United States Patent Application Publication US 2023/0272435 A1 - sequence listing, part 4

SEQ ID NO: 12831 - protein, 447 aa, synthetic construct
MRKITKLETKNIELPKLKRVAAYARVSVERGRTLHSYSAQVSYYNDLIQKNPEWEFAGVYADLGISGTGIEKRNDFKRLLQDCEEGKIDIILTKSVSRFARNTVDLLKVVRHLKELGIEVRFEKENINSLTGDGELMLSILASFAQEETISISNNVKWGIRKRFEKGIPNGGFIIYGYRWKNKKLEVVPEEAEVVRYIYDNYLQNKAYQKVASELNELGYKAYKGGKFSPSSVREILSNITYTGNLLLQKYYIVDPIIKKEKKNTGELNQYYVENSHEAIISMEQFEAVQKEFERRNKLGQRANQSLHITCFTSKVKCPLCGKSYRRSGKKNRMGKDYTYYVWVCRTKSEKGAKYCGAKVIPEEELKIAACNALGWNEFDYDLFDETIEKVVPIGEDMIEFYPYDGGVIKQEWHSTARQRGWNEERKRTTTEKRLKTLEARKNAKEC

SEQ ID NO: 12832 - protein, 525 aa, synthetic construct
MPKNVRKIPASVNLYNAVPITNKKKRKVAAYARVSTDQEEQLTSYEAQVDYYTNYIKSRDDWEFVDVYTDEGISGTSTKHREGFNKMVEYAMAGNIDLIITKSVSRFARNTVDSLTTIRKLKDIGCECYFEKENIWTFDGKGELLLTIMSSLAQEESRSISENVKWGHRKRFADGKVTVPFGHFLGYKRGEDGNLVIDEEQAVIVKRIYREYLSGSTAVAIAKGLTNDGIETPGHKQKWHASTVRSILTNEKYKGEALLQKYYTPDFLTKKQKVNNGEIQQYYVENNHPAIIEPEIFEMVRIEKDRRLMLNGKYSGTDILTSRIKCGECGGSYGAKVWHSSSKYKKVIYQCNRKYAEKEKCKTPAIRADDVETRFVNAVNSIIENKDEIISNLEMVLDKICNKKELSEEKEKLEKSLAEQVEKIQELIDMNSRVAQNQEKYKKEYDAMIKTYDETKFKYEQLEIESSQQAAKHQMIKDYINTLKKQNKPLTKFDGLMWGSLLESATIKDKDTIVFKFKDGTEING

SEQ ID NO: 12833 - protein, 508 aa, synthetic construct
MKKAIAYMRFSSPGQMSGDSLNRQRRLIAEWLKVNSDYYLDTITYEDLGLSAFKGKHAQSGAFSEFLDAIEHGYILPGTTLLVESLDRLSREKVGEAIERLKLILNHGIDVITLCDNTVYNIDSLNEPYSLIKAILIAQRANEESEIKSSRVKLSWKKKRQDALESGTIMTASCPRWLSLDDKRTAFVPDPDRVKTIELIFKLRMERRSLNAIAKYLNDHAVKNFSGKESAWGPSVIEKLLANKALIGICVPSYRARGKGISEIAGYYPRVISDDLFYAVQEIRLAPFGISNSSKNPMLINLLRTVMKCEACGNTMIVHAVSGSLHGYYVCPMRRLHRCDRPSIKRDLVDYNIINELLFNCSKIQPVENKKDANETLELKIIELQMKINNLIVALSVAPEVTAIAEKIRLFDKELRRASVSLKTLKSKGVNSFSDFYAIDLTSKNGRELCRTLAYKTFEKIIINTDNKTCDIYFMNGIVFKHYPLMKVISAQQAISALKYMVDGEIYF

SEQ ID NO: 12834 - protein, 544 aa, synthetic construct
MSMENCANTKPKITIIPAKTRVERLDPMSIAMGQKPKIRVAAYARVSTDHEEQESSYEAQVDHFTKLIASHDDWTMVDIYADPGLSGKNTKRVQFKRMIKDCEDGKIDLIITKSVSRFARNTLDCVQTARKLKADGIGIIFEKENLDTLQERSEFVLTIMASLAEEESRSISNNIRWSVKKKFQEGKVILNTKHFLGYTRDKKGTVLKIVPEEAITVRRIYAEFLDGKSLKEIAEGLERDGIASPSGRETWHPSTVKSILQNEKYKGDCHLQKTYLPDFLSPRRIKNEGFAQSWYVEDSHAAIISKETFDMVQQEFQNRQSLRSTGETGCGKFSGKYPFSGMIVCGECGETYRRHQQYNKYKKYYIWVCKRHENNGAEYCKSRPIKEEALEKAFVRALNELIGDKERILEKLQSATVSEITDSCATAINEVNAEMEKLQEQMMELLMKRNNGEITDKEYEQQSQQVGMQIDQLLMRKEEILSEQGKVQLASYRIEEVTKLLQTGKILEEFDRVMFKSLVRKITVLSNKEIEIEFECGITVRETL

SEQ ID NO: 12835 - protein, 494 aa, synthetic construct
MRVVGYARVSTREQADHGYSIGEQNSRLRAYCQAKDWTLLRVIEDPGFSGAKMQRPGLQQVLEMVRRRECDAVLVWKLDRLSRSQKDTLYLLEDVFLANGCGFVSMLENFDTSTAFGRAMVGILSVFAQLEREQFKERSAIGRVGRAKAGLFHGGGYAPIGYDYYTKEDGGQGLVVNEYEAMQVREVYRLYLAGWAVHKIQVYMHERYTTKNGCWASDTTVRSVLSSPIYLGRITWAGKTYEGQHEALISQNDFDQVAARRESLKWQPAEPRAACDLIKNSPFRSTHILGGITWCARCGARYFASGNYSGRGENRKYWPYYTCYSVAKSSKKMIKDPNCKNKRWAVGKLDAIILAEISRLEFDPAALAKAAGPVDVSDVEEKRRVLEARVAEVRPQMERLLDLCQTGGLPVASVSGRLAALQKELDALNGELSGLAVPETVDRLAVAQEMLAGASAVIENGTPEQKRALVHSLIGRIDIDGEDITIHWLFAPEN

SEQ ID NO: 12836 - protein, 467 aa, synthetic construct
MIRMARSVTVIPARNRQRETGHRAVQEKKIRVAAYCRVSTDQEDQLHSFEAQVDYYTKYINDHENYEMVGIYADEGISGTNTKKREQFKRMIADCEGGKIDLVITKSISRFARNTQDCLAYSRKLKNLGIGIIFEKENINTLDSTGELLFTILSSLAQDESRNISENCKWGIRTKFKNGEMHLNTFKFLGYDKDENGKLVINKEQAKTVRRIYRDFLIGINPAQIAKELTEEKVPGCNGQTKWYPSTIVGILKQEKHMGDALLQKTYTADFLTKRQVKNNGEIAQVYVKDSHKGIIDKETWNAVQEEFERRERFMKDHGTDRYSYGADCIPFCEKVFCGECKSLFTRHSWKSRGIVQWQCKNHRTDGRVTCSNGYVDNFDLEKGFVKAFNKLVADREKFMERWNQMKTDGSSLEKIRAEQMMEATGNDPLGRFVPEIAQLVLAEVTVLGAKKYEFFFLEGSRIKVSV

SEQ ID NO: 12837 - protein, 515 aa, synthetic construct
MAFRVIYRLPKRKEVRLVEIQIMEGSREQKRKLKVCAYCRVSTDADEQENSLENQVRHYETVIKANPDYEYAGVYSDFAISGFKEKRPGLQKMLADAEKGKIDLILTKSVSRFARNTSIVLEATRKLKELNVGVFFELQNINTLSGEGELMLTILAAFAQAESESGSTGAKMVYQRKYEAGIPVQYLERSFGYTKDERGIFVADEEEAVWVRKIYEMAADGYTPAAIKRYLNENGVKTVGGAEWIDSTVFRLIENEIYKGDYIMHKHFVNEERKLVRNRGEVDAWYIEDDHEAIVSPELWQRAQDALEAKRDYLAEGSVIEEFTEENYPYMNKIYCAKCGHPLYKRIYSNGNRLNWGCSGTKRYGKSFCEGINIPDGVLRKAWHFDGNMYIDEKPSIKGTKEFTYLKESSWKRRHKKKVPEAIPENTEEAYPYRKKIFCGLCGSRLVRHVNPKSHKVIWICNGAKRKGVTFCRGTRIPDSVIRGWGEIKKDIYIQRKDDKNGKKRYSYTSKKPTA

SEQ ID NO: 12838 - protein, 520 aa, synthetic construct
MKRITKIEGNNALSVKTKTRVAAYCRVSTASDEQLISLDTQKAHYEDYIKSNSEWEYAGVFFDEGITGTKKECRDGLNSLIDSCEKGLVDLVITKSISRFSRNTTDCLELVRKLMALNVTVIFEKENINTDTMESELMLSILSSLAESESVSISENNKWSIQKRFQNGTYIISYPPYGYENAGGEMIVVPEQAEVVKKIFEDTLAGKSTHAVAKELNDSGVRSKKGGKWTPGAINAIIRNEKFTGDVIFQKTYTDSQFSRHTNDGELNKYLCENHHEPIVSHEIFEKANEVLNQRGKEKGNGERTERYQNRYGFSGRIKCGECGGVFKRRIHYKPSGSYIAWCCTHHIEDRNSCSMKYITDDGIKTAFLTMMNKLIFAHQMILKPLLHSLQGFDDKDRLLQIQEYETKLEKNMEKRQVLTSLMAGGLLEPALFSKENNALILEEKHLQEEKKQMINSVSGDRTKIEALETLIKFASGSEMLTEYSDEIFLSYVEGIIVLSREKIVFELKCGLKLKERLVG

SEQ ID NO: 12839 - protein, 527 aa, synthetic construct
MAQRKVTAIPATINKFTAAPVNSRKKRRVAGYARVSTDHEDQVTSYAAQVDYYTNYIQGREDWEYAGIYTDEGISATNTKKRDGFNHMVADALAGKIDLIITKSVSRFARNTVDSLTTIRKLKEHNVECYFEKENIWTFDSKGELLLTIMSSLAQEESRSISENVTWGHRKRFADGKVSFAYSRVLGLEKGPDGNIVVNQEQAKIVKLIFRRFLEGMTPHSIAVELTEMGIKSPGGKDKWNGATVRRMLSNEKYKGDALLQKEFTVDYLQKKTKKNEGEVPQYYVEGNHEAIIEPSVYDLVQVELAKRSKKSEARYSGVSIFSNKIKCAECGSWYGSKVWHSNDKYRRVIYRCNHKFDGNRKCETPHITEEEIIASFIKAMNTVITEREEIIANIQLIRQTVCGTADLEEEQDKLRSEMEIVVELTQGCVAENARTAQNQEDYQKRYDGLVERYEKVKSRYDAIVEAIEEKQAHYEKLGIFIETLRQHGEPITEFDAGMWGSMVECITVDKSKNMTVTFKDGSEVQA

SEQ ID NO: 12840 - protein, 595 aa, synthetic construct
MPKISRIEPTVPAIKQLKKVAAYARVSMQSERMMHSLFAQVSYYSKLIQKNPDWEYAGVYADDFISGTNTVKRNEFKRMLADCEEGKIDIILTKSISRFARNTVDLLETVRHLKAKGIEVWFEKENINSMSGDGELMLSILASFAQEESRSISENIRWATKNRFEQGIPNGKFRIFGYRWDGDQLKIEPTEAAIVKRIFQNFLDGKSRLETEKEFAAEGITTANGCRWVDSNIKVVLTNITYTGNLLLQKEFIEEPITKHRRKNRGELPQYFVENTHEPIIDMETFQYVQDEIARRKELGALANKSLNTTCFTGKIKCPHCGVSYMHNKRTDRGQMEFWNCGSKKKKKVGNGCPVGGTINHKNMLKACAEVLGLEEFDEKIFLRDVDHIDVSKRYVLEFHMADGRVITKDCPNTGHKDCWTAEYRAKTSAKRKKNGTNCKGSSGLTGKIKCKSCGCNFRRATQLSATAENGKANYWSCSEHSNGCQTAGLREDALIPLLADALGMAEFDGALFRKTVDYISVLTDTDLEIHKKDGTVVAVVYTPPTRNHQPRTEEQKAHMRSLMKAKWPPERKAEMSERMKRMRKERGENWRKEK

SEQ ID NO: 12841 - protein, 516 aa, synthetic construct
MNNCVIYARFSSHGQNEQSIEAQVRICKEYAENKGLDVINLYTDKARTGTNDARPAFQKMISDAKTGAFQYIIVYMFDRFARNRRDSIIYKEMLKEKYGVKVISALEPIAEDEGGEFYEMFLEWNAEKYSKRLSKRVRDGLDTSIANGTFCGGFIIYGYQLELEPVPGKQGKFIKRVVINEEEAKVIRYVFEQYDKGVSKKQIAADLNAQGIRVKGKPISHKTFDNYMKNTKYTGEFYFGERLCTNMYPAIIDKEMFERVQKRLADNRYFLGGKETAKEPYLLTGKLFCGHCGTEMVAGGGKSKTGKKYYYYECKKKKKKLCDKRIEHKDKLEKYVVENVVAFLSDESNLKIITKDVLKFFDSRTDESELKSIRKRIAEIQKEADAAANAFIEAKSQLLKQRIEKRMQECEVLLADLENVKARLLLERGQKLTEQDIKAFVNIILQGDVEDIEFRRRLIDNLVYKVYVSDDDTYIYFNIKGGNHIEDITLEDTKAALKEVNRVQTQRDPARQVQPV

SEQ ID NO: 12842 - protein, 528 aa, synthetic construct
MNTATVRSVTVIPPTINPLTHISMAATRKRRVAGYARVSTDSDEQFTSYEAQIDYYTQYIQRNPEWKFVKVYTDEGISGTSTKNRTGFNEMIDDAMSGKIDLIVTKSVSRFARNTVDSLVTIRKLKEKGVEVYFEKENIYTFDSKGELLLTIMSSLAQEESRSISENVTWGQRKRFADGKVNLPYKQFLGYRKGADGLPEIVPEEAAIVRRIYARFMEGLTPHTIAKELTADGIPTPSGKQCWQTSTVESILQNEKYKGAALLQKCFTVDFLTKKQKVNEGEVPQYYVEHSHEPIIVPEEFDKVQAEFVRRKQFGLQYSGKSIFASRIVCGDCGSFYGAKVWNSNNKYRRVVWQCNNKFKGGHRCETPHLDEKTIKAQFVDAFNAVLGGKDGILADCRLMQTTLTDCTGIDAEIERLLTEVDVVTELTHRCISENAQSAQNQQEYTARYNSLVERYEKAKAQLEQLRATKTAREAQAKAIGAFMFEVQELDAFTEFDEKLWLAVIDKVTVHTNGRMTFRFRSGTEIDA

SEQ ID NO: 12843 - protein, 434 aa, synthetic construct
MERVIERVDFQIPMQPKALRVCAYARVSSGKDAMLHSLSAQVSYYNSLIQTHAGWLYCGVFSDEAITGTKSQRDGFQRMLASCRAGEIDLVITKSISRFARNTVTLLETVRELKRLGVDVFFEEQNIHTMSADGELMLTILASYAQEESLSASENQKWRIRKAFENGELVNLRFLFGYSITADGIQVNEKEAAVVREIFTRFNGGESLSSISRDLNDRGCERPLGGTWCADRIRNLLSNEKYTGNALLQKQYRKNHIDKKLVPNRGELPMYYVAGSHEPIIDQTAFDKAQVRLNELARQAEKREKPTRSTFSGLIRCGLCGSAYKRVTCRGKHFWNCTTFQTKGKAECPAKKIPAEMLKSLTCEVLGADALDSDMVRSKITMIRAEKNNVVVFCMDDGSEIVKRWKDRSRAESWSPEMKEQARQRALQTRRGQE

SEQ ID NO: 12844 - protein, 521 aa, synthetic construct
MKRVTKISDIQHTNSERTRLRVAAYCRVSTDSDAQLESLEAQKSHYEAYIAAREDWQFAGLYYDEGITGTKKDKRPELLRMIGDCESGKIDLVVTKSISRFSRNTTDCLELIRKLLRLNIPVYFEQENIQTDSMESELFLSVLSSMAQGESASISENIKWSVKRRFQNGTFKLAYTPYGYDWDGQNLVVNREQALIVKRIFNAMLSGKGADLIACELNAQRIPAKRGQHWTSTSVLGILTNEKYVGDALFQKTYTDEQFIRHKNSGQVEQYIVTEHHEPIVSREDFDAVAALIAQHGAEKGIEKGNQKYQRRYAFSGKIICGECGNTFKRRVHSSGTLRYVAWCCCTHLQDKNSCSMRYIRDDSLKLAFVTMLNKLIYSHKLVLKPYLKALEDTSGDEAIQRIQHLEKLLKQNLEQRETLIRLMAQGYIDQILFNRENNALLAQADSYRADIDDINRSMTGDVAKVNETEKLLRFSERGAMLSAYDGELFTRFADHIQVFNRSEIGFVLKCGLTLTERIGE

SEQ ID NO: 12845 - protein, 519 aa, synthetic construct
MGNVMLIPAKRQVGNAARQEQDKPKLRVAAYCRVSTDSDEQATSYEAQVVHYTEYIKKNPEWEFAGIFADDGISGTNTKKREEFNRMIEECEAGNIDMIITKSISRFARNTLDCLKYIRRLKEKNIPVYFEKESINTMDAKGEVLITIMASLAQQESQSLSQNVKLGLQYRYQQGKVQVNHNRFLGYTKDAEGNLIIDPEQAEVVKRIYREYLEGFSMDKIAARLERDGILTGAGKTRWHTSTINKILRNEKYIGDALLQKTYTTDFLSKTRVKNTGMVPQYYVEGSHEAIIPKEIFLRVQEELVRRRVVKTSPNGKKRSYSSNHCFSQIVICGECGEMFRRIHWNNRGCKSIVWRCISRLEATRLECHARTVNELVLQDIVLTAINKLLGDKSNYQAQLQQNIALALHSPTSSTDDIDGKLITLQQELLQKAHNKEDYDSIADEIFRLRDLKQQNAMDTTARDEQIRRINELQDFIRRQTTDLTEFDETLVRRWVKQITVYEEHYTVELKSGLKVDID

SEQ ID NO: 12846 - protein, 510 aa, synthetic construct
MTAVIYARYSSDNQREESIEGQIRECTAYAEKNGITVVKHYIDRALSAKTDNRPDFQQMIKDSEKRLFDIVLVWKLDRFARNRYDSAHYEYQLERNHVKLVSATEPISDSPAGIMVKSMLTGMAEYYSAELSEKVVRGMTENVLKGKYNGGTIPIGFKVDEEKFFQIDPLKAPFVVEAFQRYNDGATMKELMNWLNDSGVTTNRNQKFTYNSVQKLLTNKRYIGENHFKDIVMPDSIPAIVDKDLFEEVQQKIKKNSRAPARHKAEDDYLLTTKLFCGMCGAMMFGECGTGRNKVVHHYYKCATAKRFKTCKKKTVRKEWLEDLVVAETMKLIQDDAVIDAIVAEVMELQDQENTTLPLLEKQMREVENGIENMLNAIQAGVLTNSTKSRLEKLEAQQKELEVRITEEKIARPRLSENQVRFWLTRFRKLDPNVKSHRETLINTFVNAVYLYDEKVLITFNYKDGTKTVTFDEIAAKDAPEGNGSDLGCFAPPKNLNVCKYAEVFVLRQG

SEQ ID NO: 12847 - protein, 524 aa, synthetic construct
MNKLRAAAYCRVSTDRAEQSGSLASQRSFFDDYIRNSDSMTLVGVFYDEGTSGTTTLNRYGFNKMISLAVSGGIDIILTKEVSRFARNTVDTLNITRMLRAKGVGIIFINDNIDTRDSDGELRLSIMATIAQEESRKISERVKWGQQRKMEQGVVFGRSCLGYDVKDGKITVNADSAEIVKRIFTEYTVLLKGAESIADGLNAEQIRTVNGGRWSGAFIRKVLRNVKYVGDLEQKKTCTPDFLTHKKRLNRSEHIYIRNHHEPIISRELWEQTQAEISRRKPTDTSRHSDRYVFSGKVYCGVCGSVMVSRVKTLKNGKIYHALRCSGRIGGKSCNNETLNVTALKACVKRIFTDMPIDKTAVINAVIKGLSRTDKPDIPALRRKIETLNAKKRRAVDLMLDGLITQQELIEQKSYYDSIIEKLSQEISSDRSVLETDKIRKNAERFLDFTSDPLWLLVIRADYIHGTLTVYLKGIENGFTTCFTATGRGDSYRVITGNTVRSQGIIPGTMQVQKNRCRHDVNDK

SEQ ID NO: 12848 - protein, 531 aa, synthetic construct
MEQYCLYLRKSRSDIEAENHGEEETLARHEKILLELAKKREYNVTQIYREVVSGETIAARPVMQQLLSEVEHGIWSGVLVVEVERLARGDTIDQGIVAQTFKYSDTQIITPMKTYNPNNEYDEEYFEFGLFMSRREYKTINRRLQRGRLSSVKEGKCVCSISPYGYDKVKLKGDKGFTLAPNPNEADVIKMIFELYTKGELQPDGTYKRIGVALIARKLNEMKIPARKSEYWVPASIKDMLRNPVYAGKIRWNWRSQSKRMQSGSISISRPRSEEDNCIIVNGLHPALITEETFDLVQEYLAKNPPRPTKRNAPTKNPLAGIVVCAFCGRKLVRRPYTSASCPPTLICSVPHCPNVSSFLHLVEERILKSLEEWLRNYKLQWNLSNNKPSELISESEILRQSLNDINSQITKLNKQMIKAHELLEQDIYTTEVFLERSRAITERLNQLSYDKAEIEKRLGTETIREKSMKEIIPKVEKLLDVYHELPSAKEKNDMLKDVLEKVVYKKTQNTRWSGSPDDFEITIYPKLPKS

SEQ ID NO: 12849 - protein, 531 aa, synthetic construct
MEQYCLYLRKSRSDIEAENHGEEETLARHEKILLDLAKKREYNVTQIYREVVSGETIAARPVMQQLLSEVEHGIWSGVLVVEVERLARGDTIDQGIVAQTFKYSDTQIITPMKTYNPNNEYDEEYFEFGLFMSRREYKTINRRLQRGRLSSVKEGKCVCSIAPYGYDKVKLKGDKGFTLAPNPNEADVIKMIFELYTKGELQPDGTYKRLGVALIARKLNEMKIPARKSEYWVPASIKDMLRNPVYAGKIRWNWRSQNKRMQSGSISISRPRSEEDNCIIVNGLHPALITEETFDLAQEYLAKNPPRPTKRNAPTKNPLAGIVVCAFCGRKLVRRPYTSASCPPTLICSVPHCPNVSSFLHLVEERILKSLEEWLRNYKLQWNLSNNKPSELISESEILRQSLNDINSQIAKLNKQMIKAHELLEQDIYTTDVFLERSRTITERLNQLSYDKAEIEKRLGVETIREKSMKEIIPKVEKLLDVYHELPSAKEKNDMLKDVLEKVVYKKTQNTRWSGSPDDFEITIYPKLPKS

SEQ ID NO: 12850 - protein, 519 aa, synthetic construct
MKKVTKIAETASSKVKLKKIRVAAYCRVSTDSDAQLESLEAQKTHYENYITSRDDWEFAGLYYDEGITGTKKDKRPELLRLIDNCKAGKVDFVITKSISRFSRNTTDCLELVRKLLALHIPIYFEKENINTGSMESELFLAILSSMAEGESVSISENNKWSIQKRFESGTYKVSYPPYGYDWDGEQMIINPEQAAVVKEIFAALLSGKGTHAIADDLNRRGIPTKRNGRWTATTIRGMLSNEKYVGDCLFQKTYSDSRFVRHNNHGEQTQYMVKDHHEAIISREDFEAAQTFIHQRATEKGVVKGSDKYQNRYTFSGKIICGECGNTFKRRIHHCTGYKYAAWCCNTHIKDKDKCHMLFVKDDDLKQAFITMMNKLVYAHRIILKPYVDALKNTSSDDSLRRIQEIQTLLAHNTEKRETLTKLMTQGIIDPILFNKETNELLSQADSFRDEINALKNAVSGDVTKIDEAAALLRFTGKGGILQEFDDDLFQEYVNRIIVRSRNEVCFELKCGLTLRERM

SEQ ID NO: 12851 - protein, 569 aa, synthetic construct
MTNQKEKIVALYVRVSTGYQIDKDSLPFQKKELKAYCEHVLHVNKKRIEVFEDAGKSGKNTKRPAFERMMEKVKAGKVSHVVVYKIDRITRNLVDFSLMYDDFKYNNVTFISLNEQFDTSSAIGEAILKIILVFAELERKLTSERVTDVMIGRAQSGQWNGARVPYGWDWDAENKCPVHSKKEAPYAKAMYQMYLDGGSSVTIRDYNNSHNIPTKRGGEWTSKTVADFLRNPINKGDYRYNYRESARGKKKAEEEVIYLEGVFPPLVDPEIWNEVNRRMDENHTRKNTSSMHPIRKNCNVFAGLIACGKCGANYQVTSKDRRRGNGFRPSSYACTGKYQKKHCDNLNVSDVKIGPFMINYIAAIIDASKSRRFIKDTESLERVILSHIDFTDVAGISESSLQDTIDLLYGRSGTETLSGKPVSKDGKNTDTAEKKKELQEKLQKTDRALERLKKAYLFDDDAMGEKEFLEMKTKLEVDKVKLENSIKSLDSSSISENVDQAAFIKSASQFLISHKINSGGNIEYSELAMMDEEAMKTLMNSIIDHITVMDRHITEIVFKNGLTHTLLYR

SEQ ID NO: 12852 - protein, 521 aa, synthetic construct
MKKVTKIDGVQKNTAINSKLRVAAYCRVSTGSDAQLESLEAQKSHYEQYINSREDWQFAGLYFDEGITGTKAEKRPELLRLITDCEARRIDFVITKSISRFSRNTTDCLALVRKLQSLEIPIYFEKENINTGSMESELFLAILSSMAEGESASISENAKWSVKRRFQNGTYKLGYTPYGYDWDGNNMIINPDQAAVVKRIFADILSGKSTNAIADELNAEKVPSKKNTNWTSSTIRGILANEKYTGDVIFQKTYTDENFNRHTNYGEVDQYMAPDHHEAIISHSDFDAANALVNQRAAEKGIEKGSDKYQQRYAFSGKIICGECGDTFKRRMHSCTTYKYVAWTCNTHLKNKESCHMKYVRDDEIKAAFITMLNKLIYGYRLILAPYLKVLENSSGDEAIHRIQHLEQLIAQNSEQREALTKLMAQGYIDQILYNQETNALLLQAETYRSDIEAITIGMTGDAAKVTETNLLLHFVSHTDMLTAYSEELFENYADHIEVMNRNEIRFVMKCGLTFTERIGD

SEQ ID NO: 12853 - protein, 535 aa, synthetic construct
MHQLWVLRMQTMNKLRAAAYCRVSTDRAEQSGSLASQRSFFDDYIRNSDSMTLVGVFYDEGTSGTTTLNRYGFNKMISLAVSGGIDIILTKEVSRFARNTVDTLNITRMLRAKGVGIIFINDNIDTRDSDGELRLSIMATIAQEESRKISERVKWGQQRKMEQGVVFGRSCLGYDVKDGKITVNADSAEIVKRIFTEYTVLLKGAESIADGLNAEQIRTVNGGRWSGAFIRKVLRNVKYAGDLEQKKTCTPDFLTHKKRLNSSEHIYIRNHHEPIISRELWEQTQAEISRRKPTDTSRHSDRYVFSGKVYCGVCGSVMVSRVKTLKNGKIYHALRCSGRIGGKSCNNETLNVTALKACIKRIFTDMPIDKTAVINAVIKGLSRTDKPDIPALRRKIETLNAKKRRAVDLMLDGLITQQELIEQKSYYDSIIEKLSQEISSDRSVFETDKIRKSAEKFLDFTSDPIWLLVIRADYIHGTLTVYLNGIEKGFTTCFTATGRGDSYRVITGNTVRSQGIIPGTMQVQKNWFRHDVNDK

SEQ ID NO: 12854 - protein, 525 aa, synthetic construct
MSKVTVIPATVNPATKMPALTSKKRKVCGYARVSTDKDEQFSSYTAQVDYYTKYIANNPDWEFVKVYTDEGISGTNTKKRDGFNQMIKDALDGKIDLILTKSVSRFARNTVDSLVTIRQLKEKGIEVFFEKENIWTLDSKGELLLTIMSSLAQEESRSISENITWGKRKSAADGKISLGYSQFLGYDKGPNGTLTVNPEQALIVKRIYREFMQGKAAWAIADGLTADGIPTPSQKTKQWSLTTVRSILRNEKYKGAALLQKNFTVDFLTKKVKANEGELPQYYVENSHEAIIPPAEWERVQVEYARRHSLSTKYSGKSIFSTKIVCEQCDAFFGPKIWSSNTHLRRKVWQCNAKFDRKTYCNTPYLTEDAIKAAFVEVVTRLFCTRDEVITNCETELRALTDCTVIEQEQSMLREELEVVINLTQKYVDKNATSEEDQNTYLRQYNEYVERYQAIKERLLQLNTERSARIARSVAFEDFLNSLRGMENAPVEFDESMWRLLVEKVVVKKDGFLKFVFTNGMEVVI

SEQ ID NO: 12855 - protein, 426 aa, synthetic construct
MDRTVECIMVDAPAKTNIKRVAAYCRVSSGKDAMLHSLSSQVSYYSGLIQNHADWSYCGVYADEAITGTKSDRPGFQRMLKDCEAGKIDLILTKSISRFSRNTVTFLQTVRKLKSIGIDVFFEEQNIHSIDGSGELMTTILSSFAQEESHSVSQNMKWRIKKNFEEGIPWNNALLGYRLKGDRYELIPEEADTVRRIFREYLSGFGKTKIANGLTADGIPTRFGGPWHPNTVGKILRNETYTGNLLLQKTFIEDHITKKKRINNGERPKYLVESSHEAIIPPETFKAVQKELQKRSEMYCHASKKSASYPFTGLLICAGCGKTYTRKITPTGAVWICRTFNTRGKAYCPSKQIPEATLYEVTGQITASIKEIRQITVCNGNSLQYNMADGRIINQVWKDRSRSESWTDEKRAAASQQLKKRRKADE

SEQ ID NO: 12856 - protein, 558 aa, synthetic construct
MNKLRAAAYCRVSTDRAEQSGSLASQRSFFDDYIRNSDSMTLVGVFYDEGTSGTTTLNRYGFNKMISLAVSGGIDIILTKEVSRFARNTVDTLNITRMLRAKGVGIIFINDNIDTRDSDGELRLSIMATIAQEESRKISERVKWGQQRKMEQGVVFGRSCLGYDVKDGKITVNADSAEIVKRIFTEYTVLLKGAESIADGLNAEQIRTVNGGRWSGAFIRKVLRNVKYVGDLEQKKTCTPDFLTHKKRLNRSEHIYIRNHHEPIISRELWEQTQAEISRRKPTDTSRHSDRYVFSGKVYCGVCGSVMVSRVKTLKNGKIYHALRCSGRIGGKSCNNETLNVTALKACVKRIFTDMPIDKTAVINAVIKGLSRTDKPDIPALRRKIETLNAKKRRAVDLMLDGLITQQELIEQKSYYDSIIEKLSQEISSDRSVLETDKIRKNAERFLDFTSDPLWLLVIRADYIHGTLTVYLKGIENGFTTCFTATGRGDSYRVITGNTVRSQGIIPGTMQVQKNWFHHDVNDKLIKKSAPDIFQVHFVLICRLFCFLYAAGHSVPTL

SEQ ID NO: 12857 - protein, 546 aa, synthetic construct
MPEALNAVIYARYSSDRQTEQSIEGQLRECYAFAKANDIAVIDTYIDRAISGKTDNRPAFQKMIEDSAKRQFQAVIVYRLDRFTRNRYDSAIYKARLKKNGVKVLSAMENLNGSPESIIMESLLEGMAEYYSVELSQKITRGMRENALKGKALGGQRVLGYKVNSDCYFEIDETTAPVVVDIFKLYSSGKTVKEICDILNARGVKTARGGAFNKNSLHTILTNKKYIGIYKTKYGEIVGGIPAIIDKELFEMVALRMEQNKKAPARAKAEINYLLSTKLFCGKCRSAMVGESGTSKTGKKYYYYACVKKKREKACDKSNVKKDWIEDLVIQRTVTDILKDDVIEKIADRLVELQKAEAAESGTMLYLQNSLAEIQVSIKNIMTAIEKGIITESTKTRLTELEDEKRNVEIEIAKESIARRIISREQIIYWISSFKDGNITSEKYRQQLIDTFVHAVFVYDDKIVITYNYSGENNTATISDLDLSSPPKEEASNSSFTRMSLRLCIGWGTPDGVPFPFSLPRNAVFCVLRRFKPVGVLVYPSGFFVP

SEQ ID NO: 12858 - protein, 498 aa, synthetic construct
MLGTLPGCAKIYHTRYNIPSAFIILSRHDGKLKEIDKNCGDIMRNKEIAPALVRVALYIRVSGEEQKIKGLSLEAQQERLEAYARERGWVIVGIYIDAAKTARKNIHKRTEFQRMMDSVKRDEVDILLFARLDRWFRSVADYYKVMEILQAHNCDWKTTDEEYDTTTANGRLYINVKLSIAQNEADIDGERIDVVFDSKIAHGTVVSGSAPFGFRVNEEKRLEVVPEDAAIVQDAFNYFENTVSQRATVRYVRETYGVNWCDATFRRMLKEKLYTGVYDRGGRYNDQFCPAIIDRQQFDRVQALLTRNVRSAPSGKVYIFTSILTCAECGHKLVGYKSSDYFYYRCNQHFQRGRCSHNHSVREDVVEAWLFDHLGEELERCQLEWDVEAAKKKASVARTDKAALKRKLTKLKELYVNDLIDIEDYKKDYQIYVSALNQIPEPAQEAPPDFAAVRRLLDNSFRTIYDTLTREEKRTLWRSVIKEIRIDNDQNITGVVFG

SEQ ID NO: 12859 - protein, 521 aa, synthetic construct
MARITKIEATKSFIEKKKIRVAAYARVSTRSDEQLLSLETQKEHYDNFISANSEWEYAGLYYDEGVSGTKGEKRDGLLALLKDCEDGKIDRVITKSISRFSRNTADCLEMVRNLARLNIYMYFEKENIDTEHMSSELMLSILSSIAESESRSISQNNKWSIKHRFEEGTFIISYPPYGYENEEGRMVIVPEKAAVVRDIFNMTINGMGTHVIARELNERGVQSRKGTKWHPSTVRGILQNEKYTGDVIFQKTYTDDNYNRHINYGEKNMYLCKNHHEPIISHEIFDKATAVIHQRAKEKSIETGIGKYHHLYAFSGKIICGECGSTFKRRQHYKPSGNYVAWCCNTHIADNDACSMMYIRDEDIKTAFLRMIRKLQTAHAKVLKPFIEGLRGANNKERLHQVLALEEQIEKNVEQTTVLTNLLSSGYIEPEIFHAEKNQLTSEADRLAREKQLISKSINGDLTHLDEAQKLLRFVSKKAEITEFEDEMFLEYVDTMTVHSRDEITFNLKCGLNITERLVVV

SEQ ID NO: 12860 - protein, 579 aa, synthetic construct
MNNTLSALNITPSPPRMCRVAIYIRVSTLQQVDKDSLPMQRKDLIAYSKLILNTDDYVIFEDAGYSGKNTIRPRYQDMMDQIRTGAFTHLLVWKIDRISRNLLDFAQMYQELKELNVTFVSKNEQFNTSTAMGEAMLKIILVFAELERNMTSERVTATMISRANTGKWNGGRVPYGYKYDPEEEDFLIVANESNTVKLIHDKYEELQSLVYLARYMNEHGYRTRSGNEWSPPSLAIILKSWWYCGCYEYNKRKAGNRQKLKNESEWIMIEDHHIAIISYDQKERVLAILKGNKRFATEHNLYVKGIHVHVFGGLCWCKNCGKKMTSTSSNKNRSWQYSKYLCSTRRRSLTKCRGRSTSDPVLGEFIFNYILNMLNAQKGFDSIHSPADLQDALLTGDAFSDIKSIDQEELNDLYNILSSSVVGNIYGRSFNVNKAKKNDEVQSSLTILKAEKKKLDRALDRLTNLYLYDDMAISEKDYMTKKTEIETKIAEIDEKIGIVNKNSVDNSITDEEFVDKASTFIITQKLTNRNYISYKRLATSVDPKILYMFTHDVIDYIDIYNGKVQRIVFRNGLSQTFIR

SEQ ID NO: 12861 - protein, 434 aa, synthetic construct
MERIVERIDSRIPVQPRALRVCAYARVSSGKDAMLHSLSAQVSYYSNLIQNHSGWLYCGVYSDEAMTGTKSQRDDFQRMIEDCHKGKIDLVITKSISRFARNTVTLLQTVRELKSLGIDIYFEEQHIHTISADGELMLTILASYAQEESLSASENQKWRVRKAFENGELINLRFLFGYSITADGVQINEKEAAIVREIFTRFNSGESMSSISRNLNDRGYRGALGGKWCAERMRNTLSNEKYLGNALLQKRYRNNHIEKKLVANKGELPMYYAEGTHEPIIDPATFEQAQERLRKIAQQTADRKKPSRSAFSGLIRCSICSNTYKRVTYRGKHFWNCTTFQTRGKSECTAKKIPEDTLVALTLEVLSIDRLSAKSVKNRITEIRAEKNNVIVFCLDDGSEIVKRWKDRSRAESWTPEMKEQARQRALQARRGKK

SEQ ID NO: 12862 - protein, 528 aa, synthetic construct
MSTTAARSVTVIPPTINPLTHLSKVTMQKRRVAGYARVSTDSDEQFTSYEAQVDYYTQYIKQNPEWDFVKVYTDEGISGTNTKHRIGFNEMIADAMSGKIDLIVTKSVSRFARTTVDSLVTIRKLKEKGVEVFFEKENIYTFDGKGELLLTIMSSLAQEESRSISENVTWGQRKRFADGKVSLPYKQFLGYQKGADGFPKVVPEEAVIVRRIYTRFMEGLTPVAIAKELTADGIPTPAGKQRWQTSTVESILQNEKYKGAALLQKCFTVDFLTKKKKVNEGEVPQYYVEHSHEPIITPEEFDKVQTEFERRKRISRQYSGKSIFSSRIICGDCGSFFGSKVWNSTSKYRRVIWQCNNKFKGEHKCETPHLDEETIKARFVAAFNAILDSKDTILEDCRLMQATLTDCTGIDEEIQTQLEEIEVVTELTKRCIAENSQMAQNQEEYAARYNGFVERYEKAKTRVEELRSIKTARQAQADAIGAFMFEVQELDTLSEFDEKLWLTVIDTVTVHADGRMIFKFQGGTEIDA

SEQ ID NO: 12863 - protein, 487 aa, synthetic construct
MPEALNAVIYARYSSDRQTEQSIEGQLRECYAFAKANDIAVIDTYIDRAISGKTDNRPAFQKMIEDSAKRQFQAVIVYRLDRFTRNRYDSAIYKARLKKNGVKVLSAMENLNGSPESIIMESLLEGMAEYYSVELSQKITRGMRENALKGKALGGQRVLGYKVNSDCYFEIDETTAPVVVDIFKLYSSGKTVKEICDILNARGVKTARGGAFNKNSLHTILTNKKYIGIYKTKYGEIVGGIPAIIDKELFEMVALRMEQNKKAPARAKAEINYLLSTKLFCGKCRSAMVGESGTSKTGKKYYYYACVKKKREKACDKSNVKKDWIEDLVIQRTVADILKDDVIEKIADRLVELQKAEAAESGTMLYLQNSLAEIQVSIKNIMTAIEKGIITESTKTRLTELEDEKRNVEIEIAKESIARRIISREQIIYWISSFKDGDITSEKYRQQLIDTFVHAVFVYDDKIVITYNYSGENNTATISDLDLSSPP

SEQ ID NO: 12864 - protein, 503 aa, synthetic construct
MLRAALYARFSSENQREESILAQFRDSTEYCKKHNYAIVAKYADEAKSGTTTIGREQYKLMLKDAQKGKFDVVVFHKIDRNARNELDYYITKHKLEEAGVKYAYSRQDIDSTSPEGQMMESMLVGMAAYYSRNLSNEIKKGLRENAIQGKCTGGRPPYGFSIDANKKLIINENEAPAVRMIFDWYSAGVHYGVIRKRLFNAGYRNRAGKEFTIASIYEILRNRKYVGDLYLGKTLFRKGKRNTHQTSANVQYFENVIPAIVSRDIFEEVQVKLDQNKRRSGAGKAKAIYALSGLIYCGKCGSAMVAHSTKNSRGIKNYYYRCPKGRLVGDEKCPQKFINRDGIEETVYQLIRRLFTAPDAHDQMKRIIAKNNMSVKVPDYTEQVKRLKKQESDASKRLDKLYDLYMTDREDEFTSAKMAQIKEEILRLRTQIKEAEDRQAIAQSTTFDIDKIIDTFQKQLKQKQSPEFIKTLFELAVKNVTVYPDKIKVVLLVTQERFELPTP

SEQ ID NO: 12865 - protein, 523 aa, synthetic construct
MVSFDNIIIYLRKSRSDDPVQTVEEVLAKHERILQDYCMKEYGKAIPEKRIYREVVSGETIQDRPIMQKLLKELETDNISGVLIVEPQRLSRGDLQDCGQIINSFRYTNTAVITPTKTYNLSDEYDRKFFEMELTRGNDYLEYTKKILNRGRVASVKQGNYICSVRPYGYKKIVIGTGKDKCHTLEIIPEEAEAIKLMYHLYLDENMGFTNIARTLDSLHIKPLKSNNWSAATIRDMIDNPIYIGKIVWNSRKVVKKWENEQITKIRPRNKGDDVICVDGKHEAIIDEETFNAARQKRGLTPKVRKFKELRNPLAGILFCSTCGHSMSMKKYVDKRSHTGKVTTIMLCNKQAVCHTKSAQYEQIVAKIKESLADAIADFEIKMKEQENNNIDIHKQRITSLKDELNRLYNKDVRQKDAFEDGIYTKEEYIERNSKLQSQILNIKAEIENEKNNTPVIIDYQNKITTFTECLTSLDDDSISAADKNSLLKNCIDKIIYHNDMPSLPGIGRYIENSFRLEIFLKM

SEQ ID NO: 12866 - protein, 457 aa, synthetic construct
MKKKDIATALRVALYIRVSGEEQKIKGLSLEAQQERLEAYAREQGWVIVGVFVDAAKTARKKLHKRTEFHRMLDLVRRNEVDMLLFTRLDRWFRSVPDYYKVMEVLEAHNCGWKTIDDGEGYDTTTASGRLYINLKLSIAQNEADLDSERIAVVFDSKIKHGTVVSGSCPFWLRVNDQKRFEIIPEKAAILQDAFNHYEATVSQRGTVKYIRETYGLNWCDATFRRMLRDKLAIGVYDKNGRVNENFCEPAIDRAQFERVQKLLANNAKSSPSGRVYIFTSILVCDECRHNLAGIRTGGNYYYRCNQHFQRGRCPHKKEIREEVVEKWLFENLGEELKKYRLDWEIKEEKRRKAAASIDRAAVRRKLTRLKELYVNELIDLEEYRRDYDQLNALLAEKPEPAADQRPDFEKIERLLSQDFQTIYDSLGREEKRTLWRSVISEIRINNDQQITGISFL

SEQ ID NO: 12867 - protein, 465 aa, synthetic construct
MTDKIKRCAIYIRVSTAEQMIHGKSLEAQREYLMAYARDHGMTPVGVYADEGKTARKELRKRKAIHSLLEDVKAEKVDVILFWRLDRWFRNLSDFYKVQDVLDEYGVHWISASEPGINMETRDGRLQLNVVLSIGQNEVDTTSERIRFVNEASIRQGKAIFGDGNMPRGYKLGTVDGKKCMVKDPDQEDLVNAFFDYFEKHQSKQGALRYMQKNYDPEFSYSVLRTMLSSEFYKGTYRGIPYCPAYLSEERWERIQRISKGKNVKIAPSGRIYYFSGMIRCPVCGQILSGTGCRSIINRKTGEKRDYCYYRCNHAMIDRICTNRHRLSQNLMESYLLENLEREFAAYKIRVEDIRRKKKKEARAPRTEKQIEKEMERLNILFQKGRVTWDYYSGQYDALEKEKADLKLVIAEPETDYSSIEELLGQDFRAIYNSLTPENRRAFWRNTIRQIHIGPDYTVKKVDFI

SEQ ID NO: 12868 - protein, 579 aa, synthetic construct
MPNLPYSNEFAKLIIAIYCRVSSEDQAERGTIEIQKEFAAKYVNLYNLEVFDYYCDDGVSGTLPLEQRPEGKRLLEDAAKKRFNMVIFYKLDRLGRKVRVILNAVNDLDALGVTVKSMTEPFENETPTGKFLLTTLAGIAELDRDTILSRMWSGAQYAAKQGRWLGGVIPYGYMVADKKLVISTDPIPNCRLSEEDVIKIIFRMAAKEKANCAEIADYLNSIKIPTRYMLNGISGKRYKKTAEIWRPSRISEIIRSTTYKGLHQYGKNATHKNSKIITRSVPAIVSDEIWQEANNTMKDNRVSCKRNTKNLYLLQGMIRCGLCGLAYSPTFYKARNTSYYCCTCKGQQKTKFYNRDTCIGKPVRVDWLDNLVWSKCLELLKEPEKIYDAKPSTNKEPPNIVPTPTEFELIKSRIQELSTEREKLLDLYRKGIIIESDLTTQINKLYLEETELNNKIIKIDNQPKQELKRSKASTVMVLKEFIEMIKNTDINQLPFELKREVVKMLIDKVFVYTKVDPDKFYPSINVIISWRFDAAPFNIDYIENYTLTTFLLQRKKLKTQLQPTPLITLTPVLNCNTRR

SEQ ID NO: 12869 - protein, 569 aa, synthetic construct
MKQSNNKKSRDVTAFLYERLSRDDNLEGESYSIGNQKKLLAKVAKEKGYTNLVHFLDDGISGVTMDRPGFVEMIRQLEQGKAAAVFVKDLSRLGRNYIEVGRLTEEFFPDHDIRLVAVSDNIDTAEGENELAPIRNLFNEWYARDISKKRRISNKIKGNAGEPMGQPPYGYIKDPNDPKHWIVDDKAAQVVRRVYSMTLEGFGTEQIAAQLEKDDVPTPRAYWLTKGIKRPGKGKQQPPTKWNSSTITKILSLQEYCGDILNFKTYSKSYKNKKRIDNDRENWVVFQDVHEAIIERAVYEQVQQKRGKIRKRRTNNGEHNMFSGLLVCADCGSNLHFHFNQGNPEIKYFNCSNYKGNRGTCTSTHYVRVDFLEEVVLGEIRRLMKFASLYEDEFVKAVIGHSKQAEQTDRKLKEKELRTLLARDEELDGLFERIYEDNVSGKLSDDRFAKMSRRYEDEQKELSEKIKKLRSEIEKQSSRSMTTDMFIGLVRKYTRARKLTPRMLNELIEKIEVFNAEKIDGVWEQRLRIHYNCVGTIEIPTVLPLPIPEVSVNTRKGVVVNYAPCELAV

SEQ ID NO: 12870 - protein, 518 aa, synthetic construct
MDITNNLKAAAAYGRYSSHLQNEQSIEGQFADIYAKAQKEGYTIIKEYVDEAMTGRNDNRPAFQQMIKDSKKGIFEAVFVWAIDRFARNRYLAAIYKHELRKNGVKLIYAAENIPDGPEGIMLEGILESAAEYFSEYNAQKSMRGKRETALKGKYNGGGILWGYKLNKDNHYIIDKKVAPIIQNIFKQYAAGISSIKIAENLNNSGIKTCNNTDWDNRKVLQLLKRKGYGGFYCWSDYCLDDKIPAIIDKKTFEMVQEKMKKNKAKAATFKAKDYYVLSGKLYCGKCDCKMVGNRSRVSRKTNQKMSYYVCSGKKLYKKCDLKSFRKEFVEDLVINEIKNFLSDSERLEIIAERIYELLEKETASFKLSDALKAQLNDIEKSLKNLLYAIEKGIISETTQKRLEELEKQKKALMLKIRQEELNEQKTIISKEQILFFLERLRLADTENKQTQEKLVETFVNKIYIDENCLRIIFNISGDNNETKIDLKAVQQAEKDKAEFNPSSVLDTSHRCYYTYYS

SEQ ID NO: 12871 - protein, 521 aa, synthetic construct
MGNVMVIPAKRQVGNTARQQDAKPKLRVAAYCRVSTDGDEQATSYDAQVEHYTELIQKNPEWEFAGIYADDGISGTNTKKREDFNRMIDDCEAGNIDMIITKSISRFARNTLDCLKYIRKLKEKNIPVFFEKEAINTMDAKGEVLITIMASLAQQESQSLSQNVKLGLQFRYQSGQVQVNHNHFLGYTKDADGNLIIDPEQAEVVKRIYREYLEGYSMDRIAKGLEADGILTGAGKTKWWTSTINKILRNEKYIGDALLQKTYTTDFLNKTRVKNNGIVPQYYVEGNHEAIIPKDIFLRVQEELVRRRVVKTSANGKKRSYSCNHCFAQIVICGECGEMFRRIHWNNRGCKSIVWRCISRLEPTGQECHARTVNETILENVIVQTINTLLGDKSTYQAQLQQNIAKVIRSAQQNTADGIDERLQELQKELLKKANNKEAYDEIADEIFKLREQREKCTVDTAARDAQIARINELQDFIKQQPAHLEAFDEALVKRWLERIIVWEDHFTVELKSGLKIEIEG

SEQ ID NO: 12872 - protein, 519 aa, synthetic construct
MKKVTKIDKIQPSLASKKKLRVAAYCRVSTDSDAQLESLDAQKAHYKNYITSRDDWTFAGLYFDEGITGTKADKRPMLLRLIEDCKEKKIDFVITKSISRLSRNTTDCLEIVRTLLSLDIPIYFEKENINTGSMESELFLSILSSMAEGESASISENNKWSIKKRFLDGTYKLGYMPYGYCWKDGEILVDPEQAEIVKRIFQELLSGKGTEAIAKELNQKQVSTKKGGRWTSTSIRDIIRNEKYTGDCIFQKTYTDSNFNRHKNDGHLDQYYVPDHHEAIISHEDFEAAAALIEQRASEKGIKKGNAKYQQRYAFSGKIICSECGNTFRRRIHSSTYGKYAAWVCNTHLEDTSRCSMLYIRDDDLKLAFTTMINKLVYCHKLVLKPYLKALQENTGDASLLNIQQLEMLLEQNTEQRETLHKLMGQGYIDQILFTQENNVLLSQAGDYRNQIELLNRSQSLDATKVYETERLLHFCERGEMQLEYSEELFELFVDHIEVYSRQKIGFALHCGLIFKEMI

SEQ ID NO: 12873 - protein, 549 aa, synthetic construct
MEYQTPLRVAAYARVSTEKEDQMHSLESQRSYFAQYINAKQNMQLTKIYYDEGISGTQIRNRIGFQQMIEDALQGRFNLILTKEVSRFARNTVDTLAYTRKLKEAGVGIIFTIDHIDTRDQDGELRLTIMASLAQEESRKTSERVKWGQKRRMEQGVVFGRDMLGYTVKNGILSIQEEEALIVKAIFHKYTNEGKGAFAIARELHEEGIFPKRMEEWSGTVILRILHNEKYVGDLCQKKTFTPDYLTHKKKYNRGQEEKIYIKNHHEGIIARELWNRTQEELARRSSLYRSKERHSNRYWCSGKIRCGECGSRFISRTRKLQSGTYRAWWCFQKSRHGGAKILEGQQIGCSNRSINERALFSCMKYCNDLLCDQKDKERIREEILENVRKVRYTSELLIDMDKITQKIGAIEAKKRKAFDMMLDDKLSKDDLYRQIQWYDKEITHLQELISQSRQKQEFYRIDQEKTDLLEKALDEILSFGDGDQNEMLYREILEEIVVYREEERGCNRLVVWLKSLPFGIQLRIHSTGNGANFRTEILETEFVDRNSK

SEQ ID NO: 12874 - protein, 615 aa, synthetic construct
IAKYLLVVTIYCLYVVDKIFADISSITIFASKKNDKIMKGAIYSRVSTEGQDYSKQTNELKDYAKRNGIEVVYVFEEKESGFNNNRPEFEKLRKLTKQDIDIILVWEISRISRRAIYLQQQVQEFTDKGICIYAKKDGFSTLNDDGSVNASTKMLIGFASIIAEQEAATLKERTISSKRNKILREGKSYTYYAPYGYDYSKETKMLSINEKQAQVVKRIFQLSIDGYSTERIAILLNAEKIPTKGKKENWTAGTVCNMLTNPVYKGEANYTLKKEKKAGSTYCKPMEVVTISTPAIIEKEQFELSLQKLAERTKRSNSFGTKYNPLLRGLIHCPHCDVKYVYNFGTNQYLCVNKYKKASNKNVHCTAKCISNKLDSIVWNVVKTFFYKELAAGKAQEQIEPLQAEIESYKRQILLLDGKQSELTARANIIVDAAIEIKIQFPNMPDLYANKMKEVEEINKEASKYQKEKERLEKLIHSNESRIKNINRASKESALVESITDETEKYDLVHKAIDKIMIFGEGKTSIIIVTFSTGQTIYLGYSSKSNSKYYTIFYPSSDIYFDIQTSKGYINHLKEKATINSDGSIYLGDLTGEVKEYSIIDFVNYLDIEENRRYY

SEQ ID NO: 12875 - protein, 523 aa, synthetic construct
MAVNKNVMIIPAIKRVGNNRKEDETPKLRVAAYCRVSTDSDEQASSYEVQIEHYTEFIKKNSEWEFAGIFADDGISGTNTKNRDEFNRMIDECMAGKIDMVITKSISRFARNTLDCLQYIRKLKDKNVAVYFEKENINTLDAKGEIMLTIMASLAQQESQSLSQNVKLGYQYRYQQGEVMVNCSRFLGYTKDENKRLIIVPEEAEIVKRIYREYLEGSSMDKIKKGLEADGILTGAGKKRWHTSTIRKILSNEKYIGDALLQKTYTVDFLTKKRVVNNGIVPQYYVENNHEAIIPREIFMQVQEELVRRSRGHISTSGKKRNFSSNHVFSQIIFCGECGEIYRRVHWNNRGKKSIVWRCVSRLENTGLTCHSRTVLEDMIGLATVDAINKLIGQKDGFLLTLKENIETVISETDNNIVSEIDKKLEELQKDLLRLANSKEDYNDIADEIYRLREERHKALAEEAGKKGSKQRLEEMEKFLNEQSTLLEEYDEQLVRRLIEKITVYDDKLTIEFKSGIEIDIEK

SEQ ID NO: 12876 - protein, 528 aa, synthetic construct
MTYQEGGETMKKITKIEGNKVASIIKPKLRVAAYCRVSTGSDEQLVSLQAQKSHYETYIKANPEWEYVGLYYDEGISGTKKENRTELLRMLTDCENKKIDLIITKSISRFARNTTDCLEMVRKLLDLGIYIYFEKENINTQSMESELMLSILSGLAESESISISENNKWAIQKRFQNGTFKISYPPYGYDNIDGQMVVNPEQAEIVKYIFAEVLSGKGTQKIADDLNQKGIPSKRGGRWTATTIRGILKNEKYTGDVILQKTYTDSRFNKRTNYGEKNRYLIENHHEAIISHEVFEAVEAALNQRAKEKGIEKRNDKYQNRYSFSGKIICSECGSTFKRRIHSSGTKKYVAWCCSKHLKQITECSMQFIRDEDIKTAFVTMINKLIFGRKLILQPLLDALRGMSNSDNLSRIQELEKQIEKNAEQRELLVKLMAKGYLEAALFNRENNELQMEADSYMGQKEALIHALNGELSKVQEVSNLIKFTNKAEMINTFNEQIFNEHIEKIIVFSRVEIGFVLKCGITLRERM

SEQ ID NO: 12877 - protein, 556 aa, synthetic construct
MAGKQKKVKKITKINPVKPQVMMQLQPTKRVCAYCRVSTDSREQQNSFIAQTAYYEELISKRSDWQYVGVYADEARSGTKLQKRDDFLRMIKDCEAGKIDMIITKSVTRFARNTVDSIKAIRKLKLLGIAVFFEKENINTLFESSEMLLTILSSLAQGEAESISTNNKWAAIKRFQDGSFKIGTPALGYIKDGGGELVIDEQEAETVRYIFKQYLNGKGSYVIARELTEKGTQTIRGAEKWSDGVIKEILLNPIYTGNLILQKTFTTEVIPFKRKRNKGELPQYFISENHEPIISAEEAEAVKEIYEYRRKQMKTDTTKSLNRYAYSSKIICGECGKVFRRQKIYIGKTYEKVQWSCIQHIEDKEKCSMVAIREDIIQEAFTLMWNKLSGNYLEILSPMLESLRKLRADEQQEKDIRECNEKIMELSKQSHILSGVAAKGYLDSAIFIEKQTALQIELDAMRKKRKALLDDSGFETEIFYTEQLIGLLENNPGIQDTYREDLFLETVDQIIIKEGKTVTFRLKNMLEFSEACGKEDNKDAKTYTDRVPDAKRKDIC

SEQ ID NO: 12878 - protein, 548 aa, synthetic construct
MQAVKKKNVSIIPSQPAYDRSIKVQLKALRVAAYCRVSTLLEQQESSYDAQISYYTEKIQQNPNWKLAGIYADDGKSATNMKKRDDFNSMIDDCMAGKIDLILTKSVSRFARNTVDSLQTIRKLKEKNIGIIFEKEGINTLEATGELLITILSSQAQEESRNLSENTRWGIARKYENGVVLVNHKKFLGYTKDEDGELVIVPEQAKLVRRIYRLYLEGLSTQQIANTFMEEGIKTVTGKDKWHDTVIAKILQNEKYMGDVLQQKTYTVDFLTKKRVKNDGIVPQYYIEDNHEAIIPKELFYQVQEERARRASLHKPSIARRAKKEKSKYSSKYVLSDILVCGECSHPYRRQTWSRNGNLTPVWRCESRLLNGTKKCKHSATLKEKPLQEAIMKAVDSVVENQRELVGAFRENVIRVIGNYTTKNIKTEFDEEINKLQKQLLNLIEENAKQGAVNEDFDEQYRKIAEEIQSLKMKKLKQAREQKLADDYEQRVDGMDSCLGRVSCRVGEFDEDLIRRLILRIKVINESKIEIHFKYGIIMEQEIEFYED

SEQ ID NO: 12879 - protein, 545 aa, synthetic construct
MATNATVKKVVSVIPAKPAQAVSGLPENVKLRVCAYCRVSSDNPEQDSSFDSQVIYYTDYINKRKDWIMVDVYADDGISGTSTKKRNDFNRMIRDCMDGKIDKIITKSISRFARNTLDCLNNVRKLKEKGVSVFFEKENIDTLDSKGEVLLTILSSLAQDESRNISENCRWGIIRQFEKGRVLVNTTRFLGYDKNEDGELIINEEEAEIVRRIYREYLEGKSYVAIAKGLMADGIKNGAGNMKWWDSTISGILENEKYYGDVILQKTITVDFLTHKRVDNKGQVQQYLIEGNHKPIISKEIFDRVQDEKERRASLIGNLPGDRNRYTSKYPFSGKVFCGDCGNTFRRRTWNSNNISRKVVWQCKTYIKEGKDACNAKAVDETVLMNAFVRMFNRLYENRDVFIKTLIDNIEKAIMKKASAKEIKALDKQIDKLKTELKWLVQFQVKNGMDDEVYKEEYIRVSAELEELRKRRAEYDKQDSIKEVLRRRVNEIIKTINSRQELLEEFDEKIFNALVEKIEVISPTHFIFVLKSGMSVEEKIENSNF

SEQ ID NO: 12880 - protein, 549 aa, synthetic construct
MKRVLCLYRVSTKGQVDPKDDIPLQRRECQDFIDKQDDWIFFEERLEKGVSGYKTATDKRDVIIDIRNMAEQKMFDVLLVFMFDRLGRREDETPFLVQWFIEHGIEVWSTREGEQKLDSRVDKLLNFMRYWQAGGESEKISIRVKAAHAQMVMDGVWRGGSRPFGYKLVHNGRMGKKSKPLLDPMIDEIEGPIVQEVFRLSCCDGMGTLRIANHMNETYPYLKKIWTAQTVRSMLRNPLYTGRLHINDIVSEPIESLRLISDSDFNFAQYAMKKRIQHHYAGQREAENDLMPKDAKTKTSVFGATLLSGIAYCAHCGHKLVGGYCTKQLVDTAYHRPIYRCYNGSIKAKNCDGQRVYSSKRIEAAVLDVVHQFFEGIQQSVDVVWREKARQHYRNKQGARTKAAQEDHDKLKKQQITLRQEVMKALNGESAFAAGLLNSMLEENIAALVEAEARLSACQQEKTLEDTRLQYLSEQYKQITDWAKEFDLADNDTKKMIMARLIERIEVSRHYKLTIKFFISLEDFTLTENANLQLVQSDNQDIFMNAMVG

SEQ ID NO: 12881 - protein, 434 aa, synthetic construct
MMGEAIKRCAIYTRKSHEEGLEQEFNSLDAQRLSAENYINSQQFNGWRLIEKRYDDGGFSGGNTERPALKELLADIKAGKIDVVVVYKIDRLSRSLIDFAELQTTFEKYNTSFVAVTQQIDTSGSTGRMMLNILMTFAQYEREIIAERIRDKMSATRRQGKYIGGVSPFGYKAENKHLQIQPEEAKAVKQVFRRYLETQSPKLIAAELNAEKLTTRQGKEWRISHIYRMLNARIYTGDITYKGEVFKGEHEAIISREVWNEAQELLADNCPAKGKHRDHNGTLSLLKGIIRCGHCGGAMLPNHTTFRDGRHYYYYLCSQDLKRAKYQCPVHRIPGGDIEKLVMDEVAAIFKSEQFIEMLAKESGLNRDEIAARFSSVSGLWDTLFPLERKRLLQLMVEKVSVFQGHVELDIKTSGMKLLVKELENERIQVAGER

SEQ ID NO: 12882 - protein, 426 aa, synthetic construct
MANTQKKRCAIYTRKSVEEGLDMEFNSLDAQRLAAENYVASQSANGWICLPERYDDGGFSGGNLERPALKKLLDDAANGLVDIIVIYKLDRLSRSICDFAELSKKFDEWGVSFVSVTQEINTSTSSGRMMLNILMTFAQYEREIIAERIRDKMSASRKRGQWVGGSIPFGYFVKDRHLLPDEKSSEYIRLMFETFVEKKSARDVAHLLNIRGIKTRQGKDWTASHIYRILNNRTYIGEVAYKGGVYPGEHEALVDRTLWDSAQEILKTNAPVPRGRPAKERYSPLKGLIRCGHCDGAMGPTYSMRRGRQYNYYMCLKDSKRDIHTCPVKTIPAGDVEKAVVTQLGMLFYTPTFISMVATQLRTTIAEVRNALGNIGGFWDDLFPAERDRLLHLLVESVTVLETGITIKIKTAGMRGLIKEVQSAND

SEQ ID NO: 12883 - protein, 504 aa, synthetic construct
MKGKLRVAAYCRISTDSEEQLLSLETQKLHYESYIKANPNWEFAGLYYDEGISGTKKEKRSELLRLISDCEHKKIDFIVTKSISRFARNTTDCLELVRKLIDLGVYIYFEKENLNTKSMESELMLSILSGLAESESVSIAENNKWSIQRRFQNGTYKISYPPYGYDYVEGDIVVNLEQAEVVRFIFKETLAGKGTGKIAEELIQRGIPTKRGGKWTSTTICGMLSNEKYVGDTILQKTYTDDNFNRHTNYGEKDRYYIENHHEAIISREDFETVDELINQRGKEKGIVKGSGKYQNRYPFSGKLKCSQCGSTFKRRIHTNGNKKYVAWCCQKHITQVDKCSMKFIREDNLQRAFITMMNKLIFGRKFILKPLLKGLRDMRKAESVSRISELEKLIEKNTEQKEMLIKLMAKGYIEPALFNKENNELQIEAESYRNEIESLTFAMNSEISKTYEVRELLKFTNKAQMLTTFDGELCKRFVNQVVVYLREEVGFQMKCGITLREGL

SEQ ID NO: 12884 - protein, 522 aa, synthetic construct
MAVSRNVMVIPARKRVGNNIADEKPKLRVAAYCRVSTDSDEQASSYEVQIEHYTEFIKKNSEWAFAGIFADDGISGTNTKKRDEFNRMIEECLAGNIDMVITKSISRFARNTLDCLQYIRKLKEKNIAVYFEKENINSLDSKGEIMLTIMASLAQQESQSLSQNVKLGIQYRYQQGIIQINTNRFLGYTKDENKHLVIVPEEAEIIKRIYREYLEGSSMDKIKKGLENDGILTSTGKKRWHTSAINKILRNEKYMGDALLQKTYTVDFLTKKRVTNNGVMPQYYVENSHEPIIPKEIFMQVQEELIRRSTGHISSSGKKRNFSCSHPFSQIVFCGECGEIYRRVHWNNRGKKSIVWRCVSRLENTGLACNSRTVLENLLKDAVAKAINNLLGQKDDFLEVLSTNIETVINEQDTSAVAEIEKKLEELQKQLLIRANSKEDYNDIADEIYRLREEKHNALAEDAEKKVAGQRLMDMTAFLKEQATLIDDCDEQLIRRLIGKIMVYEDKLTVEFKSGVEVEVEM

SEQ ID NO: 12885 - protein, 434 aa, synthetic construct
MEKQIYDITPTRMTLTEKKRVAAYARVSCDKDTMLHSLAAQIDYYRKYIIHNPEWEFAGVYADEAKTGTKEDREQFQKLLSDCRLGLVDMVVVKSISRLARNTVTLLATVRELKELGINVFFEEQGINSISEEGELMLTLLASQAQEESLSCSENCKWRIRKGFEEGRPNTCTMLGYRLVNGEITVVPDEAEIVKEIFDRYLSGWGVQKISNSFNERGVHSERITHWYPDTIRSILRNEKYVGDLLLQKTLRENHITKREVVNDGLLPQFYITDDHEPIVSREVFSAVQDEVQRRAAKHTCSPGVKSVFTGRIRCGICGKNYRRKTTPYNTVWCCSTFNSRGKDYCASKVIPEETLKNYIAEALGDKTFMEDHFTDTVAQIVAEPANIMRLIFCDGTEKTIIWKDRSRSESWTLEMREAAKQKAFKRKEQTDGQ

SEQ ID NO: 12886 - protein, 551 aa, synthetic construct
MGNKNVTVIPPKPQGFMQGLPGITKRRKVAGYARVSTDKDEQQNSYEAQVDYYTSYIQRNPEWEFVEVYTDEGISGTSTKHREGFKRMIADALDGKIDLILTKSVSRFARNTVDSLTTIRQLKEKGVEVYFEKENIYTLDSKGELLLTIMASLAQEESRSISKNITWGKRKSMADGKVSFAYSSFLGYDMGADGKLFIVEEQAKIVHRIYDEFLMGKTCYEIAKGLTAEGVPTPMNRTNWQDTTVRNILQNVKYRGDSVLQSTFVEDYLTKKVKKNNGELPKFYVSQNHPPIIPPEKFEMVLDEFRRRKAGGPYTCISPFSGRVVCGDCGGFYGRKVWHSNSAYHTFVWHCNNKFTKRKYCSTPSVKEEAIERCFVDAFNSLLARKAEIAKNYEECLDAITDDRPLKARLAEVDALCTGLAAKMRDNLARESRMVDECEEDSPLKQERDEITAEYEALQSEYQELNSKIALCAARKVQVRGFLQLLKQQKKALVEFDPLVWQAAVNYMVINEDCTVKFFFRDGTELPWKIDPGVKSYKKKRKAAESCQMSE

SEQ ID NO: 12887 - protein, 526 aa, synthetic construct
MAQRKVTAIPAIINRYTAAPINSTKKRRVAGYARVSTDNEDQTTSYEAQVDYYTNYIKSRDDWEFVAIYTDEGISATNTKKREGFKTMIADALAGKIDLIVTKSVSRFARNTVDSLTTVRKLKDEGIEIYFEKENIWTLDSKGELLITIMSSLAQEESRSISENVTWGQRKRMADGKVSFAYSRFLGLDKDNETGKIVVNPEQAEIVRLIFRLFLEGMTPHSIAAELTRRGIKTPTGKDVWNQQTVRRMLSNEKYKGDALLQKEFTVDFLEKKMKKNEGEVPQYYVEGNHEAIISPAVFDMVQAEIAKRTKGGTRYSGVSIFSNKIRCADCGGWYGAKTWHSTDRYRKVIYRCNRKYNGEKCQTLHVTEDEVKTAFVSAYNKLVTEKKEIIANAEIIRRTLCGTDTLREEKSRLEDEMSVLVEMTQNIVAENARIAQDQDEYQKRYNGLVQRYDAVKARYDDVVATISAKEAQSERLENFIKVLKAQDGTIREFDCSLWGGMVEFLTVGRNKEITVTFRDGTEIQA

SEQ ID NO: 12888 - protein, 591 aa, synthetic construct
MAKITRVEQAVPTIKTKKKVAAYARISMESERMNHSLSAQISYYSSLIQKNPDWQYAGVFADDGISGTGIAKRDEFRRMIEAAENGEIDIILTKSIQRFARNTVDLLETVRHLKGIGVEVRFEKEHINSMSGDGELMLTILASFAQEESRSLSDNCKWGIRKRFEKGIPNGHFRVYGYRWEGDELVIVPEEAEIVRRIFQNFLDGKSRLETEREFAAEGITTREGFRWVDSNIKVVLTNITYTGNLLLQKEFVSDPISKKRIKNKGQLSQYYVEDTHPAIIDKATFDYVQAEIARRKELGPRANKSLNLTCFSGMLKCPDCGISYAHNKRTDRGIMEYWSCGSRKKKGGRCTVGGSINHENLKKACSEVLGLDEFDEDAFLDKVDYINVPKRYVLEFHLKNGEVITKDCPNTGHQDCWTAEYRAKTSEKRRKKPNCKGSSVMTGRIKCAQCGCNFRKASQQSATSESGKAYYWRCAEHNGCGTIGFREDLLKPFISETIGTTEFSDSEFDRQIDHIDVLSTSEMVFYYKDGRTVKRTWEQPKRIGRPWTDEQRAKFKESMKGRYTPEVRQQMSEHMKQLRKERGKAWRKEK

SEQ ID NO: 12889 - protein, 406 aa, synthetic construct
MPKIKKIEASEQAVRPRKKVAAYARVSKATDQLMHSLSAQISYYSNLIQSNPEWEYAGVYADAGITGTSVDARKEFQRMVADCDAGKIDIVLTKSISRFARNTVDLLDTVRHLKEIGVEVRFERENINTMSGDRELMLTILASFAEAESSSLSRNIKWVIKKKYENGIVHTHQNMLGYRWRGDDLIIKEDEAEVVRRIYSDYIDGKTVGCIQRELAAEGFIGLRGKPVSTPGIIRVLTNEEYTGSMLFHKQYTYAPKKEKYNHGEKAMYRIENHHEPIISSETFELVQKLRAERKKKNTQRSEECACFLGKVVCGECGYRMAPHTAYNRGNRRKRYTFVCNNRHANGKDACDNPWYAKSKLDAACAEVLGQENYEDKFTAEIKELRIYKDHLEFEFKDGRKIKWQK

SEQ ID NO: 12890 - protein, 423 aa, synthetic construct
MKTITKIDAAVAGPAEAKKRVAAYARVSSGKDAMLHSLSAQVDFYSRFIRQNADWEYCGVYADEAYTGTKNERPEFQRLLADCRAGRLDIVLTKSISRFARNTVTTLETIRELKRLGIDVWFEREKIHTLSEDGEFLITLLSSFAQEESLSTSENQKWRVRKNFKEGKPTSARITGYQLVGDTFVVIPQEAETVRLIFNLYLSGLGKTAIAKELNARGIPSKNGGLWYESVVASILRNEKYVGDMRLQKTFIADHISKRQVKNAGQLPQYYVRDAHEAIIDRDTFERVQAEIQRRAQKHTPHKPRQDTYLFTGKIVCGKCGKHYKRKTTASKPVWICSTFNTLGKSYCASQQIPEQVLLDLVDGEPFTQLRIPEANTVVIVRPDGTEVTKHWQTSRRDSWTEEKRMAASKKAKERYEAWQKEK

SEQ ID NO: 12891 - protein, 532 aa, synthetic construct
MAKREITVIPATIPKFTGKHTKPGQKRRVAAYARVSTDMEEQQTSYEAQMDYYKKYIIARADWEFAGLYSDEGISGTSTKYRTGFNQMIQDALAGKIDLIVTKSISRFARNTVDSLVTIRKLKEHGVECFFEKENIYTFDSKGELLITIMSSIAQEESRSISENVTWGQRKRFADGKVSMPYKHFLGYRKGPDGLPQVVEKEAAVVRSIYRMFLEGYSPTYIAKALTSKGIPTPAGKKRWQNSTVESILKNEKYKGDALLQKRFTVDFLTKKMKANEGEVPQYYVTESHEGIISPEVFELAQYEFQCRRENGGRQNRNVSPFSEHIICGECGVCYGHKVWHSNDKYRRLVWLCNKKYGKGAGDGLRCKTPHLTDDEVKTFFIGAMNAALRNKQEILDSCRTAVEFLTDTSQLESDLRKLEAECDVAAELLRKCIDENAHAAISQEDYETKYAELAARYETAKGKCENMNEKILQRELKANRIEAFFKTMETSDIITEFDEGLWNATVDTMTVYSKKKIVLRLKDGTEIEWHI

SEQ ID NO: 12892 - protein, 517 aa, synthetic construct
MKKVTKIEKATSKRKKILRVAAYCRVSTDTDAQLESLNTQKSHYESYINSRDDWQLAGIYYDEGISGTGKAARPELEHLISDCEAGKIDLVITKSISRFSRNTADCLSLVRRLLDLNIPIWFEKENINTGSMESELFLSILSSMAEDESYSISQNMKWSARKRFENGTFKVVYPPYGYDWNGEQMVVNRKQAEVVQFIFNEALKGTGSDTIADLLNDKGIPARNGRVWLRSTVHCVLTNEKYTGDCIFQKTWTDSSFKRHINRGEKDAILVKDHHESIISRKDWENVQRLIQQRSQEKRIEKDNQKYLKRYTFTGKIRCGCCGSTFKRRIAYSSSGSPVIWVCKTHLQGKTKCPMQSIKDEDLKRLFLTMMNKLIYSYRLILRPYANSLKDNARKETLDQIDALKGQLSENSRKRQTLTHLMTQGIIDQTLYSRETAELLAASDGIRKEIDFLENTASNVTEVLLKTRALLHFAEKSEMLQEFDGELFNEFVDHITVHSRHEITFCLKCGLELKERM

SEQ ID NO: 12893 - protein, 519 aa, synthetic construct
MKKITKIDGNKGTSIIKPKLRVAAYCRVSTDSDEQLVSLEAQKSHYETYIKANPEWEYVGLYYDEGISGTKKENRTELLRMLSDCENKKIDLIITKSISRFARNTTDCLEMVRKLLDLGIYIYFEKENINTQSMESELMLSILSGLAESESISISENNKWAIQRRFQNGTFKISYPPYGYDNIDGQMVVNPEQAEIVKYIFAEVLSGKGTQKIADDLNQKGIPSKRGGRWTATTIRGILKNEKYTGDVILQKTYTDSRFNKRTNYGEKNRYLIENHHEAIISHEVFEAVEAALNQRAKEKGIEKRNDKYQNRYSFSGKIICSECGSTFKRRIHSSGTRKYVAWCCSKHLKQITECSMQFIRDEDIKTAFVTMMNKLIFGRKLILQPLLDALRGMSNSDNLSRIQELEKQIEKNAEQRELLVKLMAKGYLEPALFNRENNELQMEADNYMGQKEALIHALNGELSKVQEVSNLIKFTNKAEMINTFSEQIFNDYVEKIIVFSRVEIGFVLKCGITLRERM

SEQ ID NO: 12894 - protein, 519 aa, synthetic construct
MKKITKIAEITSPKINVKKIRVAAYCRVSTDSDAQLESLEAQKTHYENYINSRNDWEFAGLYYDEGITGTKKDKRQELLRLIDDCKSGRVDFIVTKSISRFSRNTTDCLELVRQLLALHIPIFFEKENINTGSMESELFLAILSSMAEGESVSISDNSKWSIQKRFENGTFKVSYPPYGYDWNGEQMLINPEQAAVVKEIFAAALLGKGTSSIAADLNLRSVPTKRNGKWTSTTIRGMLSNEKYVGDCIFQKTFSDSAFNRHNNHGEKDQYMVSNHHEAIIRREDFEAVQALIHQHSAEKGIVKGSEKYQKRYAFSGRIVCGECGDTFKRRIHTCTGYKYTAWSCNTHILDKQKCSMLYVKDETIKQAFCTMMNKLIFAHRIILKPYVDALKNMSTDDSLRRIQEIETLLAQNTEKRETLTRLMTQGIIDQILFNKETNELLSQADSFRSEINALKNTVSGDVTKVTEATALLRFAEKGGMIPAFDEELFEKYVNRIIIRSRNEACFELKCGLALKERM

SEQ ID NO: 12895 - protein, 522 aa, synthetic construct
MGNVMVIPARRQVGNTVKKSEQPKLRVAAYCRVSTDSDEQETSYDAQVTHYTEYIQKNPEWELAGIFADDGISGTNTKKRTEFNRMIDECMAGNIDMIITKSISRFARNTLDCLQYIRQLKDKNIPVYFEKESINTMDAKGEVLITIMASLAQQESQSLSQNVKLGLQYRYQQGKVQVNYNRFLGYTKDKDGHLVIDPEQAEIVKRIYREYLEGYSMDKIAAGLEADGILTGAGKEKWHTSTINKILRNEKYIGDALLQKTYTTDFLTKKRIKNNGTVPQYYVEDDHEAIIPKDLFMQVQAELVRRRAVHVSPSGKKRSFSCNHCFAQMIFCGECGELYRRVHWNNHGCKSVVWRCISRLEPTSADMNCTNRTVNETILQDVTVKALNQILTDKSTFLKTLQKNIARAVVSADTLSPDGIQNRLAELQRELIKKANSKQDYDAIADEIFRLREQKEKSEVDSHCRKEAMNRIKELQDFIGQQKTEVTNFDEELVRRLIEKITIFTDHFTVKFKSGVSVDIEG

SEQ ID NO: 12896 - protein, 525 aa, synthetic construct
MARTITIIPATVTSRFSNLAVSVPKRRRVAGYARVSTEKEEQQSSYEAQVDYYTKYIKEHPDWDFVFVYTDEGISATNTKKRDGFNQMIKDALDGKIDLIITKSVSRFERNTVDSLTAVRKLKAANIEIFFEKENIWTFDAKGELLITIMSSLAQGESRSISENVTWGWRKRIADGKVSMSYGQFLGYEKGADGTPQIVPEEAKIVRLIYTMFLQGKTPTAIAKHLTAQGIPTPGGKEKWQCTVVESILTNEKYKGDALLQKTFTTDFLTKKMKPNEGEVPQFYVTDSHDGIIDAEDFEMVQAEFARRKALGRSYNCKSCFSAKLVCGDCGGFYGSKVWHSTDKYRRVIWQCNSKFKKGEKCATSHFTEDEIKERFIQAWNGMQDITDEVISECRLALAELFDSAAIDDEFAAKNAEAEVLIEMNCKHIVENASAAQDQKAYKKRQEELVSKYNAVAKRIDELKAEKDARKRQRTVLTAFIDTMEQQRGSLTEFDESLWLAVVEKATVHADGRLVFTLMDGSEIE

SEQ ID NO: 12897 - protein, 523 aa, synthetic construct
MAKVTTIPATKNKFTALPTNALTKRRVAGYARVSTDSDEQLTSYEAQVNYYTDYIKSRADWEFVKVYTDEGISALGTKHRDGFKKMIADALAGKIDLIITKSVSRFARNTVDSLVTIRKLKEKGVECFFEKENIYTFDGKGELLLTIMSSLAQEESRSISENVTWGQRKRFSDGKVSVGYSNFLGFEKGENDTLKVVPEEAETVRIIYKLFLEGKTTQGIANYLMEHGVLSPARKQKWQASTISSILTNEKYKGDALLQKRFTVDFLTKELRENNGEVPQYYVEGSHEAIISPEEFDIVQDEMARRKELGRAYSDKAFHSKLICGDCDGFYGRKVWHSTDEYRTVIFQCNRKFKNEIKCTTPRLTEDEIKERFLTAYNELMGNRENVIADCELIRQTLCTTEELDAGMQQAQDEMTVIAGLMQAHIKKNASIAQSQADYAIETEWIEKRYNDALERYTALEAEKTKRVRKSKELKAFTKTLKQQPLVLSEWNERLWITLLDTATVNSGSRIVFRFKSGIEITS

SEQ ID NO: 12898 - protein, 443 aa, synthetic construct
MRKKVKKLEKKMVLEKPKRVAAYARVSSGKDAMLHSLSAQVSHYSELIQVHEGWQYAGVYADEALTGTNEDRADFQRLLSDCRAGLIDIVITKSISRFARNTVTLLQTVRELKSLGVDIFFEEQNIHTMSTEGELMLTILASYAQAESLSASENQKWRVRKGFEKGELINMRFLFGYSISKDEIEIDSDAAPIVKEIFKRVIAGDTFGSISRDLNKRGVSGALGGKWCVQRIRDIVGNEKYTGNAMLQKHYRNNHLEKKKCRNTGELPMYYAEDTHPAIIDEDTYKAAQVVLLATKKANRNRPKPKTSEFTGHIYCPHCGKNYKRVTNNGSAGWNCSTYVTQGKVYCHGKKIPEDTLKTVCADTLGLSEYDVKVFSECVERIEVPGENRLLFVFKDGRTEDCIWADKSRRDSWTVEMKQAAAERMRQRRKNNGKSNNDSGNKK

SEQ ID NO: 12899 - protein, 514 aa, synthetic construct
MQAVIYARYSSHAQKDVSIEQQVEECREYAQQNNYTVTTVYADRHTSGRSDRRPEFQRMMRDADKRRFAMVIAYKSNRISRNMMHALQYEERLSRLGIRVCYAKEEYGDTAAGRFALRTMMNVNQFYSESMAEDIRRGMMDNAQKCMVNSGSLPMGYMKGEDGRYAINPDTAPIVQEIFRRVAGGEPYVDIAMDLNARGIRTRRGNPWGRSSFHRMLCNQAYIGVYQFGEVRIEDGVPKLISEEVFEQVQHKRNETRHARGRHQAGGEYLLTGKLFCGHCKRPMTGLSGTARDGSLRYYYICQGRRQNDGCTKANVRRDRAHEHIAQAIQQLMLSDSAIAWLADQAVAYGKHLRETDPSKETEQQLRDVQRAINNIMKAIEQGIFTTTTKGRLEELEGEQQTLTSRLNRELRALPDLNREQIIYRMESCRTGDIKDPAYQKFLFDTFLNAAYLYDDRLHLDFNYTGEGSSATLPLGTSPPPDDLAEHASGSFSLAQRPQTGVPCTTRNPGFINN

SEQ ID NO: 12900 - protein, 523 aa, synthetic construct
MGNLKNITVIPARARIGNTVKADDTPKLRVAAYCRVSTDSEEQATSYEAQVEHYTNYIKGNPEWELAGIYADDGITGTNTKKRDEFNRMIEDCMEGKIDMVITKSISRFARNTLDCLKYIRQLKDKNIPVFFEKENINSMDSKGEIMLTIMASLAQQESQSLSQNVKLGFQFRYQQGEVQVNHNRFLGYTKDENKRLVIVPEEAEVVKRIYREYLDGASLLQIARGLEADGILTAANKRKWRPETLKKILQNEKYIGDALLQKTYTVDFLSKKRVVNNGIVPQYYVENSHEPIIPREIFMQVQEEMVRRANLQAGKSGKRRIYSSKYALSSIVYCGECGDIYRRVHWNNRGCKSIVWRCVSRLEEKGSDCSSRTINEITLQEAVVKAINEVLGSKNTFLTVLQENIAAVLNEDNDQTIQEIESRLNELQQELLQLVNAKADYQKVADEIYRLRELKQNILAENAEREGKRERIEEMMKFIYDQSVELQEYDEQLVRRLIEKITVFDEKLTVEFKSGVEFDVKI

SEQ ID NO: 12901 - protein, 519 aa, synthetic construct
MKKVRKIEPNSKIIKPKLQVAAYARVSTDNDEQLVSLEAQKTHYESFIKSNPDWEFAGIYYDEGVTGTNKENRSELQRLIEDCENRRIDFIVTKSISRFARNTIDCLELIRKLSDIGVFLYFEKENINTQSMDGELMLTILSSLAENESISISQNNKWSIQRRFRNGTFKLSSPPYGYDYEDGILIVNEEQAAVVRRIFSEALSGKGAQKIADDLNADGISPKKAALWNASTILGMLSNEKYTGDVILQKTYTDDHFKRHRNNGEKDQIMIRRNHEAIISHEEFDAVNELLRQRGDEKGIEKGKGKYQKRYPFSGKIICSECGSHFKRRIHYNGGSQYIAWCCSKHIHDIAKCSMRFIREDDIHQAFITMINKLIFGYEFILKPLLKSLRSLNYSANLTEILELEQKLEENMERSRVLTNLLTKGYLSSSLFNEQINELRAEATLLKEKKKALSRSVNSGMTAVSEVEQLLKWASKADMIESFDEAIFSRYVESIIVYSQEEIGFKLKCGLTLKERLVR

SEQ ID NO: 12902 - protein, 518 aa, synthetic construct
MKAVIYARYSSERQTEQSIEGQIRDCTEFAEENEITVVGTYIDRAKTGTNDRREEFQKMLRDSKRRNFQAVIVWKIDRFGRNREEIAKNKAILRMNGVSVLYAKEHIPDGPEGIILESVLEGLAEYYSAELRQKIVRGMRESAYKAQFNGSGLATGYTTDKDRKFHIDPDGAKVVRLIFKSYDDGMKVAEILRMLHDKEIRTMKGNEFTHYGITRILRNRQYIGEYRWHDIVIPDGVPQIIEKELFERVQAEMDKNKKAPARARGGDVSFLLTSKIFCGHCRGTMVGDSGTGKSGNMFYYYTCRKRKTKRACKKKSVRKEWLEREVAMLTAATVLQGDVIEYIAGRVVEIQRKECDDKSMLNYYKKQLSETNVAIKNIMKAIEAGVFTDTTRDRLLELETARDDIQVEIEKENIARPVIKREQVIYFLNRFKGGDIDDPAYQKEIIDMFVNKVFLYDDKIIITYNYSGEKNEITADIVEEAAEEAVSEAVKGCSDKLPLTPPIFNNSNTFIFFLPGGV

SEQ ID NO: 12903 - protein, 544 aa, synthetic construct
MSNTLFGQTAKTDFDFSRHRAVQTAIGRTNLAFQEDGNLEAKKLKVASYCRVSTAEEMQLNSLENQIIHYTNYIRSNNAWNFAGIFSDRGKSGTGTRSRAGFNKMMRYALDGKINTILCKSISRFSRNVVDSLNAIRLLNQKGVKVIFEKESLDTGNVQSDFILTMLSALAQEESRNTSENITWGIIKRFEMGEPIFTRMIGYKKVDGKPWVIVEEEAKIVKEAFEACLNGDSPSQIAKKFIGKEYKKANGRTDWSAIAVRDILKNERYVGDALCQKTYTKDYLSHQAEINEGEKNQYLIQNHHQPIVDRETFYKAQQILLRNSKKIEKGSKKTYPLSGRLVCAECGGNLQRFISRGKVTWRCGNHTKSNLLCKMRGIREEDILKALVKAFEKRYRIDELGEGKRQIIRLIREVRGAETNIESQQNRLRLELKKILLEETEATIKLEDTTDITQRRIAIENKIAKSETWWATFDEDDVYRKKAIEKLEVIKNKARPMSELRKKINNIEFVRAWVTSIKAVSPYLFSIAWLDGNETEIERGDDEW

SEQ ID NO: 12904 - protein, 559 aa, synthetic construct
MVSNDQQKASRVRVIPARTRTERNEQNPDGQKKRIGVYVRVSTELESQASSYDIQVSYFKEYVENNPQWELVEIFADEGITGTSTKNRDGFNRMIERCQNNEVDYIITKSISRFARNTLDCLHYIRMLKGLGIGIYFQKENLDTLDSKSELFLTILSSMAQEESRSISENTKWGIQKRFQQGKAHIPTTYFLGYTSDADGNIIINEEQAPIVRRIFRELLEGKGTPTIARGLMKDGIKTARNNLSWTSDSVYKILRNEKYKGDCLAQKSVTVDYLTHQRLRNRGHQPQYYIEDNHPAIISEEDWDRVQEELTRRNNMRKDPDNKYNMRYSGIAPFSNMLSCGECGRPVTRRRLTTFHGKERIQSKFTAWHCRVAAQKDKDFTDCNCSYVWEEEVEKAFMRLLYDIKCDQKLLRNKVKLAIEEASLTEEEEAKLKELNTQIRRIADKITDLANRPPGANEAIYDATMNHLVYEQEILRTEYDELSASKKDSDYLKKSYEILLDNLEKIEEPTDLFDSDIFKQTVERGIVYKEWQVEFQFKCGVSYKVSAMRKRRTQKKGK

SEQ ID NO: 12905 - protein, 549 aa, synthetic construct
MKEGFILKKIISIAARNVSFSDNGQFLRKTRVCAYCRVSTGSLKQSESLKTQVSYYGRYIKNKAEWEYAGVFADEGISGTGMLKRTEFNKMIRACELGKIDLIMTKSISRFARNSADCLDVVRHLKNIGVSVYFERENINTLGADSELVLSILSSIAQDESRNISENVKWGVQKRFREGKVYITTKRFLGYDLNNEKQLTVNNGEAEIVKRIYREYLNGRSLKEIKSGLEKDNIKTVTGNRVWNKSTIEYILQNEKYCGDAVLQKTITVDYLTGRRKKNKGEAPKYKVKAHHESIISKEDFLKAQNIRKRKALKYGNLPEDRDKYQNRYAFSGKIICGNCRAFFNRRTWNSKTKVKQIVWQCRTYINEGKSSCSMKAVDDITLKAVFVRVFNRIYEAKEDFFKRFDDNIGKVLKQNEKCEDVLRVDREIENISGKIKELVRKQIKGELEESTFDRKYRGLKDILQEFKNRRNSLSYDDEKYKELLERNKKIKKFIEGREGTITEFDDDIFGNLIENIVVITPTHLEFHFKNGMVVEEEFIKKRGIKGLQ

SEQ ID NO: 12906 - protein, 533 aa, synthetic construct
MPKVSVIPAKQVQVINGIEDKKKKRVCAYCRVSTDTDEQLTSYEAQVTYYESYIRSKPEYEFAGIFADEGITGTNTKHRTEFKRMIDEALADKFDMIITKSISRFARNTLDCLKYVRLLRDKGIGVYFEKENIDTLDSKGEVLLTILSSLAQDESRNISENSRWGIVRRFQQGKVRVNHKRFLGYDKDENGELIINEEQAKIVRRIYKEYLGGKGIRAIGKDLEKDNILTGAGGRKWHDSTIQKILRNEKYSGDALLQKTITTDFLTHKRVKNKGEVQQYYVEDSHPAIIPKEMFQMVQEEIKRRASLVGYSEKTKSRYTNKYAFSGRIICGNCGSKFRRKMWGPCEKYKKYVWLCANHIDNGLKACSMKAISEEKLKDAFVRSINKIIENKEYFIKTMIENINTVSENEEDKSELKIINERLEELKEQMMNLVRLKVRSSLDNQIYDEEYERLEEEIKQLKEKKTRFDNTELIKKKGIQKVKEIERILRGRQDIIKDFDRELFTQVVERIKVISLVEVEFIYKSGVVVKEIL

SEQ ID NO: 12907 - protein, 436 aa, synthetic construct
MEQKRITKIDALPKLQKKTRVAAYARVSTGKDAMLHSLAAQVSYYNKMISEHEGWEFAGVYADEALTGTKDSREEFQRLISDCKAGKIDMVLVKSISRFARNTFTMLKTVRELKALGVDVFFEEQNLHTLSAEGEMVLTFLASFAQEEARSNSENIKWKIKKDYEKGILWGGKDMYGYKIVNRKLVLIPEQAELVKRVFKLYLEGCGVQMIANILNNEGERALKGGRWNKSTILNMITNYNYTGALVLQKTYREDYLSKKTKRNNGEKDMYVIDDDHDPIISLEDFQMAQELRKQRSELSNNTGHRRTRNRYTSLIRCGVCGAKFERCNRSKGKRWLCRTYDSIGKHACASKAIPEEILNEVTSQVLGVDELTDGLVQYSINYIEAFNENKIVYHFKDGRIHEDFWKDRSRRESWTPEMKEMARQRALKQHRKEDN

SEQ ID NO: 12908 - protein, 456 aa, synthetic construct
MAKVRVIPSTINPVTLTPLGQLNRRKVAAYARVSTDDEEQATSYETQVKHYTEFIQKKPEWEFVKVYADDGISGTSTKRREGFNEMIKDALDGKIDLIITKSISRFARNTLDTISYTRKLKTKGIEVYFEKENLWSLDDKTEFLLTIMASMAQEESRSISQNVTMGKRWGMKEGRVSWAYSNMLGYKKENGKIVVVENEAILVRQIYQLFLREGKTCTGIAEYLKAQGIPTPSGKSYKWTKNTINSILRNEKYKGDALLQKTYTTDYLEHKVEKNRGHLPQYYVENSHPAIIDKEEWEIVQAELMRRDKIGAAYSGNSIFSSKLICGDCGGFYGRKKWHSTSKYSRFVYQCNCKYKKNHNKCLTPVFTEDKIKEKFVIAYNQVMQEKDRIIEDINDVIKLLSDTSELDTKVVELQNKMEVISGLVDKMIKENTRTTQNQVEFNKRYDELSAQYESE

SEQ ID NO: 12909 - protein, 527 aa, synthetic construct
MEQQKKVTTIPASISKFTAAPIDKPVKRKVAGYARVSTDHDEQFTSYEAQIDYYTKYIQSRDDWEFVKVYTDEGISGTGTKKRVGFRTMIDDALAGKIDLIVTKSVSRFARNTVDSLSTIRELKDHGVECYFEKENIWTFDGKGELLITIMSSLAQEESRSISENCTWGQRKRFADGKVSVPFSRFLGYDRGPNGELVVNHEEAKTIKEIYRLFLQGQTPYGIAKQLTSEGILTPGGKTKWSVTTVKGILKNEKYKGDALLQKSYTVDYLTKKTKMNEGEIPQYYVEGDHEAIIEPAIFDQVQIELERRCPGRNRHSGVHDFSGMIKCGQCGSWYGSKVWHSTSKYRKMIWQCNHKFDGGKKCTTPHLTDDEIKAAFVSAANKALSNRKSVIETFRTIKDTAFDTSALEKEQDDLTIDINVVAGQIQDGIHKNAHVAQDQAEYEKSYETLTARYEKAKARLDEVTASIHDKRSRCQSIGYYLDLLEQQDGPIQKYDACLWHGMVDHVTVFSKEDIRFTMKDGMEVQA

SEQ ID NO: 12910 - protein, 595 aa, synthetic construct
MGKITKIEPTVKALPKRKKVAAYARVSMETERLHHSLSAQVSYYSDLIQKNPEWEYAGVYADEGISGTSTSKRPEFQKLLSDCEAGKIDIVLTKSISRFARNTVDLLETVRHLKELGIEVRFEKEHINSLSGDGEVMLTLLASFAQSESESISTNVKWGIRKRMQAGIPYANGHMNVYGYRWEGDELVIVPEEAAIVKRIYQNFLDGKSRLETEKEFAAEGIKTRAGARWVDSNLRVILTKVTYTGNMIYQKEYITDPITKKVKKNHGELPQYYVENTHPAIIDKETFDYVQSEIARRKELGCFANKALTLNCFSTKIKCGCCGRSFVRSKRRNRAKSSNLGEYDVFWLCTSRKKKKHPGQVPCTSGTIRESVLKEEIAKVLDLPEFDEEAFTEKVKQITIPETGTLFFEFSDGTTLEHHWYRNFKKESWTKELREQASIYRRTHPANRNGKTCFTAKIRCEKCGGNYRRQAVTMADGHQNSYWHCCSGKSLRDDHLKELTAEVLGLETFDEEVFLKQIDYISVRDVTHLTFHFNDGHTEERDYEFKKEGVKWTDDRRVKQTQAIRESFTPERRQKMGRKMKKIRSEKYWNSKRK

SEQ ID NO: 12911 - protein, 436 aa, synthetic construct
MEKIVTKISPSVPPIPARLRVAAYARVSSGKDAMLHSLAAQVSYYSNHIQQRMDWEYAGVYADEALTGTKDTRPEFQRLIADCKDGKIDLIITKSISRFARNTVTLLETVRELKLLGVDVYFEEQNIHSMSGDGELMLTILASYAQEESRSVSENCKWRIRKRFQQGEIVNLRFMYGYRINHGQIEIDQEQAEIVRIIYADYIKGLGCDRIAARLREMGARTFSGRQWTAKRVLAILNNEKYSGNALLQKKYVADHLSKKLIYNRGTLPKYYAEGTHPPIIDPLTFQKAQEIMALRRENRNVKKNPANRYPFSGLIFCPHCGKNYRRVTYKGHAAWNCSTFVHYGKDACPAKQIPEPILLSLTAEVLGLAEFDEVVFRSQIKQLQVPQANKVIYIFQDGHKVEAAWQDRSRKSSWDDKKKQQARERTLAYQRGDLK

SEQ ID NO: 12912 - protein, 527 aa, synthetic construct
MKPARAVTVIPPTINRFTPETTGVAARKKVAAYARVSTDSEEQLTSYEAQVDYYTKYINERADWIFAGIYTDEGISATNTKKRDGFKQMVADALDGKIDLIVTKSVSRFARNTVDSLVTVRQLKEKGVEVYFEKENIYTLDSKGELLITIMSSLAQEESRSISENVTWGQRKRMADGKVSMPYRHFLGYEKGEDGLPKIVEKEAETVRLIYRMFLEGKTPSAIAKHLGNLDIPSPAGKKTWQVATVISILTNEKYKGDALLQKSFTVDFLTKTTKVNEGEVPQYYVQNSHPAIIEPDEFDAVQLEMERRKKLGRPVSCHSPFSAKIVCGECGGFYGSKVWGSNTKYRRTVWRCNEKYKNDKPCSTPHLTEDEIKQRFLEAFNILMGSRDELLANCRLAQEVLCDCSAIKTELAELHREIEVVSELTRKSIYENARFTINQDEFNERHQGYMERHRIATERIAELEDQRRNRQNKLLILDGFIREIETRPLAIDEYDEKLWLAVIDKVIIHDANAIHFTFRDGTVIKV

SEQ ID NO: 12913 - protein, 519 aa, synthetic construct
MKRITKIEANEKLQKAPKKLRVAAYARVSTDSREQLVSLEAQKGHYETCIKSNPDWEYVGLYYDEGVSGTSMAKRDGLLKMLDDCEAGRIDFIIIKSISRFARNTTECLEAVRKLIRLKVFIYFEKENINTGDMESELLLTIFSSLAESESVSLSENETWSIEKRFQNGTYIVAFPPHGYKNEAGLMVINEEEATVVKFIFAECLAGKGAHVIARQLNEKGIPTRRNSEWTSGTVNAILRNEKYKGDVLFQKTFTDSSFVRRTNNGEKAQYYVSEHHEAIINPEDFEAAQAMIDQRAKDMKIQQGDAKYQNRYPFSGNIICGECGATWKRRTHSDKKGKYYAYACNTHIKKKDKCSMQFIREKNFEVAFINMMNKLAFTKKVLLQPLLVSLKDINQEAPLARIHKLEAALEDNFDKRQQLMDLFVKEYLEPAVYTAQHAGLIAEAKNLSDEKEALYASVNHEHEHVEALNKLIKYINSVGTLTEFDADAFEEHVDHIIVFKRYEIGLALKCGITLRERL

SEQ ID NO: 12914 - protein, 539 aa, synthetic construct
MTMNDKLKKFAKGKFQEQEEAGGYCIIYNRVSSKEQLDGQSLNTQMEKCEQYAEKLGMTVLERFGGTFESAKSDKERKEFSKMIAYLNNSRIPIKAVIVYSTSRFSRTGSTTIIEEVEKRGAQVRSATSNYDPKTAQGKFIQNMELATARLDNDIKRNTTIDNSIAALRKGRWIAKAPRGYDQKTTKKEQVITINEEGEKIKLAFDWKVNQNLSNEEIRIKLEKLGFIINKQKLSELFKNPFYAGYMSHNFLKGEIIKGNHPAIVSEDIFLKANGLLDISHSNGYEVKMYKPEVPLLGSIKCPICRRNMTASISTKMKKKYDKEIYYYVCWNKGCKQNNAAKNIHQSYKDILNSYGLSSELTELLKIQMKKTFSYMTKNDSEQLTLLKRKLSSVEGYIKQVEDNLAFANNQRQVEACTRKLADLENEKEIIETELQKVNDMSLNLPKYIDYGLKYRNNMLKIWELADLGEKKRIQKVIHPMGFVFNKEVGNIEPLSINQFVSLRCCKPNEYDQKEKETINQNDQLSLFVPEAGLEPAQP

SEQ ID NO: 12915 - protein, 489 aa, synthetic construct
MNAAIYIRKSRKDKDKPSHRLELQREQLPAHAKNQGWAYEIYDDGHASAARGKTDDLRERARLEADIRSGKVGVILTIELSRLSRDDSLQDYVAWLYLCGEHGVKLSTLSRVLDPGQHSDWMLLLMEGGFSSVEMKVLKGRMREGWEQAFRQGMFLGGTPPPPYVYDHAQERPIIDHMQLPKIQRIWSLAETRSAKSIASEMDMPEITVRRILSDDRLLFCQALRIDPQTGEVIQCEWDPCLDAETASRVRAGRRTRKNGQGRRAYAALLSNLGLVWCGYCGRTVKVWHNSRIRRDGTRNDYYGCQTKNDKSKCPKARLIPQQALNDRVLTNLFNTIEDLEPLKQYWQIAAEKSNPGKELELIENKLKKATDKKSRLVSAIADGILDFADAKQKMNELNAEIERLRGEERTALALAGSVPDWEALSVSRAEFDSLTTDGQRDIISMAISRIDLFENYAIITYPFPRNEDGDRIARIHLPLRKDGYITTP

SEQ ID NO: 12916 - protein, 569 aa, synthetic construct
MTGMTKIIRSKEKKRFVIYTRCSTDDQAQGDFTTLDAQAHHCKNMLDAFGYELGDIGKNGIINDDGYSGKDLNRPGIQTILENVRQKKIDGIIFFRLDRLTRNTRDLYSLIDLFREKEVDFISVRENLDSSTAIGRVVIGILGILSAFERELTGERVKASAIARVRQGKWVGGFLAHGYKLEKDGERLPNGRQPHKVVLDPELAPKLRIIWEMAANNKSLMEIGQELERQNVRTCRGKVWRKQTLSSVIKNPFYKGYILYANELHKGNHEAMIEPAIWEKANRIVKAKLPGHGFSRRPKTYNYLLSGLLKCGKCGSHLISASNKGRDGKKFHYYICGRSKQKLGCNELGIPAPVFDRALIGYFRKASQNREIIIKGIGDAMREAQLMAGRIDTMIAETEAKLNECQHEAKTLLDLAMTGTVTQGPAYKTKMSEIDNEIIMLENKLTKLRTQKTANDMTANSANYLHETLQFAIQYLDKAPVDSQKSLVHALIKDIVIHKDVIDIKMYLGDPDAVLQADIIDCEHNHDGIKKKSPTPAQCRNGAVTEQKLGASVRQQWLPREDSNLGPSG

SEQ ID NO: 12917 - protein, 579 aa, synthetic construct
MAMNVKTDNTRKKKRYVIYTRCSTDDQAQGDFTTLDAQTYHCRNLLDAFGHELADIGNKGVVKDDGYSGKDLNRPGIQMIIDHVRRKTAAFDGIIFFRLDRLTRNTRDLYWLIDLFNSKEIAFVSVRENLDSSTAIGRVVIGILGILSAFERELIGERVKASCVARVRQGRWVGGNVPFGYKLIPDGAPLPNGRQPHKIIVDPETGNKLRFIWEMAANNKSLYDIGQELIRRGIKTPTGKVWRKQSIAWIIKNQFHKGYIKYGKEIHKGTHPAIVDEELWLKANRVLTAKLPGHRFIKQTPEYIYLLAGLLKCGECGSHYVCESGNGQAAEKFFYYVCGRSKQKLGCDVSRFSARGFDEALIDYFKRASTDQDIIVKAIGDAILDSQIKLEALEKMMKPLQEKLEETKQEANRLLELAMDNRISQGKTYKDKMARLDEEIVRLEDELEKLQAKKNVAQMSASSGQFLHSNLRFAMQYIEKAPPEAQKSLIQAMIKEIVVYKDYIEIKMYIDQPTVDSISCSLPAPETQKAPKNDKRPAGDACKALVTVSNARSSPERQGWLPRMDSNHDSKIQNLESYH

SEQ ID NO: 12918 - protein, 587 aa, synthetic construct
MIAAIYSRKSKFTGKGESIGNQIQLCKEYAEFQLKDKDVTEFLIYEDEGFSGGNTNRPEFQRLMEDAKSKKFGVLICYRLDRISRNVADFSSTLESLQKYDIDFVSIKEQFDTSTPMGRAMIYIASVFAQLERETIAERVRDNMLELAKTGRWLGGVAPMGYKADPITYFDADMRERKLVKLKQAPEELKVIKLLYKKYLEYKSLSKVETFCLQNNIKSKRGADFTKANIRLILVNPVYVKATSQVLEYLENDGITVCGEADGEHGLLTYNKQKSMTNDEGKNVNVYRDKSDWIAAVSSQKGIINAEDWIEVQNTLSENRDAMPNLGKTHNALLTGKIRCAKCNSNMQVAHGHISKKTGKEIYYYACSMKKYSKGVRCNNKNAKVSELDPIVINQLKQLGMNKKAVLEDLKDQNRRAKKDNISNDNAVNINKSIEEKTKQIDNLLNKLSMDDDITDLILDKIKSLKIEVKTLNEQLDHLNSKNTEFENNDLNLSVIEFMLDRCSIIDTLSLDEQKQLINVLIDTITWDGELHNMKIDFIGSTCTEEEYKKKIGIILPDNPFKSQFSIMSTRIKYPFVIGLTCSGKYN

SEQ ID NO: 12919 - protein, 429 aa, synthetic construct
MKVKIIDPIVKSYGKKKRVCAYARVSTDNFRQGESLENQVQYYENLIKINPEYEFAGVFADNGITGTSANRPEFQKMLELCKKGKVDLIITKSVSRFARNTVLMLETVRELKELGVEVRFEKENINTLSGDGEFILTVLSSFAEEESRNVSENLKWRYRNKFKVGEMVINTKRFLGYDKDKSGNLVINKSEAEIVKRIFEEYIAGKGATKIARELNGDGIKTIGDRQWHDSTIFTILKNEKYKGDVRLQKYYTPDYLKKTSLNNNGVLDSYYIEDNHPAIISKNMWEQVQEEMKKRAEAKGNTEGHTGKYQKRYPLTGMLYCSICGAPLKRRTWNSKLPCKKIVWQCSNYVNNGRYACKGTAIDDEIISKLNIKKPTIVKEVIKDGKKHYSYSSKSEQNRPSGKHRTAEKEDGSLLQSINRPVRTVIKL

SEQ ID NO: 12920 - protein, 646 aa, synthetic construct
MLRPICYERVSTIYQAVMANGLDDQRSSLTAYLDRNAGKFSDDRIFIQDAGLSAYKNANISATSNLGKFLQDVRDRKYGKGDALIVISLDRLSRRSSWAESTIQFIVNSGIEIHDISTNLVLREDDPMSKIHMELIQHRSHNESLMKSVRAKLAWDNKILRALQNGEVISNRMPNWLRNVDNKYQVISEQAELIVKCFEWYREGLSTGEIVKRIGKKWQMVTVSRLIRDRRLLGEHERYNGEVVPNVYPKIIDEDLFLTANRMMDRVMLEKKKPAEDLLLEPDVVREIFNLYESGLGSGAIVKRLPKGWSTVNVLRVLRDKKVVTMKIIDNLTFERVNAKLTANGVANRIRKDVTIAQDDYITNLFPKILKCGCCGGNIAIHYNHVRTKYVICRTREEKKRCDAKSIQYTRIEKNILSVVMNIDFGKVLSEDSTKKDKVLQALKVELSALRKEENTYQLKIDERKKSGKKTSLPLMEGLTDVQDRIEETVEQISRSSTINELPKFDYDINCLLDPMNVELRAKVRKELKHVISKVTYQVIDKYILVRLHYYTDVLSHVLIIDNKRGGGDIVSQIAIYTKDSTTIYTTPSFALTTSNDEIPRIHFMENVPLNQIDYELLLISADSVECSDSVTSWMRHNHNFLFANN

SEQ ID NO: 12921 - protein, 542 aa, synthetic construct
MIVALYARVSTSKQAEKELSIPDQLYQMREWCAASNNSVAVEYVEPGASATDDRRPVFQQMIGEACAYPPPFDAIIVHSLSRFFRDSIEFGLYERQLKRAGVQLISITQQTSDDPSGEMARRIFSLFDEYQSKENAKHTLRAMKENARQGFFNGSTPPYGFRKVEVASPGNKGKKKRLEIDPEEAAMISRIFGLYLAGCRGKMLGVKGIAAHLNSQGLTMRGKRWRKTFLHEMLSNRLYLGEYTFNKMEAKTHRLKPESEWISATVEAIISPEIFAQVEQRLESRSPVVVPPRVANSPTLLTGLVKCGACGATMTIATGKGGRYRYYKCTGRINNLAIGSSCTNSNVPMEKLDTLVLETIADSIFIPERVETMLKELHRNLKHSRSEHEEQLKKLKKELDNIKVQTERLYEAVEKGLLPLDGTLQERVNSHQERRQGILAEIAGLQRQRGLPLANLGVKRIRAFCTALKEKLLEKGSNFGKEYLKLLVDEIWVNKKEVRLTGSYAALAGALAMSTKPAHFEMVPSFVPLWLPSADSNHGQGG

SEQ ID NO: 12922 - protein, 404 aa, synthetic construct
MLSIDSQIKEMLQLAEREDLDIIEIRRESHSAKSTGQRQVYNELLEDIRLGKFNAILTWAPDRLSRNAGDLGAIVDLMDQGHLQEIRTYGQKFTNIPNEKFMLMILGSTAKLENDHRGENVKRGLRTRVEMGLWPGVAPLGYLNQGLMDKKCQIIIDPVRAPIIKQIFEKMAHEHWSGRKIYNWLKHELNFKTRGNKSLTLSGLYRILDNHMYYGVFERPQKSGNWYQGKHTPIITKDLFDKAQAQLKRDQIVRENKEFAFTKLFTCGLCGSGISAEEKYKKLKDGTTAKYVYYGCSRARDRNCKNQYIREEDLITQLFTIMDQVNINELGMRHKLEEEIKRYNKFQSVVLGGKGKQDPKEAEVNIRTYVKYLLKEGTVTEKRELLGNLRSRLVYENKRIRLLK

SEQ ID NO: 12923 - protein, 528 aa, synthetic construct
MLDNSNVAPGKNKTLRCAIYTRKSHEEGLEQEFNSLDAQRESAEHYIEAQRMRGWTALPDRYDDGGFSGGNMERPGLRRLLADINAGKIDVIVVYKVDRLSRSLLDFMKMIDLFNEKGVSFVSVTQHFSTTDPTGRMFLGILITFAQYEREVIAERIRDKVAAAKRRGKYCGGVPILGYDVDRDNKKLLVNPDEARTVQYIFRRFIQIGSAKKLGQELNEQGYRTKAWTTKKGKVREGSEWNTAHIYRLLNNRIYIGEIAHKDRSYPGEHEGIIDRATWDKVQAILEDNKPVKVSMARTKMVAPLKGVIRCGHCGCAMGPTYARKNGRHYTYYICQKDSKRTVSRCPLKRIPAGDIEQAVVEQLSAVFRTPTLVAKTYFAARDIEQVERERLFKQKAQLEMELSQAREQAIELMKPGNDQPGKTEMLTTVNRQAVELSKQLTHVSERCRAYRGNNITEQDVSEAFQNVEGFWEDLFPVERNRLIRLLVDKVEIRETGIDMELRTNGLTTLIAELAGLACEVTERRASR

SEQ ID NO: 12924 - protein, 498 aa, synthetic construct
MESEEILVKDVAIYLRKSRGDKDTDLQKHRMQLVELCNKMDYSYREYAEIGSSDSIQDRPEFCRLLDDIKMDLFDAIAVVDIDRLGRGDDRDWGLIEAILREAEVFIITPDHNYKWDNDNDEIQLETKKYLARIEYKAITKRLRRGKIWGARDGKWTNGKPPYPYVYNRETGNLDINADHYKVYRQILDMALDGLPAYQIAWELNKLNIKSPGGLDWNNNTVYRLLKDMTHLGKIVFGKQKGSGHKNKKTKPLKRYDQQDWIVIDGRHKAIKTQAEHDKIVELLAKRKIIPKAARKGAFVLSGLVYCSKCGYRMGITKNGRNHIEYLKKCQHFTPIGDKCDNPGADTDYIVQAVFTELRKYEDRILSNIADVKEDETILIRSALKQKQDELQKEEKALNNLYEMREDGEISKDKFLLRKNIRETRIDQINNDVKELKVRLQKRDKATDQMMLSNIADFRKKWSQAESSHDKNQFLKTIIDRINYTRNGENIIIHVNFL

SEQ ID NO: 12925 - protein, 445 aa, synthetic construct
MARIIHTKQPTIPTIRPRKRVAAYARVSIEKETMIESLATQVGYYRAHIQRNPEWQYVGVYADEGITGTKSARPEFQRLIADCKAGLIDMVITKSLSRFSRNTLDTLNILRQLKERGVDVFFERENIHSISGDGELMLTILSSYAQEESRSASENVKWRLRKKYEQGEITGWCQLYGYTINHGIVEIDNLKAAIVRRIFSEYLAGESATAIAKRLRKEGIPCEQGGQWKQFTVSEILRNEKYTGCQLLQKTFTKDHLTKRAQKNKGELPLFFVENAHPAIIDKETYRRAMTLMESRKDTANRPQVKMQDQPFRQKIICEKCGRHFIRKNTNGTPGYVCSTYSAEGKDFCPSKKIPEDILVKLSAEALGLSAFDEAVFERQIDHIVAVYPRQVTFVYRDGHTAEHTWEERSRSESWTNDMKKAVGEKTRARKRDTKHGSHQEGHEN

SEQ ID NO: 12926 - protein, 520 aa, synthetic construct
MEAIKKVTKIDRTVVEKASHHQPKPALRRVAAYARVSTDSDEQFTSFEAQVDYYTRQIAAKQDWMMVEVYTDEGITGTNTKKRDGFNRMIADALAGKIDLIITKSISRFARNTVDTLTAVRQLKDKGVEVFFEKENIYTMDSKGELLITIMSSLAQEESRSISENVAWGKRAKCEEGKVYLPYKQFLGYEKGQDGLPRIVEDQAETVRLIYKLFLDGLMPSGIAKKLTERGISSPAGKLVWYSGTVESILTNEKYKGDALLQKTFCVNFLTKEMKRNEGELPQYYVEQSHPAIVSPEVFDEVQQELKRRREARYVGRSGCFSSKIICGECGSYYGRKVWHSTDKYRTVIWRCQHKYDNGEPCKTPHVTEDQIKAAFVTEMNRVIANKEQVLADIKTLIATLTDISELEESEAAASKELEAASESMRKLIDAYAHALIGQAEYEDRYGELLAKSRSIEEQIAEIGEQREQRKARKRELDAFYKMLKATGPIVEFDEELWNVAVENVTVQAKEGIYLRLRNQ

SEQ ID NO: 12927 - protein, 528 aa, synthetic construct
MLDNSNVAPGKNKTLRCAIYTRKSHEEGLEQEFNSLDAQRESAEHYIEAQRMRGWTALPDRYDDGGFSGGNMERPGLRRLLADINAGKIDVIVVYKVDRLSRSLLDFMKMIDLFNEKGVSFVSVTQHFSTTDPTGRMFLGILITFAQYEREVIAERIRDKVAAAKRRGKYCGGVPILGYDVDRDNKKLLVNPDEARTVQYIFRRFIQIGSAKKLGQELNEQGYRTKAWTTKKGKVREGSEWNTGHIYRLLNNRVYIGEIAHKDRSYPGEHEGIIDRTTWDKVQAILEDNKPVKVSMARTKMVAPLKGVIRCGHCGCAMGPTYARKNGRHYTYYICQKDSKRTVSRCPLKRIPAGDIEQAVVEQLSAVFRTPTLVAKTYFAARDIEQVERERLFKQKAQLEMELSQAREQAIELMKPGNDQPGKTEMLTTVNRQAVELSKQLTHVSERCRAYRGNNITEQDVSEAFQNVEGFWEDLFPVERNRLIRLLVDKVEIRETGIDMELRTNGLTTLIAELAGLACEVTERRASR

SEQ ID NO: 12928 - protein, 427 aa, synthetic construct
MPPLDAPLKYCLYARKSTESDERQVQSIDSQVKEMLQIAERENLEIVDIRRESKSAKDSGNRPIFKELLKDIAEEKFNAILTWAPDRLSRNAGDLGSLVDLMDEKKLMSIRTFGQTFSNSPNEKFLLMILCSQAKLENDNRGINVKRGLRARCERGLWPTCPPTGYFKEKRVDHKGQCLIDPDRGHVIRQMFEKVAYEKWSGRKLYNWLRFDLNFRTALGKKHLSLGNIYRLLENTFYYGPFEYPRGSGNWYQGKHEPLITKELFDLVQDQMKNSQLVRRENIEFAFTKIMTCGLCGSGISATEKFKKLKNGGYNRHIYYGCTKAKDKNCKCGYISEEDLIKQLQKQIDKLDFKKLPVQDKIEGEIKRFKKFKMMATGKNQNIDVSDVDVKNYIKFLLKEGDDQEKRELLTCLNGEILLKNKVVEIK

SEQ ID NO: 12929 - protein, 558 aa, synthetic construct
MDKKILCIIRASTEKQETESQKKELVAYCITKGYAVEEMEFIEVAGASAVKLNKKYIQMLEDIKATILSIPTITAVALWHLNRLGRVESKLHEMKEWFLQHKIQVYCKNPDFTLLDDTGKESAAGSLAFSMFASVVKFETDEMFAKMKRGRERNKVNGIFYGGKIKFGYTLDATKHFIINEEEAQTIRLIFNLYSSGKYSFYDLIEELKARGITKGGMKITYEMIQNALADEAYYSSKILPSIIDKELFDKCAAIKANTVAVKRTKESVNVNFAVGLLKCKCGNNFIANGDFYRCYSKINQQRKKKVVKCDAPIIRRDIMDDTLWLVTRLLQQRFLMDKDSVDISEQKDKINVLTAKLSTAQKGLSSIKDRKEKLEDAYYVDGEMNEAQFKKRLASLHSKEVQTESLIRNYKTEIEDIQKVIKQIELPSNDRYLQSLLLSDLDVEELEDRKKIKEMMFNHIDKVTVNRVMKGNHKCVEITITSKTKLTFVFLYDSWLNSHRKGECNLFYEDKPVYEIDGAIIRQNKAVTKMLYQKIGLPELTSRELGEAAARYAKKQE

SEQ ID NO: 12930 - protein, 415 aa, synthetic construct
MGEMRVIPARPARPQRLRVAAYARVSTEHERQLSSIAAQVSYYSHLIQSTPGWDYVGVFIDEGITGTSTKHRDGFKRLMDTARAGGIDVILTKSISRLARNTVDLLDAVRELKALGVAVRFEREQIDTLSADGELLLTLLASFVQEESRSMSKNVKWGIRKKYADGSVHSRQPYGYQYLGGDLVIIEAEAKIIRRIFAEFLAGISPEATATRLNAEGVKPRRGAKFRGKTIRKWLENEIYTGRAVLQKYYRPNVAESNCHTNTGELPRYLVDESHPAIIDQTTFDAVQAELVRRRHLGRGATPSGGTTGLTSRIECFVCGRFYHRRTKTGRHRSYKFWWCETATKGKGNPCHAPQIRETRLTRICTHVFGFDAWDDDTALTSLAKIVVNPDRTLTIHTTRTETPVTVKLDERSTR

SEQ ID NO: 12931 - protein, 522 aa, synthetic construct
MTTTQIRRKRVTAIPATKTPGHATVLGAQRRRRVAAYARVSTEAEEQASSYEAQIDYYTHYIQSRTEWEFAGMYADEGITGTSTKHREGFKTMIADALAGKIDLILTKSVSRFARNTVDTLTHVRKLKDAGVEVYFEKENIWTLDSKGELLITIMSSLAQEESRSISENVTWGHRKRFADGKIMVPYASLLGYKKGDDGNLAIDETQAPIVRRIYARFLEGATPQTIAKELTADQIPTPRGKQIWSPSTVRSILTNEKYKGDALLQKSFTTDFLTKTMKVNEGEVPQYYVTGNHEPIITPATWDVVQAELARRAGKGTSNTHPFANKITCSECGGSFGRKVWHSTSKYRRYIWRCNNKYKKIHRCATPHVTEEQIKNAFVATLAERVTNTDVLDDTMCLLDETVYDTRELETQQATLGERIEETITLMNQLITTAAATAHDPDDYDRRYHQLETRHRQLETEHQHITDKIDRRAQAIKVHVYLATLPPLAYSDQAWNTLVDHAIINANGAISVIFKDEQSAS

SEQ ID NO: 12932 - protein, 603 aa, synthetic construct
MDTGLRLGVGCVRVSTDRQERSIDEQKEAIRAAANRDGVKLMEGEAWCEDEGISGSILARPGLQKLLAICHTRRDITDVYFWKRNRLARSTDPLDGLSIEREIEKTGKRVHFVQGMQKTGNKLLDFIASTIEYAEAGQYLVNLSSDTIRGLVPLTKAGFDAGRPTPYGFDRMVVDSSGKELYRIRCLGGGTYHKMLPNGDVQVYSNGVKPEKEQTARSTLVPGAPDRVAVVRKIFAAYVQGEQGIRTIVENLNAERIPGPRGGLWTMGTIRSILVNPVYHGANIWNVRNFSKYHAIKKGAPTPHEPTDGRTLRKNAPEDWIVADEQHGFEGLIPKKLFDEAQEKRLERNTPFKRGHSVKSPYYLTGLIKCACGHSLHGIKKLSSKKKGRLTYFYYTCGGFVTKGHAACKRYLVPKEVIEGPVLEALRGRLQTMGRIGNIRKQVEALIAEHAPAGEDRSGELRSRLAELADKRRNWEAAIDNGLDIAMAVDKLKQLAKEEEVIKGDLAAMKARNAADADVHAASTEILGQLDRLRDVLEEGSVAEVKAILRAYIGRIEYDPENNRARVGFLPSRALVSRLVLGQENEIVSMVAGGGFEPPTSGL

SEQ ID NO: 12933 - protein, 540 aa, synthetic construct
MKTIEVIKPTNKFYNVATNEVINKKRVAAYARVSTDEDDQLNSFKFQIEEYTKRIQANKDWEFIGMFSDQGLSGTQMKKRPEFMKMIELARRQEIDLILVKSISRFARNTVDILSLVRELRDLGCIIYFEKENIYSCDPQIDFTLAILSSIAQEESRSISTNVKWSVEKRFKAGKMHISRIYGFEKSEQGELVINEDEAKTVRLIYSLFLQGFNINDIRKVLNERKIPTLNNKEWLYNGVKTILTNEKYCGDAILQKTVTTDYLTHKQVKNDNLATKYFVRNNHEGIVSKAAFEMVKSIFEESTKSSRNLVTKYPLTNLVYCSKCHGNLRRHLVNYRRPSEKVVLDCKHNRMDKSIKCNEPWVDSDLILETAMESIKHLLSSDDVVNSLMNELSNVTCSEELSELLLKKKQELSRLVHQKNTDANLLPESFLNQERILKKEINTLKKEITSSIKNVSLVEIMKNHSADIITKDSQYLIKNIYSLIIMDVDKIICVISKTTSTEELISKIDELVKMDSSVRGFYKDYSREKTFGYKVVVHE

SEQ ID NO: 12934 - protein, 560 aa, synthetic construct
MARRRPPERRDPDAPMRVVLYARVSTPGQAAAELSIPDQLAQMRSWAERRGATIIAEFVDPGFTATDTNRPGFQQMIDRVMNGEIRIDAIVVHSLSRLFRDSIEQGVQRRNLAKRDTTIVSITQEFGQGNEGDFATQMIALFDEYSSRETAKHVTRTMKLNAKEGYSNGGVPPFGYRRVAAGQKGDRIKSKYEVDPVEAEIVRTIFKLAVEGDGKSGPLGVKRIADTLNKTGIRTRKSNLFTTGGVHEILTREAYTGTRRWNVRSSKTGDYKYESDVVAYEVPTIIELDVFDRVQKLLADRDPQKSPPRFSASPTLLGGIAVCEACGAAMTARTGTSRRGVVYQYYACSAAGRKGTTACKGQWVSAPKLDDAVTEGLVERLLQPAHVMSLLDGAMKARDAAREAVHSRIAALTKEVKEAGDKLDRLYQAIEVGVVSVTDPSLKKRVDDTVADRDRAQAALDRILASETSVKTIDPMKVQIFSSAMATTLRTGDVGARKAWVNALIDRIVVGKTGIRVIGKKDLLARAIDADGDLTRTARPVRSSVSEWCPGRLHNIRSSN

SEQ ID NO: 12935 - protein, 533 aa, synthetic construct
MKRAVIYARVSTQRQADDGVSMDSQIEQCRVKALALGCEVDQVFRDDGVSGRSDNRPGFQAALAYCAAHRVSHFVCWSTSRFGRNLEDALKNTNQLREWGTRAAYVHQDIDLETDAGWMLGVMTGMMDEIYSRNVARDTLRSMITASRDGFFVGGRAPFGYRIERVGKRSKLAVHEDHAAIVRTMYALALNEELGAQAVALRMNAAGLTRDGKAWGKNSVAIILKNPSYMGERLFNQTTKRTQERKSADEVVRVASHPAIVSREDFEKVQTMMKDRTPHEIGGTPKSCFAFTGLLRCGICGETLQITNGTGRKNVSYSYYSCLGHKKGAPRCCLKNTPATPFDTWMVDELLEKVLTTSVVEKVVLDIRANGGRWAEERELRRKALVVELRTAERKRESLYETIEELGKSTPGLAGMMQRLAEHGETIKNVEFALQELESRPAPDYDLVDIDAQTAVETITGVIRACPDPKQLRMLLSTFVEKITLTNSTAVVEYREDALLRSPTPTVHSGVRWLPVLVSAQNGQASLVLEGAA

SEQ ID NO: 12936 - protein, 565 aa, synthetic construct
MTRAALYARYSSDNQRDTSIEDQFRICKERAMREKWTITNSYKDAGISGASMILRPGIQALLQDAQSHAFDIVLAEALDRISRDQADVATLFKQLRFVGVSIVTLAEGEITELHVGLKGTMNALFLKDLAAKTHRGLRGRVEGGKSGGGLCYGYRVIKRLDERGDRIRGDREIDPAQAAVIRRIFRDFAAGISPRAIAVKLNAEGIAGPETKLWNDTTIRGHVKRGTGIINNELYVGRLVWNRLHYLKNPSTGKRISRLNPEAEWIVTKVPELRIIEDELWDLVKAKQSEIAERFINVTVAVREHHSNKRLNSARRPKSLFSGLVLCGLCDGPCSLRGADRFVCSAHVSNGSCSNGRTLARSELEQRVLSGLKDRLLAPDVIAEAMRAYAEEMNRLNRERRAHDNAWRAELAKVEKQIHGMVEAIKEGMFQHSMIAAMDALEARKAELSALLAEAPADTPDVLPSASQLYAKKVAHLTEALNRPEDRAEAAQALRGLIQRIVLRPGAKRGQIDATLHGDLGTILNWTAARNAEKVAQTKTPAASATGVSVSVVAGIGFEPMTFRL

SEQ ID NO: 12937 - protein, 610 aa, synthetic construct
MGPPTLGGMNSAPNPLAYSYIRMSTDIQLKGDSLRRQQQSSKAYADQNGLELVEDFKLEDIGVSAFKGANVSSGALGKFLALVKGGEIARGSYLLVESLDRISRQQVLDSIPVFFDIIKSGINVVTLADAHLYRAGETNFADIMYSVMILGRAYEESKTKSMRVGEAWRNKRNKASEKKLTKVAPAWLTLREDRSVFDIIKERADVVQQIFDFADAGHGSFVITRRLNQSDVPTFTKSDGWHESYVTKILNNRAVLGEFQPHRYDELGERIASGDPIRSYFPRIVDEDQFLRVQAARRRRLVEGAGRKGPEYRNLFSKIAKCDYCGAPMRFVHKGRPPKGTQALKCTNAVRNLGCESVSWKYSDFETSFLYFVKEVDLTAILQAAAQDSGQAMLQQRMAALEEKVHQLQVKRERIFEMLDDPGSSTTFIKGKLEECESEISKEQQQIEQLQGQLLASQPMPSITALELKSLIDAIQDMTASDIFDRRAVVANRLRSMIRSLRVASDGSQPKAKRIEHFLSSTGVDPEERRRLLDQIQWSNEHAQRFQRTFSVVLADGISRHVVVKSDDPTDFIAEVLVGKDGAISGSDRGMPIGWSDGLDDVFDEPASAQ

SEQ ID NO: 12938 - protein, 439 aa, synthetic construct
MERSIRIIEPSKPRIPAKKRVVAYARVSSGKDAMLNSLSAQISYYSELIQRNNKWQYVGVYADEAQTGTKDSRVEFQRLLTDCRAGKVDMVITKSISRFARNTVTLLEAVRELKLLNIDVYFEKENIHSLSGDGELMLTILASFAQEESRSVSENCKWRIRNNFKDGLPHGFSILGYRLNGDTLEIVPQEAETVRMIFADYLGGMGKNAIMKKLNIAGIKTKRGNTWLEATVDRILRNEKYVGDMLLQKVFIADHIDKKKCINHGMLPRYYVKDSHPSIIDRDTFELVQERLKNQAAKYNPGAGTPNTYPFSGKILCGQCGKYYRRKINGAGSKYAKPVWICSTFNRHGKAACPSKQIPEDILLSLTAEVLGTPEFDEVFFKTQVKEMRVYDLNQLVYVFHDGHKVEATWQDKSRKWTEEAKQQARERQLENIKRRNSQ

SEQ ID NO: 12939 - protein, 591 aa, synthetic construct
MPTVKRARLKAAEAAPSRPPRAYTYARYSSPQQGGGSSIARQDAYAERWAKENGLTLDRSLRMADLGKSAFSGEHLKPGSALAAFMLQIKNKDVLPGDALIVENLDRLSRAEPIDSQGLFGDIVRAGVAIVTSNDNQVYSRETLRQNRALLLVVDALWMRAHEESDSKSVRIRAAYRDKVKKWNDGERDILFGAPRHMKDNGKGELVLVPGTDPSWVLYNREAKRFELDQPQADAMVRMIELYRAGYGAVEITRRLAAEGLSVSEKYPTNRIQRVISYPALKGDKVVISDGKEFVLRGYYPPLMNESEWDELQLLVGKRGHRKGKGDVPAILTGLKTSYCGYCRMLLVGQTVTKKLADGTERKSRRLRCGTYYHLAQKCEGGDSWRAEPVERALLTVCADQANLDYLFSGNDKADPLMKQLTAKRAALAKLELRIKGIKDALRNSDESPETFLETSRELEAEKRDLTKVVEQLERELKVHTCAKPSTGDAWAALTEEAMALDYDARMKARLLVSETFERIDVFAKGLEPKAKHGLEVGARTMHLRLTSKRGVVLGFDFDRRTGELLNTPAKVPNRERIATGKHSTRSARTK

SEQ ID NO: 12940 - protein, 542 aa, synthetic construct
MSNKDIRYFLYARKSSEGEERQVQSIPDQVTIFTRMVEKERLTLVDVFSEAKSAKRPDNRPVFAEMVRRIEAGEANGILCWNANRLFRNPVDGGNIRWLLQEGIIQSIRTIDREFLPSDNSLLLAVEEASATQQVRELSVNVRRGLREKAERGCWPTQAKPGYRNIVRIVEGKEVRNIEPDPERFILMRRAWDLMLTGTYSVPQVLTELNSWGYRSQPTRKGGGRKPMGRSALYRLFDSPFYAGRFFYGGEWRKGNHKPMVTEDEFNRVQELIKGTNRIPRQKHQFTYTGLIRCGVCGCQITAERKTKHYWTTGRTVEYVYYRCTGRRGCPLRSVSEDYLTRRIFGLLNTWHIDDQARAIAEHAIERQEQASYAEVGVIREERLSTRKGVERRLDALFTMRENGEISTDEFVQRKARYADELNALDRTITEPGELVASNANAVRQAVQYLNEAPPRFPDASLEEKRETASVLAESYVLTLGKLSIRPDPLLLKVVTLEPGKNESDQVHGDDSDPKNPTQRREWDAIRTLLTGSELNFKCDSK

SEQ ID NO: 12941 - protein, 434 aa, synthetic construct
MTRGRERAAWVGYLRVSTPGQAERELSLPAQCAAIAEFAARRAVTIAREYADVGVSGTDPRRREYRRMLEDVYAPGSDIKTIVVHHTSRFTRDATEARVVKSKLAKIGVNVVSVCQDLHDDPMGKLMEGFFECIDEYESAINGVRTASAMREAVRQGYFPGSTPPYGYRSEPIAIRSGVVRHRLVPDDVEAEIVREIYRLYIAENGAKTVARRLNHRGFRVRSGRLWSGAAILRVLDDTTAAGTYYWGRCATRSKQARPRSEWTCLQVEPIVDPSVLALAMTLRERRCPRRNPGRPPAPVHVPSGLLRCGQCGASYQLETSGKRVDGDVYRYTYYNCRSACRVGSELCPGFRVRTGDLHAAVFHHLADIVCTDERAADLRARVRAAHAVSVERVGEIWRSLLLHDPLVKRTYARHLIDRIDVSPTRTLIEARRA

SEQ ID NO: 12942 - protein, 542 aa, synthetic construct
MTVRTYRRRSKNDAGKQEFSLDTQADGCAAFIASSPFATARKVPDYVDDGEEGDDFTRVGLRKLLDDLRAGDIVVCRDQSRLGRDALEVTLAIRDIVRDRGCRLFYYTTRQEVLFKTAMDQAMTFIQGTGHQMEVEALRGRVTEALRSRVQAGRVAGGRCYGYELQRVSDGSGRPYTIAVVKEDEAAIVRRIFLMRADGLGFKKIAHVLNEECVPSPAAGKRGTGTWSPGCIRAMLLNARYRGLYVHGKIKKVRKGAGAQRVRADASEVMTVEIPEWRIVDDETWTRAQERFAPESPTRRMTRPRARYALTGIARCGTCDGAVGCASTRTAGDYRKFYTCTRHHERGPRACAVSVRQPMEDVENALVTYLERHVLTVEVIDQYASAIREAIEATIPSRNADADALEAELRQVKAEQKKLTKAVALADDVPELVTELRERATRARNLEVRIAAIRRAPDELRGIVDRAEATVRERLGDVRTALIDRADLRAIFLRLFPEGIRFHPARVEGVQVWEIEGSVNLGRLVEGDGVPMCSLDSDPKGT

SEQ ID NO: 12943 - protein, 530 aa, synthetic construct
MKTCIYARKSTHKLGQKETIENQIKICRSKGKELGLEIVDIKQDVGTGRDDLNRPEIKELISDALEGKYQCVIMKGISRLFRDTEKGLGLIKLLDRNNIRVITVEEMFDSGNPESRTGTGKLDLSKITMYLMFSEMESKKLGDRVKYTQIEKAKNGEWNQPNNTPFGYSYNPETKKLIVNPEEAKIVKLIFDLYRNGLGIRSIMNYLNGENQEKIKYPTPNKGKLWNQYTINFILKNEAYTGDVIYNKRTKKERTYKNPELYGKDKSDIWIGADYNPEEEWIIARNAHEPIISRDMFADVQRIMNNKATRKGIRSNVGLLAGIAKCGLCGASMTFKRGNRDKNGRIKTRNNYYCMNYIKYGNKVCTSHHVKAEDLENTIIDEIEALAKDEKMLNDLIIEICQIRKNDKEIQRLKNEQNYYENEIEKTLNKMNKLLERNIEGIISDVQFKEMNKRFSEELQKYQEQLLEIKEKIPKLKEEEFRIDEFKKLISRCINLKEKTKEEIRHLLLGLINKVIINEKGEIEKLTYKF

SEQ ID NO: 12944 - protein, 525 aa, synthetic construct
MTKKVTTIPALLNKQSTNQVGAIKKRRVAAYARVSTDQEEQLTSYEAQVDYYTNYIKSRDDWEFVDVYTDEGISGTSTKHREGFNKMVKSALDGNIDLIITKSVSRFARNTVDSLTTIRKLKDIGCECYFEKENIWTFDGKGELLLTIMSSLAQEESRSISENVKWGHRKRFADGKVSVPFGNFLGYKKGEDGNLVIDEEQAVIVRRIYREFLSGSSSVAIAKGLTNDGIETPGHKQKWYATTVRSILTNEKYKGDALLQKHYTVDFLTKKQKINNGEVQQYYVENNHPAIIEPDVFEMVRLEIDRRLMLKGKYSGTDILTAKLRCGECGGSYGAKVWHSNDKYRRIMYQCNMKYYGKENCKTPAIRAEDVENKFVDAVNKLIKNKDEIISNLEMVLDTICNKKELSEEKEKLERSLTEQVEKIQDLIEINSRVAQNQEKYKKEYDALIKEYEETKKEYGQLEIESSRKAARHQTIKDYINILKKQDKPLDKFDGLMWGSLLENATIKDKDSIVFKFKDGTEIEV

SEQ ID NO: 12945 - protein, 453 aa, synthetic construct
MRTITKLETKNIELPKLKRVAAYARVSVERGRTLNSYSAQVSYYNDLIQKNPEWEFAGVYADLGISGTGIEKRNDFKRLLQDCEEGKIDIILTKSVSRFARNTVDLLKVVRHLKELGIEVRFEKENINSLTGDGELMLSILASFAQEEVISTSNNIKWSIRKKFESGRPQCRYKIYGYRWDGDTLVIEPEEAKIVKLIFEMYLNKVSAERMEIILKDMGVIATNGGYFNIGTIRDMLKNITYTGNLLLQKCYTPNPLVRRKKANNGQLPKYYVENNHEPIIPLEMFMQVQEERERRKAEGQRANFGKNITCFSCRVKCPICGKNYMRNSSSRRSNGTKAHIWTCGTRLTGGSKACNGKNINEIALKRVSAKVLGLDEFDSNAFDEQIEKVIVIGDDILEFHFNDGRIISEKWEFNGRKEYWTEERRKERGERLKKIWREKNDKKSNNNTSVIK

SEQ ID NO: 12946 - protein, 454 aa, synthetic construct
MRKITKIETTKVELPTKKRVAAYARVSVERDRSVHSFSAQISFYNNLIQKNPEWEFAGVYADLGISGTGTKKRNDFNRLIEDCENGKIDIILTKSISRFARNTVDLLETVRHLKELGIEVRFEKENINSLSGDGELMLSILASFAQEESMSISKNVKWGIRKKFEKGKPNGGLNIYGYRWINKQLVIEPDEAKVVKLIYDNYQKGISPETTGKYLTEKGIKAYNGGNFAPSSLRAILTNITYTGDLLLQKDYCPDPIKKGRKRNRGELPQYYVENDHEAIIPMKQFVEIQEEIKRRRELGIRANAAVNTTCFTSKVKCPLCGKSYRRSGKRQSKKKDEICYSWICQTKSKLSSKVCDAKTIPEYELKFASKEVLGLDEFDSDTFDKEIEKVIVIGNDMLEYHFYDGKVVLKEWHSHARTRCWDSKRREEWGEEIKRRWKDGEYDKERKNNTCNS

SEQ ID NO: 12947 - protein, 525 aa, synthetic construct
MTKNVRTIPATVNLFNNNPINGVKKRKVAAYARVSTDSEEQLTSYEAQVDYYTNHIKSRDDWEFVAVYTDEGISGTSTKHREGFKSMIDNAMAGNIDLIITKSVSRFARNTVDSLTTIRKLKDIGCECYFEKENIWTFDGKGELLLTIMSSLAQEESRSISENVKWGHRKRFADGKVSVPFNNFLGYKKGEDGNLVIDEEQAMIVKRIYREFLSGSSSVAIAKGLTNDGIETPGHKQKWYATTVRSILTNEKYKGDALLQKHYTVDFLTKKQKINNGEVQQYYVENNHPAIIEPDVFEMVRLEIDRRLMLKGKYSGTDILTAKIRCGECGGSYGAKVWHSNDKYRRVMYQCNSKYSGKEKCKTPAIRSEDIESRFVNVVNILIESKDEIISNLEKVLDKICNKKELLEEKEKLENSLTEQVEKIQDLIDINSRVAQNQEKYKKEYDALIKNYDETKCKFEQLEIKLSQQAAKHQMIKDYINTLKKQEKLLTKFDGLVWGSLLESATIKDKDVIVFRFKDGTEING

SEQ ID NO: 12948 - protein, 504 aa, synthetic construct
MRAATYRRVSSEEQALHGFSLEAQKEACWNKAKEIGATSILEFADEGETGKILDRPGLEALRQAVEDGLIDCVVILDPDRFSRKLSHQLLLTEEFEKAGVELVFVNFEWEDSPEGRLFYSIRGAVSEYEREKITERMKRGQIQKAKQGRPPIGVYHYGYDYDPATETISINDKEAKVVRYIYKSLIQGMTPAAIAISLTESGTPTKTGKSFWHRQVVRQILMNPSYKGEWNYKDYIIPMPVIIEPELWEQAQKILEESLRTWSHKAKRQYLLSGLLTCGDCGQTMGGIYAKNWGRYYRGYTCRKSASTNRFPGCYPQKIINAESLETIVWEKFKNLFINPDTLLDEVRKNLPKQSEIEDELTSIKQQLKDTEKGRETLIEAMSLGILELDDKTKRKLLDIKNRKEKLIQKQKNLQNSLLAFQHSTNNYTELYNAIAGVIDNIDDLEFEQKRELLRSAISQIEITGRVNPSNTTPGVLPGVDISISVRVDDILGFESDTNEIQKS

SEQ ID NO: 12949 - protein, 529 aa, synthetic construct
MGINEGKKVKTIPATLTRFTASPITEQKKRRVAGYARVSTDHDDQFTSYEAQIDYYTNYIRSRDDWEFVDVYTDEGITGTSTKRREGFKRMVADALAGRIDLIVTKSVSRFARNTVDSLTTIRKLKEKGVECYFEKENIWTFDGKGELLITIMSSLAQEESRSISENCTWGQRKRFADGKVTIPFNRFLGYDRGANGELVVNPEQAKVVRSIYDMFLQGTTYHGIAQKLTDDGIKTPGGKDKWSISTVKSILSNEKYKGDALLQKCFTVDYLTKKQKKNEGEIPQYYVEGNHEAIIPPEKFDMVQREMAKRGKGKKYHSGVHPFSSKIRCGQCGSWYGSKVWHSTDKYRRTIWQCNHKYDGGKHCCTPHLTDEQIQDAFLSAANQLLATKDAVIANGREMMALLFDTTEQEAERDKLLEEAQVVSDAVQQNIYENAHVALDQKAYQKKYDDLTTRYESLKTRIEDLNEQINQTQSQKGSVEDFLAAFEKLPETLTAFSLDAFNALTDYLTVNGEGDISVTFRNGQTIKA

SEQ ID NO: 12950 - protein, 596 aa, synthetic construct
MAKITKIEPQIPALPTRKKVAAYARVSMETERLHHSLSSQVSYYSELIQKNPEWEYVGVYADEAITGTIAKKRDEFKRLIADCDAGKIDIVLCKSISRFARNTVDLLETVRHLKELGISVRFEKENIDSLSGDGEVMLTLLASFAQSESESISNNVKWGVRKRMERGIPNGHFRIFGYRWEGDQLVIVPEEAAIVKRIYQNFLDGKSRLETEREFAAEGITTREGCRWVDSNIKVVLSNITYTGNMLLQKEYIADPISKKRKKNHGELKQYYVEDTHEPIIDMETFQYVQSEMARRKELGALANKSLNITCFTSKIKCEKCGKSYVRNTRKNRAKVSQLGDQLVGWVCGSSKTKNGKCKAMEIPEYILRQKCAEALGLEEFDEDAFAEQVEVITVPEQGILNFHMADGTEKTLTWVSTAKKDAWTPEARKKASSYRRNHAMKRDDVTCFTSKIKCADCGNNYRRQTRTKASGEKYHLFVCATTNTCSNNCIHEDTLRELTAQALGQQELDEAVFLKEIDHITIAPGGHITFCFYDGHEVSMEYSIKRRMPAWTEERKKKQGEAIKASFTEERRQKMSETMKKIRSEKYWASTKAKR

SEQ ID NO: 12951 - protein, 530 aa, synthetic construct
MSGAKTARKVTTIPATISRFTAAPINEQRKRRTAGYARVSTDSEEQFTSYEAQVDYYTKYIKSRDDWEFVDVYTDEGISATNTKHREGFKQMIADALAGKIDLIVTKSVSRFARNTVDSLTTVRQLKEKGIEIYFEKENIWTLDSKGELLITIMSSLAQEESRSISENVTWGQRKRFSDGKVTVPFGHFLGYDRGEDGNLVLNEKEAVIVRRIFALFLEGYSPYKIAKTLTADGILSPGKKPKWNAATVRRMLQNEKYKGDALLQKSYTIDFLTKKKKLNEGEIPQYYVKNNHEAIIDPAVFDIVQIELENRSPGPNRRSGVSIFSSRIKCGQCGSWYGSKVWHSTSKYRRTIYQCNRKYDSDNQCRTPHLDEERIKKLFISAVNKLLSERDEILGNFELIKATVFDTTDLEKEQAELQNELEVVAGMIQQAIGENAHFALDQGEYQERYNGLVDRFDLAKARHTAVTEEITGKQTRLSTINAFLYTLRKQNNLLTEFDEKLWCSLVDYATVYDKDDVRFTFKDGKEIQA

SEQ ID NO: 12952 - protein, 574 aa, synthetic construct
MRKVSKLEAKPPQLPERKKVAAYARVSEEKGRTLHSLSAQISFYSSYIQKHREWQYAGVYADEGISGTTDNRAEFRRMLENCEQGKIDIILTKSISRFARNTVDLLETVRHLKELGIEVRFEKEGINSLSEDGELMLTLLASFAQEESRSTSENVKWAIRKGFEQGKTNSFCIYGYRWDGEQFNIVPEEAEVIRLIYDNFLKGLSAEQTEMQLKEMGIKSYTGGHFSNTSIRAILRQERYTGNMLLQKTYIENHITHKSKINRGELPMYYAENTHPAIIDLEIFEKVQAEIARRKELGVFANWSINTTCFTSKVKCGNCGVSYRRSGKRQRKKSSQVYYIWTCQTKDRKGVSACGAKNIPERILQKVCAQVLGLEEFDEDVFLDRIEKIVVNGKDELIFHFYDGKVITQHWESTARKDWWTPEARAAKSAYSKKHPRSSGTITCFTSKISCGKCGQNLRRNTSTRVSGEKARHWRCPPRTDCGHNGLEENLLKTISADALGINEFDEAAFTDKVERITVVSNEVLIFRLKDGSDVTRQWHFKRRQPAWSEERKQRQSKKMIQVWRDKHERRENS

SEQ ID NO: 12953 - protein, 520 aa, synthetic construct
MKKITKIGVNETLTQKKKLKVAAYCRVSTASDEQLISLEAQKAHYENYIRSNDKWEYVGLYYDEGITGTKKDVRAGLLSMIADCEDGKIEFIITKSISRFARNTTDCLEMVRKLTDLGISIFFEKENINTGSMESELMLSILSSLAESESVSISENSKWSVQKRFQNGTFIIAYPPYGYENDNGTMVIVPEQAEVVKEIFAACLAGKSTHAIAKELNVRGVKTKKSGKWGAGAVNGILTNEKYTGDVIFQKTYSDSSFNRHANHGERDRFLCQNHHEPIISHEDFDKVRAVLDQRAMEKGNGIDTYRYQNRYCFSGKIKCGECGATFKRRQHYKPSGNYVAWTCKTHLEDKTECSMLYISDEGIKLAFLTMMNKLVYGHGTILKPLLRTLRGTDDKDRLLRIQELELRIEGNTDRKQILTNLMATGVLEPAVFNKENNAILAEEQRLRAEKDKLVSFVGGYKVRMKELQKLMAFTSKGEMLIAFSDETFLAFVDSITVESRKKIIFHLKCGLNLAERLVM

SEQ ID NO: 12954 - protein, 523 aa, synthetic construct
MEATKNITVIPARRRVGNTVNKEVKPKLKVAAYCRVSTDSDEQATSYEAQVEHYTDFIKKNPEWEFAGIFADDGISGTNTKKREEFNRMIDEAMAGKIDMIVTKSISRFARNTLDCLKYIRQLKEKNIPVYFEKENINTMDAKGEVLLTIMASLAQQESQSLSQNVKLGFQYRYQQGQITVNHNRFLGYTKDEKGQLIIDPDEAVVVRRIYREYLEGASLQQICRGLEADGILTGAGKKKWRPESVKKILQNEKYIGDALLQKTYTVDFLEKKRVPNNGIVPQYYVENSHEAIIPRDLYMQVQEEMIRRANLHSGQERKKRVYSSKYALSSIVYCSKCGDIYRRIAWNNRGKHSIVWRCCTRVEHGPGACAADTIQESELQNLVVRAINMALCKKDTMSENLQKNVEAVLTGADGIPLDEIDSRLEQLQKELLKVANAKGNYDSIADEIYHLREVKQNALVDNAEREGVKQRISEMQQFLAEQTQNITEYDEQLVRRLIEKITVYEEKVTVEFKSGTSVDVRR

SEQ ID NO: 12955 - protein, 519 aa, synthetic construct
MKKIFKVDNIAATSKRKLRVAAYARVSTDSDEQLVSLKAQKEHYESCIKLNPEWEFAGLYYDEGLSGTKKDNRTGLLDMIADAEQGKIDFILTKSISRFARNTTDCLEMVRRLIDVGVFIQFEKENINTGSMESELMLSILSSLAESESVSISQNSKWAIQKRFINGTFIISYPPYGYTNTDGKMEVVPEEAEIVRNIFRECINGKGAFLIAKELNERGIPSKRGTKWHPSTVQGVLKNEKYTGDVIFQKTYTDSKFNRHINYGEENQYLFENHHEAIINHDDFEKAQSIMEQRGKEKGVLKKEGKYQKRYVFSGKITCGECGSRFKRRIHYSGKNEYIAWCCTKHIDHTVKCSMKFIRDEDIKTAFVTMLNKLIFSCDMLLKPFMQGLRNIDEKAYLKKITEIEERIEKNENQRNVLMELMSKGLLNPGLFTKQNTELLSEFARLATEKKHIFYAVSGNASKIDETQRLIRFCSRNRMALKFNDNVFEDFVDEIVVNSREEIVFKLKCGLSLKERLVE

SEQ ID NO: 12956 - protein, 464 aa, synthetic construct
MNNRRNATAEPMAAPLRCAIYTRKSTDEGLDQEFNSLDAQRESAESFIASQRPNGWIPVEDRYDDGGFSGGTLERPALQRLIQDIEAGKVQCVVVYKIDRLSRSLLDFTRLVDLFDRHGVSFVSVTQQFNTTTSMGRLTLNILLSFAQFEREIIGERIRDKVAAAKRKGKYMGGPPVLGYDPDAGTRRLLVNSEEASLVRHIFSRFVELGSTLKLAHELNQQGRRTKSWTTRGGRKHEGGRWDKASLARLLRNHLYIGEVAYKGEIYVGEHEAIVSRTAWDKAQATLDRNDRTNGNRNRKRHDSLLRGVLRCGHCNCGMTHSYARKKGAMYRYYVCANAMKHGYASCPMKSIPAGEVERMVIDRLRQVLRSPALIAQTYREAEAASPGDAPTFTERDVVLALERLDELWDNLFPGEQARIAQLLIQCVVATRDSLNIELRAHGMLDLTVEMNAVEEDGNDGKTD

SEQ ID NO: 12957 - protein, 562 aa, synthetic construct
MSQPRLRAAIYARYSTDLQRDASVEDQIRDCTDYAKAQGLEVVATYSDRAISGASLMRSGMQALLRDARGGTFDVVISEALDRLSRNQADIAHIYQEFCFNGLPIETVADGLISEIHIGLKGTMNALQLKDIAMKTHRGLKGRALEGKSAGGKAYGYRMKPQLTSCGEVIRGEREINPEEAKIVRRIFQDYASGLSPKKIAEALNKERVPAPSGRHWGASTIHGNRQRGTGILNNELYIGRQVWNRLRYVKDPQTGKRISRLNPESEWTVTNVPQLRIVEQDLWDAVRARQGELKTTGTNVPVWDRRRPKTLFSGLMACGCCGGGFAKISKDSFGCSPARNKGTAVCSNKRTIKQADLEARVLYALANHLMDPDAVQVFCEEYTAERNRLKAAAAGNRKEKEQALARAKRDHQKLVDAIIAGIPADQVKDRMIELDARRQQLERELEQTPAPDTVVFHPSMAEAYRERVRRLIKGLGSAAGMEEAKEALRSLVERIVLTPAAEGSGLDLTLEGDLAGLLRLAAGAQGPDTKKAPGGAPEAFDMSCELVLVAGAGFEPATFRL

SEQ ID NO: 12958 - protein, 567 aa, synthetic construct
MNATPGLRAAIYARYSTDKQKDTSVEDQIRLCRRLCEQKGWLVTEVFTDHALSGKNALRPGYQRLIQAAERGGIDVIAAESQNRLSRDMADSATLLKRMNFFGVKIHTASENELDDMKVGVGGLVSTMFLKDLAQKTRRGLEGGVTKGKSAGGISYGYRVKREILPDGTLSTGDREIEQDEAAVIKRIFRDYADGLSARTIAAALNAEGVTAPQSGKGTGTWNPSTISGNIKRGTGILNNELYIGRLVWNRLTYDTNPDSGKRLSRLNPPEDWITEDVPGLRILDDQLWQAVKTRQGEVRQAMNPAGVLTERPKLERARRPAYLLSGLLRCACCRASYTLINKTRYGCAGARNKGAAVCTNRATIGRAEVEERVLSGLKQRLLAPDLLAQFAEEYRKAFNDAAAGACQDRQKAEHALKKVESRIANILTAIEDGMYTASMKDKMSELEGEKARLAAVIADNPEPPALRLHPSLSARYRELIEDLAVSLNAPEVRREATASLRALISEVRMVPDGAAPGGHQLELVGELAGLMALGSPESKKPPLFAGAWSETMVAGAGFGHCFIQAR

SEQ ID NO: 12959 - protein, 575 aa, synthetic construct
MIIMFLDNEFKIDSAVHIYARVSSEDQQERETIENQIDFAKKYCDLHKLDIVDIYKDDGISGKIPLENRPEGQRLVKDASDGKVKVVLIYNIKRLGRSARDILNSVYQLEQYGVKIRSMTEPFDTGNPHGRFILTVLAGVAELDRETTLETMWLGANRAARKGKWLGGIVPYGYFVNSEGYIEPCEDPLPGKEEMTEAGVIRLMYELVANQKWSATKVANYFNSLGIPPAYVKDGRTVKRGKRKVRTAGIWTASRIYNMLVNTTYKGIHVYGKRTKKDRELINRTVPAIVSEEEWERAQQVLRENRIEAACRVHHPYLLRGLIKCGICGLTYHGTAYAGPKRKLKPYYVCGGKVVHRGPFLGRCPSRNVPAEWLEQIVWNECVSFIQNPGEMINELAGSMNDQKARRNSLEEEIKLIKQELERKDLERHDIITLFRKRIITASDVEKQLQVMMNERASLQKRLRQLEEQLSNESNLIQHYTHAQKLLNDLREKIKGDIPFELKKEIVKTLVKVIIVKNAVPTDPEDKIKRKPPVVVEVHYGFTNAKELSLTDKGSSSPPTGSGRGNGIPFLPGQW

SEQ ID NO: 12960 - protein, 506 aa, synthetic construct
MTNNKDLQTGVIYARYSSDKQRDESIEGQIRECTEYAQREGILITKIYTDRALSARTDNRPEFLQMIRDSANQSFSYVIVYQLDRFSRSREDSAKYKGILRRNGVRVLSAKEHITNEPAGIILESMLEGMAEYYSVELSQKVKRGMTENALKGKMNGAAIPLGYDLTESHHLAVNAHEAKAVRLIYDLYLKQHSMAKISNILHGKGYTTKRGRKISPSVIKNILSNEKYIGVYSWGDIRIEDSIPPIISRKIFDEVQKIMPNRIRNKGRRSEMYSLCGKLICGECGGHYVGSTATSRNGEKHHYYVCTNRRKYHTCTAPNIRRDELEDLVINRTLEILNQPSNIARIVDLVISGYSNATQEAKTAIQGINNKIKAIDTELDNCMSAIKQGFITERLKGEIENLESERNNLLEQKANHESAITPIKFTADHIEYFLERMAKEDPTTKTGRSRILDTFIKSVAIYNDRVEIIFNYKNELPEFSSQCESGSHFKVLVGPPGIEPGTDRL

SEQ ID NO: 12961 - protein, 479 aa, synthetic construct
MNKVAIYVRVSTKGQAEEGYSIDEQIALLTSYCSIHKWKIHDTYVDAGISGATIERPELSRLSRDAQKKKFNTMIVYDLKRLGRSQRNNISFIEDVLEKNGIGFISLTENFDTSTPLGKAMVGILSAFGQLDRDTIRERMMMGKIGRAKSGKPMMTSTIAFGYTYDKITSSLNINPAEAIIVKTIYKEYLSGRSLTKLRDYLNENDLLRNGKPWNYQGVSRILRNPVYMGMVRFRGEVYQGNHDPIIDSETFEAAQKELKKRQLETYEFNKNTRPFRAKYMLSGIIKCGYCGSPMGVTLGTKRKDGTRNIRYQCVNRFPRTTKGITVYNNGQKCNSGFYEKDDIEIYVLGQVRLLQLNKAKLNKMFETPEIINVEEIENQINSLNNKMKRLNDLYLNDMISLDELKTQTYTFLKQKDLLENELNNNPAIHQEENRKQFQKLLGTKDITQLSYEEQSFAIKNLIDKVFVKPGIIDINWRI

SEQ ID NO: 12962 - protein, 447 aa, synthetic construct
MSKSKRAALYIRVSTEEQARHGYSLAEQEHDLRQYAEQHGYSVVGLYTDEGTTARKALSRRKGLQRLLEDVQEDAIDIILFKCLDRWFRNIADYYKVQEILDQHNVLWECTQEDFNTTTTNGRLMLNLKLSLAQHESDQTSDRIKYVFEGHLRDGRVITGRLPVGYLVGDDKRIHIDESTAEMARDMFRYFLIHRTVLSTRRMLQEKYGWRRTSNTIVRALKNKIYIGEYYGIKNFCPALIDEGTFKRAQKIFEGRTRYHRSNNIYLFVGLLRCPSCGRVLSATGYTYKDKVSIYYRCHAHHTLDCPFNRHLPEIRLEAALLDSVENALQKFSVDISRTLREEGPTDAKATVESLRAKQSRLKELYIEGMLSRDVFDQRHNDLDIQITALRPKPETRHLFLGTIDAKKFRERYDALDKTARKEFWSRTLEVVHIAEDGTLTPVFSAL

SEQ ID NO: 12963 - protein, 532 aa, synthetic construct
MNFTNQIQEAAIYCRVSTDDQAERGTIESQIEYAKKYCDLNNIHIVKIYRDDGITGTLPLEERPAGAGLLADAKEGVFSTLLVFKLDRLGRVTRIIINAIYELEQYGVKLKSMTEPFDTSDPSGRFLLTILAGVADLERSNILQRMQLGANRAAAAGKWLGGIVPYGYIVNDDRFLEVNETEIPGTGMSEADVIRLIFHLIAEEKMSSIAVAHRLNSLGIPPSYVLRGIKGKRHNHTRGIWFSGRVLCIAKNTTYYGVHRYGKRSLHGRELIEREVPAIVSKEIWDEAQEVMHNNQLTAMRNAKTKYLLRGLIKCAACGSTYVGVNDKGTRYYTCNGKRMHKKLGREKCTALAVNMDWVESEVWEDCMQYINNPNMVVEAIAANRGKATESAKQIHLLEMQLAECENERERVMDVYRAKLITFEEVEKQLRKVADKKSTVQFELSALKSRGEASATFDQQETALEILNEIKKKLTDSSTVSLDLKFEIFHTLIKKITAISTEDGLTLKVHYVFGESPVSVNRTVTDSLPLPK

SEQ ID NO: 12964 - protein, 520 aa, synthetic construct
MKKITKIGADTNKGTKKKIRVAAYCRVSTDSDEQLISLDAQKAHYESYIRLNDEWEFAGLYYDEGISGTKKELRNGLQSMLSDCEDGLIDLIVTKSISRFARNTTDCLEMVRRLTELGITIIFEKENINTSSMESELMLSILVSLAESESVSISENSKWSVRKRYEKGTFKIVYPPYGYKNVDGEMVIAPEQAEIVKEIFALCLAGQGAHTIAKMLNERGVETKKGGRWTGTTINGILKNEKYTGDVIFQKTYTDSSFHRHVNYGERDRFHCENHHEPIISHEDFENVRMVLEQRGKEKGNGSNTSRYQNRYSMSGKIKCGCCGDKFKRRTHYKPSGNYIAWSCSTHLENRKVCSMLYVEDTAIKVAFITMVNKLVFGHKDILKPLMRSLRGMDDKERLLQIDALERQIEENADKKQTVASLVAQGLLDAPIYNTEIYKLMAEEQELKENKDQLVNDIGGDKIKVRELQTLMEFTSKGRMITEFEDNLFDAIVDEIVVISREQISFHLKCGLNLKERLVM

SEQ ID NO: 12965 - protein, 521 aa, synthetic construct
MGKTITMIPAKRRVGNTVKEEERPKLRVAAYCRVSTDSDEQATSYDAQVEHYTDYIQKNPEWEFAGIFSDDGISGTYTKKRDGFNHMIDECMDGKIDMIITKSISRFARNTLDCLKFIRQLKEKNIPVYFEKENINTMDAKGEVLLTIMASLAQQESQSLSQNVKLGIQYRYQQGLVQVNHNRFIGYTKDDDGQLIIEPEGAKVVKRIYREYLEGASLLEIGRGLEEDGILTGAGKEKWRPETIYKILHNEKYIGDALLQKTYTVDFLNKTRVKNKGIVPQYYVENNHEAIIPRDIFMRVQEEMMRRANLHSGKSRKKRVYSSKYALSSIVYCSKCGEIYRRMQWQAHGKKYIVWRCCTRVENGPRVCDAEAIREVDLQSIVVKAINKALGKRDSMKATLAANIETVITDVGGVSIAEIDTRLEQLQNELLKVAGTKENYDEIADEIYSLREQKQKAMLDSAERQELKLRINEMSKFLDEQTEEIKDYDEQLTRRLIEKITVFDSHFTVEFKSGTSVDIYK

SEQ ID NO: 12966 - protein, 496 aa, synthetic construct
MIGVIYARYSEGPRQTDQSIEGQVADCTAYAERSGIKVIEIYADRHHTGKDFEGRAELKRMLLDADRRRFDAVIVWKIDRLGRDRYELAVTKQRLRKAGVKLLYAEESVPDGPEGIILESVLEGLAEYYSADLRQKVMRGMKESVKKGRYCGAVPPLGYKVDEEQHLHPDPEIAPSIRQAFEMHVAGCTYAQIIEMFEKAGIKARSGRKLSTSTIYRLLRNERYTGHFERLGVALEADPIITPELFTEAQKHFKTSRNNAASTAKVDYLLSCKCFCGYCGRLLNGETGTGKSGRLYHYYKCGGRKRSSKCELKPVRQAVLEETVIRATVEQMLTPEMIGKLTKKVMEVQDQDDELQQVKLLEKQIEKNRQKQERILDAIEETGAKGLAGRLAKLEEEEEALQYDLERAKIKKPRLTEEAVRQWLMSFCDGDVSDPEFRRRLVDTFVARIDVKNGAAVITYNTSDCGPAGCSSTTREVDLTGVEPVSENKFPFLLLS

SEQ ID NO: 12967 - protein, 435 aa, synthetic construct
MAAYCRVSTDQDEQLSSYENQVRYYKEYIRQNPLYELVDIYADEGISGTNTKKRTEFNRLIADCRKGKVDRIIVKSISRFSRNTLDCLKYVRELKELGIGVTFEKENIDSLDAKGEVLLTILSSLAQDESRSISENATWGIRKKFERGEIRVNTTKFVGYDKGENGNLVINEEQAKIVRRIFRDFLQGETPESIARSLKEEGVPGWNGKVNWYPTTIQRMLQNEKYMGDALLQKTYTVDFLTKKRSENQGQVNQYYIEGNHEAIINKEEWELVQLEVERRNQFRQDNHINFYIIQCEQNPFTCKVFCKECGGLFGRKNWTTSRGKRPVWQCNNRYKVKGIQGCTNRHIDEETLQQAFLRALEILRENKEKLQEKWANFSEEQKLEKYHVTHMKELLDSKQEAFNGRKMCQVLEKISLGEDCSITVKFLEGTEVNL

SEQ ID NO: 12968 - protein, 407 aa, synthetic construct
MKPEKIRVCAYARVSTMTEKQQDSLTNQQSYYNHFYQNKKDVEFIGVYYDQGISGKLAKRPGFQQMLEDCRAGKIDVIHTKSISRFARNTELLLAVSRELKTIQVDIFFEEQNLHTLSNEGEVMLTVLASYAEEELRNMSENQRWAFQKKFQRGELMINTKRFLGYDKDENGELIINLEEAKIVKRIYNLYLSGMGVHVIAKLFNGEKLSTVDGGKWYSSTITNILKNEKYKGDAILQKYYFAEIKAKQRLNKGQVQQYLITDNHEAIVSREDWEAVQKRLKQNRKANLSIDYNRRYPLSGLLKCEHCGSTLKRQKYYKGKVVWVCSKYIREGKASCIGMRVPDSAVQDWSIHEPTVVKEENIGGKKYYSYSSKENDTSRAEAAHSENPDGGLLPSVHRPRRTAIKL

SEQ ID NO: 12969 - protein, 481 aa, synthetic construct
MITTNKVAIYVRVSTTKQEEEGYSIDEQKAKLSSYCSIKDWSVYKIYTDGGFSGSNTERPALERLIKDAKERKFDTVLVYKLDRLSRSQKDTLYLIEEVFIKNDIEFLSLQENFDTSTPFGKAMIGLLAVFAQLEREQIKERMQLGKLGRAKSGKSMMWAKTSYGYDYHRETGTMTINELEAVAIRDIFESYLAGMSITKLRDKLNEKYPKTPAWHYRIVRGILANPVYCGYNQYKGHVFPGNHEPIITEEDFNKTQEELKIRQIAAYQLSNNSRPFRAKYMLSGIAQCGYCGAPLQITLGVKRKDGSRNIRYQCKNRFPRTTKGVTVYNNNQKCDSGFYDKSDIERYVLKEISKLQHDDEYIEELFAEQEFSIDRAAYQKQIDVLSNKISKLNDLYIDDRITLDELQIKAAEFSSQRAVLEEELGNDPAIKRQKRKEDMKQILNTDDILTMDYDHQKFIVRSLINKVQVTAEDIVIKWKI

SEQ ID NO: 12970 - protein, 505 aa, synthetic construct
MNTIDLQTGVIYARYSSDKQRDESIEGQIRECTEYAQREGILITKIYTDRALSARTDNRPEFLQMIRDSNNQAFSYVIVYQLDRFSRSREDSAKYKGILRRNGVRVLSAKEHITNEPAGIILESMLEGMAEYYSVELSQKVRRGMTENALKGKMNGSAIPLGYDLTESHHLAVNAHEAKAVRLIYDLYLKQYSLSKIADIVHGKGYTTKRGGKISYSVIRNILSNEKYIGVYQWGDIRIEDSIPPIIPREIFDEVQRVLPTRIKNKGRRSEMYNLCGRLICGECGGHYMGSTATSRNGEKHHYYVCTNRRKHHTCNAPNIRRDELEDLVINRTLEILKQPQIIARIVDLVMSGYNNTTKEAKTAIQGIQGKIKAIDAELDNCMAAIKQGFINERLKSEIETLEKERQDLLEQKANHESVISPIKFTAEHIEYFLERMANENPTTKAGRSRILDTFIKSVTIHSDRVEIVFNYKNEMPEFGVQSASGSHFSVLVGPPGIEPGTDRL

SEQ ID NO: 12971 - protein, 505 aa, synthetic construct
MNSMELSKGVIYARYSSDKQRDESIEGQIRECTEYAQREGILITKIYTDRALSARTDNRPEFLQMIRDSANQSFNYVIVYQLDRFSRSREDSAKYKGILRRNGVRVLSAKEHITNEPAGIILESMLEGMAEYYSVELSQKVKRGMTENALKGKMNGSAIPLGYDLTESHHLAVNAHEAKAVRLIYSLYLKHYSLTKIANILHSKGYTTKRGGKISYSVVRSILSNEKYIGVYQWGDIRIEDSIPPIISRTIFNEVQRMLPTRIKNKGRRSEMYNLCGRLICGECGGHYMGSTATSRNGEKHHYYVCTNRRKYHTCNAPNIRRDELEDLVINRTLEILRQPQIIARIVDLVMSGYNNTTQEAKTAIQVIQGKIKAIDTELDNCMTAIKQGFINDHLKAEIESLEKERQDLLEQKANHESVISPIKFTAEHIEYFLERMANENPSTKAGRSRILDTFIKSVTIHSDRVEIVFNYKNELPEFSAQSASGSHFSVLVGPPGIEPGTDRL

SEQ ID NO: 12972 - protein, 429 aa, synthetic construct
MSTDQDEQLSSYENQVNYYREFILKHEDYELVDIYADEGISATNTKKRDAFNRLIQDCRDGKVDRILVKSISRFARNTLDCIKYVRELKELGIGVTFEKENIDSLDSKGEVLLTILSSLAQDESRSISENSTWGIRKKFERGVVQVNTTNFMGYDKDEKGNLIINHEQAKVVRYIFDRFLEGYSPEFISKELREQEIPGCTGKARWCPSAIWKMLQNEKYKGDALLQKTYTVDFLTKKRIDNDGQVNQYYIENNHEPIIDKEEWDIVQLEVERRNQFRQDNHINFYIIQCEQNPFTCKVFCKECGGLFGRKNWTTSRGKRPVWQCNNRYKVKGVQGCTNRHIDEETLQQAFLRAIEFLQENKEKLCEKWSNFSDEQKLQKYHATQLYELLDSVQEEFNGRKMCQVLEKITLGEDGCITIKFLEGTKVNL

SEQ ID NO: 12973 - protein, 413 aa, synthetic construct
MNIRKIEAKNNNRKKRICAYVRVSTTNGSQLHSLENQKVYFEKLYAEREDVEFLGVFCDKGISGSKYDRPDFQTMLDACRKGQIDVIHTKSISRFARDLINVLEISRELKTLGIDIFFEEQNIHTLSNEGEVVLTVLASLAEEELQSMSGNQRWSFRRKFQKGELLINAKRFLGYDLNEKGELVINKAEAQIVRTIFYSYLEGMGTHRIAKKLNEGKVPTVTGKKWYDSTIRNILKNEKYKGSLLLQKYFNDGVNGPKKLNQGQVEQYYIEDNHEGIVSKEIWEKVQVKMKSRSRIQGTNKTYKFSRMLKCQYCGSTLKRQVSYKKKIVWCCSKYIKEGKNSCKGMRVPERDIEDWKLSSPVIVLERIEDGEKHYGYTGQKTSANSHISNSEKGQGSRLLSSVYRPRRTAIKL

SEQ ID NO: 12974 - protein, 450 aa, synthetic construct
MATNDQKRAALYIRVSTDEQARHGYSLTEQEYDLKQYAERQGYKAIGVYADEGVSARKALSRRKGLQRLLEDVEADHIDIIIFKCLDRWFRNIADYYKVQEILDAHHVEWECSQESMFNTTTTNGRLMLNLKLSIAQHESDQTGDRVKYIQEGLKRAGKVITGHMPLGYRIGEDKRIALDEDTVPIVREAFDHFIVHKTVLGTFRMMRAKYGYAKTEGAVGRMLQNRIYLGEYYGIKDFCPALIDAGVFAQAQKVFAGRTRHHSSGMIYLFGGLIRCPDCGRFLTPRNRTLNNKICTYYTCRDHTHGRECPHKTYWREDKVEIDLLTSLGEELEKYLADIKKVTRKSDNTKSGETVAELRAKQSRLKELYIAGLIDRSEFDVRHADLDAQIAALRPRPDVSIAYLETVAASDFAERYLKLDKKARKIFWSRILDQVQLTTGAPRPVFRAF

SEQ ID NO: 12975 - protein, 481 aa, synthetic construct
MNEINKVALYVRVSTTSQMEEGYSIEEQKAKLESYCDIKDWHVYKIYTDGGFSGSTTERPALEQLIKDAQSKLFDTVLVYKLDRLSRSQKDTLYLIEDIFLKNNIEFVSLLENFDTSTPFGRAVIGLLSVFAQLEREQIKERMQLGKLGRAKAGKSMMWAKTSYGYDYNKDTGTMTVNEYEALAVKEIYASYLAGMSITKLRDKINEEYPKQPAWSYRTIRGILDNPVYCGLNQYKGQTFQGTHKAIISLDDFEQTQRELAKRQQTAKELSNPRPFQAKYMLSGLAQCGYCHAPLKVILGQKRKDGTRFKRYECYQRHPRKTRGVTVYNDNKKCESGYYDMELLEHYVLTRIAQLQNDPDKIQELFSDDTSPAVDKQAIQKQIDSLTLKLSKLNDLYLDDRITLDELRAKSSDFIKQRNALEEEMKKALTDKQAGQRKKIEKLLDASSVLEMSYDNQKVIVRELIDKVQVTSDKIVIRWKI

SEQ ID NO: 12976 - protein, 463 aa, synthetic construct
MSYFNFNPDLVGVRVVKYIRCSHEGQVLHGDTLEAQNLILDEFIATNKMVLVDTFIDEAMTARKKYTKRKEFVRLLDGVRSHNFDLIIFTKLDRWFRNIGDYHKIQEILDANHVQWKAVTENYDTTTTNGRLHINIRLSVAQDECDRDSDRIKDVFAYKLKNKTFISGALPRGLMLDAEKHVIPDPEYSEYVTDLFEHFESCGSIRNTLLFLQDKYGFSISYKSISNALRNPLFKGQYRDDPDFCTQIIEPERFDHIQLLLSRNVRIRRNRQTYVFSGLLTCAECNHALVGYSAYYTTKEGEERATKTYRCNHYISTRTCTHKNQMSQKKLEKYLTENIQLAFSDYIASFNVVSSAAKKKDTAAEIARIERKQKKLYNLYMDDLIDAATYKEEYNSFKKQLEELRSIPFSPAVDTRKKTEELLSGDWISVYSSFTDLEKNAFWKSFIDKIVIDVNGNIDIIFL

SEQ ID NO: 12977 - protein, 515 aa, synthetic construct
MSYLIYLRKSRKDLENPLMTTEEILNRHECILLDLAKKMNLSIGDIYREIVSGDSIAARPVMQKLLREVESGMWEGVLVVEVERLARGDTVDQGIVQRTFQYSETLIITPQKTYNPSSESDQTFFEFGLFMSRQEYKTIKRRLKSGVMSAVREGKWPYNSAPYGYRRYKLENQKGWSLEFDDQERPIAELIYHLFCDEKRGLGYISDYLEARNIKSRTGGRFTESFLREFLRNPVNDGKVFYGRRKVVTKIVNGSSVRTRPRADEYIEVAGLHDPLIPHDLFLKAQERFRVSTPRNPSSYTVKNPLSGLLVCSECGHKLQRRPASTSKRGAPYDVLMCKTRGCPTVGSAVEVIEGEVLYALEDIVRGYEADVPSVPSLVPQKEELLHNAILHRTDLNKQQERIYTLLEQGIYSTDVFLDRSKALEKQMQEVNHSIEVLKNELEEEKIKYNNWKSFVPTCKQLLEIYWTLTPDAKNSALKEVIDRIEYKKLTRNPKGMCDVATFELTLYPKIPMKS

SEQ ID NO: 12978 - protein, 505 aa, synthetic construct
MNSMELSKGVIYARYSSDKQRDESIEGQIRECTEYAQREGILITKIYTDRALSARTDNRPEFLQMIRDSANQSFNYVIVYQLDRFSRSREDSAKYKGILRRNGVRVLSAKEHITNEPAGIILESMLEGMAEYYSVELSQKVKRGMTENALKGKMNGSAIPLGYDLTESHHLAVNAHEAKAVRLIYSLYLKQYSLTKIANILHSKGYTTKRGGKISYSVVRSILSNEKYIGVYQWGDIRIEDSIPPIISRTIFNEVQRMLPTRIKNKGRRSEMYNLCGRLICGECGGHYMGSTATSRNGEKHHYYVCTNRRKYHTCSAPNIRRDELEDLVINRTLEILKQPQIITRIVDLVMSGYNNTTKEAKTAIQSIQGKIKAIDTELDNCMTAIKQGFINERLKSEIETLEKERQDLLEQKANHESVISPIKFTAEHIEYFLERMANENPSTKAGRSRILDTFIKSVTVYSDRVEIVFNYKNELPEFSAQSASGSHFSVLVGPPGIEPGTDRL

SEQ ID NO: 12979 - protein, 512 aa, synthetic construct
MERAVIYARYSSDHQREESIDAQVRACREYCQRKGYLVTKIYADEAKSGKSIAKREQYKKMLADAQKNLFDVVVFHKIDRNSRNELDYYLTKNQLISSGIKYEYAAQNIDTSPAGQMVEGILVAVAANYSRNLAEETKKGLKENALKALFNGGRPPLGFEINQENKYVINDYEAGAIRIIFDLYLKGKGYHYIISQLNSLGYKTREGRKFGKNSLYDILRNPKYCGTYTFNKVNKDPSGKRNSHKISENTIIVEDAIPAIISKEDFRKVQEKMSRNKHRTAAYRSKETYLLTGKAFCGICGAAMTGHRASARGKKYVYYTCAARDRLGTSACENKVVPRDELEQVVLDTLKEELLSNNFQKNLNHYILEEFHTLASEVSNEADSLAEQKAIAERKLNNLYSIIEQGTADEYDLQRLADVKRELTSIKEKLSKCAAAHSLSDINPRAIERTIKLCRNMLLKNASAETLTLIFDDMVEKIVIGAKKITLQFKLECFDTYGAEGRTRTGTWGNHA

SEQ ID NO: 12980 - protein, 530 aa, synthetic construct
MQTTGEFKITALYARLSSDDELQGESNSITYQKQILEEYAATNNLNNYQFYVDDGFSGTNFERPGFQRMVSDIKNGVIGTVVVKDLSRFGRNYLQVGYYTEMMFPEYDIRFISVTDNVDSNFGYNEFVPLHNLMNDWYAKDISRKQKAVIQSKGNSGKRLTTKAIFGYKKDDDGQWVIDSEAAEVVKKIFKLCLDGYGTQMIANYLFAEKIKNPSAYMGYVCRTKDDKNPYLWTSQTISSILSRQEYCGDTVNFKTQRKSCMSKQIIYNNPEDYKIFYNTHTAIISREDFKKVQEIRSKRKRISPIQKPVLFDEIYCADCGHRMYIMRLRDKSKPDAYSCSKYRKNSLVCSSHYIREGYLIEYILNELNVLLNSAQDEDFRKKIKDEFSKKNSLTQVEIKKNLANAQKRIDEINVIIKELYEDKVKGNITLEIFQKLSSEFINEQKKLANAIIDYSKERADLDNSKDALKGFLDIVEKYKYRTQGSITQLTHEIVDDFIDKIEVFESKKVDGKRQQKVNIYFKGIGILSV

SEQ ID NO: 12981 - protein, 523 aa, synthetic construct
MAKSVTTIPATLSRFTAAPINSTKKRRVAAYARVSTDNEEQLTSYEAQIDYYTNYINGRDDWEFVGVYPDEGITGTNTKKREQFRQMVADALDGKIDLIITKSVSRFARNTVDSLTTIRKLKEHNVEVYFEKENIWTFDSKGELLLTIMSSLAQEESRSISENCTWGQRKRFADGKVTVPFKRFLGYDMGPDHNLVVNPEQAKLVKRIYGMFLQGQSPFQIARTLAEEGIPSPGGKDHWNPSNIKSILTNEKYKGDALLQKSFTVDFLTKKKKTNEGEIPQYYVKDNHEAIIDPETFEMVQTLMTTRTKGRNRKSSVSIFSSKVKCGDCGSWYGPKVWHSNDAYRKVIWQCNHKFDGQKCATPTLTEDEIKELFLRAANQVIDQKEEFIAIYDQVLSRSLNTTALESELSDLEAEINIAAELIEDCIKENAHVALDQDEYQKRYDALVARFDKAKARHTEVTDLIAERMARKHQIEAYLKNLRSREPLTEFRETDWLAMVDYITVHSKKDIWVTFKDGNEIKA

SEQ ID NO: 12982 - protein, 590 aa, synthetic construct
MKTVEKIERKLPVLKTRKRVAAYARVSMESERMQHSLSAQVSYYSALIQKNPEWEYAGVFADYGISGTGTKKRDEFNHMLAECEAGNIDIILTKSIQRFARNTVDLLNTVRHLKELGIEVRFEKEKINSLSGDGELMLSILASFAQEESRSISENVKWGTIMRFKQGIPNGKFSIFGYEWQDDKLVIVPEEAEIIRWMYAEYMKGASRIEIGRALMDRGIYTRQGKPWVDSNVKVILTNITYTGNMLFQKEYCEDPITKHRRKNYGEMPQYFVEDTHEAIIPMDEWQAVQAEFKRRRDLGPFGNKSLKLSAFSTKITCGCCRKHYRHSGKRNTAGEVYYIWICQTKSQKGVSACPSKNIPEKMLQNTAAEVLGLDKFDEDVFSQQIEEVIVIGDDTLTFRFYDGHEVTTKWQSTAKTDWWTDERRKLWGERHKRKDTNPNRNTFYEFTGFIKCGCCGANYRCQSGKRKDGTPTRSWYCTGPRSECRNPAIRDETMKRLVTEILGLDEFDEAAMDAQIESATILDHMVTFHFRDGHIESRDFLDKRHGTPWTEERREKAKKSMKAAWTDERREAMSERIKKIRSEKKWPNP

SEQ ID NO: 12983 - protein, 528 aa, synthetic construct
MAYCIYLRKSRADRELELQGFGETLKRHRDTLIELAKKKNLPIGEIYEEVVSGDSIAARPQMQRLLNDVSDGKWEGVLVMEIERLARGDTSDQGIVTKTFTYSNTLIITPMKTFNPTDEFDQEYFEFGLYMSRREYKTIKRRLHAGMEASCKEGNYIHHTPPFGYSIVKNKKSKGYRLEPKPGEAEIVKLIFQWYTKGILKEDGSYELLGTARIADKLNSEYSIKPLGGVWTIPTISTMLRNEHYLGYIVFGKKKRKKVVENGIIVDKWTRNESYGLYKGKHPALVSQETFNLAQERLSRNPRRPSKTITNPLAGVIKCGMCGRSMYRRPYQKRGQSASLICSEKTCHNVSSAFYLVEDALLTAIKEWIDGYEIKEEANKYDTSVLESKTKLLEEQQKQLITYKNQLTKVFEAYENGIYDSDTFLNRQKTVSESISSTEEAIVRLNKEIANEREIISHQEEIIPKAKKILEIYKTSDDVQLKNDLMKSILDKVVYTKTANGHFKDQRLDDFKLELFPKLPKNKGNSSE

SEQ ID NO: 12984 - protein, 525 aa, synthetic construct
MVQERLRAVFYARVSTEEEKQLNALEKQIQENRDVISKNGWILVGEYIDEGKSGTTTKRRSDYKRLLADMTEDKFDIVVCKDQERLQRNTLDWYLFVDNLVKNSLKLFMYLDNKFFTPSEDALITGIKAIIAEEYSRNLSKKLNNANRRRVERALAGEEIAAMGNGKSLAFKIINGKWVKDEKEAELGKKIFELYLQWNSLRKVRDWVNENGYRNSVGKPFTTESIGRILKNEKAKGIIVMGHHHHDFDKKKIVRMPEEQWVRIPAPELAYVSEEMFDEVQRRLKAKTGKKRGVNAYSNPLSSKLYCGKCGGKLWKHNSNGYVNWHCSSKMAKGDIKCTGVSTTSVKVRKIYSEISKNLIVNKSAVKSSMLEWLHKLKASLQIEDKSEAAQKAIEQLERKKNKLTEAYLDEIISKEDYKAKYSALEDQIREQQKLLIPVEENEDIKDIEAVIENIDKEIDTYIASSQFEDSKVDYLIEHTKKITVIDKEHYVIDLDLLAGVILIGKDFLLYVHNTMSFSNGRIYI

SEQ ID NO: 12985 - protein, 567 aa, synthetic construct
METADLYIRVSTDEQADKGYSQRDQEERLRKYCEFQGITVRQVLYEDHSAKTFLRPTWQRLLQDLRKQKRKTSLVLFTKWDRFSRNAGDAYQMISTLRRLGVEPQAIEQPLDLSVPENKMMLAFYLAAPEVENDRRALNVIRGMRKAKKEGRWMATAPIGYKNRVSEGGNKYIAPVEPAASIIKWVFEELATGRYNTEQVWKEAKAKGLKCQKSNFWRFLRNPVYCGKIFIPRYKDEESCFVPGLHEPLISEDLFYQVQEVLDGRGQTYRPKVETREEFPLRGYLLCPMCERKLTASKSKGRHAYYAYYHCIKGCPFRSKAEAVHEAFSQELQRYVPRKEFQGLYHALILEAFQAQTKAQGSERQQLLVRVKELEQRIAHARDLVASAQIEPVDFREIKTACTATIEKLEAKLSALARETDLKGLLKKGLEQLLRLDYLYENSSNREKRLLIGSIFPDNLVFDDGRVRTARVNEVAHLIYQINSTLGVKKNWTKSPKKLLSSKVHPRGFEPLTLGAEIRYSIQLNYGCSASAKIGSMRTKRNIHSYFLRGKSIKMRCSACSLFINVV

SEQ ID NO: 12986 - protein, 554 aa, synthetic construct
MLKTVIYARYSSDKQNEQSIEGQIHECEQFAKTHDMVIIKHYIDRALSGKTDDRPSFLQMIKDSSSGLFDAILVYKTDRFARNRYDSAVYKAKLKKNGIKIFYAKENIPDGPEGIILESMLEGFAEYYSAELSQKVKRGIKENIRKGLSFGGACPFGYKIVNKKYVIDDEQAPYVKKIFEDYAKGRRAIDIFNELNTLPNYAGKGRKWNRSSLNRMLTNKKYIGIYELEDVCVKDAIPPIIDEALFNKVQSRILFNRRHTTRAKVNYLLSGKLFCGLCEHSMTGKTGTSKTKVKYHYYVCSNRHCKQKKYRKELLEDIIIQYTVKDILNPKHFKMIAKKCLEIQQADNKINDILLMLKKQLTATKTKINNIMNAIEAGIITTSTKDRLEQLEQEKYKLELEISTQQLNSNRLLSEKQIIYMLNVFYNKRVDVSFYNQIIDCFIYKIYIYSDKICIVYNLNNSDKDVTYSDINELYKSSHLNSCGSPMNSRLCRFSVKLFLLFAVKIVVNLKYLIYFHLKYYPLFELFYFEIFEEHERKRFESLYYLHDPLHQRQ

SEQ ID NO: 12987 - protein, 506 aa, synthetic construct
MSNAAIYARYSSGHQREESIEGQIRECTDFAKRNGLTIVEHYIDRAISAKTDDRPSFQQMVADSSKKTFDTIIVYTLDRFARNRYDSAVYKAKLKRNGVRVLSAKENITSDPSGIILESVLEGMAEYYSVELAQKVKRGMTENALACRWASGRIPFGYTIDADKHLHPDPALVPIVQEAFEMYAAGAKIVDIARKINSYHVVTGMGNKFGRSSFDRMIRSETYIGVFKWNDIRKENAVPPIITPELFYKCQARYNARNKKNVARPSAIYLLSGKLRCGCCGGSMCGMSGKSRNGTMHYYYSCYSTRRRTSHCDIGNIRRDEIEHIIAAHAASILKKPINLDIIANQALKTNNSVKNYRLESLIQQEKDLTQKLENCMKAIIDQGLVSITLMDRIKQYEADLQSVKNDISLEKIKSNPIQVTKEHIIFFLEKFALLEGEEFKDRIISTMVRDIVIKKEKDGNYLVTVQYNYANSKELPNEESYSVPESIGSQDVELVETSGIEPLTS

SEQ ID NO: 12988 - protein, 454 aa, synthetic construct
MECVAYLRVSTEKQAEEGNGLDSQKRDIENYCRKNQLIISDWYEDDGFTGSNMNRPALQRLINDCSKKKLKCVVAFKLDRLSRSMVDGIYLIERVFIPNGVDFRCVHDSVSYDSPMEQAYTQMMAVFAQLDKNTMLLRMRGGMLERVKQGYWMGGGNTPYCYRYSKEDGILVPIPERKEMALRAMNLYISGYSDVRIQKLIGFKSEFVTRQVLTSPVNIGMIPYKGKLYKGRHEPIFDIKVFELAQELRKTRKQSKSFCVNHENQLLTGLCYCGVCGCKMRYQKWTHGKHKIYCYSRDNGMSYLPNYNPNCSNSLEWAEDIEKQVEDEILKISLNLSSHKPKERESCLDILSKQLQKEKTKLKRLYTLYAEGNDTVLEMIKETESGIDELKLKIQNEMKNPDNSQKKEFVYDNIKKLADVWEHIDKQNKNRILKTIISKIIIVNGNIEIQLKKF

SEQ ID NO: 12989 - protein, 462 aa, synthetic construct
MSYFNFNPDLVGVRVVKYIRCSHEGQVLHGDTLEAQNLILDEFIAANKMVLVDTFVDEAMTARKKYTKRKEFVRLLDGVRSHNFDLIIFTKLDRWFRNIGDYHKIQEILDANHVQWKAVTENYDTTTTNGRLHINIRLSVAQDECDRDSDRIKDVFAYKLKNKTFISGALPRGLMLDAEKHVVHDPEWKQWALDMFDHFESCCSKRDTLLFLMDKYNMYLCYDTIVRSLKNPLYKGFYRDDPDFCEPLIDPARFDRIQNLAIRNVRVRRSRQTYVFCGLLVCASCEHYMTGVATYHTLSGGKEKMYKRYRCNMHASSHSCPHSKMYSEEMLEQYMISNVCSAFSCYIAEYAVAAASAKKKNTAAEIAKIERKLKKLYDLFMDDLIDKEAYKSEYDSFNKQLNELKSIPFAPANDYKKVQELLSGDWSAVYTSFNNNEKNAFWKSFIDKIVIHEDGKIDIIFL

SEQ ID NO: 12990 - protein, 456 aa, synthetic construct
MRNKEIAPALVRVALYIRVSGEEQKIKGLSLEAQQERLEAYARERGWVIVGIYIDAAKTARKNIHKRTEFQRMMDSVKRDEVDILLFARLDRWFRSVADYYKVMEILQAHNCDWKTTDEEYDTTTANGRLYINVKLSIAQNEADIDGERIDVVFDSKIAHGTVVSGSAPFGFRVNEEKRLEVVPEDAAIVQDAFNYFESTVSQRATVRYVRETYGVNWCDATFRRMLKEKLYTGVYDRGGRYNDQFCPAIINRQQFDRVQALLTRNVRSAPSGKVYIFTSILTCAECGHKLVGYKSSDYFYYRCNQHFQRGRCSHNHSAREDIVEAWLFDHLGEELERCQLEWDVEAAKKKASVVRTDKAALKRKLTKLKELYVNDLIDIEDYKKDYQIYVSALNQIPEPAQEAPPDFAAVRRLLDNSFRTIYDTLTREEKRTLWRSVIKEIRIDNDQNITGVVFG

SEQ ID NO: 12991 - protein, 550 aa, synthetic construct
MRAFIYCRFSSHKQQELSIEGQRDICQEYADKHNITVVGQYADRARSGKTENRADFRRLMRDAATGVVDCVLVWRYDRFFRNRAESALYRKQLEAAGVHLISVTEYIPEGSAGIITQGMIETVAEYFSAKLSEDVSRGMNKAAQHCQIVGRAPLGYRAGPDKRWQIDPVGAELVRRIFEWYASGKAMGQLAAQLNEEGHRTTNGTLYTRSSFNSILRNEKYIGVYSYGGEVRIEGGCPRIVEDELFFTVQRRLSANRHRPGAYKAEVPYLLSGKLFCGLCGAPMTGTAGTSHTGARHYYYICNNRRAKTCKKKNVRLDLIEEAVLQSALDILTDENIAYISTEVERRCAENSDSAALLASLNAQLEEVQRRLKNIGNAIAQGIITETTKELLEEAEADRTALRQQIDRAKVQAALVVKAEAVACWLDGFRRGDRADPDFRRQVFGALVHSVFVYDDYLKIIFNVDSAGAAVVPYEAAQAATPSEAPPGSYLDTLGAPKKALRKRKAFFIMIAALCECFRFAADFNPSQRLFLFCRRNARTFIVRETVAYM

SEQ ID NO: 12992 - protein, 474 aa, synthetic construct
MRAVIYARFSTDKQREESIEAQERACREYAAAHGYSVSAVYADRAASGKTDRRPDFQRMMRDAKSQRFDVVLVHKYNRFARRMSDHVRYEDKLNSYGVQLIAVAEDFGTGKEAVIMKALMRSLSEYYIIDLSDEVKKGHRENAMKALHNGGLAPFGYDIVDQKYVINEFEAAYVRRMYNCASDCIGFTALVDEMAAAGVRGKRGKPIKYQQIYDILRNEKYTGVYLYCPEQESSKMLQRSKPSAIRIEGAIPPIISKEQFEEVQKIMSSRKMTGRKNSYLCSRLVFCGECGAAMHAITTGKYQYYYCKNHCGNPNVRMETIDNAAKLYLRELLTPENQLTIAEALKRYQASAAYRMEDFYDSVHDQITEREQKYEALLANLSSGALPADVVADVGATMQRLKDEIDVLRDAKPEKDYTVDNITTWLESLRQAPDEKAIRLLISKISVKNRTDVSIDSMLTSILGNLGCGTRIRT

SEQ ID NO: 12993 - protein, 515 aa, synthetic construct
MRAFIYCRFSSHKQQELSIEGQRDICQEYADKHNITVVGQYADRARSGKTENRADFRRLMRDAATGVVDCVLVWRYDRFFRNRAESALYRKQLEAAGVHLISVTEYIPEGSAGIITQGMIETVAEYFSAKLSEDVSRGMNKAAQHCQIVGRAPLGYRAGPNKRWQIDPVGAELVRRIFEWYASGKAMGQLAAQLNEEGHRTTNGTLYTRSSFNSILRNEKYIGVYSYGGKVRIEGGCPRIIEDELFFTVQRRLSANRHRPGAYKAEVPYLLSGKLFCGLCGAPMTGTAGTSHTGARHYYYICNNRRAKTCKKKNVRLDLIEEAVLQSALDILTDENIAYISTEVERRCAENSDSAALLASLNAQLEEVQRRLKNIGNAIAQGIITETTKELLEEAEADRTALRQQIDRAKVQAALVVKAEAVACWLDGFRRGDRTDPDFRRQVFGALVHSVFVYDDYLKIIFNVDSAGAAVVPYEAAQAATSSEAPPGSYLDTLGAPKKAAMLIAAFSFICLSII

SEQ ID NO: 12994 - protein, 668 aa, synthetic construct
MAYAKAKKHLKIWTKKKAALYVRVSTRYQVDKDSLPFQRKKLKEYCKFLGLEDHVIFEDDGYSAKNTERPHFQEMMSRVRSGEFSHLIVWKVDRVSRNLLDFAAMYQELKDHKVTFISMNEQFDTSTAIGEAMLKIILIFAELERNMTSERVTGIMLDRAEQGLWNGARMPVGYRWNDETKFPEPDPEEVKIVQLIFDKYEEWKSSIKIARYLNNNNFKSKRGGQWTSKLIHDIIRNPFYIGTYRYNLRESGRGPLKPESEWIVRENNHPAIIDKAQFDRCNKIMDQNGSSRDTSDLRARKYVHTFSGHLVCGKCGANMIASKDRARANGWRPSMYRCAQRSRMLDCDNSRTINESYIGPFIFNYIANLARVQKNFKNIATPEKLERELLKGETFDGVAGILPEGLNLTFQALSFRQVGNGTYIPDIDFLGDSDGASDRDQIELLKSEIEKSKNAVARLTDVYLFDPDSMTKEEFATKKKELAKKIEGMERQLVDLLDDSGNDDLADMSFIKKASAFLVAQRIVSKSFVDYVGMAQELDNEILKDFIDQIVDQIVVLDGRVQSITFINGLKHEFRYTAPAELPVCKKCGGRIGSTCGCRTRTFDFSGKRYQRIKVGDPRDMLRGKKNPVCPECFAQEGRWHHWNCKIETCPICGGRLAECEHGPNGKK

SEQ ID NO: 12995 - protein, 537 aa, synthetic construct
MTEAATGGTRVRMIPATVRRYAAARPLTERLRVAAYARVSTDDEEQQTSYEAQVDYYTKKIRKNPEWIFVEVYADEGITGTSTKRRKNFNRMIDDAMAGMIDRIITKSVSRFARNTVDTLTTVRKLKEKGVGVTFEKENIDTLDSKGELFITIMSSLAQEESRSISENVTWGWRKRIADGKVSVAYSHFLGYEKGPDGNMQIVEEEAKVVREIYAMFLDGKTPSGIAAALTKRSVPTPAGKATWQASTVKSILSNEKYRGDALLQKTFTVDFLTKKAKVNEGEAPQYYVENSHPAIVSAEVFELVQAELAKRRQRGGRTSAVTPFSGRLVCGECGAYFGSKVWHSTDAYRSVIYRCNRKYEKKGAPCPSPHVREEELRTAFEKALGMLLERRSEIFSAYETIIANLTDTAQLDRELERAQARLDEAHQEMERMARRNAEIAQDQEEYNRAFDALSAKCSALKEKIGALKAQLAAKAGRRRKLEAFMAQLREKEALAPFDERTFAAMVDHIVVYPGEAKGAKKLIFRFRDGTEIPVDL

SEQ ID NO: 12996 - protein, 445 aa, synthetic construct
MKKEQKQQPMQIRQVKPDAPTPRRKRVAAYCRVSTGKDAMLHSLSRQISHYSAYIQRQPGWEYAGVYADEAYTGTKGDRPRFRQMLSDCRAGKIDLILTKSISRFARNTVTMLETVRELKALGIDVYFEEQNIHSMSGDGELMLTILASFAQEESKSVSDNCKWRIRKDFSEGKPMNLMLLYGYRSVDGQIVIDEDEAAVVRDVFKAYLDGAGSSRIAARLRATNTPRRFGGTWTGNHVVEMLTNEKYTGDALLQKTFVEDHLTKKQRRNTGQLDQYYAENTHPAIIDRETFERAQAILAQRREMINIRKPTTVRYPLSGKVVCGNCGAHYNRRTRSTGRNSIPRYTWQCVTYSSKGKRYCPASQIPEETLIALTCEVLDVEKLTEEAVDALDEIRVTGKDCLRFALRDGRVEERQWAWESRAKAWTPEMRRKASKQMKRRWRHD

SEQ ID NO: 12997 - protein, 438 aa, synthetic construct
MARTIQQISFPAPMRPSLKRVAAYARVSSGKDAMLHSLSAQVSYYSALIQKHADWLYCGVYADEAFTGTKDSREGFQDLLAECRAGNIDMVITKSISRFARNTVTLLETVRELKALGVDVYFEEQNIHTMSADGELMMTILASYAQEESRSASENQKWRIRHGFERGELVNLRFLFGYKIEKGQVEVDPEKAEVVREVFRRALEGESLSSLAADLNRRGVTGVLGGKWNAMRIREMLSNEKYLGNALLQKQYRNNHLEKKEIPNRGELPQYYAEGTHEAIIDQSTFDAAQRLLVKLREGTPVRSPWKKSAFTSMISCTVCDRNYKRCTSGKRHFWNCPTAVRTDLASCGTSQIPEKLLYDLSAQVLGLTQFDEPVFREKVKSIDALPDKTLVFHFYDGSTVARHWEYTSRAKSWTPEMKEKARQRALAQRRGEKWQER

SEQ ID NO: 12998 - protein, 525 aa, synthetic construct
MARAVTVIPPTIQPITHLARNAVVRRRVAAYARVSTSSEEQLTSYEAQVDYYTRFIQSKPEWEFVRVYTDEGISAVNTKKREGFNQMVRDALDGKIDLIVTKSVSRFARNTVDSLVTVRKLKEKGVEVYFEKENIYTLDSKGELLITIMSSLAQEESRSISENVTWGQRKRFADGKVSLPYSHFLGYRKGADGLPEIVPEEAETVRWIYSLFLSGKTTGSIAGLLTREGIPTPAGKKKWAASTVESILKNEKYKGDALLQKAFTVDFLTKKQKKNEGEVPQYYVENSHPAIIDPAEWKLVQRELERRKAIGRSYSGNSIFSSRLVCGDCGGYFGSKVWHSTDKYRRTIWRCNSKFIGEEKCQTPHLTEEEIKARFLDAFNALVSDKERLLDECRTMQAALTDTGSLDSEIAALLSEMEVVAELTKRCIEENSTTAQDQTAYLERYNGLAERYETAKAKLEKLQAEKAQREAKAEDIGGFMFELAEYGESLTEFDDRLWLTVIDTVTVHRDGQLTFKFQTGHEMLE

SEQ ID NO: 12999 - protein, 530 aa, synthetic construct
MEQYLIYLRKSRSDLEAEAHGEGETLSRHEHALLELAKRQHLNVTDIYREVVSGDTIAARPMMQRVLSEVEQGVWSGVLVMEVERLARGDTIDQGIIAQTFKFSGTKIITPIKTYDPDNEFDEEYFEFGLFMSRREYKIINRRLQRGRLASAKEGKWPSGLAPFGYRRVKLKNEKGCSLEPIEEQAAIVRMIFDLYTVGLQDEDGSAHPLSLGSIATRLNDMHIPSPSGSQWARITIRGIIKNPTYIGMVRWGSRETKKKVVDGKVVSVRGPADPEKECVFKGIHPPLVPKETFELANDKLARSENTSTHKEKVVRNPLAGLLVCSECGRQMMRMINPVHPDMPVVRCPRRGCPNCSSYLPIVEERVIQGLSEWMKGYELEWSSAAASSSVSSVGVREKALASAEAELRKLQQQLERTHDFLEQGIYDTDTFLSRSRMLSDKIAAAKDSVTRCSRELTEEKLRETSRRDIIPKVKNLLDVYPLLETAEEKNALLKEVLEKVVYQKLNEKRKKSPDGFTIEIYPRIPKSEK

SEQ ID NO: 13000 - protein, 556 aa, synthetic construct
MLLYWKNQTDMLKCNRTKIMKQKNKESSDVMKIAAYCRVSTEKEAQIDSLEKQIEFFNEFTKKNGYELYKLYADEGISGKQIKHRKQFQQMMIDAKAKKFDKVVVKDVSRFARNTVDLLQSVRELKSYGVQVDFLNNGEVMEGGSEFILTILGAMAQQESANMSKRVKFGKDITAKKGRVPNLVFGYDKIPDERYTLKINEEETKIVKEIFESYVYKGIGTTKIAWNLNDRGIRTKKTKSKWVQTSIVRMLKNPIYTGRVTNKKSEVTDFITGTRKELPEEEWIVVERPEMRIISDELFNRAQELLEQRSNEFKLNNKREKTEYVFSTLIYCKHCGYSFRRIKRKYTADGPEYIRWVCSGRNSMGVNHCPNTTVIDEEELLNAIKIYLKSIIKNKKDFMKAVEKEFEKITKLRENNERSEESLLKKIEKVTVKKQKYMEMFQNEIINIQELKKYTNPLNEDIARLERELKLITSEIKEKDVLEKELSKTINTVDDILNNQTITNAMLKTIIDVIEVDSDSNVEVRLKLLNEIGSTPAVITNFNDINPTVTKSNVST

SEQ ID NO: 13001 - protein, 576 aa, synthetic construct
MKKNFKMPGSGSETPIRVAIYVRVSTVYQIDKDSLPMMKQDLTSYCKYILNTDDFVIFEDAGYSGKNTDRPAYQKMMSQIRQGLFTHLLVWKIDRISRNLLDFANMYAELKDLGVTFVSKNEQFDTSTAIGEAMLKIILVFAELERNMTSERVTATMINRASNGVWNGGRIPFGYSYDKPTQVFSIDPEENKIYNFMVETYEDTQSIVHTSRRLNEAGYRSRNGNMWSPVAVWTILRNPWYKGVYRYNYYKIPGRKAIKDESEWVIVENHHPASIDPDRFDRIQATLDKNARYRNTPGRKTAQKNVHVFSGLVWCAECGSAFTASPGKLHVSGYRPSKYGCPNVRKTKTCHAKYTSDVVLGEFLLNYILNILNAQKQFAYIHSTDDLQKCLLHGSTFSNVDHVDPDGLASLLNMLEKCSGSDPVLLKRPRSKPKMDPELKRMMADQKKQQRALDRLNDLYLYSDDSISEREYLVRKQQITDRLQEINEAIGMMSQEPWMRTMNDEEFIRQASSFILTQKLADKQYIYYESLAESLDPEILKNFFVSILDSIILRDGRPETVVFRNGLSHTFTYKDS

SEQ ID NO: 13002 - protein, 449 aa, synthetic construct
MAETQKRAALYIRVSTDEQARHGYSLSEQEYDLKQYADRQGYRVIGIYADEGISARKALSRRKGLQRLLEDVEADHVDIIIFKCLDRWFRNIADYYKVQEILDAHHVEWECSQESLYNTTTTNGRLMLNLKLSIAQHESDQTGDRVKYIHEGLKRIGRVITGHMPLGYRITEDKRIAIDEDAVPIVREAFDYFIVHKTVLGTFRMMREKYGYTKTEGSVGRMLQNHIYLGEYYGIKDFCPALIDEGVFAQAQKVFAGRTRHHSSGIIYLFGGLLHCPECGRLLTPRNRTLNRKVYTYYTCRDHTHGRGCPHKTYWREDHVEAALLSSLGAELRKYLADIKKVTRKSDRAKSGITVAELRTKQTRLKELYVEGLIDRSEFDVRHADLDAQIAALRPRPDVSIAYLETVAAGDFVKRYQRLGKKAQKIFWSRILDQVQLITGAPKPVFRAF

SEQ ID NO: 13003 - protein, 484 aa, synthetic construct
MNAVIYARYSCDRQTEQSIEGQLRECKAFAASEGITIIGEYIDRAISGTTANRPEFQRMIADSRYKTFQAVIVYKLDRFARNRYDSAMYKSKLKANGVRVLSAKEHITDSPEGIILEGLLEAMNEYYSAELSQKIKRGMRENAIKGKTTGGNVALGYRIGADKQMEIDPAGASLVRRIFTGYDSGMTFTEICDDLNHAGYTTSRGKQFRIDTISRILANQRYTGTFQCAGEDAHCPPIIEPELFRSVQERLTESRHKHRHTQSPHEYVLTGKAICGTCGRRLTGRAGTSKTDKRYYYYCCPNKCCGWLPAAELEHAVLDAIAQYTTPEACEQIANATYALYQQSTHENADLTAAQRRLQETEKKLENAVNAVLNGITSAALQATMQQLEQQKAALETEVRLLQTDAPELKLEHFQYFAHRLLEVQAEGTEKILQLLVNQVIVYKEQITVLVNLTDKTKTPPLEQVTAALRESSCSIACGGGDEN

SEQ ID NO: 13004 - protein, 522 aa, synthetic construct
MGNVMLIPARRQVGSNARKQEEEKPKLRVAAYCRVSTDSDEQATSYEAQVEHYTEYIQKNPDWEFAGIYADDGISGTNTKKREEFNRMIDDCKAGNIDMIITKSISRFARNTLDCLKYIRQLKDMNIPVLFEKESINTMDAKGEVLITIMASLAQQESQSLSQNVKMGLQYRYQQGKVQINHNRFLGYTKDADGNLVIDPEQAETVKRIYREYLEGLSMDKIAAGLERDGILTGAGGKKWHTSTINKILRNEKYIGDALLQKTYTTDFLNKTRVKNNGLVPQYYVEGDHEAIIPKDIYLQVQEELVRRRVVKTSANGKKRSYSCNHCFSQIVICGECGEMFRRLHWNNRGVKSIVWRCISRLESTGLECHARTINELLLQDVVVKAINQMLGDKSSYQAQLQLNIATVIRASQATAIDSIDEKLMAQQQELIQKANSKEDYDEIADEIFRLRELRQKTTVDTAARDEQIKRINDLQDYISQQTTYLTEFDESLVRRWIKQITIWDDHITVELKSDVRIDVDA

SEQ ID NO: 13005 - protein, 521 aa, synthetic construct
MKKITKIDGVQKNTAINSKLRVAAYCRVSTGSDAQLESLEAQKSHYEQYINSREDWQFAGLYFDEGITGTKAEKRPELLRLVTDCEARRIDFVITKSISRFSRNTTDCLALVRKLQSLEIPIYFEKENINTGSMESELFLAILSSMAEGESASISENAKWSVKRRFQNGTYKLGYTPYGYDWDGKNMIINPDQTAVVKRIFADILSGKSTNAIADELNAEKVPSKKNANWTSSTIRGIIANEKYTGDVIFQKTYTDENFNRHTNYGEVDQYMAPDHHEAIISHSDFDAANALVNQRAAEKGIEKGSDKYQQRYAFSGKIICGECGDTFKRRIHSCTTYKYVAWACNTHLKNKESCHMKYVRDDEIKAAFITLLNKLIYGYRLILTPYLKVLENSSGDEAIHRIQHLEQLIAQNSEQREALTKLMAQGYINQILYNQETNALLLQAETYRSDIEAITIGMTGDAAKVTETNLLLHFVSHTDMLTAYSEEFFENYADHIEVMSRNEIRFVMKCGLTFTERIDD

SEQ ID NO: 13006 - protein, 667 aa, synthetic construct
MAYAKNKVVKLWTQKKAALYVRVSTRYQVDKDSLPFQRKKLKEYCKFLEIDKYVIFEDDGYSAKNTDRPHFQEMMSRIRTGEFSHVIVWKVDRVSRNLLDFAAMYQELKDHKVTFISMNEQFDTSTAIGEAMLKIILIFAELERNMTSERVTGIMLDRAEQGLWNGARMPVGYRWNEQTKFPEPDPEEVKIVQLIFDRYEEWRSSIKIARFLNNKNFKSKRGGEWTSRLIYDIIRNPFYIGTYRYNMRESGRGPLKPESEWIVRENNHPGIISKDQFDRCNKIMDENASRRDTSEMRARKFVHTFSGHLVCSNCGSNMIACKDHARTNGWRPSIYRCAKRSRMMTCDNSKTVNETYLGTFVFNYIANLARVQKNFTKITSTEKLESELLKGETFEAVSGIIPDSLNSTFQALLYSNLGNGTYVPDIALLSKFDEVQDHNQIDLLNTEIEKSKNAITRLTDVYLYDPASMTKEEFAAKKKELIKKIEEMEHQLAELLDNSEDNDLTDLSFIKKASAFLVTQRIVSKSFIDYVQMAQELDNEILKNFVDQIVDRIVIKDGRIQSITFVNGLTHEFFYSRPAELPVCKKCGGRIGSTCGCRTRTFSFNGKRYQRIKVGDPRDALYGQKNPVCPECYAKEGRWHHWLCGIELCPICGKPIQTCEHGANGKE

SEQ ID NO: 13007 - protein, 597 aa, synthetic construct
MPKITKIEPKVKALPARKKVAAYARVSMETERLHHSLSAQISYYSELIQKNPEWRYAGVYADEGISGTGTARRPEFQRMLEDCEAGKIDIVLTKSISRFARNTVDLLETVRHLKDLGIEVRFEKEHINSLSGDGEVMLTLLASFAQSESESISTNVKWGIRKRMQAGIPYANGHMNVYGYRWEGDEMVIVPEEAAIVRRIYQNFLDGKSRQETEKEFAAEGIKTRGGYRWVDSNLKLILTNVTYTGNMLYQKEYVSDPITGKVKKNHGELQQYYVENTHPAIIDKETFDYVQAEMARRRELGCFGNKALTLNCFSTKIKCGLCGRSFVRSTRTNRAKMSLLSEKYTFWACTSHKRNNCPYCKSGTIREDVLKEECARMLGTPEFDEDAFSERVKQITIPEAGTMIFEFTDGSTLEHHWYRNAKKESWTDAHRKRASEYRKRHPTTRSDITCFTTKIRCEECDCNYRKQTTTMADGHKNAYWSCADKKTHPGKSLREDHLKEIIAQVLGLEEFGEEAFKERIDFISVRGLTHLTFHLKDGSTVKRDYEFRKEGIPWTDERREKQTKAIRDSLTPERRQKTSESTKKTRSEKHWDSKRK

SEQ ID NO: 13008 - protein, 527 aa, synthetic construct
MGQQKKVTTIPASRTRFSSTPITEKKKRRVAGYARVSTDHDDQFTSYEAQIDYYTNYIKSRDDWEFVNVYTDEGISGTGIKKRIGFQSMVEDALDGKIDLIVTKSVSRFARNTVDSLTTIRKLKDHGVECYFEKENIWTFDGKGELLITIMSSLAQEESRSISENCTWGQRKRFADGKVTVPFNRFLGYDRGPNGELVLNEKEAETVKRIYRMFLQGMTYNGIAKKLAADGIKTPGGKNNWSISTVRSILSNEKYKGDALLQKSYTVDYLTKKTKVNEGEIPQYYVEGDHEAIIPPETFDMVQREMENRGKGKKYHSGVHQFSSKIRCGECGSFYGSKVWHSNDKYRKVIWHCNHKYDHGEKCRTPVLTDDEVKAAFLSAANKLLASKAEVISNGKEMLGLLFQTNEMEQKRERLIEDAQIVADAVQQNITENAHTALDQTDYQKRYDDLSARYDKLKKEITELSDRIQETQSRKAGVEDFLKAFEKTPGTLTEFSVDAFNGLVDHLTVHAKDDIRVTFRNGQEIKA

SEQ ID NO: 13009 - protein, 581 aa, synthetic construct
MAYASQNTAARFDDRIVAIYVRVSTGYQVDKDSLPFQKKELKAYCKHILHVDMSRVEIFEDAGRSGKNTKRPAYERMMQKVRAGLVSHVLVYKIDRISRNLVDFSLMYDDFKYNRVTFVSLNEQFDTSSAIGEAVLKIILVFAELERKLTSERVKDIMIGRANEGKWNGARVPYGWDWDSSAMRPVHSEKEAPFGRAMYEMYLEVKSTGKIRDYNNAHKIPTKRGGEWTSKTVGDFLRNPMNKGDYRYNYRESARGRKKPVDEVVYLEGVFEPLVNPEIWEKVNKIMDINRDQRNIGGSHPIEKNCNVFAGLIQCGSCGSGYLVGKKDKRRKNGFTPSMYYCSAKTRAIHCQNLNVSDVKIGPFVINYISAMVRVSNERRKIKTSEDLEEMLLSDKAVFADIMGLSSDSLNNTFELLTGKSSTSGALWRADLVDQEGASADPAEIESLKDQIRKYERAKERLEDAYYFSDDGMSEKEYLEKKNRFDSGRVAAENKLKELTETHIASGVDESAFMKSASAFLLTHKIRAGSHIVYSDLAGMVEEESIKEFFNLVLDHITVKDRRVTEIVFANGLSHKFIYRD

SEQ ID NO: 13010 - protein, 504 aa, synthetic construct
MQRAVIYARYSPGPNQTEQSIEGQVRECTKYAEQHDLRIVGTYVDRKISGKTDNRREFQRMIDDSEKHIFDVIILYHTDRFARNRYDSAIYKHKLKENGVELRYATTDIPKGPEGIILESIMEGWAEYYSAELSRKIKRGMRESALKCHSTGAGRCLGYRTAEDKSLVIEPEGAKAVQTVFDMYIKGKSHADICRYLNDCGFRTAQGKLFNKNSVTHIIRNKRYIGVYTYDDITIEDGIPAIISKDTFHLAQLEAARRKTAKRPKEPKAEYLLSGKAFCGHCQKPLVGVSGTGKSGNKWYYYYCQESRAKRGCTKRPVKRDWLEREVVERTVAEVLQPEVIQHIAKKCYDLQMEYRQDNSDVLFYELKLKDVRKAIKNTMRAIESGVKTKTLPARLQELENEEEALEAELAIAKASDFVITTDQIEFLLTQFAEPWECESEEEYYRRIIKCFVHKVFLFDDKLLIYYNVSRDGKTREQSEAELLEEALGEGFDKRSSGSTISPP

SEQ ID NO: 13011 - protein, 519 aa, synthetic construct
MSYCIYLRKSRADKELCSEEEVLKRHETTLLELAKNRSYNITKIFREVVSGETLAARPQMQQLLSEVENGLWEGVLVMEVERLARGNSVDQGIVAQAFKYSNTLIITPTKTYNPANEFDEEYFEFGLFMSRREYKTINRRLNAGRIAACKEGKYAGGNPPYGFYKEKLKGERGWKLVPVPEEVEIVKLIYKLYLSNEDGTGFSGIARRLNDSKVPTRSGVFWTSTQVKKILTNDVYIGKIHWQKVPEKKIVENGILLKKRYINDNPLIFEGLHDAIIDEDIFNRVQEIVKSRKKPPNTPERPMKNPFAGVLVCAVCGKPLKRRPPDKRRPGHSPSFDCITPYCPTISSPVNIVENRILDGMRMWLEDYKLKESSNNTTDMEYTYNTTRIINCKKELENIQKQLGKTYTLLEQGIYDNETFLERQVFLKNEMSNILSTITKLEEEDNATKARAEYDKTLIPELENLLEVYDTLPDAKSKNVLIKKIFHQIRYSKKTRGNRWAPDKVDDFELEFISKLPSK

SEQ ID NO: 13012 - protein, 674 aa, synthetic construct
MAYAKNKVVKLWTQKKAALYVRVSTRYQVDKDSLPFQRKKLKEYCKFLEIDKYVIFEDDGYSAKNTDRPHFQEMMSRIRTGEFSHVIVWKVDRVSRNLLDFAAMYQELKDHKVTFISMNEQFDTSTAIGEAMLKIILIFAELERNMTSERVTGIMLDRAEQGLWNGARMPVGYRWNEQTKFPEPDPEEVKIVQLIFDRYEEWRSSIKIARFLNNKNFKSKRGGEWTSRLIYDIIRNPFYIGTYRYNMRESGRGPLKPESEWIVRENNHPGIISKDQFDRCNKIMDENASRRDTSEMRARKFVHTFSGHLVCSNCGSNMIACKDHARANGWRPSIYRCAKRSRMMTCDNSKTVNETYLGTFVFNYIANLARVQKNFTKITSTEKLESELLKGEAFEAVSGIIPDSLNSTFQALLYSNLGNGTYVPDIALLSKFDEVQDHNQIDLLNTEIEKSKNAITRLTDVYLYDPASMTKEEFAAKKKELIKKIEEMEHQLAELLDNSEDNDLTDLSFIKKASAFLVTQRIVSKSFIDYVQMAQELDNEILKNFVDQIVDRIVIKDGRIQSITFVNGLTHEFFYSRPAELPVCKKCGGRIGSTCGCRTRTFSFNGKRYQRIKVGDPRDALYGQKNPVCPECYAKEGRWHHWLCGIELCPICGKPLQTCEHGSNGKSNFTFNQL

SEQ ID NO: 13013 - protein, 524 aa, synthetic construct
MAKVTFIPSTLNPMTRIPMDSIQKRRVAAYARVSTDSEEQLTSYEAQVDYYTKYIRSKPEWEFVKVYTDEGITAVNTKKRDGFNAMVADALAGKIDLIVTKSISRFARNTVDSLVTVRTLKEHGTEVYFEKENIFTFDSKGELLITIMSSLAQEESRSISENVTWGQRKRFADGKVSLPYKQFLGYRRGEDDLPEIVPEEAEVVRKIYSLFIQGKTTHGIAKQLTEENIPTPAGKEKWQASTVESILTNEKYKGDALLQKGFTVDFLTKKTKKNEGEVPQYYVENSHPAIIRPHEWQLVQREFSRRKGLRRKYSGNSIFSTRLVCGDCGNYYGPKTWHPKKPYQKIVWQCTLKYKGENSCETVTLEETEIQQKFIQAINSLFSIKGPVLENCRIMQKALTDCTGIDTELATLTRELEVLGQMIKDAIKTNALEAQNQEEYTARYNALAERYDTTHRQIVALQEKRQARENEAEAIGGFMFALREMGTEAQEFDPKLWLSTIDRGTVNRDGSITFRFVSGAEITT

SEQ ID NO: 13014 - protein, 426 aa, synthetic construct
MERIIRQVSFPGAEMPRLKRVAAYARVSSGKDAMLHSLSAQVSSYSNLIQNHEGWQYCGVYADEALTGTKEWRGSFQSLLADCRAGKLDMVITKSISRFARNTVTLLQTVRELKGLGVDVYFEEQNIHTMSADGELMMTILASYAQEESLSASENQKWRVRRNFEEGIPWRFFMLGYRAGDGKLAVVPEEAEIVRSIFSDYMAGDGVTIIANRLNKSGYATQSGCVFHKSAVERILRNYAYTGNLLLQTKFRENHLTKVTRRNHGELPQYHAQETYEAIISFEMFQAVQEEIQRRKAKYGPTKERQFSPFTGLITCECCGKHYRRKTTATGFIWICSTYNSKGKAYCASKAIPEQKLLATAAQVGDPDTFKGILAKNGNELVFTLQDGSTVVKHWQDRSRAESWTPEMRRAVGQKTRERNHAAWQR

SEQ ID NO: 13015 - protein, 528 aa, synthetic construct
MAYCIYLRKSRADRELELQGFGETLKRHRDTLIELAKKKNLPIGEIYEEVVSGDSIAARPQMQRLLNDVSDGKWEGVLVMEIERLARGDTSDQGIVIKTFTYSNTLIITPMKTFNPTDEFDQEYFEFGLYMSRREYKTIKRRLHAGMEASCKEGNYIHHTPPFGYSIVKNKKSKGYRLEPKPGEAEIVKLIFQWYTKGILKEDGSYELLGTARIADKLNSEYSIKPLGGVWTIPTISTMLRNEHYLGYIVFGKKKRKKVVENGIIVDKWTRNESYGLYKGKHPALVSQETFNLAQERLSRNPRRPSKTITNPLAGVIKCGMCGRSMYRRPYQKRGQSASLICSEKTCHNVSSAFYLVEDALLTAIKEWIDGYEIKEEANKYDTSVLESKTKLLEEQQKQLITYKNQLTKVFEAYENGIYDSDTFLNRQKTVSESISSTEEAIVKLNKEIANEREIISHQEEIIPKAKKILEIYKTSDDVQLKNDLMKSILDKVVYTKTANGHFKDQRQDDFKLELFPKLPKNKGNSSE

SEQ ID NO: 13016 - protein, 514 aa, synthetic construct
MSTEYALYLRKSRADLEAEAHGEGDTLARHEHILMELAKSRALPIGAIYREIVSGERIANRPVMQQLLSEVEDGRWKGVLVTETSRLARGDTIDQGIVAQAFKFSGTLIVTPAKTYDPTQEADEEWMEFGLFMSRQEYRMIRRRQLAGTRASKKEGHYVPGRPPYGYERYKLDGRGWSLRPVEPQAGVIRTIYDMYLSGKGFSEIANELNAMKIRTPLDKKWVPATTRAILQNPHYAGFIPSAMKVNTKIVQKGKLITKRPVNKNCELYEGIHEAIIPRDVWYSVQQRMKDTVTPRVPRKYQQMNPLAGLVYCDQCGKLMSRHPYRREDKVRFGCENPSCSTVSSLFEDVESLVLQSLREFLHEIELSSPTLLDTKSEEIALQNIEKQLTDINHRLQRTYELLEDGVYSKETFLQRQSAISQDQTALLNTKHEIERKLHNKQTDIEAQKNSAPLIRHVLDVYPTLEDPKEQNLLLKQVIRRIDYHKTVRVYGKAKSDLHLTIHPKIAIPQTSNI

SEQ ID NO: 13017 - protein, 562 aa, synthetic construct
MKNKIAVYIRVSTTHQIDKESLPFQRRELENYAKYVLNIDDMEFFEDAGYSGKNIMRPAFQSMMSRIRLGEFSHILVWKIDRISRNIIDFANMFEELKKLNVTFVSKNEQFDTSSAIGEAILKIILVFAELERNLTAERVSDVMISRASTGQWNGGRVPLGYNYDKENHTFTVNQQEAEIVKFIFDYYIDNGSMVSLVNALKDKEIKTRTNGAFSLSAVATVLNNIFYTGKYRYNYRKQGDRQQVKPESEWIVIYNHHPAIISEEVFKKAEEIKQTNLRLKNEKGKIVKKNNIHLFANLLECDVCHNNFSSSLDRPRVNQGGYRHSMYNCYGRRIGACKSKYVSDVYLGKFVFNYIANLYKAYCSFGKSTTFETFKKKMLRGNIFSDIKEVTNLEGIYNIFCSKYNDKATANIINYKNTQQDLGNELRIALSEKGKYERALARLKDAYLFSDDAMTQNEYISQKHSIEIKLSATNKKLDKLQSKDDTPFDDVEFLNVLSYFILNQNLQDKREIDFVDFITSVDKKIISDFVHKMFVKFIISKGKIKSMTFRNGITNTFVYDD

SEQ ID NO: 13018 - protein, 560 aa, synthetic construct
MPRKKKLQEVGGLRLVAYYRYSNGGQQTEQSIEGQRRDCEAYAKAHGYKIVHEYIDRHISGKSDSRPAFQQMISDSDSHLFDAVICWKTDRLARSRYDSIIYKTRLRKNGVKILYAAETVVDGPEGIIIEGLMESLAEYYSAELAQKLRRGQRESALKCIALGGNRSFGYDIGPDKHYCINEKQAPAVRYIFEQYAAGATAADIVRELTARGYRTSRGNPFNKNSICRIITNEMYLGVYKYADIRIEGGVPAMIDRELFNRCQTQLAFNRAHGGGKGAPRADYVLVGKLDCGLCGHAMKGASATGHTGSKHYYYTCTQHVEKKCPKTSIEKNYLEQIIVDGVAKYVLTPEKISQIVDCMMELQAKEQEPKGNPEKDALEAELAECRRKQNNILEAIEEGGSARLAARLRALEEQEAQLTFALGEINNAPAPPQFSREALTFMFEQFRREEDEVDEEYRRRILDTFVSSILLYEDRAEVKFNITDQKTGDFERVILPISANKKPPEDDDTTSNSEGSAALRLVEAMGVEPMSEKSSVQVSPGAGDLQHSRRATPIVRLALW

SEQ ID NO: 13019 - protein, 516 aa, synthetic construct
MPKTEEKQAAKAVIYARYSSDRQREESIEGQLRVCEDYARRNNITILHTYADRAMTGRSDQRPEFQMMIRDAATMAFNVILVYKLNRFARNRYDSAKYKHKLKKYGVKVVSAMENIADDPSGILLESVIEGMAEYYSAELSENVLRGMTQNALEGKWPGGVIPLGYKLDKGGRLIINEEKAPIVRMIYQMFLDGMSVARIERKLNDKKYTTDAGKVFSRSRVYYILHNERYIGTFQWKDIKKEGIIPPIISKEAFHAVQERINAMKSSSYRTNNNYLLAGKAFCASCGAKVSGTSGKSQNGNKYCYYGCSHHHRSARYEYCETKNIRADVLEKLVCDKTHEILSSKKAIKEIARQAVKLRPRDESELEIRAIKNHISSCQKKIDNCIKAIENGVMSNALVESLNENERTLDVLKEKLAKASLMQGSGLLTEEKIQFFFETIREKAKETEKYNDILLTSLVRAVYICNEYVEIQYNYAEQLPILTNPVRIESCSYKCTNGGTIWVRTGDLFDVSEVL

SEQ ID NO: 13020 - protein, 543 aa, synthetic construct
MARKKNIAAGLDAVIYARYSSHNQREVSIEQQIAECTKHAAALGLRIVGTYEDRAISGKTDNRPRFQQMMRDAEKGKFQAVVAWKSNRIGRNMLQAMVNEAKLDDYGVKVFYAEEDFDDTAAGRFALRNMMNVNQFYSENMAEDITRGLYDNASKCMANGRQPLGYKRGEDGRVVLDEANAAVVREIFTRVAAGDLFVDIARDLNAQGIKTSKGANWNKGSFQSICQNERYRGIYIYGDVRVADGIPRIVSDDLWYRVQEAMRMKKNPVGTRHRVGAEDYLLTGKLRCGHCGSYMTGVSGTSRNGELHYYYTCQKRRTEHACDKKNIRRDVIEPAVAQAIKMYCLTDDVIAWIADRTVEYWEKHDNDLQIEALEQQLGENKKATSNMLKAIEMGIITEATRTRMVELETEQSRLSVQLNAAKEDVVKIDREQIISYLELLQQGDIHDRDFQMELFKNFLVAVYVYDDNRMKLVFSCMGDQNSVEIPLETGEDPPDGGLSPDAKMFVLTPDSSTRRKSTARKRVVFFVVTDQRRNYELRDRIQQ

SEQ ID NO: 13021 - protein, 597 aa, synthetic construct
MGKKQKTNGGDAVIYARYSSHNQRDVSIEQQVEACRKHAAELGLTVTATYEDRAISGKTDKRPSFQRMMRDAEQHKFAYVLAWKSNRIGRNMMQALVNESRLVDCGVKVFYAEEDFDDNAAGRFALRSMMNVNQFYIENMAEDVKRGLYDNAKKGLVNGSLPLGYKRGADGKPEIDEPKAAIVREIYTRVAAGELFASIADDLNARGIKTARGREWNKGSFHVLCHNDRYRGIYMYGDIRIPGGMPRIISDELFYDAQEAYSMKKDNRYGRARHGAENYLLTGKLYCGHCGGYMVGISGTSKTGEMHYYYACQKHRLEHTCEKKAIRRDVIENAVARAIMMYCLDDETIDFIVDSTIAYFKQKDHELHIEAMENELAAVQQAISNLMKAIEAGIITPTTRTRLLDLEEQQAKLSAKINTAKAERVEIDRDDLIAGLQLFRTGDIKNKKFLAKLFNTFLIAVYLYDDNRLKIVFSFTGNHNSVEIPLELDNDCPDSQIVSDETEVRMSHLECRKNLGSPPSSGEAEKGDDCSDGRFVRTAPLPPHQLTSGPFRPEVLFYPDAVQRRISWSTPSVKWQRCWAFRHPPCATMTRKVCCPL

SEQ ID NO: 13022 - protein, 428 aa, synthetic construct
MIQKVAFPQKKPFLLKRTAAYARVSSGKDAMLHSLSAQVSYYNQLIQSNPKWLFCGVYADEALTGTKENRAEFQKLLNRCRRGEIDLILTKSISRFARNTVTLLETVRELKTLGVDVYFEEQRIHSMSSDGELMLSILASYAQEESYSASENKKWQMRKDFEQGKVGSMRMLGYRRTKSGKLEIVPEEAEIVRMIFLYYLSGMGKLAIAKKLNEQQICTVRGCAWTTEDVRRTLRNEKYTGNLLLQKSFRENHITKKKVANIGQLPQYFVADSHEAIISLEQFDAVQKQMAERQKKYAGSCTTNRYPFTQKIRCACCGKYYRRKTTVTGVVWICSTYNTKGKKYCPTAKQIPENTLISACCDVLEISEFDTERFAEQIEQIQIPAPNELQFCFSDGTEQTVSWKDRSRSESWTTEMREKARQKKWRQS

SEQ ID NO: 13023 - protein, 526 aa, synthetic construct
MATVLKIPAKFHPITHLPETKVQKRRVAAYARVSTDSEEQQTSYAAQVDRYTKYIQERADWEFVAVYTDEGISALNTKHRDGFNRMVADALDGKIDLIVTKSVSRFARNTVDSLTTVRKLKEKGVEVFFEKENIYTLDSKGELLITIMSSLAQEESRSISENVTWGQRKRMADGKVSLPYKHFLGYRKGADGLPEIVPEEAEIVRNIYRWFMEGKTPTGIARTLTEQGVPTPAGKEQWCSSTVKSILTNEKYKGSALLQKRFTVDFLTKKSKVNEGEVPQYYIEESHPAIIVPEEFELVQAELLRRQNLRRQYNGKSVFAARLVCGDCGNFFGAKVWHSNSKYRQVIWQCNHKFQGVCKCQTPHLQESVIQQRFQAAVQELLQKRKAILENCQVMLELLTDCTDLEYQLQELETQKMRISEQVHGYVRENSEIVQDQEKYEERYQALVGQYEPLQKQETALQEQRAERLAKREQIQGFQRALNGQNGMLPEFDTQLWLAAVEKAVVYRDGKIVFVLKDGTELVQKI

SEQ ID NO: 13024 - protein, 533 aa, synthetic construct
MQTGKITALYVRFSFDDGIDTESGSIEHQKALLKNYAESNGFTNLSYYADDGYTGTNFNRPNFQRMMNDIKNGLVGTVIVKDMSRLGRNYLMVGQYVEIDFPKYDVRFIAISDNVDSAKGMNDLLPINNLMNEWYSRDISKKIRSMVRQKGNSGQHITSKLPYGYYNTHENKQDWQVDEEAAEVVREIFELYVHHAMGTKQIALQLQAEKRIGVEYHKKIRKGIAVTAEDIYLWNSGTIAAILKRQEYVGDTVNFRTQIASYKNKTVIYNESDKIKIFPDTHPAIISRELFQMAQDRREKTIRHPSRPHKYLFGDYLYCMDCHARMHGRRCGTKSENALYCYECTTYRKSKGCYFHGVPEKYLETEVLQAIQRVIYKANANPDEFYKAIQKRVEKRSDDCKAVVLAELEKSQLRITEIDKYIQGLFEAKVRGEIDGSLFASLKRTYDEEKEQLNALVAELIGKLHEKNESVNKVKLFMQAIEKYDAVTELTPQVLADFIEHIEVGKCQNTSKKLPFSKRDNAVSVFFWGIGIF

SEQ ID NO: 13025 - protein, 523 aa, synthetic construct
MAKSVTTIPATLSRFTAAPINSTKKRRVAAYARVSTDNEEQLTSYEAQIDYYTNYINGRDDWEFVGVYPDEGITSTNTKKREQFRQMVADALDGKIDLIITKSVSRFARNTVDSLTTIRKLKEHNVEVYFEKENIWTFDSKGELLLTIMSSLAQEESRSISENCTWGQRKRFADGKVTVPFKRFLGYDMGPDHNLVVNPEQAKLVKRIYGMFLQGQSPFQIARTLAEEGIPSPGGKDHWNPSNIKSILTNEKYKGDALLQKSFTVDFLTKKKKTNEGEIPQYYVKDNHEAIIDPETFEMVQTLMTTRTKGRNRKSSVSIFSSKVKCGDCGSWYGPKVWHSNDAYRKVIWQCNHKFDGQKCATPTLTEDEIKELFLRAANQVIDQKEEFIAIYDQVLSRSLNTTALESELSDLEAEINIAAELIEDCIKENAHVALDQDEYQKRYDALVARFDKAKARHTEVTDLIAERMARKHQIEAYLKNLRSREPLTEFRETDWLAMVDYITVHSKKDIWVTFKDGNEIKA

SEQ ID NO: 13026 - protein, 494 aa, synthetic construct
MRVVGYARVSTREQADHGYSIGEQNSRLRAYCQAKDWTLLRVIEDPGFSGAKMQRPGLQQVLEMVRRRECDAVLVWKLDRLSRSQKDTLYLLEDVFLANGCGFVSMLENFDTSTAFGRAMVGILSVFAQLEREQFKERSAIGRVGRAKAGLFHGGGYAPIGYDYYTKEDGGQGLVVNEYEAMQVREVYRLYLAGWAVHKIQVYMHERYTTKNGCWASDTTVRSVLSSPIYLGRITWAGKTYEGQHEALVSQNDFDQVAARRESLKWQPAEPRAACDLIKNSPFRSTHILGGITWCARCGARYFASGNYSGRGENRKYWPYYTCYSVAKSSKKMIKDPNCKNKRWAVGKLDAIILAEISRLEFDPAALAKAAGPVDVSDVEEKRRVLEARVAEVRPQMERLLDLCQTGGLPVASVSGRLAALQKELDALNGELSGLAVPETVDRLAVAQEMLAGASAVIENGTPEQKRALVHSLIGRIDIDGEDITIHWLFAPGN

SEQ ID NO: 13027 - protein, 537 aa, synthetic construct
MAKRKFNKGGEVRLVAYYRYSGGSGQTEQSIEGQRRDCEAYARLHNMTIQKEYVDRHISGKTDDRAAFQQMIADSDKGAFDMVICWKTDRFARNRYDSAVYKKRLRDNGVEIVYAAESNISGAEGIIIEGVMEALAEYYSAELAEKMRRGMRESALKGQAISRCRALGLKTDEHKRFVIDEKTAPTVRFIFEHYAAGESAMSIVEQLNAKGLRTSQGNPFNKSSIPRIIQNEAYRGVYISKSYDVRIEGAIPAIIDDELWERAQTMLKLNRQLKAKNEPKADYILSGKLYCSCGSLMRGMSGHSATGEVYRYYTCPNKDCHLRNIPKDDLEGKVMQSIVDHLLQPESMEALAEAMVEVQKADVEKPNAERVAIEQSLSDVRRRSKNILDAIENGTANAQLCARLDDLTEQEQTLSFQLSSLEKEKPVVFTKEQYLFLLEQFLMEPSERTPEYGRRLVNTFVTSMVVSGRELVINFNVSDETVNKNKKTSQTNLQKESSSGMRLVHLAHQQANYSLYAASGYFSLVEHQFSARLWRTA

SEQ ID NO: 13028 - protein, 526 aa, synthetic construct
MPYCIYLRKSRADAEAELAGEGETLARHEKTLLALAKKLKLPITKIYKEILSGETIAGRPVMQQLLQDVEAGIWQGVLVMEVERLGRGNTLDQGIILNAFKYSSTKIITPMKSYDPNDEFDEEYFEFSQFMSRREYKTILRRMQRGREASVKEGKFAGSIAPFGYRRVKLPQEKGFTLEIEDAEAAAVRLAYELYAYGDPQPDGTFSDIGRATIAKRLDQMGIRNRKGGTWATASVTRMLQNPVYIGKVHWNRRPEKKHTENGKIKKTRPLAENYLLVDGLHEPIISEELWNLAQAKMKQHYRPTGVNGITQNPLAGLVHCSYCGNAMQRRPYLKTGQPASLICTTHFCPQISSPLYMVEGKILEALSLWMKQHEPTWEEESSADVFSTKIMALEHAIADMEQELQGLQSQFEKIFEFLETGIYTPEVFTARNKTLSEKMAEIRSAIEETQAELSKLKAARKNQVSMIPKIKNILDTYETLTPAEKNKLLKEVLDHVEYHKKIKGKKNVPADNFEIILFPKISPEN

SEQ ID NO: 13029 - protein, 512 aa, synthetic construct
MPKTEEKQTITAVIYARYSSDRQREESIEGQIRECKAFAAANGYRIIGTYIDRAMSARTDQRPDFQRMIHDSDRHLFQFVIVYALDRFSRSRYDSAIYKNRLKKNGVRVLSAKENIRDDPTGVILESLLEGYAEYYSLELAQKVRRGMADNLLEKKWVGTVIPFGYKKGCDSRLYIDEQKRQAVIDIFQMYSDRSRLVDIISYLNAHHFTTAQGRPFSRNSLNNILVNSIYTGTFRWAGTVYPGYTPRIISDELFNKVQKIKEGRKRNMIKNTSPDYELTGKIFCGRCGRPMVGVSGTGKSGNTYFYYKCSGKTHGRKDCDAKAIRRDAVESAVYNATVAMLKQPHAIKIITAQAILAQEREQGNSEVDRLKHEKAALDAKIRNISKAVAAGLTADEIIAQANEYSNRSKELESLIRIEELKEKAFTLTPEAVTFFLEKLLEKAETGNATLSTFWDFIRCIKINGCIAEIHFNYTAVPATLDNPIRIKIETNEECSNDDVLVDHQGFEPRTP

SEQ ID NO: 13030 - protein, 520 aa, synthetic construct
MKRVYCLYRVSTKGQVDKDDIPMQKTSCREFAERNGWTILKEFQEKGISGFKVSARERDAIQDLKTAVENKEFDVLLVFMFDRIGRIDDETPFVVEWFIKHGIEVWSVNEGEQRMDSHVDKLMNYIRFWQANGESQKTSARVKTRLNQMTMDGKFTGGVAPFGYRLIKSGEINKKGKELMDIVVDDDEAVIVKKIFDMTVKEGYGSYRMADYLNSHGIRTHNNSKFQCNTVNRILKNRLYCGYFVSGGVESPYIEKLQIIDENVFDQAQFILKQRSSKNEEKQQIARTTKGSTLLSGNIYCAHCGQKMVSTSYVDRYNRKDGSQYKVRRQRYICTNKAMKRGECDGQSAYVAHRIDGAVLATLKDYLAKIKSTPKDIALEKRYKSEISEYKRKQTKIEKEIEKLKRQVVELSAEIGRSLLGESRFTPDMLSTSIDNTNDILHKKEIELSDIKYKLTNQQNAMGKLDFYYSQFRTWADEFDNSTMEQKKMIACQLIKEVRVARGYELEIVFDLNYKQFLSK

SEQ ID NO: 13031 - protein, 480 aa, synthetic construct
MATHKVAIYVRVSTTSQVDEGYSIDEQKAKLTSYCDIKDWNIYDIYTDGGFSGSNTERPALEQLIRDAKRKLFDTVLVYKLDRLSRSQKDTLYLIEDVFLENDIEFVSLLENFDTSTPFGKAMIGLLSVFAQLEREQIKERMQLGKLGRAKSGKSMQWAKTSFGYDYIKETGTLSVNPYQALIVRKMFEWYLSGMSITKLRDTLNEQYGQDKEWNYRTVRVILSNPVYCGYNQFKGQIFPGTHEPIISEEDFNKTQEEIKTRQRTAAQRFNPRPFQAKYMLSGIAQCGYCSAPLAIKLGMKRKDGTRLVKYECKQRHPRKTKGVTVYNNNEKCDSGFYFKDDIEHFVLTEISKLQTDSDYIDKLFSNTDKETIDRASYQKQIDNLTAKISRLNELYIDDRISLEELQKRSSDFMAERSALEKELETDTSLKAVERKKDIRRVLDTKDIFTLDYEQQKAIARALISKVRVTSETIVILWKL

SEQ ID NO: 13032 - protein, 456 aa, synthetic construct
MRNKEIAPALVRVALYIRVSGEEQKIKGLSLEAQQERLEAYARERGWVIVGIYIDAAKTARKNIHKRTEFQRMMDSVKRDEVDILLFARLDRWFRSVADYYKVMEILQAHNCDWKTTDEEYDTTTANGRLYINVKLSIAQNEADIDGERIDVVFDSKIAHGTVVSGSAPFGFRVNEEKRLEVVPEDAAIVQDAFNYFESTVSQRATVRYVRETYGVNWCDATFRRMLKEKLYTGVYDRGGRYNDQFCPAIINRQQFDRVQALLTRNVRSAPSGKVYIFTSILACAECGHKLVGYKSSDYFYYRCNQHFQRGRCSHNHSAREDVVEAWLFDHLGEELERCQLEWDVEAAKKKASVARTDKAALKRKLTKLKELYVNDLIDIEDYKKDYQIYVSALNQIPEPAQEAPPDFAAVRRLLDNSFRTIYDTLTREEKRALWRSVIKEIRIDNDQNITGVVFG

SEQ ID NO: 13033 - protein, 524 aa, synthetic construct
MAGAKNITVIPAKKRVGNTVTAEDKPKLKVAAYCRVSTDSEEQATSYDAQVEHYTEFIRKNLEWEFAGIYADDGISGTNTKKREEFNRMIEDTMAGKIDMIITKSISRFARNTLDCLKYIRQLKEKNVPVFFEKENINTMDSKGEVLLTIMASLAQQESESLSKNVKMGIQFRYQNGEVQVNHNWFLGYTKDENGHLIIDEDQAVIVRRIFREYLQGASLKTIADGLMADGIPTATGNKKWRGDGIRKILTNEKYMGDALLQKTYTVDVLTKKRVSNNGIVPQYYVENNHEAIIPRQLFMQVQEELFRRAHLKTEGGKTKRVYSSKYALSSIVYCGKCGDLFRRVAWKARGASYNKWRCASRIEKGPKKGCDADAISETEIQNAVVRAINKTLGGREQFLVQLQHNIEDVLNGDSTATLEYIDQRMAELQEKLVLCVNKNAEYDVIANEIDALREKKAAVVTKDAEQEMLKKRIEEMRQFLQTQSSRVTEYDEQMVRRLIEKITVFDNKLIFEFKSGMTLELKR

SEQ ID NO: 13034 - protein, 520 aa, synthetic construct
MKNVTKINQVDFSVFKKTRVAAYCRVSTDSDEQELSLETQKNHYESYIKANSEWEYAGIYYDDGVSGTKTAKRDGLLRLMEDCEKGLIDLVITKSISRFSRNTTDCLTLVRKLLNYDVYVIFEKENINTGSMESELMLAVLASMAESESRSISENEKWSIKKKFKNGTYVIAYPPYGYANVDGEMVIVPEQAEVVKEIFAGCLAGKSTHIIAKELNKKGVPTKRGAKWTGATINGILTNEKYIGDALFQKTITDASFKRKRNYGEEEQYYCENHHEPIIDKDTFEKAKEAIRQRGLEKGNCSEDTAKYQNRYAMSGKIKCGECGRSFKRRYHYTSHGKSYNAWCCGGHIEDSSSCSMKFIRDDDLKRTFLTMMNKLVFGNDLILKPLLISITTNNSKKNANSVEDIEKEMKSNEEQRKQLNTLLTNGYLERPVFAEAHNKLIMEYDHLVAKRDLLFRMDDARYTMEQALKELVDFLNDAKPFTEWEESLFERFIEKVKVLSRDKVEFEFKCGLKLKERMD

SEQ ID NO: 13035 - protein, 530 aa, synthetic construct
MFLEISDPMAYHVAKYIRLSKEDESEGPSQSVTNQNSLLDEFVKQHRLSVYDTYIDDGYSGTTFDRPAFQRMIADIEAKKVNMVITKDLSRLGRDYIMTGHYMERYFPEKRVRYISLLDGIDTGVESTANDITPFRAIMNDMYAKDISKKIKSVKRDKQRKGQFIGGKPMYGYKMHPTEKNKIVIDEEVAPIVRRIFAMALDGVSCRKIAATLNEEGVPTPATYCGWNMGRKGPYAGLWSSERISEMLQNETYIGNMVQGRMVKISYKSKKCLKQPRENWVVVEGTHEPLIDAETFRKVRLLVESRKHTRSRTYDFLLKGLIFCHECSYPLATLNRKNAAGEERLFFVCRTYQRFTKAGVCTCHSIKEQTVTEAVLAKVREVCQAYLNADTLLPMAEKAVEAARAADRTDTEIQALQGKIDAMTTNLDRMYMDKLSGILNEDDFQRIYLKVKSDRAKLEDQLRELEKKKGSPAKAEDEAKTLVQRFLESACASRELLISLIERIELSEDKQLYIKFRFKQLNSAQFEAIS

SEQ ID NO: 13036 - protein, 532 aa, synthetic construct
MNFTEQIKAAAVYCRVSTDDQAERGTIESQIEYAEKYCELNQIAIVKIYKDDGITGTIPLQERPAGAELIADAKAGLFSTLLVFKLDRLGRVTRIIINAIYDLEQYNVKLKSMTEPFDTSDPSGRFLLTILAGVADLERSNILQRMQLGANRAAAAGKWLGGIVPYGYIVNDDRFLEVNETEIPGTGMSEADVIRLIFHLIAEEKMSSIAVAHRLNSLGIPPSYVLRGIKGKRHNHTRGIWFSGRVLCIAKNTTYYGVHRYGKRSPHGRELIEREVPAIVSKEIWDEAQAVMHNNQLTAMRNAKTKYLLRGLIKCAACGSTYVGVNDKGTRYYTCNGKRMYKKLGREKCTALAVNMDWVESEVWEDCMQYINNPNMVVEAIAANRGKATESAKQIHLLEMQLAECENERERVMDVYRAKLITFEEVEKQLRKVADKKSTVQFELSALKSRGEASATFDQQETALEILNEIKKKLTDSSTVSLDLKFEIFHTLIKKITAISTEDGLTLKVHYVFGESPVSVNRTVTDSLPLPK

SEQ ID NO: 13037 - protein, 543 aa, synthetic construct
MEVTKVPKKIVTVIEPKRSMTVDKEKYRQKKVAAYCRVSTDSEEQLVSYANQKKVYTEMIASRKDWCFAGLFADEGKSGTRADKRPEFNKMINDCLAGKIDYIITKSVSRFARNTVDCLDYVRMLKSKGIGVYFEEQQIDTLKTDSELYLVIYAGFAQSESESISKNITWSVRKKFEEGTPVFIYKRFLGYKKGADGEPEIVPSEAAIVERIFNLYLAGETVDNISKMMQAENYDIPGKTISFSKGMIMNMLSNERYCGDAILQKSVTVDCIEKKRKKNTGEAPMYYVQNNHPAIIDRVTFNKVQEELARRKTKTPGSAKSSITSTGKYSRYALTDVLICGNCGTRYRRVTWSRNGTKRIVWRCISRLDYGKKYCSDSPTIMEDKLQEAIVRAVNKFNKQDNATYKALMRATISEALGLNGDPEEVDMLERKIEALNNKMLALVNESVSSGDGIEAHESEFMTLSQEAELLKQRIAAIQESTAKDNGEQNRLEQIQAIIAERESKCMEYDDSIVRQMVECIKVYPGGKLEIIFGGGYLVEESV

SEQ ID NO: 13038 - protein, 455 aa, synthetic construct
MANEIKQVALYIRVSTDQQAKHGDSLDEQQHTLNEYVRQQGNMRVFKTYIDDGISGQKLYRDEFQKLLDDVKKGRIDTILFTKLDRWFRNLRHYLNIQEILDKNNVTWLAVTQPFFNTETAMGRSFVNQSMGFAELEAQMTSERIRAVFDNKIRKGEVVSGKVPLGYEIKDKHLVPNEKAEIVKEIFQYYLETGSMRATVRHLENHFSMTRDYQSVRQMLTNRKYIGELRDNKNFCKPIIDRDVFERVQLQLSKNIRMNKKRDYMFTGLLVCSECGCNYSATAVISRYVRKDGTTNPNERHLYRCTKNRNNAKKCSNKKGIYETTLENFLLENIEKQAEELSVKMQQEPEVKKTKNTNDKIKKKIDRLKKAYLNEVITLEEYKKDREELEALLIPERDNKIAKIDLNSLHNYSTAEFRDGYKQLTISEKSSLWRQVIKNIVVYPDGNLKINFLGY

SEQ ID NO: 13039 - protein, 548 aa, synthetic construct
MKFKYPAMGTTKNAVIYARYSSHSQREESIEGQLRICHEYAKAEGLAIVGEYIDRAISGTTDARPDFQRMIDDAKKKQFSYVIVYRLDRFARNRYDSVLYKHELKQCGVKVVSATEGIGTGDESILLEALIEASAEYYSMELSRKIKRGRQDSAMKGNFLGGAVPLGYKVVDSKFIIDDETAPIVRYIFERYAAGIGKKQIIDELTAKGYMRRTGKPFTYRSFDSVLRNRKYTGEFTQTGITVEGGCPAIVDTEMFEKVQARLEINRRAPAKAKAKTEYLLSGKMFCGYCGEPMIGISGTGRHEKTFYYYSCVGRRGKSGCKKQHEKKDFIEWYVCEQTVQYMQDPERLSHVAKRIIEINDAEFDGGKVKELERAVENCDSDIRKLVDALTTIPDAARPALYDKIERIGAAKADMEIDLAKLRVLSEVRYKQEDVEAWIRSMCRGDLMDFEFRRQLIDVFINSVYLFDDRVVIVYNIKNGKQVSAIDVLNAVEELDGVELFPDSAEDSSAGGNGSFLVADAPPYMKNPNLFPIGNGFGFLIFIKDIID

SEQ ID NO: 13040 - protein, 421 aa, synthetic construct
MKLRKIEPLKPKQKKLRVCAYARVSTDCLKQGESFENQVSTYERMIKSNPEYEFVSVYADQGMTGRSENRPEFQRMIADCKAGKIDLIITKSISRFARNTTTVLKYTRELKELGVGVLFEENNINTLSSEGELMMTVLASFAQEESRSISDNNKWTLKKKFERGEGMVNTARFMGYDKDETGDLVINKEEAKVVRLIFKMYLSGIGCHRIAKALNEEGVPTIAESSWHASTIKGMLTNEKYKGDFHIQKTYIPEGTHQSVKNNGQVQSYYVTEDHPAIISAEEWQQVQELMEYHRKQRNIGKGEKYQKRYPMSGMLVCPYCGKSLRRRYVYNRKVEWLCATYIHKGKEACKGIRIRDTELTGLSFSEPMVVEEVMINGEKHYGYTSKRAYDAGERAADRIEKESSSVLPRVNGPRRTVIKL

SEQ ID NO: 13041 - protein, 528 aa, synthetic construct
MLDNSNVAPGKNKTLRCAIYTRKSHEEGLEQEFNSLDAQRESAEHYIEAQRMRGWTALPDRYDDGGFSGGNMERPGLRRLLADIDAGKIDVIVVYKVDRLSRSLLDFMKMIDLFNEKGVSFVSVTQHFSTTDPTGRMFLGILITFAQYEREVIAERIRDKVAAAKRRGKYCGGVPILGYDVDRENKKLLVNPDEARTVQYIFRRFIQIGSAKKLGQELNEQGYRTKAWTTKKGRVREGSEWNTAHIYRLLNNRIYIGEIAHKDRSYPGEHEGIIDRATWDKVQAILEDNKPVKVSMARTKMVAPLKGVIRCGHCGCAMGPTYARKNGRHYTYYICQKDSKRTVSRCPLKRIPAGDIEQAVIEQLSAVFRTPTLVAKTYFAARDIEQAERERLFKQKAQLEMELSQAREQALELMKPGSDQPGKTEMLTTVNRQAVELSKQLTHVSERCRAYQGNSITEQDVSEAFQNVEGFWEDLFPVERNRLIRLLVDKVEIRETGIDMELRTNGLTTLIAELAGLACEVTERRASR

SEQ ID NO: 13042 - protein, 535 aa, synthetic construct
MNFYIEKFQPEEILEYLRKSRSDDPTLSVDEVLSRHREILRNWEERNLDGFVPEENIYREVVSGETLDGRPEILRILNRIEDPRIKAILVVDVQRLSRGDLEDCGRLIKLLRYTGTKVITPQKIYDLDDEYDRDAFERELKRGNEYLEYFKKIQNRGRLQSVAAGNYIGSIPPYGADKVFIMEGKRKCPTLAFNEKSETVVLMFHLAYYKHMGCVSIGHYLDAMGIKSPTEKHWNYQQVHRILRNPVYNGKVVWNRRKEVRTVENMEVHISRPVNNDYLCYPGKQPKLIPDDIFQGVQEFLDSHIARKNTNKELRNLLSGILYCGCGRSMNLRSYMQSTQKYSADRFVCPDQAYCNNGSILADDLLRTIFTALSSELESFETMQQNAPSQEETNVDTISLLSKQLSALEKKRISLWDKYTDEAMPRDIFEALKAKCEEDIVLTKKALNEAYTSADSQCKLSDTIYTIQQASRCIYDDSLSAAEKNVLLKAAIKKITYSRPRPNRYTKQEQRANKLPISHGGWMNPDPDITIEFNV

SEQ ID NO: 13043 - protein, 656 aa, synthetic construct
MSLRSKYTEHQICKLEKKEFMKEASFDDIFIDYGHDLNTLILCRESTAHEDQQKALNDQVERMKAIVDKHRQLHLVDEGIIIEDAKSGLAMDVRPKFQATIKRAVAEDIDVILVQEASRFSRNTGDFFYNMNILQNSGVGILIMEGEFWTYFMAPADYPRLANEVAKGQAESLTTARRVNRGIETYRSRGQLVSGNMFGYDLVKAVERKDNTYKINPVDGATVQLIFYMYVNKGIGTELIATHLNANNYPTAKRKGEWSASKVRRVIINEKYANLIMYGKYKVVDTSTKKKIATHIKPVRTTTYDKDGNIIQERNVQYGTWEPLVDEETWWKAQEIMDSRSNSYNLKDDTGKSKRCANGLRTSNDAYANKAYCCCGHTLSPQYTHAATDTKYAQFRYNCRWQINSHTDEYRKKHGLPPSDCTCKLPAVTDVAMRLMSIKVFEYLFTDIRDTIDDTVRIIEMANKQAVDSLNNSGVSVEDLEATYAKLNNRLSRFADMYADGDLTREQYRDKKSSVEEELKHTKELIDSKKLAISEQKKKSLDIETIKARLNTYVDLKGYGVSNEMIEFFVERIIRRPNNEYVWELNLTGQPSKPNKYKIKKYNKEYSDSLQDDSNFNIIKTFVISLDECKKFCETLAHRQFRASYWNQITVKIAVK

SEQ ID NO: 13044 - protein, 464 aa, synthetic construct
MARSVTVIPARSQKVRTGHKAVQEKKIRVAAYCRVSTDQEDQLHSFEAQVEYYTKYINEHENYEMAGIYADEGISGTNTKKREQFKKMIADCEDGKIDLVITKSISRFARNTQDCLAYSRKLKNFGIGIIFEKENINTLDSTGELLFTILSSLAQDESRNISENCKWGIRTKFKNGEMHLNTFKFLGYDKDENGKLVINKKQAKTVRRIYRDFLIGINPAQIAKELTEEKVPGCNGQTKWYPSTIVGILKQEKHMGDALLQKTYTADFLTKRQVKNNGEIAQVYVKDSHKGIIDKETWNAVQEEFERRERFMKDHGTDRYSYGADCMPFCEKVFCGECKSLFTRHSWKSRGIVQWQCKNHRTDGRVTCSNAYVDNSDIEKGFVKAFNKLVADREKFMERWNQMKTDGSSLEKIRAEQMMEATGNEPLGRFVPEITQLVLAEVTVLGAKKYEFFFLEGSRIKVSV

SEQ ID NO: 13045 - protein, 502 aa, synthetic construct
MEIQIREGNREQKRKLRVCAYCRVSTDADEQENSLENQIRHYETVIKANPSYEYAGVYSDFAISGFKEKRPGLQKMLADAQKGKIDLILTKSVSRFARNTSIVLEATRKLKELNVGVFFELQNINTLSGEGELMLTILAAFAQAESESGSVGAKMVYQRKYEAGIPVQYLERSFGFKKDERGVYIADEEEAVWVRKIYDMAAKGYTLAAIKRYLNENNVKTVGGAKWLDSTVLRILENEIYKGDYIMHKYFVNEERKLVRNRGEVDAWYIEDDHEAIVSPELWQKAQDALEAKRDYLAEGSVIEEFTEENYPYMNKIFCARCGHPLYKRIYSNGNRLNWGCSGTKRYGKSFCEGINIPDGVLRGAWHFDENMYIGEKQTDKGKKEFTYLKEASWKRRHKKKEPEPIPENTETEYPYREKIFCGLCGSRLVRHVNTKNHKVIWVCNGRKRKGKDFCDGTRVPDTIIKGWGEIKKDIYIQRKDDKNGKKRYSYTSKKPKGADRA

SEQ ID NO: 13046 - protein, 506 aa, synthetic construct
MPKKETTAPVKAVLYARYSSDRQREESIEGQIRVCEDYARRNNMVIVHTYADRAMTGRSDQRPEFQMMIQAAATQAFDVVLVYKLNRFARNRYDSAKYKHKLKKYGVHVVSAMENIADDPSGILLESVIEGMAEYYSAELAENVMRGMTENALECKWSGGLVPLGYKLDADHHLVIDEAGAQIVRRIYQMVLDGRTPTGIINELNAANCRTSTGRPFGKSSLTTILRNEKYIGTYTWNHIRKENAIPAIIDRKTFEAVQKTLQYRKNNHVKVCSENFLLTGKLFCGQCGSNMVGTSGTSKYKNTYYYYACTKHLKKDGCTARNIRTDKLEELVCSVTTRILSSKEAVHAIARQAVEAQKKQKESLTVQSLKNQAAEINKKLKNCVQAVESGLISVTITNHIKEYEKSLTELNKAISREELLSGKSRLTEKHIEFFFYSIAQKIKTADKYKSILLSSLVRCVIVYDDYIEIQYNYKNELPLLQNPVRVKSSNLNSMVTQERFELPTP

SEQ ID NO: 13047 - protein, 608 aa, synthetic construct
MNTAVNEYNYRFKLTDYSLFDRNRARKVAIYGRVSTEHEAQLSALENQLQWYDDQVKYHPNWTVCERYIDEGITGTQAKKRPAFLKMIEDAKQGKFDLIVTREVCRFARNVVDTLVVTRELKGIGVEVFFIDDNIWTMDGDGELRLSLMATLAQEESRKTSERVKAGQKISRDNGVLYGNGNILGYDRVGDTYVINEEQAETVRMIYDLYLQGYGSMKIAKILTERKRKTASGLIKWSVSNIMRAIKNATYTGTKCYNKSRSNNFLEQKRINNLDMSTYEYVEGDFPSIISQEIWDKAQAIRESRVKPVCVSAGKNTHSKRDSRDIWVNKLRCSCGSSYRKNKWHTKLDGKTSYGYQCYNQLNNGIKRKRAEIGLDTEGYCDSRMITDWKLDFMAKALLEHLWTERKESVLIALDLIKYYYKEEKSNETQSDTVTIQAKLDKANSRLTNLIAMRADGEISKDEYQAMRSPVDEEIKKLQKALDEIPQEKSNPKGLDIEGIRSTLNSFIDFSGSTISHDVVNQFVYLITPTSDTTFDWYVNLNGTADVKATFTAEGRKKNCIIKLEEIEKISSVHREKNEDNAHFIKNPHIFTYLHRLLSQTSNPHRMY

SEQ ID NO: 13048 - protein, 519 aa, synthetic construct
MKKVTKIDKIQPSQTSKKKLRVAAYCRVSTDSDAQLESLDAQKEHYKNYITSRDDWAFAGLYFDEGITGTKADKRPMFLQLIEDCKAKKIDFVITKSISRLSRNTTDCLEIVRTLLSLDIPIYFEKENINTGSMESELFLSILSSMAEGESASISENNKWSIKKRFLDGTYKLGYVPYGYRWKDGEILVDPAQTEIVKRIFRELLSGKGTEAIAKELNQEQVPTKKGGRWTSTSIRDIIRNEKYTGDCIFQKTYTDSNFNRHKNDGHLDQYYVPDHHEAIISHEDFEAAAALIEQRASEKGIKKGNAKYQQRYAFSSKIICGECGNTFRRRIHSSTYGKYAAWVCNTHLEDTSRCSMLYIRDDDLKLAFITMINKLVYCHKLVLKPYLKTLQENTGDASLLNIQQLEMLLEQNTEQRETLHKLMGQGYIDQILFTQENNALLSQANDYRNEIEALNRSQSLDATKVYETERLLHFCERGEMQMEYSEELFELFVDHIEVYSRQKIGFALHCGLILKEMI

SEQ ID NO: 13049 - protein, 521 aa, synthetic construct
MGNVMVIPAKRQVGNTARQQDAKPKLRVAAYCRVSTDSDEQATSYDAQVEHYTELIQKNPEWEFAGIYADDGISGTNTKKREDFNRMIDDCEAGNIDMIITKSISRFARNTLDCLKYIRKLKEKNIPVFFEKEAINTMDAKGEVLITIMASLAQQESQSLSQNVKLGLQFRYQSGQVQVNHNHFLGYTKDADGNLIIDPEQAEVVKRIYREYLEGYSMDRIAKGLEDDGILTGAGKTKWWTSTINKILRNEKYIGDALLQKTYTTDFLNKTRVKNNGIVPQYYVEGNHEAIIPKDIFLRVQEELVRRRVVKTSTNGKKHSYSCNHCFAQIVICGECGEMFRRIHWNNRGCKSIVWRCISRLEPTGQECHARTVNETILENVVVQAINTLLGDKSTYQAQLQQNIAKVIRSAQQNTADGIDEKLQELQKELLKKANNKEAYDEIADEIFKLREQREKCTVDTAARDAQIARINELQDFIKQQPAHLEAFDEALVKRWLERIIVWDDHFTVELKSGLKIEIDG

SEQ ID NO: 13050 - protein, 617 aa, synthetic construct
MNNRQTEPKITALYERLSRDDELQGDSNSIRNQKIFLENYAREHGFENCVHYTDDGWSGGNFERPAWKQMIQDIEAEKIGAVIVKDMTRVGREYLQTGYFTEIVFRQHGVHFIAIGNNIDSNDQNSTDLAPFFNIMSEFYLRDMSKKQRAAYKARGLAGKPTTNQAIYGYKKDPEDKHHWLIDEEAAEVVRRIFQMAVNGDGPGVIASKLRDDQVETPSYYETTHGICNRTARTDLSRPYDWYPGTVTSILSKPEYMGHTVNFRSTRESYKSKRVIHYPEEDWVIIENTHAAIVDPETWKLAQYTRRTIHRVDKTGVANPFTGLVYCADCGAKMYNHRMQPDPKKPGGVDPETGLYPYDHYDCSTYTLTMNRVDNGCKAHYISTKALRTLVLETIRLTSRYAIEHPEEFSQKVREASEIKQNKAAKELKKKIAQAKKRSVELDSVIKKLYESYALGMITESRFSALISDYEKEQAEVNALISMEQTQLDTYEADNQRVDQFMSLAKKYTDFTELTPQMIYEFVDRIIVHAPEKIDGERVQEVEIRLQYIGKFDTPLPDPTPEELAAEEKRRKRREINRRYNEKKKAKKLVAAQQESLEDAMAKADSMPSENDEQKTA

SEQ ID NO: 13051 - protein, 565 aa, synthetic construct
MTKLKKAALYIRVSTRYQIDKDSLPFQKQKLIDYCEFMGIKDYEVYADEGFSGKNTDRPSFQRMMSELRNGDISHIIVWKVDRISRNLLDFAAMYTELKKYRVTFVSMNEQFDTSSAIGEAMLKIILVFAELERNMTSERVTSIMLNRAEHGQWNGARMPMGYKWDDKIKFPVPDEEESKTVQFIFDKYEEVHSCLTVSRYLNNNNINTKRGGKWTSKTVNDIIKNPFYIGTYRYNVRESARGKMKPKSEWIVKENNHTPIIEKDQFERCAAIIQSNLKRDTSEYRRTNYVHIFSHLLKCGKCGSGFCSQKDKMRSNGYRPSMYRCAKRMHMKDCEQKIINDTTIGNFVFNYVSNVVRVQKDFSKINSLDKFEKALLKGPAFEDIAKIEEAGLQQMYNAILYNSATSNSLSFDFLSTTQADNNTAEIILLTKEKEKYAKAVDRLLDIYLYDSEAVSKEEFAKKQKDLQSKIDVIDEKIENLKTSEANNKNLNPLDTSFIKKATAFLVSQKILSARYIDFVDLALNSDPQILKDFVSQIIEYITVDENKVTKIKFINGIEHSFIRK

SEQ ID NO: 13052 - protein, 572 aa, synthetic construct
MRKRIVGYARVSTEKQDLERQKILIREYCSNNNYDLVKIISEKVSGAKKDRESINELLAVTKDTADMVVVSELSRISREKECLTVLNTINDILENGLDVLFLDDTSKVYSAYTELNVIDIITLTVKAHSAAEERDKITARMRTGKITKLNINPYMYTGSLVPYGFKVIDNPDYKGQKCNIPARKLMVIDESKTKDVQFIYQLVLNGTTLRDAAEEVNKLGLRTQLNKPFCETSISKMIKNPIYNGRRRFKGLNLPLMDKIISDNDWNRAQICVSQNQLFKGKTTKNFNPLKGLVFCPCGYALMLHKMIRKDGSGYFVMTCCKKNDKEYRKKCRNSGIVSHVLLPTVWKCVKDTLLLSEYTTKTTSEVHRINGIIEGLEDRISGLIDEIDSHKKEMARLSKAITLVTVKGLITQYENEYVTEEAKVTEIEAKINNIRDEISNYKANITKINSITYNSQLTNLTDQEKASVYQKVLSKVVYYSIDYFRGFIVISYKNGLENIIAINKTTTGYISPLPSSFSFNAETRKIRVTIAKKQTSIKEFSLSDIENIEYSFKELEANFNPQQWDIQSQIL

SEQ ID NO: 13053 - protein, 588 aa, synthetic construct
MKRAALLLRCSTDAQDYERQKLDLLDTIKGMGYTTSDDLVFGQYITGKDDVRKKDRESVAECKQAVREGKVDAIFINEVSRLSRDSIAGRLFIREFNDEYKIPVYFRDLGMWTINPTTRIVDRSFETMLGFHFDMAQNELKSMKTRFASGKRKNAREGKTIGGAVPFGFYKDEDGKLQVDEEQAQVVRLVYNKYLEDGGSIPSVCRYLLSCSYDKKFNKKFGTGSVRNLLRERRYIGEQRYNLVNPDEPDEAKKQEVYIYKVDSIIDTTIYNKVQIKLDKNRTTETKKVNKDKKVHLLAKLITCPICGDSYTSKTASANKSGERYRIWNYCCVSKYNFSECTSDITLNADNIESIIWQLTKKEILALQELSLEERQSKIEEAEQKLASYKDELDVVAKSIDKLNAKKKKLVALFLDIEDDDTAIFNEQREAINKEIDSYNNRIQFLNTEITICEGNIARFKEADFTDEVLDKIEQDLLKKKELIKEYIKVIRPYRLTKARLILEVESKQTNYCILFEPRNSKRRCWYIQSSLAQWQNGLLKTSTAPLGNFFYIPMASLLLDEPDDLDAIASFEDMKEICSINNYVIEY

SEQ ID NO: 13054 - protein, 521 aa, synthetic construct
MKKVTKIDGVQKNTAINSRLRVAAYCRVSTGSDAQLESLEAQKSHYEQYINSREDWQFAGLYFDEGITGTKAEKRPELLRLITDCEARRIDFVITKSISRFSRNTTDCLALVRKLQSLEIPIYFEKENINTGSMESELFLAILSSMAEGESASISENAKWSVKRRFQNGTYKLGYTPYGYDWDGKNMIINPEQADVVKRIFADILSGKSTNTIADELNAEKVPSKKNNHWTSSTIRGILANEKYTGDVIFQKTYTDETFNRHTNYGEVDQYMAPDHHEAIISHSDFDAANALVNQRAAEKGIEKGSDKYQQRYAFSGKIICGECGDTFKRRIHTCNTYKYVAWACNTHLKNKESCHMKYVRDDEIKTAFITMLNKLIYGYRLILTPYLKVLENSSGDEAIHRIQHLEQLIAQNSEQREALTKLMAQGYIDQILYNQETNALLLQAETYRSDIEAITIGMTGDAAKVTETNLLLHFVSHTDMLTAYSEELFENYADHIEVMSRNEIRFVMKCGLTFTERIDD

SEQ ID NO: 13055 - protein, 522 aa, synthetic construct
MGNVMLIPARRQIGSNARKQEEEKPKLRVGAYCRVSTDSDEQATSYEAQVEHYTEYIQKNPDWEFAGIYADDGISGTNTKKREEFNRMIDDCNAGNIDMIITKSISRFARNTLDCLKYIRQLKDMNIPVLFEKESINTMDAKGEVLITIMASLAQQESQSLSQNVKMGLQYRYQQGKVQINHNRFLGYTKDADRNLVIDPEQAETVKRIYREYLEGLSMDKIAAGLERDGILTGAGGKKWHTSTINKILRNEKYIGDALLQKTYTTDFLNKTRVKNNGLVPQYYVEGDHEAIISKDIYLQVQEELVRRRVGKTSANGKKRSYSCNHCFSQIVICGECGEMFRRLHWNNRGVKSIVWRCISRLESTGLECHARTINELVLQDVVVKAINQMLGDKSNYQAQLQLNIAAVIRASQATAIDSIDEKLMALQQELIQKANSKEDYNEIADEIFRLRELRQKTTVDTAARDEQIKRINDLQDYISQQTALLTEFDEALVRRWIKQITIWDDRITVELKSGVSIDVNA

SEQ ID NO: 13056 - protein, 515 aa, synthetic construct
MKTVTKIDRIADTATKKKKLRVAAYCRVSTDSDAQLESLEAQKAHYENYILSRDDWEFAGLYYDDGISGTNTKKRTEFNRMIDACMDGEIDMVITKSISRFARNTLDCLKYIRQLKDRSIPVYFEKESINTMDAKGEVLITIMASLAQQESQSLSQNVKLGLQFRYQNGQVQINHNRFLGYTKDAEGNLVIDPEQAEVVKRIYREYLDGYSMDKIAAGLETDGILTGAGKTKWHTSTINKILRNEKYIGDALLQKTYTTDFLNKTRVKNNGLVPQYYVEGNHEAIIPREIFLRVQEELVRRRVVNTSANGKKRSYSCNHCFSQIIICGDCGEMFRRIHWNNHGCKSVVWRCISRLEPTGLECHTRTVNEQELEAAVVKALNELLAHREGYQNQLAKNIATVIRASATASTDAIDEKLLELQQDLLKKANNKEAYDEIADEIFRLRELKQQTAVDNVTWDEQISRITELQDFIRSQSAELTEFDEVIVKRWVQKITVWPDRYTVELKSGLSVDVEG

SEQ ID NO: 13057 - protein, 526 aa, synthetic construct
MGKKQKTNGGDAVIYARYSSHNQRDVSIEQQVEACRKHAAELGLTVTATYEDRAISGKTDKRPSFQRMMRDAEQHKFAYVLAWKSNRIGRNMMQALVNESRLVDCGVKVFYAEEDFDDNAAGRFALRSMMNVNQFYIENMAEDVKRGLYDNAKKGLVNGSLPLGYKRGADGKPEIDEPKAAIVREIYTRVAAGELFASIADDLNARGIKTARGREWNKGSFHVLCHNDRYRGIYMYGDIRIPGGMPRIISDELFYDAQEAYSMKKDNRYGRARHGAENYLLTGKLYCGHCGGYMVGISGTSKTGEMHYYYACQKHRLEHTCEKKAIRRDVIENAVARAIMMYCLDDETIDFIVDSTIAYFKQKDHELHIEAMENELAAVQQAISNLMKAIEAGIITPTTRTRLLDLEEQQAKLSAKINTAKAERVEIDRDDLIAGLQLFRTGDIKNKKFLAKLFNTFLIAVYLYDDNRLKIVFSFTGNHNSVEIPLELDNDCPDSQIVSDETEVRMSHLECRRRGSNPYSVSRKGF

SEQ ID NO: 13058 - protein, 559 aa, synthetic construct
MRTIRKIERRIPNLKQRKKVAAYARVSMESERMHHSLSAQVSYYSSLIQKNPDWEYAGVYADYGISGTGMKKRQEFLRMLEDAEAGKIDIILTKSIQRFARNTVDLLRTVRHLKELGVEVWFEKENIHTMSGDGELMMTILASFAQEESRSISENVRWRVKKRFEQGNPNGRFRVYGYRWEGDTLVIVPKEAAVVRRIFQNFLDGKSRLETEREFAAEGITTRNGRRWMDSNIRVVLTNVTYTGNMLFQKEYVTDPILKKRKKNRGELPRYYVENTHEPIIDKETFDYVQQEMARRKELGALANKSLNTTCFTGKIKCGICGRSYMHNRRTDRGFEEFWDCGSHKLKGRNCGAKGSIPHAVLVKESTEVLGLDDFDEQAFLDRVEKIVVPEYHVMVFCMKNGQKLIRHWVSTAKKDCWTDEYKDRQRAWMKNYMANGKGTRFSVFTTRIRCALCGSSFRRCKTKHDRPVYWRCSKGGKCESVSIREDDLKRVAAETMGLEDFDEDRFRGKVESIEAGKPDCLTVHFKSGRTEEISYTPTPSKRRPKARRKESGEKWQRQ

SEQ ID NO: 13059 - protein, 503 aa, synthetic construct
MEITVEKVDTGVQKLGFQALSTLKTVRVAVYARVSTDQEIQLHSLEEQMKAFRAKIAQHPGWMLVDVYADEGISGTSVKKRKEFLRMMEDCEAGKVDYIMAKSISRFARNTVECLSYVRHLQSIGVQLYFEKEGLDTATSVSELILTVMAAFAQEESRSISENLKWGIRKRFESGESRWTKTYGYRKTKDGEIVIEPDEAAIVRMIFKMYQYGIPMTDILDELTFIQAPSARGKQTWNKTALKYLLENEKYIGDMRLQKWVSVDHISHRSVRNDSTVIPVYNVRNHHVPIIDRHTYQQVQRIMELKSPHGEYSRYPYFDTNIVCPLCGKKMIPRVMKVNSHKRILGCFDVDGCRGYAVKGYLVDAALLEAYNTLEIKEKKRTVAMQRMLEIKAESPKLDTVQYYWLDDLVGHIEFKQDTMRVFWKCGLESEVALNASKVEEPTHVAELYRNSLDRAQRSENKPVSVVRADKKSVNAREAQRNAAMQTAKNLRAKENGVAANDY

SEQ ID NO: 13060 - protein, 404 aa, synthetic construct
MIIKKVMPKIPVAKKRVAAYCRVSTFRNEQDESFETQQKYYEELIQSHPDWELVKVYADRHSATRVKNRPGFQEMAAAAEAKKLDIIICKSISRFSRNMVDCQQYAKWFRTLGVTIIFEEQNIRTDDPTCDFVLSILAAVAQDESHSISENEKAAYASRFARGEYNLGNNRILGYDCVDGELVPNKDAWIVKEVFRRFIEGESYRQIAKGLEELGAQSLHSKKGFGVETLRYMVSNETYVGNKRLQKKAPLDYLTKKPNPNQKVESNYLWDDHEAIIDRETWDKAQEILEKRKELAKVGIHKTNREHHFLYGKVFCGECGAPFLRRTLKAAGGFKTQSTYKAWNCRNRQKGKGNERCGNRFIKEEELIDAILRELEWLNMDQERFEKEVSKVQVYPDHIEVEKN

SEQ ID NO: 13061 - protein, 517 aa, synthetic construct
MRKITRLEPKKTALPTRKKVAAYARVSKDTERLLHSASAQVSYYSELIQKNPEWEYAGVYVDCGITGTLTYKRDEFKRMLTDCEAGKIDIILTKSISRFARNTVDLLETVRHLKSIGVEVRFEKEGIHSFSEDGELMLSLLASFAQEESRSISENVKWGIHKRFKSGEIGVANKHILGYQYDEEQKKYIIIPEEAESVRWMFQMYIDGVTLRDIADNLNNAGICTILGNDFQEASVRQLIFNEVYAGDIRRQKCYVSDPIKKDKVPNRGELPQYYMADCHEAIIDRDTYAKVKAEMERRASLLNPTYCFTKKIRCGTCGAQFTRKKGKVRGKTYVHWICRSKKETGMTCSSVNFSEEELKNICADVLETDSFDEEIFESRVKDIIVLKNGDIEFHLVGGETRRWKNLHLNPPRHKVTLTDAFQGKIRCAKCGNTYHRVNSANKWVYWYCMGKKKKGMTCDNINYTDFQLRQITAHILGLEDFDEQVFSEQIEGITVLEDGNLEYHFYKGRTERWQRV

SEQ ID NO: 13062 - protein, 521 aa, synthetic construct
MRVAIYCRLSREDDDKLHENDESESIQNQKSMLINYAIERSWDIYNIYCDEDYSGIDSERPEFNKLLEDAKNHKFDIVLCKTQSRFTRDMEMVEKYLHNKFVEWNIRFVSLVDHVDTLDKGNKKSRQINGLVNEWYLEDLSENIRRTFDSKRKQGLHIGSFVCYGYKRSPENKNKLVIDEESSDVIRLIFNLYEQGNGITKIAQILNDKGILTPTKYKQSQGINFKNQGKNIDYWCESTVSKILKNEVYIGNLVQGYNKKVSYKSKQMKNQPKSEWIIVENTHEPIITREQFYKVQEIFKSKTRRCKNGEVHLFTNKLVCLDCGSKLYKCRNDRGYVYFSCKGSKKLYGTCTPHSIGYENLKNLVTEKIREKILAFYNFDNISDDLFVSNDNLNKAKLLENKALLLSKEMENINKAIKELYLNKVSGKVPEEVFEDLNSSFLADKSAKQKELTKLESDLSNLKEKELNSKFIKEQKEKIINHFKDFKELNYDIVNSFIDYIEIGEKDRKTKTQDIIIRWNF

SEQ ID NO: 13063 - protein, 585 aa, synthetic construct
MKQSKNVSDKLSNQKCALYVRVSTHWQIDKDSLPVQREDLINYAKYALNIDKYEIFEDAGYSAKNTDRPAFQQMMARLRTGEFSHLVVWKIDRISRNLLDFAEMYAEIKKLGITFVSKNEQFDTSNAMGEAMLKIILVFAELERNMTSERVTAVMLSRASNGQWNGGRVPYGYNYDKETGLFSINEAEASVINMIYDTYERVHSLLVVARTLNEKGILPRSGTPWSPTTISTILKNPFYTGAYRYNYHDESKSGGNTSSKFLKPKADWISVQEHHPAIVSAERQERVCAILEDNRRSNKRSSKTYVRKNIHIFAGILYCGYCGNQMQSTIDRERADGYRPSIYACSRKRRFDDCENKYISDVVVAPFVLNYIANVIKAQNNFGKSTSIETFERKLLRGPTFSEVEHIEQVGLQEMYDMLRSGISDAVYTSRTLSDIAGAEELADERDLLLAEHRKKERALARLKSLYLYNDEAISESDYIIERKNLSDSIASIDKRLEEIEKHSSRQFTLSDDEFLAKASMFIMTHHLQDKRYVDFEKLIRKVEPIIIKEFINSVTQKIVIKQGRIISIRFKNGIEHKFLYKTQE

SEQ ID NO: 13064 - protein, 524 aa, synthetic construct
MPKKEALFMPKTEEKQAAKAVIYARYSSDRQREESIEGQLRVCEDYARRNNITILHTYADRAMTGRSDQRPEFQMMIRDAATMAFNVILVYKLNRFARNRYDSAKYKHKLKKYGVKVVSAMENIADDPSGILLESVIEGMAEYYSVELSENVLRGMTQNALEGKWPGGVIPLGYKLDKGGRLIINEEKAPIVRMIYQMFLDGMSVARIERKLNDKKYTTDAGKVFSRSRVYYILHNERYIGTFQWKDIKKEGIIPPIISKEAFHAVQERINAMKSSSYRTNNNYLLAGKAFCASCGAKVSGTSGKSQNGNKYCYYGCSHHHRSARYEYCETKNIRADVLEKLVCDKTHEILSSKKAIKEIARQAVKLRPRDESELEIRAIKNHISSCQKKIDNCIKAIENGVMSNALVESLNENERTLDVLKEKLAKASLMQGSGLLTEEKIQFFFETIREKAKETEKYNDILLTSLVRAVYICNEYVEIQYNYAEQLPILTNPVRIESCSYKCTNGGTIWIRTKDLFDVNEAL

SEQ ID NO: 13065 - protein, 567 aa, synthetic construct
MRSKNKNQIGITALYCRLSRDDGTESESNSIGNQKKLLSQKAKEMGLTDTKYYVDDGYTGTNFNRPGFQQLIDDIEIGLVSAVMVKDLSRLGRDYVSVGNYTDSYFPEHNIRFIAVNDAIDSDEGESEIAPFKNILNEMYARDISKKIRSSHRLRGSMGEPLSQPPYGYMKSPENKKKWIIDPEAATVVKSIFKMCLDGKGNETIARELQESEVLIPMAYWQSKGLNRGGKKTQTNPYKWCKTTVQKILSQQEYCGDIINFKTYSKSFKNKTRYENSKENWAVFKDVNEPIIDRETFETVQKFISKTKRRAPKKENGERSIFNGLIYCGDCHSKMRYHTSTSNKGIHYFTCSDNKVDYRGKCPGRHYVRADALEKVVKLELRRLVEMLEIDESYFAQLLLRKNDEEREKDKKFLETELQKAIARSGTVSQLYEKLYEDNVIGKVSDEWFVELSHKYEKERMNLKAKIADTRHKIEELKNNNSEYEKFISAIRRFMQMDNLTSPLLRELIDHIDIFETEGTGKSRTQRIVIYYRFIGYIELPNTTKQTHIADTRKGVAVEYITEQLTA

SEQ ID NO: 13066 - protein, 572 aa, synthetic construct
MEYRRIESCENARYNDNTACCICRKGRFNMTDKITALYCRLSQDDMLQGESNSITNQKAILKKYAEDNGFSNTVYYVDDGVSGTTFERDGFKAMMADVEAGKVSTVITKDLSRLGRDYLKTGEYIEIIFPDYDVRYIAINDGVDTLKSENELMAFKNIFNDWYARDTSKKIRAVFKAKGQSGKHLSSPIYGYKHSETDKNLWVIDDETAEVVRKIFRLCIDGYGPAQIARILTEEGIPTPTAYALSQGRDNGHKNAKLDRWGSETISGILEKPEYCGHTVNFRTHVKSYKNKKRVNNPKEDWLIFENTHEPIITQQEFDLVQELRKNKRRPTKHEEVNPFSGMVYCADCGKKMYLCRATSLTADQEHLKCSTYSLDKDACSAHFIRTIVMKEIILGELNKMISFVKENEDEFVQAAMDNSIQKQSSELAKSRKELRDAEKRIAELDRLFIRLYEDNVSGKISDERFSIMSAGYEDEQKKLRATAAELADFIETAVQKSADVNAFIQVVQKYENITELTPEIMHELIEKIVVHAPDKSSGHRTQEIEIYYRFNVAVATAVADSMKYDKKRKAA

SEQ ID NO: 13067 - protein, 464 aa, synthetic construct
MARIVTVIPARNRQRETGHRAVQEKKIRVAAYCRVSTDQEDQLHSFEAQVDYYTKYINDHENYEMAGIYADEGISGTNIKKREQFKRMIADCEGGKIDLVITKSISRFARNTQDCLAYSRKLKNLGIGIIFEKENINTLDSTGELLFTILSSLAQDESRNISENCKWGIRTKFKNGEMHLNTFKFLGYDKDENGKLVINKEQAKTVRRIYRDFLIGINPAQIAKELTEERVPGCNGQTKWYPSTIVGILKQEKHMGDALLQKTYTADFLTKRQVKNNGEIAQVYVKDSHKGIIDKQTWNAVQEEFERRERFMEAHGTDRYSYGADCMPFCEKVFCGECGSLFTRHSWRSRGIVQWQCKNHRKDGKVACTNAYVDNADLEKGFVKAFNRLVTDRDKHMERWDQMKTDGSPLEKIRAEQMMEATENEPLGRFVPEIAQLVLAEVTVLGAKKYEFFFQEGSRVKVSV

SEQ ID NO: 13068 - protein, 498 aa, synthetic construct
MEIQIREGNSRQKQKLKVCAYCRVSTDADEQENSLENQIRHYKEVITSNPDYEYAGVYSDFAISGFKEKRPGLQKMLADARKGKIDLILTKSVSRFARNTSIVLEATRKLKELNVGVFFELQNINTLSGEGELMLTILAAFAQAESESGSAGAKMVYQRKYEAGIPVQYLERSFGYTKDEREVYIADESEAVWVRKIYEMAADGYTPAAIKRYLNENGVKTVGGTKWSDSTVFRLIENEIYKGDYIMHKHFVNEERKLVRNRGEVDAWYIEDDHEAIVSPELWQKAQDAIEAKRDYLAEDSVIEEFTEDNYPYMNRIFCAKCGHPLYKRIYSNGNRLNWGCSGTKRYGKSFCEGINIPDGVLRKAWHFDGNMYIDEKPSVKGTKEFSYLKESSWKRRHKKKVPEAIPENTEEAYPYRKKIFCGLCGSRLVRHVNPKSHKVIWICNGAKRKGVAFCRGTRIPDSVIRGWGEIKKDIYIQRKDDKNGKNRYSYTSKKPTA

SEQ ID NO: 13069 - protein, 526 aa, synthetic construct
MANVKYIPATKMRHSGAPIESKTKRRVAGYARVSTDSDEQLTSYEAQVDYYTQFIRKNPDWEFVGVYTDEGISALNTRHREGFNRMIADALEGKIDLIVTKSVSRFARNTVDSLTTIRKLKDYGVEVFFEKENIWTFDGKGELLLTIMSSLAQEESRSISDNITWGQRKRFADGKVNMPFSSFLGYRRGKDGKPEIDPEEAELVRLIYRLFMGGKTITGIATYLTQQGIPTPRKKARWRDSTVESILTNERYKGDALLQKQFTVDFLNKKMKNNEGEVPQYYVTDSHPAIIDRTEWELVQAEMARRKEKGNHQNSLNVFSSKIYCGQCGSYYGSKVWHSTDKYRKVVWRCNGKYERQTRCSTKHLTDDEIKRLFISAVSKLHAERETLIEDCRFMREILSDTSGLEAERARLMEELTAVGLLTQKLFDEEAAGTIKKKDFDARHASYVERYNDLQAKLKAIADSEKRKRQQIKVLDRFIKDIRGMKALPIDFSERLWNALVEKLTIYPDGTAEFLFKNGTTVTEKL

SEQ ID NO: 13070 - protein, 424 aa, synthetic construct
MEIRIEKKNAIAPLPRLKNVAAYARVSSSKDAMQHSLAAQISYYSGLIQSHSGWRFAGVFADDGLTGTKESREGFQKLLAQCRAGEIDVVITKSISRFARNTVTLLSTVRELKSLGIDVFFEEQNIRSASSEGELMLTILASFAQEESLSASENQKWRIKRNFEQGRPWSGKLFGYRLVNGTFILLPDEAVIVRRVFDEYLSGRGTEAIANGLNADGLTNRGGKWYPSVIAHMLRNVDYTGNLLLQKTYREDHLTKRKKKNDGVLPQYFVEEAHEAIVDSDTFEAVQKEAEGRLAKYKHENKGSEKYAFTGLIVCAVCGRKYKRKKTHAGPVWICPTFNSAGKAVCPSKQIPEETLKELTAGIDLSTVERMTAENGNVLRVRFRDGTERTLVWKDRSRSESWTDDMKRKAKDAAEKRWKKNGER

SEQ ID NO: 13071 - protein, 606 aa, synthetic construct
MENERTLLPAVAYYRYSPGGGQTEQSIEGQRRDCLAYARSHGYVIVKEYIDRHMTGRNDKRPNFQLMMHDAELHRFDTLIAWKNDRISRNRRDALNYKDQLRRCGVQIRYAEMDIPRGPEGILMESVMDGLAEYYSAELAQKIRRGMTESAHKCYALGSTPPFGLMVKDHKYVPDPATAPYVRWIFEQYASGTLITEICSTLNAKGVRTARGHEFNKNSLRVLLRNEKYIGVYEAKGIRTEDAIPPIIPRDLFYAVQQRIPQNAHSGHKLSGPRSFPLSGIAYCAICGAPLIGTCGTGKSGAVHTYYACTAHKHKRTCAKKNIRQASLEKQVYTATLDYVLQPSVIRPIAKQVEALSAADNANQEEMLAVQSQLKDTTRRINNILTAMEEGDFSKAVSARLSVLESEQTRLEGQLAALRRAKPKVTASRVEFMLEKMRQTLTDLTSDQLTALTKIFLSRVDLSDDELILTYTLIGTPSSPHPITLKDTPSATLVPFPLCSQDVHSAPPYCANPNSIFFVKYCFGFVFVLEDVDLSTSSFFRRIVSKRLFSIPDASRGRVAPANPRAAYMRPLRRSKKQKAAYLKRDKRLLAGVEGFEPSARGFGDR

SEQ ID NO: 13072 - protein, 556 aa, synthetic construct
MRVSVNLNAQKPDTTTNAVIYARYSSHGQTEQSIEGQLAKGHEYAAAQGYTVVHEYIDRAMTGRNDNREAFQKMLSDTGKHQFQVVIVWKVDRFGRNREEIAFNKHTCKKNGVRVEYVAESLPNSPEAVILESVLEGMAEYYSIQLSQNIRRGQLESAKKCQCVGGSVPLGYTLDSDKHFVIDPQTAPVVKKIFDLYAEGATISEITGQLNEQGIRTARKQLFTKNSLTKLLKNEKYIGIYAYKDVVRVEGGVPAIVDKSTFDRVQELLKINRRAPSHTWTKVEYLLTDKLFCGHCGSPMVGESGFSHTGAKYSYYGCIKRRREKACDKKPVRQDWIEALVLDETVKLLHDDELMEYIIDRTWEYYQITDKVQEEKAVLEAQLAEVDKAINNLVRAIEAGIFNAATKSRMDELDAQKAALTASLADLELTSGIRITRDHIEYFLLRLRDLDVKDRECQKRLVQTFVNAVFVYDDGRVKITYNYSGQSSTITLNQIASAEKGKGFVCCLPCSTFSPRFRVGSRGIFCFLGKTGRKYTTNFSCFVLQWKRKRQRGNGK

SEQ ID NO: 13073 - protein, 525 aa, synthetic construct
MWMLPQMSVDDIIMYLRKSRTDDPALTVQEVLSKHEQMLDDWVVRNIPDDGRKIPEANRYREVVSGETIESRPCVQEVLRRVESPRVKAVLVVEPQRLSRGDLEDIGRLVKLLRYSNTIVITLQYTYDLRDERDRDMFERELKRGNEFLEYQKRIMGNGRLLSVQNGNFIGQKPPYGYNKVVIKEGKRKCHTLEPDPERAPIVKMVFEMYAGGTSASQIAKILRTMGVTTADGGKWVMSSVKQMLTNDHYIGMVHWNKRKTVKVVEDGEVVATRPRNSDFLVYPGKHQPIIEKELWDAVQAIKGNIPPIKNRAKYANPFAGLVVCQCGGKMVRQQYVRDGVERCAPRLVCPNQAECHTASCSLPEFTEAVIEALEKGIKNFELMMADAPEDDATQQERLIAQLEKRLAELDRLELAQWDKYTQEAMPKHVFDALNKKVVQEKEETLQALKTAMETVPIRVDYEKKRETFAVVVRTLQDPNASVKEKNLLLKQCIERINYNRKPKESDNRRFGNPEPLELEFQFKV

SEQ ID NO: 13074 - protein, 463 aa, synthetic construct
MRRKTTAPVEKILLRVAIYIRVSTDKQVKDGDSMRDQLATGQKYIDSHENMILVDTYIDDGISGQKLKRDDFQRLIDDVRAGRIDLIIFTRLDRWFRNLRHYLNTQDILDKHGVSWTAIEQPYFDTSTPHGRAFVNNSMIWAELEAQNDSDRILGVFDDKVDNGEVLSGSTPLGYRIVNKHLVPDDDAPTAVAIFQYYRKTGNLSMTLRYMESEFGLVRSAASLKNMLTNTKYIGEFRDNKNYCPAIIDRDLFFDVQRLLKINIKSGKKHDYIFSGLVVCDDCDHIMSGCQQRARGRVRADGTRIIYKYSVYRCRQGVNLHRCPNRKLVFETTLEKMLLERIRPELENYIAEYEVANLPALRTDAKRRSVEGKMQKLKDLYLNDLITMDEFKLDREKLLMQLEKINAEDSRPVKDLSYLKNFLKMDFESVYDSLSIPERRELWRSIVKEIRVDHDKNIHIIFL

SEQ ID NO: 13075 - protein, 498 aa, synthetic construct
MQIEVRKADMGKEKKRLKVCAYARVSTEASEQENSLENQVSHYTEMIQSNPAYEFAGVYADFGISGFKESRPQFQKMMQDAKNGKIDLIITKSVSRFARNTAIVLKASRELKERNVGIFFELQNINTLTEAGELLLTILAAFAQAESESASESSKMAYLHRIENGEVVAYLERSYGYEKDENGEYRAKEPEASVIREIYDLVIQGVNCTNIARVLNARNIQTVQGAEWTASTVFRIVENEIYKGDVLMQKTFIDGKRHQVQNRGEKAMYYAKDNHPPIVSEKTWEKAQRKLEDMRAERAEHSVIQEFTEENYPYMNHIFCAKCGWPLKPRVYSHGHRLSWDCSGQKRGTKKFCTGIHVLDNDLRKMKIEGNRYFSGTVDKYGEVHLKHVGERTWKNKHKKKKFNHKELYPELNEENYPYYKRLYCARCGSRLGRYISHGTVRWICLNYKRKGQAKCPGVRIPDEIIKGWNLPDGKIYIMGKEDKNGEKHYSYTSESAL

SEQ ID NO: 13076 - protein, 465 aa, synthetic construct
MARSITVIPASQPYRVGGRTQQKTRNLRVAAYCRVSTDQEEQLNSFENQVEYYTKYIQDNPLYQMAGIYADEGISGTNTKKREEFKRMIRDCEEGKIDLVITKSISRFARNTQDCLEYSRRLKNLGIGIFFEKEHINTLDASGELLFTILSSLAQDESRNISENCKWGIRSKFKKGIPQVDCTKFLGYDKDDDGKLIVNQEQAKIVKRIYQEFLNGYNPAAIAKMLMEDHIKTGTGREEWRSASVRAILKNEKYMGDALLQKTYTADFLTKKVKKNHGEVEQFYVKESHEAIIPKEQWEAAQLELERRDSYMQELGLTFYGYGSEVNPFSCRVVCGKCGAVCGKKSWKSRGVEFWQCNNRSKNHGVKGCASENLPHENLLKGFITAWNQIVAEREQYLPKWEKKKKEGNPLEKLRAEQMIELTLQPPLTKMLPELGQMVLERVIVQGKEILFIRFLDGTEIKVRI

SEQ ID NO: 13077 - protein, 520 aa, synthetic construct
MVIGIYPRKSVYRDNSESIQTQIQMCKDYAALVFKGKDISFHIYDQDEGFSGKNTKRPSFQEMMSDVRNDLLDVIVVYKLDRIARNVAQFSAMYEIFQRHNVSFVSVKESFDTSTPMGRTVMYILAAFAQLERENTSERVSDSMKALGTAGIWTGGNLPPGMKSIRRKNGSKEHSYLVVDPESIGFVKLLYQLLLDGYSITRVERYCRDHGFKSRTGKFMSTSQIYNIITNPVYCDNSPEAYEYFSALGCQIPDQIDDPIFFDGQHGLIAYGRTKTNDTTQKRQNAAGWTLAIGIHEPVIPAADWIAAQNRLGINKMCRTAKYEVGLLKGVLRCRCGARMDIRTHKKNNILFSYYYCSKMTRQGKDACASGYTPVSNIDNAFIRELRKIRLDPSRIQCRHETPEALNPDTLQAEIRNIQKSISNLTAALQQAMDSPAAAYIIDQISALDKQKRALEADLQKAKRQQFENRALQETEKMIHENICYLLDHFDEIDYSGKNKLIRNTIKSCILNGESLRIVF

SEQ ID NO: 13078 - protein, 528 aa, synthetic construct
MTKRKWGELMKTITKIEEIESVGPAKKIRVAAYCRVSSSSDDQLISLETQKAHYETYIRANPEWEFAGLYYDEGISGTKTSKREGLLSMLKDCGRGKIDYIVTKSISRFARNTADCLTMVRKLLELDIPVFFEKENINTGSMESELMLSILSSLAESESVSISENTKWAIQRRFQNGTFKISYPPYGYQNMDGQMIVIPKQAEIVKYIFAEVLSGKGTQKVANDLNQKGIPSKRGGRWTATTIRGILTNEKYTGDVLLQKTYTDSHFNRHTNYGEKNMYLVENHHEAIISPEDFEAVDVVLNQRAKEKGIEKRNSKYQNRYSFSGKIICSECGSTFKRRIHSSGRKYVAWCCSKHIGNITECSMQFIRDEDIKTAFVTMMNKLIYGQKFILRPLLNGLRNQNNVASFRRIEELETKIENNMEQSQMLTGLMAKGYLEPALFNKEKNSLEAERERLLVEKDQLTRSVNGNFTKVEEVDRLLKFATKSQMLTAYEDELFENYVEKIMVFSREEVGFELKCGITLKERLVN

SEQ ID NO: 13079 - protein, 559 aa, synthetic construct
MAYRKITDIKDTIGMRAVFYARVSTAEEEQLNAIELQIEENRGCIKDHGWKLVGEYIDRSKSGTMVKGRDDYQRLYEDLYEDLFDIVVIKDQERLQRNTLDWYLFINRVVQTGKLLFMYMDGKFYSPDDALITGVRAIIAEEFSRNLSKKLHNYHDHRIEKARQGQEIALQGSGNVYGWDKKDGKYYINPEQAKVRRLMCEGIMARKGSTLIAKELNDAGYRNTVGKPWKPMDIPKFVYDCKNVGTMIINKERHDFESKQTIKLPKEEWVYVENALPPIVTQEEWDLICKIHEERVIATGSDRRGKKTSGYSFSGKLVCGICGAPYWRKQRVSKDEYWVCSTKQTKGRRTRKRDSTMGKAGEINPLGCDNENISYNSLMEIMGVVSERLQANTDTIKQDMINWLTKLRKQLLEANGGHTEVDLQRELSRKSKLLDAYLDGILNKQEYQKKAEELDERIIQLKAETEKNKANSGDIAEIDKVLANIDEEVARYVDGNEKLKVEYLLEHLEQVQIFPDKVIVIVPILNEGIVVEKTQYVSREKWSGKVHTHEHNNRKYQAK

SEQ ID NO: 13080 - protein, 468 aa, synthetic construct
MLYGKPQNYSWYRARVVLYIRVSTDEQARHGYSLGAQREALREFCDTFQCQIVAEYSDDGVSARKEIQRRPGLLRVLEAVKAGGVDYVLFIKLDRWFRSVREYYRVQDVLDAAGTNWKAILEDYDTSTTNGRLNLNIRLSVAQDESDRTADRIKFVFSERVKNGGAIFGSKSLPYGLEVRDHRVQIVEDQAVIVRAFFDHYEAAHSTRSTQVWLRDQYGVDLPRATIGRMLRNGLYCGQYRDNKNYCPAIISLDQFQRVQEILARQASGHTRQSKYSYVFTGLLRCPVCGCTLKAFPQFDYKWNRLYLRYRCTQHWIERRCSWKTTPWEPRLEDWLLDHIQPQLDAYIAQFDVQEAQRRRAVVDVCAIQRKLSRLQDLYVDGMIDRAAYDEKYQALIRQQEAAQAAQQSQSAGRDLEPLRQLLAGDFRSIYATLSPQERHTLWASVIDHIVVKDGRYGHYDLDVIFLP

SEQ ID NO: 13081 - protein, 529 aa, synthetic construct
MSRYCIYLRKSRADLEAEAHGEGETLSRHKTALLELARRMGITISATYEEIVSGETIAARPQMQRLLSEVGAGEWDGVLVMEIERLARGDTMDQGLVAQTFKYSGTKIITPLKTFDPQNEFDEEYFEFGLFMARREFTTTNRRLVRGREASAKEGKYVGSVPPYGYRKVKIPNDKGFTLEIIEEQAKVVRMIFEWYAEGAEVNGQKKRIGPYTIAVRLNELGIKSVAGKDYWTIYGVQHMLINPVYIGKIRWGYRKVKKTVTPEGMKKKSREFAQDGDYIVVDGLHEPILSEELFYKVQDLIAANPPTPIKYRNNNVNPFAGLIFCTKCGHCLSYRKGYGRHPGYLGCNIAGCDNKAAPFELIEQRVLSILNSWVKDYSVDKAQIKHEADLNAELTNAISLAEKEIETLQDQLDNVYSFFERGTYTEKIFKQRSSAIEQQITDIGEKIDRLKAEHQQVLERQNVQAEFVPSIKHLLEIYDTLEPVEKNKWLKQIIDRMVYEKNADGKYRNVDPGDFTLGILPRLPKKGS

SEQ ID NO: 13082 - protein, 467 aa, synthetic construct
MKRAAVYIRVSTQEQAQEGYSVGEQKERLIAYCKAQDWLIADIYVDGGYSGSNLNRPGIQKLMGETDKFDVVLVYKLDRLSRSQRDTLYLIEEVFLPHDVDFVSMQESFDTATPFGKAMIGLLAVFAQLEREQIKERTRMGRIARAKSGLHHGGGFAPIGYDYADGKLTINPYEAEQVRKIFQWYIEGESLRGIMLRMNEAGFTNRYSSYKSWTCIRNILDNPLYTGQLHFGEVIVENAHEPIISKETFQMAQSLRKKKRGKFGVTSFSSKHLLTGMVFCGKCGARYYVKSNGVYKYYCCYSRTKQLPTMVKDPNCKNKYWRAQDLETVVEKEVRKVLKSPKLAKEIAEANAPRAIVPNKNASIEKRVHEIDKQIGKLMELYQTDSIPADILGDSINKLYNEKTSLESMTEKEEKDSVLPFDLAKELLSDAAQVWDFADGEQRRRILQSLVNRIIVTDDKVDIEWSF

SEQ ID NO: 13083 - protein, 516 aa, synthetic construct
MSYCIYLRKSRKDLEAEQHGEGETLARHERALLSLAKKNNLIISNIYREVVSGETIAARPVMQQLLREVEQNLWDGVLVMEVERLARGDTIDQGVVQRAFQYSNTLIITPSKTYDPANEFDEEYFEFGLFMSRREYKTIKRRMQNGRYAAISEGKWPYNSAPYGFRRTKLEKEKGWTLAFDENEAPVVRLIFSMFTGPERVGIRSITRTLNSYGTKPRNSKLWSESTVRGILSNVVYDQCVKIGERKVVRTVENGILTTTRPRTSDYTIVSGRHPRLIDHDVFAEAQSYLGCGSPKPAGSNIIKNPLAGIIVCSECKKKMIRRPPSGTASRVPYDLMLCSTYDCPTIGSPLDLVEREVYNALSDWVEGYRLSGQTPSKSLIPEKEVLLESAQQTLDQLLRQKGTMYDLLEQGVYSTEVFLERSASLQSRISEAQSNVAQLKLELDKERQREANIEQFLPACEDLLSCYWDLSIPERNRLLKLLIESIEYKKLTKNKRGHLNEPNFELTIKPRIPRK

SEQ ID NO: 13084 - protein, 668 aa, synthetic construct
MAYAKAKKHLKIWTKKKAALYVRVSTRYQVDKDSLPFQRKKLKEYCKFLGLEDHVIFEDDGYSAKNTERPHFQEMMSRVRSGEFSHLIVWKVDRVSRNLLDFAAMYQELKDHKVTFISMNEQFDTSTAIGEAMLKIILIFAELERNMTSERVTGIMLDRAEQGLWNGARMPVGYRWNDETKFPEPDPEEVKIVQLIFDKYEEWKSSIKIARYLNNNNFKSKRGGQWTSKLIHDIIRNPFYIGTYRYNLRESGRGPLKPESEWIVRENNHPAIIDKSQFDRCNKIMDQNGSSRDTSDLRARKYVHTFSGHLVCGKCGANMIASKDRARANGWRPSMYRCAQRSRMLDCDNSRTINESYIGPFIFNYIANLARVQKNFKNIATPEKLERELLKGETFDGVAGILPEGLNLTFQALSFRQVGNGTYIPDIDFLGDSDGASDRDQIELLKSEIEKSKNAVTRLTDVYLFDPDSMTKEEFATKKKELAKKIEGMERQLVDLLDDSGNDDLADMSFIKKASAFLVAQRIVSKSFVDYVGMAQELDNEILKDFIDQIVDQIVVLDGRVQSITFINGLKHEFRYTAPAELPVCKKCGGRIGSTCGCRTRTFDFSGKRYQRIKVGDPRDMLRGKKNPVCPECFAQEGRWHHWNCKIETCPICGGRLAECEHGPNGKK

SEQ ID NO: 13085 - protein, 516 aa, synthetic construct
MNNIACYIRVSTDKIDQQKSLEKQRILLQEQYKDCNISMYSDTGTGTSFKRKGFKKLLFDCGLNEKILKDGRLTFEVDAIREPLFNEIVVINTSRFARNIAIIDILRILWDYKKVNVKFLDVQKNSNNPSDMILLQMFFAMAENEVAETSKRTKRGNKTTIMQNKIRNNSIFGWDFDRETNSLIANEEEKKVVEFIFETALTNGLKNTAKLVNEKGYRTKKGNLWTDSTIKTLITNPKYKGYNVRNKFESINLFTESRSKYVKKENWVVMKNDRIEPLVSEELWDKVQQALNKRCIAGNKGQNARIYDTRGKIKCKCGANYVRCVTTKVANEPKDKHYLICGHKKKYGKNYCRAENITVGILDRFIEEQRKSYYKNIQLQTRVKIMQLEKEIDNISKDEVFSIKEKEQELDVLREKLDKLLDTFLSSSETMQKLVEKKIGELEYHIKRLELEIYNIKSIYADKEKHLRQLNNKIIKLKQELINSTDKELTRKEWLDKVDKIVIESKISFNVVYNLD

SEQ ID NO: 13086 - protein, 546 aa, synthetic construct
MKAAIYSRKSKFTGKGDSIENQIQLCMDYSKSIGIKEFLVYEDEGFSGGNIDRPQFKKMMQDAKDKKFDCLVCYRLDRISRNVSDFSTLIEKLNKLEISFISIKEQFDTSTPMGRAMMFISSVFAQLERETIAERIKDNMYELARSGRWLGGKTPHGFTSKKISFLDENLKERSMYQLEVNDEQMEIVKLIFNKYLELRSLSQLYKYVYHNGIKGPRGGKFDPSSLSGILRNPAYVKANEDILDYLRSLGMEVVGVPDGQCGILTYAKNTSNSIAAIAKHHGVIEPDMWLEVQSILNENKDKIPRISTGKTALLSGLLKCGKCGANMRIMYKGKRNDKDLKYYYVCGTKRSLGVEGCNCKNLNGPLVENLVIDKIKNCNIESVINAFNSNKAKVDTVFSDVRSEIDLFKNSISEKEKLIGNLVMELAKNTGSVASEYIISQIESLNGEIDSLKSKVSELESSSVDINSASLNLDIIVSNLKKFNYEVDDASLDDKRLLLFTIVDSIVWDDASGNLSIVYMGAKMDDLVSLSDGSHFCSDCRSYIYE

SEQ ID NO: 13087 - protein, 562 aa, synthetic construct
MPRAQKAAIYCRVSTLHQVDKDSLPMQRQDMINYAKYVLGIEDYEIFEDAGYSGKNTDRPAFQEMMERIERGEFSHVLVWKIDRISRNLLDFATMYARCKKLGVTFVSKNEQFDTSTAMGEAMLKIILVFAELERNMTSERVSSTMNARAAEGKWNGGRVPFAYRYDRETDSFSIRDDEAKVALELKDTYLRTHSLAYTARLLNEAGRRTRRGYAWTPATVAIILRSPFYRGTYRYNYRDESETTFSFKGRNEWIMCAKHHPPLFSEADCRQIDFWLTKNRRRHGKAKHVQRKLVHVFAGLIRCGFCGSNYIASIDRIRASGYQPSMYNCGGRRQKGMNRYVTDIRLGSFVFNYISNVIRLRDAFRPQWSKTRIKHFLLQGDDFCGASLSDDTLRRVRVALLGSRLNTAEYQPTDEQHDDSATQTRKANLQAELEKNRRALSRLMHLFLYAEDEMPQADFLREKKHLQDTIAHLQSELEKAQQSSVFASSLTDEEFLGKAARLLFQSAMVHGGIDFPELAMRVGNLELKNFVNAVIKQIIVLDGRVTQITFANDEIHTFLYH

SEQ ID NO: 13088 - protein, 481 aa, synthetic construct
MKTTNKVAIYVRVSTTSQVEEGYSIDEQKAKLSSYCDIKDWNVYKIYTDGGFSGANTDRPALEGLIKDAKKRKFDTVLVYKLDRLSRSQKDTLYLIEDIFIKNNIAFLSLQENFDTSTPFGKAMIGLLSVFAQLEREQIKERMQLGKIGRAKAGKSMMWARTSYGYDYHRETGTITINPAQALAIKFIFESYLRGRSITKLRDDLNEKYPKHVPWSYRSVRAILDNPVYCGFNQFKGEVYPGNHEPIITEEVYNKTKEELKIRQRTAAENVNPRPFQAKYILSGIAQCGYCGAPLKILMGVVRKDGTRFIRYECHQRHPRKTKGVTVYNNNEKCDSGFYEKDDIENYVLTEISKLQDDAGYLDKIFSDDNAETLDRESYKKQIEELSKKLSRLNDLYIDDRITLEELQDKSAEFISMRAILETELENDPVLGKDKRKADMRELLNAEKVFSMDYEKQKVLVRGLINKVRVTAEDIVIKWKI

SEQ ID NO: 13089 - protein, 413 aa, synthetic construct
MNIRKIEAKNNKRKKRICAYVRVSTTNGSQLDSLENQKFYFEKLYAERDDVEFLGVFCDKGISGSKYDRPDFQTMLDACRKGQIDVIHTKSISRFARDLINVLEISRELKTLGIDIFFEEQNIHTLSNEGEVVLTVLASLAEEELQSMSGNQRWSFRRKFQKGELLINAKRFLGYDLNEKGELVINKAEAQIVRTIFYSYLEGMGTHRIAKKLNEGKVPTVTGKKWYDSTIRNILKNEKYKGSLLLQKYFHDGVNGPKKLNQGQVEQYYIEDNHEEIVSKEIWEKVQVKMKSRSRIQGTNKTYKFSRMLKCQYCGSTLKRQVSYKKKIVWCCSKYMKEGKNSCKGMRVPERDIEDWKLSLPVIVLERIEDGEKHYGYTGQKTSANGHISNSEKNQSSRLLSSVYRPRRTAIKL

SEQ ID NO: 13090 - protein, 430 aa, synthetic construct
MSTDQDEQLSSYENQVNYYREYILKHEDYELVDIYADEGISATNTKKRDAFNRLIQDCRGGKVDRILVKSISRFARNTLDCIKYVRELKELGIGVTFEKENIDSLDSKGEVLLTILSSLAQDESRSISENSTWGIRKKFERGVVQVNTTNFMGYDKDEKGNLIINHEQANVVRYIFDRFLEGYSPEFISKELREQEIPGCTGKAKWCPSAIWKMLQNEKYKGDALLQKTYTVDFLTKKRIDNDGQVNQYYIENNHEPILDREKWEIVQLEIARRKRFREQHKLQFYIMQKENNPFTTKVFCAECGSAFGRKNWTTSRGKRKVWQCNNRYRIKGQIGCLNNHIDEEMLEKAVMMAVSILKENRELLQSKWNKLMETDSSLEQYYSDRLREIVSRNKWDFNGVEMCRILHSITISEKGEISVKFLEGTEVNL

SEQ ID NO: 13091 - protein, 569 aa, synthetic construct
MKQSNNKKSRDVTAFLYERLSRDDNLEGESYSIGNQKKLLAKVAKEKGYTNLVHFLDDGISGVTMDRPGFVEMICQLEQGKAAAVFVKDLSRLGRNYIEVGRLTEEFFPDHDIRLVAVSDNIDTAEGENELAPIRNLFNEWYARDISKKRRISNKIKGNAGEPMGQPPYGYIKDPNDPKHWIVDDEAAQVVRRVYSMTLEGFGTEQIAAQLEKDDVLTPRAYWLTKGIKRPGKGKQQPPTKWNSSTITKILSLQEYCGDILNFKTYSKSYKNKKRIDNDRENWVVFQDVHEAIIERAVYEQVQQKRGKIRKRRTNNGEHNMFSGLLVCADCGSNLHFHFNQGNPEIKYFNCSNYKGNRGTCTSTHYVRVDFLEEVVLGEIRRLTKFASLYEDEFVKAVIGHSQQAEQTDRKLKEKELKTLLARDEELDGLFERIYEDNVSGKLSDDRFAKMSRRYEDEQKELAEKIKKLRSEIEKQSSRSMTTDMFIGLVRKYTRARKLTPRMLNELVEKIEVFNAEKIDGVWEQRLRIHYNCVGTIEIPTVLPLPIPEVSVNTRKGVVVNYAPCELAV

SEQ ID NO: 13092 - protein, 413 aa, synthetic construct
MNIRKIEAKNNNRKKRICAYVRVSTTNGSQLDSLENQKVYFEKLYAERDDVEFLGVFCDKGISGSKYDRPDFQTMLDACRKGQIDVIHTKSISRFARDLINVLEISRELKTLGIDIFFEEQNIHTLSNEGEVVLTVLASLAEEELQSMSGNQRWSFRRKFQKGELLINAKRFLGYDLNEKGELVINKAEAQIVRTIFYSYLEGMGTHRIAKKLNEGKVPTVTGKKWYDSTIRNILKNEKYKGSLLLQKYFHDGVNGPKKLNQGQVEQYYIEDNHEGIVSKEIWEKVQVKMKSRSRTQGTNKTYKFSRMLKCQYCGSTLKRQVSYKKKIVWCCSKYIKEGKNSCKGMRVPERDIEGWKLSSPVIVLERIEDGEKHYGYTGQKPSANGQISNSEKGQGSRLLSSVYRPRRTAIKL

SEQ ID NO: 13093 - protein, 428 aa, synthetic construct
MSTDQDEQLSSYENQVNYYREFILKHEDYELVDIYADEGISATNTKKREAFNRLIQDCRDGKVDRILVKSISRFARNTLDCIKYVRELKELGIGVTFEKENIDSLDSKGEVLLTILSSLAQDESRSISENSTWGIRKKFERGVVQVNTTNFMGYDKDEKGNLIINHEQANVVRYIFDRFLEGYSPEFISKELREQEIPGCTGKAKWCPSAIWKMLQNEKYKGDALLQKTYTVDFLTKKRIDNDGQVNQYYIENNHEPILDREKWEIVQLEIARRKKFREQHNLQFYIMQKENNPFTTKVFCAECGSAFGRKNWTTSRGKRKVWQCNNRYRIKGQIGCLNNHIDEEMLVKAFMKAVGLLKEHRSEVVAKWQKLVQGANLLHKHYAKQMYQILDLDKFDGVIMNQVLDHISISETGQIVVTFLEGTEVDL

SEQ ID NO: 13094 - protein, 450 aa, synthetic construct
MATNDQKRAALYIRVSTDEQARHGYSLTEQEYDLKQYAERQGYKAIGVYADEGVSARKALSRRKGLQRLLEDVEADHIDIIIFKCLDRWFRNIADYYKVQEILDAHHVEWECSQESMFNTTTTNGRLMLNLKLSIAQHESDQTGDRVKYIQEGLKRAGKVITGHMPLGYRIGEDKRIALDEDTVPIVREAFDHFIVHKTVLGTFRMMRAKYGYAKTEGAVGRMLQNRIYLGEYYGIKDFCPALIDAGVFAQAQKVFAGRTRHHSSGMIYLFGGLIRCPDCGRFLTPRNRTLNNKICTYYTCRDHTHGRECPHKTYWREDKVEIDLLTSLGDELEKYLADIKKVTRKSDNTKSGETVAELRAKQARLKELYIAGLIDRSEFDVRHADLDAQIAALRPRPDVSIAYLETVAASDFAERYLKLDKKARKIFWSRILDQVQLTTGAPRPVFRAF

SEQ ID NO: 13095 - protein, 664 aa, synthetic construct
MTKAVGYIRVSTEEQAQHGYSLEAQAESISNYCKAMRWELIKIYRDDGYSASSLDRPALQQLIADIPLRSFDTVVSWKLDRLSRSPKDTLYLLEDVFEKNSITFVSVQEPFVNTKDPTSKMFTTILAAFAQHEREMITERMKMGKYQKARMGQFPGGHILYGYRKNPLTGEFEINEEEARIVRLIYHWYVYGDETGKPLGMEAIADKLTKMGVLPPSAVRGVRVGVRGKRGQKGEYVKHWSNATVRQILTHQAYIGKNYFGRNGKNAEPDKVEDDWIVIPFPPIVDEYTYQLAQERRNRAKFWQRKHETPLLTGIIHCGICGLQFRGTYDHGKTAVYSCYGRLKRYHRDGSPTCDSPRIPADWLDQQVVLKVFEALQKPEQMKEAIMAHLESWERRKRELELLVGPSVKQMKELQDEQERLNYLFRKGRISVSEYEKEASALDKKIAELREQHKHQTNELRHLQKLEKDLDFIKQAIENGYWKVEYEALQSEIKMMWDAALTINNKTGEVVITTPRQEKKVTIDFSEAGKQVQEQEELLTFAIHGGGKIATRQLFDKLHITVHVYHDRVEVRGLIPIGNINISSFQSLLGRLKTRTIKNYKIVLPEFQSLLGRLKTQQWLMLLLWLLQFQSLLGRLKTISQQRAIKALERFQSLLGRLKTWFYR

SEQ ID NO: 13096 - protein, 413 aa, synthetic construct
MNIRKIEANNNKRKKRICAYVRVSTTNGSQLDSLENQKVYFEKLYAERDDVEFLGVFCDKGISGSKYDRPDFQTMLDACRKGQIDVIHTKSISRFARDLINVLEISRELKTLGIDIFFEEQNIHTLSNEGEVVLTVLASLAEEELQSMSGNQRWSFRRKFQKGELLINAKRFLGYDLNEKGELVINKAEAQIVRTIFYSYLEGMGTHRIAKKLNEGKVSTVTGKKWYDSTIRNILKNEKYKGSLLLQKYFHDGVNGPKKLNQGQVEQYYIEDNHEGIVSKEIWEKVQVKMKSRSRIQGTNKTYKFSRMLKCQYCGSTLKRQVSYKKKIVWCCSKYIKEGKNSCKGMRVPERDIEDWKLSSPVIVLERIEDGEKHYSYTGQKGTSNSHISNSEKNQSSRLLSSVYRPRRAAIKL

SEQ ID NO: 13097 - protein, 430 aa, synthetic construct
MSTDQDEQLSSYENQVNYYREYILKHEDYELVDIYADEGISATNTKKRDAFNRLIQDCRDGKVDRILVKSISRFARNTLDCIKYVRELKELGIGVTFEKENIDSLDSKGEVLLTILSSLAQDESRSISENSTWGIRKKFERGVVQVNTTNFMGYDKDEKGNLIINHEQANVVRYIFDKFLEGYSPEFISKELREQEIPGCTGKAKWCPSAIWKMLQNEKYKGDALLQKTYTVDFLTKKRIDNDGQVNQYYIENNHEPILDREKWEIVQLEIARRKKFREQHKLQLYIMQKENNPFTTKVFCAECGSAFGRKNWTTSRGKRKVWQCNNRYRIKGKIGCLNNHIDEEMLEKAVMMAVEQLSKNVDLLHGKWNKVLEENRPLEKHYSLKLAEMINKPLWEFDSHEMCQVLDNIIIAEDGQITVRFLEGTEVDL

SEQ ID NO: 13098 - protein, 521 aa, synthetic construct
MNRKITTIQANKQLSHQSKLPSIKKKKVAGYARVSTDNEDQTSSYETQMKYYEEYISSRKDWEFVKMYSDEGISGTNTKKRLGFQEMVNDALAGKIDLILTKSVSRFARNTVDSLSTVRKLKDVGVEIYFEKENIWTFDSKGELLITIMSSLAQEESRSISENITWSKRKQAAEGRVIFAYNNVLGFKPKEDGGFEVDKEQAQIVRYIFGQFLSGKNPNQIAKHLTENKIPTPRGKEKWSYSSVRSILTNEKYKGDALLQKYYVADFLNKTQKRNNGELPQYYVENSHEAIIDKEVFDAVQVQLSENKKWYTEKNYFGKIRCGCCGSSYVRHLWHSTDKYKETIYRCKDKYKNEEKCDTPHIRDDEIQRWIVSALNKVIDNRKEIIGNIKLLMKMIKEDRVLDDEIIQLEGKLENIRVDVEKLIITNSKIAQDQEEYTRKYNKLIEEYKLLEKELEQKNLELLSKNKRVRELKIFVDSLEKQDELLTEYDTKLFNYLVDKLIIHKGKRVAIHLKNGEVISI

SEQ ID NO: 13099 - protein, 535 aa, synthetic construct
MAKTVRVIPASPKIFRSEVTAEPRRRRTAGYARVSTDHEEQASSYEMQMAHYKNYIVSRADWDFVGMYSDEGISGTNTKKRDGFNQMIEDALAGKIDLIITKSVSRFARNTVDSLQNVRKLKENGVEIYFEKENIWTFDTRGELLITIMSSLAQEESRSISENTTWGKRKQFAEGKTSVGYSAFLGYDKDFKINEEQAKVVKLIYKFFLGGRSFYAITKELEKRGIKSPSGKDKWYISTVRSILTNEKYRGDALIQKEYTADFLDKTRRKNTGEIPQYYVEEHHEAIIPPDLFDFVQAEIKRREQNGKHSGVSIFANKIKCGCCGGWYGAKVWHSTDKYRRVIYRCNKKYSQKGKPCSTRHLTEEEIKRIFVKALNSLVEVRENVIAELRSLIDSVCQTGELLEEHDRVEQELGVLAERLETLIRENARVAQDQTAYLKQENEIRARYVEKQGHLARLDEQIAERDGKRNILEGMIQVVCDINGEQVAFDEELWSGLLDHIVVKEDGAVVVVFKGGIESGVDGCRGLFYLRKQSG

SEQ ID NO: 13100 - protein, 499 aa, synthetic construct
MKIRRVQPTQTLQKKLRVAAYARVSVDTLHHSLAAQVSYYSNLIQKNPSWEYAGVYADEGITGTSTAHRTEFKRLIADCNAGKIDLVLVKSISRFARDTVDCLHIVRQLKEKGIAVRFERENIDSTSEDGELLLTLLASFAQEESRSIGDNIRWGVRRRFAQGIPNGHKAPYGYTWDGEMFRIIQAEGGIVKEIFRRYLAGESAYAIAKSLAGRGITGRQGRPIEQTTVKDIISNISYTGTMALQKNYISEGHIRKRNKGELPLYLVDGVFEPLVSKDDFDKAQEIRKMRAAQSGNRNPVLMPFSGMVKCGCCGGGFSRRTAGKYRRWGCNTRERKGSTACDSRPIREDELVAAVRAVMERDEFDAAELRRNVSKIVIHGDRIDFHLVNGRIKKTARIYNGQRGSNPFTNKVYCASCGSKCERDTWTKGTKVWACSQPRTKCSMRRLSESELKEAAESLLGDGYEGKIVQNVERITISDDEVIFQLKEGGAYRWQRQCG

SEQ ID NO: 13101 - protein, 413 aa, synthetic construct
MNIRKIEAKKNKRKKRICAYVRVSTTNGSQLDSLENQKVYFEKLYAEREDVEFLGVFCDKGISGSKYDRPDFQTMLDACRKGQIDVIHTKSISRFARNLINVLEISRELKTLGIDIFFEEQNIHTLSNEGEVVLTVLASLAEEELQSMSGNQRWSFRRKFQKGELLINTKRFLGYDLNEKGELVINQAEAQIVRTIFYSYLEGMGTHTIAKKLNEGKIPTVTGKKWYDSTIRNILKNEKYKGSLLLQKYFHDGVNGPKKLNQGQLEQYYIEDNHEGIVSKEIWENVQIKMKSRSRIQGTNKTYKFSRMLKCQYCGSTLKRQVSYKKKIVWCCSKYIKEGKNSCKGMRVPERDIEDWKLSSPVIVLERIQDGEKHYGYTGQKAKANSHISNSEKNQSSRLLSSVYRPRRTAIKL

SEQ ID NO: 13102 - protein, 503 aa, synthetic construct
MLRAALYARFSSENQREESILAQFRDSTEYCKKHNYAIVAKYADEAKSGTTTIGREQYKLMLKDAQKGKFDVVVFHKIDRNARNELDYYITKHKLEEAGVKYAYSRQDIDSTSPEGQMMESMLVGMAAYYSRNLSNEIKKGLRENAIQGKCTGGRPPYGFSVDADKKLIINENEAPAVRMIFDWYSAGVHYGVIRKRLFNAGYRNRAGKEFTIASIYEILRNRKYVGDLYLGKTLFRKGKRNTHQTSANVQYFENVIPSIVSRDIFEEVQVKLDQNKRRSGAGKAKAIYALSGLIYCGQCGSAMVAHSTKNSRGIKNYYYRCPKGRLLGEEKCPQKFINRDDIESTVYQLIRKLFTAPDAHEQIKRIIAKNNMGVKVPNYTDQVKRLKKQESDASKRLDKLYDLYMTDREDEFTSAKMTQIKEEILRLRTQIKEAEDRQAIAQSTTFDIDKIIDTFQKQLKQKQSPEFIKTLFELAVKNITIYPDKIKVVLLVTQERFELPTP

SEQ ID NO: 13103 - protein, 535 aa, synthetic construct
MKKAFAYARFSTDMQREESIDAQFRAIKEYCSRNKISLINFFKDEGISGTTDNRPAFQEMIKKSEEVDYIIVHKLDRFSRNKYDSAIYKRALHQKGVRVLSVLENLDNSPESIILESVLEGMSEYYSKNLSREVKKGLYENAYKAKFNGGVPLFGYTIDENKNYIINEYQAIAVRLIFEMFAKGHSYSEIITELNNLGYKTNKGNNFKKTTLHDLLSNERYIGTYVFSREDYDMENRKRNSHKFKNRNDMIIVENGNPAIIDKKTWELVKERQSLNKKISNKAKWTYVLSPFLYCNQCGKKMSGFTRKNKIGKYYQHYRCINTSCEQKSVRTDILESEFYHAFNKLIFNDSNKKLLVEKINNFITMKNSNNDNSKIENELKEIEQQLNNAVTFILNGSSSQTIKNKIEELEQKKYNLQNELIKNSQKHDNINSNEIVKFLNKYDKLEKFSILEQQTILKFFIDQLRYEKGKLIIKLKLAEKPPPLKNNENGTELPAPFQKLTFLLVFFIVKQQGSREPTRCEASWKGGILIAKKV

SEQ ID NO: 13104 - protein, 428 aa, synthetic construct
MSTDQEEQLSSYENQVNYYREYILKHEDYELVDIYADEGISATNTKKRDAFNRLIQDCRGGKVDRILVKSISRFARNTLDCIKYVRELKDLGIGVTFEKENIDSLDSKGEVLLTILSSLAQDESRSISENSTWGIRKKFERGVVQVNTTNFMGYDKDEKGNLIINHEQANVVRYIFDRFLEGYSPEFISKELREQEIPGCTGKAKWCPSAIWKMLQNEKYKGDALLQKTYTVDFLTKKRIDNDGQVNQYYIENNHEPILDREKWEIVQLEIARRKKFREQHNLQFYIMQKENNPFTTKVFCAECGSAFGRKNWTTSRGKRKVWQCNNRYRIKGQIGCLNNHIDEEMLEKAFMKAVGLLKEHRSDVVAKWQKLVQGANLLHKHYAKQMYQILDLDKFDGVIMNQVLDHISISETGQIVITFLEGTEVDL

SEQ ID NO: 13105 - protein, 413 aa, synthetic construct
MNIRKIEAKNNKRKKRICAYVRVSTTNGSQLDSLENQKVYFEKLYAERDDVEFFGVFCDKGISGSKYDRPDFQTMLDACRKGQIDVIHTKSISRFARDLINVLEISRELKTLGIDIFFEEQNIHTLSNEGEVILTVLASLAEEELQSMSGNQRWSFRRKFQKGELLINAKRFLGYDLNEKGELVINKVEAQIVRTIFYSYLEGMGTHRIAKKLNEGKVPTVAGKKWYDSTIRNILKNEKYKGSLLLQKYFHDGVNGPKKLNQGQLKQYYIEDNHEGIVSKEIWEKVQVKMKSRSRIQGTNKTYKFSRMLKCQYCGSTLKRQVSYKKKIVWCCSKYIKEGKNSCKGMRVPERDIEDWKLSSPVIVLERIEDGEKHYSYTGQKTSANSQISNSEKGQGSRLLSSVYRPRRTAIKL

SEQ ID NO: 13106 - protein, 461 aa, synthetic construct
MPKRAALYIRVSSEEQARHGLSLGEQRADLLNYAKEHGYSVVGIYADEGVSARKAMSRRKELQRMLADVEAGRIDIIIIKCLDRWFRNVADFYKVKERLDACGVDWVCSREDYNTTTPNGLLMLNLKLSIAQHESDQTGERIRYVFEGKRARRQFVTGLIPLGLKVADGYFARDDETAPIVECAFNHILSGGSTRSLVQVLYDKFGHKITKAGLFDLLRNRSYIGEVYGIPDYMFSLIPHDVFFRVQEILSRNTKYTHSGRIYLFSGLLRCPDCGRNLAAYRGRRVNSDGERRFQYQCGYRVNRSMPGCHFARGMYEDKIEQYLLDNIQSLIRDHIITMESFCGQQGRERPESKIDALKAKLSRLEDIYIAGLMDKDKYTKTYKEITQEISELSTLVARSLSIPSALREVADDRDFRSTYESLTRENKQRFWKSIIASITFDDTPNTRGKGAYIPYRVTFL

SEQ ID NO: 13107 - protein, 687 aa, synthetic construct
MQSAFFFIPFFCSWRKGLFMAYVRNKKKILKFWSKKKAALYVRVSTRYQVDKDSLPFQRKKLKEYCKFLGIEDFVIFEDDGYSAKNTDRPHFQEMMSRVRDGEFSHLIVWKVDRVSRNLLDFAAMYQELKDHKVTFISMNEQFDTSTAIGEAMLKIILIFAELERNMTSERVTGIMLDRAEQGLWNGARMPVGYRWNPEIKFPEPDPEETKIVQFIFDEYERVRSTTKIARYLNHNQIASKRGGQWTSKLIRDIIRNPFYIGTYRYNLRESGRGPLKPESEWIVRENNHPAIITKEQFDRCNAIMDENGTSRDTSELRARKYVHTFSGRLVCGKCGANMIASKDRARANGWRPSMYRCAQRSRMMDCDNSKTVNESYIGPFIFNYVANLARIQKNFKNIKTLEQLEKELLKGTEFENMKVSKESLRRTFDALAFQEVGKGAYLPDIDLSDGDDDYTAAEQLSILKRELDKCKTAIDRLTDLYLYDPDSMTKEEFAKKKRDLVNKIAGYEKQIEASQATGGKDDLADLEFIRKASAFLVAQRIVSKKHVDYIQMALDLDNEILKDFVDQVIDRIEILEGRVRSIRFVNGLVHEFTYSTPADLPACQKCGGRIGSTCGCRTRTFDFAGKPYRRIKVGDPGDKFQGVSGAVCPECSAQAGRWHHWKCGIERCPICGEQLIACEHGPNGKK

SEQ ID NO: 13108 - protein, 497 aa, synthetic construct
MKIRRVQPSPILQKKLRVAAYARVSVDTLHHSLAAQVSYYSNLIQKNPAWEYAGVYADEGITGTSTTHRTEFKRLITDCNAGKIDLVLVKSISRFARDTVDCLHTVRQLKEKGIAVRFERENIDSTSEDGELLLTLLASFAQEESRSIGDNIRWGVRRRFRQGIPNGHKAPYGYTWDGEMFRIIPAEGKVVKEIYRRYLAGESAYAIAKTLAGCGIRGRKGRPIEQTTVKGILSNISYTGTMVLQKNYITEGHIRKRNRGELPMYLVDGVFEPLVSKTDFDKAQEIRKLRAERAVNRNPVLMPFSGMVKCGCCGGGFSRRTAGKYRRWGCNTRERKGSTACDSRPIKEEELVAVVRTVMEKDDFDTAELRRKVSKIVIYGDCVELHLTNGRIKKIARIYNGQRGSNPFTNKVYCASCGSKCERDTWTKGTKVWSCSQPRTKCQLKRLPESELKEAAESLFGDGYEGKIVQNVERISISDDEVIFQLKEGGAYRWQRQ

SEQ ID NO: 13109 - protein, 535 aa, synthetic construct
MAKTVRVIPASPKIFRSEVTAEPRRRRTAGYARVSTDHEEQASSYEMQMAHYKNYIESRVDWDFVGMYSDEGISGTNTKKRDGFNQMIEDALAGKIDLIITKSVSRFARNTVDSLQNVRKLKEHGVEIYFEKENIWTFDTRGELLITIMSSLAQEESRSISENTTWGKRKQFAEGKTSVGYSAFLGYDKDFQINEEQAKVVKLIYKLFLGGRSFYAITKELEKRGIKSPSGKDKWYISTVRSILTNEKYRGDALIQKEYTADFLDKTRRKNTGEIPQYYVEEHHEAIIPPELFDFVQAEIKEREKRGKHSGVSIFANKIKCGCCDGWYGAKVWHSTDKYRRVIYRCNKKYVHKGKPCSTRHLTEEEIKQIFVQALNSLVEVKENVIAELRSLIDDVCQMEELIEEHGRVEQELRGLAERLETLIRENARVAQDQTAYLKQENEIRALYLEKQGALEKLDEQIAERKSKRNTLEGMIQVVCGINGEQLAFDEELWGGLLDHIVVKEDGQVVVVFKGGIESGVDGCRGLFYLRKQSG

SEQ ID NO: 13110 - protein, 450 aa, synthetic construct
MNITTAIYCRESTDKQDIDSLISLCERKANELGLNDYKVYKDVKSGYSNEREEYLKLIEDIKAGVIKTVIVYESSRLGRDELEHHILYKIFRNYNVKVYNISRGWVDPSNEDDLFLEGILNLLDAREGRKIARRVKDRLKELCMSGQWTGGPAPVGYILKDKKLIVDPEKAKMIKDIFQLFIEGTEKGKIAKIYNLEYKKVGRIISNPVYAGKLKYQQFQKDSNKKRIENKTYEVFKGEHEAIVSEEVFFLANNLLKNTYKEKVTFPAIFRNLLYCNCGKKLYPNEGYKRKRIYICTDNCISAIKEEEIFPTVINTIENVLNNIDLENIDNVNKNIKERLEFYRNQQKNSEIQLENLTRKYISGQIKEELYDKLSKEINEKINLLLGEIEELNKKISVKESTKNNKEIIFKYLEKIKKEKDKDKINQFFSLIIDKIVFINSYRYIVYLKI

SEQ ID NO: 13111 - protein, 407 aa, synthetic construct
MKPGKIRVCAYARVSTMTEKQQESLTNQQAYYNHFFKNKKDVEFVGVYYDQGISGKLAKRPGFQQMLEDCRAGKIDVIHTKSISRFARNTELLLAVCRELKTIQVDIFFEEQNLHTLSNEGEVMLTVLASYAEEELRNMSENQRWAFQKKFQRGELVINTKRFLGYDKDENGELIINPEEAKIVKRIYNLYLSGMGVHVIAKLFNEEEVPTVDGGRWYSSTITNILKNEKYKGDAILQKYYFAEIKAKQRLNKGQVQQYLITDNHEAIVSREDWEAVKKRLKQNRKAKLSIDYNRRYPLSGLLKCEHCGSTLKRQKYYKGKVVWVCSKYIREGKVACIGMRVPDSVVQDWSIHEPTVVKEENIGGKKYYSYSSKENDTSRAEATHSENPNGGLLPSIHRPRRTAIKL

SEQ ID NO: 13112 - protein, 435 aa, synthetic construct
MAAYCRVSTDQDEQLSSYENQVRYYKEYIQQNPLYELVDIYADEGISGTNTKKRTEFNRLIADCRKGKVDRIIVKSISRFSRNTLDCLKYVRELKELGIGVTFEKENIDSLDAKGEVLLTILSSLAQDESRSISENATWGIRKKFERGEIRVNTIKFVGYDKGENGNLVINEEQAKIVRRIFRDFLQGETPESIARTLKEEGVPGWNGKANWYPTTIQRMLQNEKYMGDALLQKTYTVDFLTKKRSENQGQVNQYYIEGNHEAIIDKEEWDLVQLEVERRNQFRQDNHINFYIIQCEQNPFTCKVFCKECGGLFGRKNWTTSRGKRPVWQCNNRYKVKGVQGCTNRHIDEETLQQAFLRALEILRENKEKLLDKWDNFREEQKLERYHAAKLKETLNSNQEEFNGRKMCQVLEKISLGEDGSISIKFLEGTEVNL

SEQ ID NO: 13113 - protein, 503 aa, synthetic construct
MLRAALYARFSSENQREESILAQFRDSTEYCKKHNYAIVAKYADEAKSGTTTIGREQYKLMLKDAQKGKFDIVVFHKIDRNARNELDYYITKHKLEEAGVKYAYSRQDIDSTSPEGQMMETMLVGMAAYYSRNLSNEIKKGLRENAIQGKCTGGRLPYGFSIDANKKLIINENEAPAVRMIFDWYSAGVHYGVIRKRLFNAGYRNRAGKEFTIASIYEILRNRKYVGDLYIGKTLFRKGKRNTHQTSANVQYFENVIPAIVSREIFEEVQVKLDQNKRRSGAGNAKAIYALSGLIHCGQCGSAMVAHSTKNSRGIKNYYYRCPKGRLVGDEKCPQKFINRDDIEETVYQLIRKLFTAPDAHDQIKRIIAKNNMGVKVPDYTDQVKRLKKQESDASKRLDKLYDLYMTDREDEFTSAKMAQIKEEILRLRTQIKEAEDRQAIAQSTTFDIDKIIDTFQKQLKQKQSPEFIKTLFELAVKNVTVYPDKIKVVLLVTQERFELPTP

SEQ ID NO: 13114 - protein, 438 aa, synthetic construct
MGATRITQTASQTPQFQAKRVAAYARISEVKGNTPASLSAQVSRYNDLITSTPGWVFAGVYADAGLSGTTKNRPQFQQLLQACEDGQVDLVLTKSISRFARNTVDLLEVVRHLKELGVEVMFERENIRTFSGDGELMLSILASFAQEEARSVSENVKWGIRKRFKQGITNQMCVYGYTWTGEEFLINEEQARVVRYIYRRFLEGASYQQMLRELDEQGVRGYWGAKMNTSTLRNMLRQERYTGNSLLQKTFNAYPGDHGTKNEGQMPQYWVENTHPAIIPMETWTLAQEEMERRNEAGRKQGRGVTKGKKMPRTALSKKIRCERCGTNYRRTSIRCKGGRDYAWVCGSGQDPTVPSCPGHMRETLVKAHIAAAMGWAAFDETLFKRQVDHLEVTAKNRFTIVATNGERHDRFYKPVTKAVSIQERVRRIMAGTEGSAQ

SEQ ID NO: 13115 - protein, 450 aa, synthetic construct
MKIRKIERSAPAMRPKLRVAAYARVSVDTLHHSLAAQVSFYSALIQQNPEWEYAGVYADEGITGTSTAQRDAFKRLIADCDAGKIDMVLVKSISRFARDTVDCLHTVRKLKEKGITVRFERENIDSMSEDGELLLTLLASFAQEESRSIGDNIRWGVRRRFVQGIPNGHKAPYGYTWDGEMYNVIQAEGEIVKEIFRRYLAGESAYAIAKALAGRGITGQQGRPIEQTTVKDILSNCSYTGTMALQKNYITEGHIRKRNKGELPMYLVEGMFEQLVSKADFDKAQEIRKLRAEQSVNRNPVLMPFSGMVKCGCCGGGFSRRTVGKYRRWGCNTRERKGSTACDSRPIKEEELVAAVRTVMEKDDFDTAELKCKVSKIVIHGDRIDFHLVNGRIKKTARIYNGQRGSNPFTNKVYCASCGSKCERDTWTKGAKVWSCSQPRTKCGLKRLPE

SEQ ID NO: 13116 - protein, 460 aa, synthetic construct
MPKRAALYIRVSSEEQARHGLSLGEQRKNLMAYAQEHGYVVVGVYADEGVSARKAISRRKELQRMLTDVDEGRIDIIVIKCLDRWFRNVADFYKVKERLDARGVDWVCATEDFNTTTPNGLLMLNLKLSLAQHESDQTGERIRYVFEGKRARREVTNASLPIGLKVENKHAVPDERLPIARFLFDYIAAGGSTRSSVAAVQAKFGIFLSTIIVRNLLRNRAYIGELYGIPDYMPAVIPHDLFFRVQDILSRNARWAPTGSIYLFTGLICCPDCGTRLIATRGKRNARGEFHAYQYKCRIHRVGNPPPCGFSRSIFEPKLENYLLDNIQQLIREHIVTVEELREKQNRERPETRLAALTAKLSRLEDVFLDGMMDKEKYAATYKEISREISELSIQISEAPAISPSLRAVVDDHDFRATYNALTRENKQRFWKSIISSITFDDTPETRYRGAYIPFKVVFL

SEQ ID NO: 13117 - protein, 521 aa, synthetic construct
MNRKITTIQANKQLSHQSKLPSIKKKKVAGYARVSTDNEDQTSSYETQMKYYEEYISSRKDWEFVKMYSDEGISGTNTKKRLGFQEMVNDALAGKIDLILTKSVSRFARNTVDSLSTVRNLKDVGVEIYFEKENIWTFDSKGELLITIMSSLAQEESRSISENITWSKRKQAAEGKVTFPYNNVLGFKPKEDGGFEVDKEQAKIVRYIFGQFLSGKNPNQIAKHLTENKIPTPRGKEKWSYSSVRSILTNEKYKGDALLQKYYVADFLNKTQKRNNGELPQYYVENSHEAIIDKEVFDAVQVQLSENKKWYTEKNYFGKIRCGCCGSSYVRHLWHSTDKYKETVYRCKDKYKNEEKCDTPHIRDDEIQRWIVSALNKVIDNRKEIIGNIKLLMKMIKEDRGSDDEIIQLEEKLENIRTDVEKLIITNSKIAQDQEEYTRKYNKLIEEYKFLEKELEQKNLDLLSKNKRVRELKIFIDSLEKQDELITEYDTKLFNYFVDTIIIYKGKRIEIHLKNGEVISI

SEQ ID NO: 13118 - protein, 413 aa, synthetic construct
MSVKKIRVNRQKHRKRVCAYIRVSTTNGSQLESLENQKQYFENLYSNRDDIDFVGVYHDRGISGSKDNRPNFQAMIEDCRKGMIDVIHTKSIARFARNTVTVLEISRELKAIGVDIFFEEQNIHTLSSEGEVMLSVLASIAEDELRSMSGNQRWAFQKKFQRGELVINTKRFLGYDVDENGELIINPEEALIVREIFSLYLAGNGTHRIAKHLNEKGVATVTGAKWHDTTIRQMLSNEKYKGSVLLQKYFHDGVNGPKILNQGELEQYLIEDNHDAIISKEDWQRVQDKLNSRRWQKGRNKTYKFTGLLKCQHCGSTLKRQVSYKKKIVWCCSKYIKEGKVACQGMRVPEVDISNWEINSPVTVIEGDRDGEKYYSYSGQESADQRSSSGQEENQGSRILSSVHRPRRTAIKL

SEQ ID NO: 13119 - protein, 430 aa, synthetic construct
MSTDQEEQLSSYENQVNYYREFISKHEDYELVDIYADEGISATNTKKRDAFNRLIQDCRAGKVDRILVKSISRFARNTLDCIKYVRELKELGVGVTFEKENIDSLDSKGEVLLTILSSLAQDESRSISENATWGIRKRFERGEVRVNTTKFMGYDKDKDGNLIINREQAEVVRYIYERFLKGYTPESIARDLNDRDVLGWSGKANWYPSSILKMLQNEKYKGDALLQKTYTVDFLTKKRTENDGQVNQYYVENSHEAIIDKDTWELVQLELERRKAYREEHQLKSYIMQNDDNPFTTKVFCKECGSAFGRKNWTTSRGKRKVWQCNNRYRVKGQIGCQNNHIDEETLEKAVVMAVELLSENVDLLHGKWNKILEENRPLEKHYCTKLAEMINKPSWEFDSYEMCQALDSITISEDGQISVKFLEGTEVDL

SEQ ID NO: 13120 - protein, 480 aa, synthetic construct
MEDIKKVAIYTRVSTIEQAEGGYSLDEQQSKLKAYCDLRDWHVYKVYTDGGYSGSNLVRPAMSALLEDANARKFDTVLVYKLDRLSRSQKDTLYLIEDVFNPLKIDFVSLSENFDTSTPYGKAGLSMVAVFAQLEREQIKERMQLGKLGRAKSGKPMNWAIKAFGYEYKEGALEIVPFEADIIRGMYEDYNAGISLHGLVIKLNEEGHLGKSKPWSFNPVRRILTNPLYAGMVPYKGDTFPGNHEPIISQALFDSVQAQITIRQRTNAERFNPRPFQAKYMVSGIARCGICGAPMRLESQNKKKDGTRTQNYLCSCARREKSKHIPMKDYGPCNNIRFKRQDLENFVLGEVQKLKTRPGLLKKLATKKDKRTNFDNLQAQLDKAQSQLDKLIDLYLMDELSRDKLDARRDALLKEKSALLSKLEKQDAVTVDITPVSAILDGFKDIRSLPYQRACIVVKSLIERVEVSPDLIKITWRFEV

SEQ ID NO: 13121 - protein, 448 aa, synthetic construct
MKRAVAYCRFSSSNQREESIDAQVRAIKEYCDKNKLKLLKIYKDEAISGTSTKDREMFLEMILDCKKNLFDCVIVHKYDRFARNRYDHALYEKILNDNNVKLISVLEQLVDDSPESVILKSVLAGMNEYYSKNLSREVKKGKKENALKAIHNGGIPPLGYDLDVNKKYIVNKKEAEAVKLIFELALDGVGYVSIADILNKRGYKNKRGKEFKKISIRDTLLNIKYIGTYYYGLKDGHGRLQKEPIIIENSHEAIIDKDIFYKVQSKMKKNLKGPRNRNGQLYFLTGYCVCGECGGPFSGGYRSVNRNGSVSYGYYCQKKKRKETKCNNKAIRKELLETFIFDIIKKEIFNDEKIEKIIKDIISFSENKKLIREEEIKEYTKEIEKLQKLTLKLLEKNLEGNILDEIFNIKNNELKEKIQVLREKIYSVKNITKIGSPVHLANLTFYFI

SEQ ID NO: 13122 - protein, 447 aa, synthetic construct
MPETQKRAALYIRVSTDEQARHGYSLAEQEHDLRQYADRNGYDAIGVYADEGATARKALSRRKGLQRLLTDVQAKKIDIILFKCLDRWFRSVRDYYKVQEILDRYNVLWECTQEEYSTTTTNGRLMLNLKLSIAQHESDQTWDRIKYVLEGHLREGKAISGRFPAGYCLSKDKRICIDKSKVPMIQEMFHYFLVNRNTTGTRKMLKAKYGFSKSLSTIARMLKSRIYIGECYGIKNFCPAMIDEDTFARAQNIFKWRTRYPRSGNIYLFTGLLRCPLCGRTLGVNSKETNGTLYIYYRCQLYTRGDCNYSRQFREERIEATLLSVINAELRQYAAAIKDAPCDQQEDDSARTIEDLRAKQARLKELYVEGLIPREDFDQRYRDMDMQISALRPIRDARPTFLDFANTESFLSHYHSLDRQGKKEFWANTVDQIRVLKKGLRPVFRVT

SEQ ID NO: 13123 - protein, 503 aa, synthetic construct
MLRAALYARFSSENQREESILAQFRDSTEYCKKHGYAIVAKYADEAKSGTTTIGREQYKLMLKDAQKGKFDVVVFHKIDRNARNELDYYITKHKLEEAGVKYAYSRQDIDSTSPEGQMMESMLVGMAAYYSRNLSNEIKKGLRENAIQGKCTGGRPPYGFSVDADKKLIINEDEAPAVRMIFDLYAAGVHYGVIRKRLFNAGYRNRAGKEFTLASIYEILRNRKYVGDLYLGKTLFHKGKRNTHQTGVNVQYFDNVIPAIVSREIFEEVQVKLDQNKRRSGAGNAKAIYALSGLIYCGKCGSAMVAHSTKNSRGIKNYYYRCPKGRLVGDEKCTQKFINRDDIENTVYQLIRKLFTAPDAHNQIKRIIAKNNMTVKVPDYTEQIKRLKKQESDASKRLDKLYDLYMTDNEDEFTLQKMTQLKEEILKLRTQIKETEDRQIIAQSATFDIDKIIDTFQKQLKQKQSPEFIKTLFELAVKNITVYPDKIKVALLVTQERFELPTP

SEQ ID NO: 13124 - protein, 413 aa, synthetic construct
MNIRKIEAKNNNRKKRICAYVRVSTTNGSQLDSLENQKVYFEKLYAERDDVEFLGVFCDKGISGSKYDRPDFQTMLGACRKGQIDVIHTKSISRFARDLINVLEISRELKTLGIDIFFEEQNIHTLSNEGEVVLTVLASLAEEELQSMSGNQRWSFRRKFQKGELLINAKRFLGYDLNEKGELVINKAEAQIVRTIFYSYLEGMGTHRIAKKLNEGKVPTVTGKKWYDSTIRNILKNEKYKGSLLLQKYFHDGVNGPKKLNQGQVEQYYIEDNHEGIVSKEIWEKVQVKMKSRSRIQGTNKTYKFSRMLKCQYCGSTLKRQVSYKKKIVWCCSKYIKEGKNSCKGMRVPERDIEDWKLSLPVIVLERIEDGEKHYGYTGQKTSANGHISNSEKDQSSRLLSSVYRPRRTAIKL

SEQ ID NO: 13125 - protein, 428 aa, synthetic construct
MSTDQDEQLSSYENQVNYYREYILKHEDYELVDIYADEGISATNTKKRDAFNRLIQDCRGGKVDRILVKSISRFARNTLDCIKYVRELKELGIGVTFEKENIDSLDSKGEVLLTILSSLAQDESRSISENSTWGIRKKFERGVVQVNTTNFMGYDKDEKGNLIINHEQAKVVRYIFDRFIEGYSPEFISKELRKQEIPGCTGKAKWCPSAIWKMLQNEKYKGDALLQKTYTVDFLTKKRIDNDGQVNQYYIENNHEPILDREKWEIVQLEIARRKKFREQHNLQFYIMQKENNPFTTKVFCAECGSAFGRKNWTTSRGKRKVWQCNNRYRIKGQIGCLNNHIDEEMLKKAFMKAVGLLKEHRSDVVDKWQKLEQEANLLHKHYAKQMYQILDLDKFDGVIMNQVLDHISISEAGQIVVTFLEGTEVDL

SEQ ID NO: 13126 - protein, 479 aa, synthetic construct
MNKVAIYVRVSTKGQAEEGYSIDEQIALLTSYCSIHKWQVYDTYIDAGISGATIDRPELSRLSKDAKRKKFNTMIVYDLKRLGRSQRNNIAFIEDVLEKNDIGFISLTENFDTSTPLGKAMVGILSAFGQLDRDTIRERMMMGKIGRAKSGKPMMTSTIAFGYTYDRLTSSLNVNRAEAIIVKTIFDEYLGGKSLTKLRDYLNENGLLRNGKPWNYQGVSRILRNPVYVGMIRFRGEIYKGNHEPIIDTEIFERTQDELKKRQLETYAFNKNSRPFRAKYMLSGLIKCGVCGSPMEITLGTKRKDGTRNIRYQCVNRFPRKTKGITTYNDAKKCDTGFYEKADIEVYVLSQVKLLQLNQTRLNSMFEKVETINVEDIENQINTLAKKLKRLNDLYLNDMISLDELRNQTQDFLKQKELLEHELDNNPAIEQQKNLKQFKELLGTKDITQLDYDEQKFIIKSLIDKVFVKPGTIKIQWKI

SEQ ID NO: 13127 - protein, 575 aa, synthetic construct
MSKKNPKSDISKKLQFDIEKWEYIEKEQYTDAKQNPTAIIYVRVSDQKQVDEGNGLESQEATCRRWAETKNIKILKIFADEAQSWANMSRKGIQDAIDFLKKENSRYQKISYFLCTEVSRISRSEDTNQTNELKKRIEATWVEIITTYTGRNISSININDTFITDIDIAIAKSERLRIRERSLNGSKAKLLSWYWIFDVPAGYERVYVKNGTKTEKLLQKVEPQASIIKEWLELFANGAIINNAKLLQYFNDRELKSNYHSPKPWKLTLTFIQRLFEVEKLYFYAWYILYPNPNYGIIKPVDAVHMPLISLSTAKKILKRLKNKWWSKVWPKKDTSELYPLRGLIYCPNCNHPMTARPSRGKMGKIYYYYWCNRKDCKNKECINVKKVHLDFESLLKKITPKDWIMRLLDWVLKEVFDAKNKKQHTINEFKKKRIKEIEKEIEVLRNTIWKLSKIELIQSIEEKRSELEQEKEIIYNELQDKALNDREFQVLYGKIKNIIQDPLSIWELWNIELKILLAGVLFWWKIYYKKNEGFQTPQINALFSILNHLNDGKVTSGAGDGTRTRNSLLGRQAL

SEQ ID NO: 13128 - protein, 480 aa, synthetic construct
MKTINKVAIYVRVSTTNQAEEGYSIDEQKDKLKSYCQIKDWNIYKVYTDGGFSGSNTERPALEKLIKDAKNKKFDTVLVYKLDRLSRSQKDTLYLIEEIFIKNSIEFLSLQENFDTSTPFGKAMIGLLAVFAQLEREQIKERMQLGKLGRAKSGKSMMWARTSYGYDYHRETGTVTINELEAVAIRDIFESYLAGISITKLRDKLNDKYPKTPNWHYRIVRGILANPVYCGYNQYKGHVFLGNHEPIITEEVFNKTQEELKIRQQTALERFNPRPFRAKYMLSGIAQCGYCGAPLSITLGTIRKDGTRNIRYQCKNRFPRATKGVTVYNGNKKCDSGFYEKSDIEQYVIEQICKLQHDKKYVEELFADHGPSVDRVACQKQIDLLTNKISRLNDLYIDDRITLEELQTKSSEFSSQRSILEEELENDPALKRKKREKEMKKILRTGDISSLDYEHQKTLVRSLINKVQVTVDKIIIKWKI

SEQ ID NO: 13129 - protein, 433 aa, synthetic construct
MRTIHKIERSIPNLRQRKKVAAYARVSVDSERMHHSLSAQVSYYSSLIQKNSEWEYAGVYADYGISGTRIKKRQEFQRMLEDAEAGQIDVILTKSIQRFARNTLDLLRTVRHLKEIDVEVWFEKENIHTLSGEGELMLTILASFAQEESRSISDNIKWRFKKKFEQGIPHAKFFVYGYRWEDDNLVTNPYEAKVVQRIFEDYLSGKTRKDIIRELKAEGIRTMYGNFFKDASIRQILTNPVYTGLLEIQKTFVVDPINKHQIYNHGEKDKYVVEHHHEAIIEPGVFEQVQVEMARRKQDGLQKGGYARKFLNTCCFTGVIKCGICGKSYTHVVRRYKGKVSEYWACESHKGKGTNCGAHGSIPEPALKKACASVLGTEDFEEQEFLQKVTMIVVPAYKKLMFYMTDGRVIEKNWESTALKDCWTEELKKKQRN

SEQ ID NO: 13130 - protein, 521 aa, synthetic construct
MRVVQRIPATIRNFKAKPLDTQQKRRVAGYARVSTDHDDQITSYEAQVDYYTHYIKGRDDWEFVGIYTDEGISATNTRHRDGFKRMVKDALDGKIDLIVTKSVSRFARNTVDSLTTVRKLKDKGIEIYFEKENIWTLDAKGELLITIMSSLAQEESRSISENVTWGHRKRFADGKVSVGFSHFLGYDRGPDGNLVVNRGQAKTVKLIYRLFLDGYTFHSIAKELMTRGLETPTGKKKWYQGTVKSILTNEKYKGDALLQKRFTVNFLTKETKANEGEVPQYYVENNHEAIISPQVFDWVQEEIKRRCEGRSRYSGVSIFSSKVKCGQCGSWYGAKVWHSTDKYRRTIYRCNDKFKHHCKTPHLTEEEIKDIFVKAVNQLISNKEVVLGNITLLKEQLTDTATLEKERDRLSTDLELMADKVQQLIAENARVAQNQDDYERNYNELVGRYENEKKQYDKTCEAIQYRERRRRQIDSFIEELRGQELIKEFDVRLWGSMVDFIMVYSKEDIRVTFKAGTEIRA

SEQ ID NO: 13131 - protein, 530 aa, synthetic construct
MTAKKAAIYCRVSTTYQVDKDSLPVQEESLIAYTKQVLGIDEYELFTDAGYSGKNTERPAYQDMMSRCRNHEFTHILVYKIDRISRNLLDFATMYDELKKLHIVFVSRNEQFDTSSAIGEAMLKIILIFAELERKMTSERVKGVMNARARKGLWNGARMPFGYDWDKEKEIPAINPTEAAVVRKMFDMLLAGDGVFRVSVYLNENKIPTKRGGRWTPTTVRHIATNPMFAGTLRYNYRSAGRGEIKPESEWIILEDALPAIISKEEFNQVQTRFKKPGPHEHRRKNYHPFSTLLYCSCGQHFISRKDRVRKRTGLCPSVYTCAGVRHHWGCHELQPSDVTLLPFVITYIQNMMRVQIAAPASASAMKGILLHNLPGVSDIKDIKAIYRAYTRSHPTAYEIPNSSPTIDLAAAERHKIKRALARLKDLYLYGDGILSPSDYVDEKKKLENKLRSTPVPINTTEDVVADAISHASLQALLSADSMSYPEIMSYVDDKTIHNFLLRIINRITVAGRRVQSITFANGVTHTFTY

SEQ ID NO: 13132 - protein, 438 aa, synthetic construct
MKKIIGYVRESTQWQVANGYNLGEQKRKIEEFCKYKYEMGSYELEIKEERGVSARNLKRPQIQSIIELIKAKSIDILVIHNLDRLTRSVKDLAYLIELLEEYSIELVSITESIDTTTPSGRTFILMIGVISQWEEDSISWRTKRGMAEALERGYYCKPRGPFGYARDPHDKRYLIIDDEKAEYIRYIFETVAKSIKTANEIYLDFKKEKVLGKKWGQDDVYRILKNKAYTGDVELFGKVYEGVIPAIVTKELQKEALERVKLRSRKKKYRYPFRGILLCSECGSTLKCDSTHKKIRGKVYKVYQYYFCEYCKNRISQNCIQEQVENKLSRLLDKEHTKEIRKNFLKHLKQVEKDINAVIDLILSQGRSEILIKKYEALVNEREELFKKAEKQDEGNIPLIDMDNLKDLIYKYISHIKVDLIRKSIDVEYKKKFLNKTK

SEQ ID NO: 13133 - protein, 479 aa, synthetic construct
MNKVAIYVRVSTKGQVEEGYSIDEQIALLTSYCSIHKWKIYDTYVDAGVSGATIERPELSRLSRDAKKKKFNTMIVYDLKRLGRSQRNNIAFIEDVLEKNGIGFISLTENFDTSSPLGKAMVGILSAFGQLDRDTIRERMMMGKIGRAKAGKPMMTSTIAFGYTYDKVTSSLNINPVEAIIVKTIYNEYILGRSLTKLRDYLNENDLLRNGKPWSYQGVSRILRNPVYKGMNRFRGEVYQGKHEPIISAELFDRTQKELNKRQIEAYKRNNNRRPFRAKYMLSGIIRCGVCGSPMEITLGTKRNDGTRNMRYQCINRFPRQTKGITIYNNAQKCDTGFYEKSDIEIHVLSQVRLLQLNKAKLESMFERTDVINVEDIQNQIETLNNKMRRLNDLYLNDMIDLDDLRSQTQNFLKQKELLENELENNPALNQEQDKEQFKELLGTKDITQLDYDKQKLIVKNLIDKVFVKPGNIEIKWRI

SEQ ID NO: 13134 - protein, 580 aa, synthetic construct
MPPRKEPPKTGKSAVKRAAIYARVSTIHQVDKDSLPLQKQELVGFCKYSLGIEDYIIFEDAGYSGKNTDRPAFQRMLEQIRNGLFTHLVVWKIDRISRNLLDFATMYAELKKLGVAFVSKNEQFDTSSSMGEAMLKIILVFAELERGMTSERVTATMINRASNGVWNGGRVHFGYSYDKEKQVFSLAPEEAPIARMMFDEYENSCSLVQVTRRLNSLGYRTRYGNMFSPVTVQLVLRNPWYKGTYRYNYYKFPSRHEVKDESEWVLVDNHHPAIVEASQFARVQEILNRNKRFRNEPGRSIHCERPIVFAGLLWCADCGSAMVASPGRIHVSGYRPSKYACPKAARSKECPAKIVSDTIIGEFLLNYVLNIMNAQKEFAVIRSLEELERRLLRGSTFEAVSGIDHDGLETLWDMLSKFQPSDSVFASKYKPRQKMDPELKRLRKEKQKQERALERLNHIYLYGDSNMPDREYIVRKQTIIDALGEVNEAIGLVQQEPWNSSLSDEDFIAAASSFIMAAKMQERQYVYFVNLAKETDSGVLKSFFQSIIDSVYIRAGKVESVVFRNGLAHKFTYNDSKAGE

SEQ ID NO: 13135 - protein, 502 aa, synthetic construct
MSKTAVIYARYSSDRQREESIEGQIRECSAYAKRNDITILKIYSDRAMTGKTDRRPEFQMMIKDAAKQVFDYVLVYKLNRFARNRYDSAQYKHRLKKYGIKVISAMENIADDPSGILLESVIEGMAEYYSVELAENVMRGMTENALECKWPGGIVPLGYKLDENKHLIIDENKAFIVREIFQMALDGNRTASIVQELNNRHYLTAINKPFTNNSLTSILRNERYAGVFFWKNIRIEGGVPAIISKETFYAMQERLKLRKQLRIRICSDNYLLSGKLFCGNCGSKMIGMSGQSMNKESYYYYACASRRRQNKSCKTKNIRADKLEELICDTTIKILSDDEAIKLIAKQAVALQDKKQEDAIIDSIKEQIKDTSKKLKNCIQAVENGLVSDNIMKNIPEYEKRLEDLKKDLSEAELQKSAFKLDENMIRFFFHAVAHRIKKEDKFKSILLSSLVRGVIIYPDYIEIQYNYKKELPILTNPVKINSSILHGMVGDDRIELPTFCL

SEQ ID NO: 13136 - protein, 445 aa, synthetic construct
MKSKRVALYIRVSTEEQARQGLSLDAQLTDLRTYADKHNYEVVGVYTDDGASARKKPFSRRAFKQLIEDIKQNKIDRVLFIKLDRWFRSVRDYYRAQDILEAHNVDWETTQEDYSTTTTNGRLMLNIKLSIAQNESDMTSDRIQFVFAQKRARHEICSGKIPFGYSVQDKKLVPNENAKYVQPLFEHFVKTQNLTEAARWMCGRGFYYTYASISQVLKNERYIGRSHGDDEFCKPIVTEDVFYKAQKIIRSKKLIKRTPTGRAFLFTSLIRCPVCGHPYNGVGCVGKCNGKTYYYYRCPHGSSPFKACTNRKRLKEYVIEEALLNSFDEAYKNFRHSVNQKQKTPLVTSDVDKMKRKLNRLKELFLNELIDLDEYKKTREELTTAIAEAEKPKTQASAQFNYYLPDGIRPYYEKMTREQRRQFWHQTVDRIDIDEDDMPRITFIS

SEQ ID NO: 13137 - protein, 520 aa, synthetic construct
MQYEEYLIYLRKSRSDASLEAMGVDVLERHEQILLDLAKRMNLSIGGIYREVVSGESISARPEMQKLLSEVESGRWEGVLVMEVERLARGDTVDQGIVQRAFQYSGTKIITPTKTYNPNNEFDEEYFEFGLFMSRREYKTIRRRMRAGVTAAVKEGKWPFNQAPYGWQRVKLEHGRGWVLAPDPDEAPVVKLIFRLYTGPDRIGITHICRYLDNRGIKPRNGDTWLECSVMGILRNVVNDQRVGIGRRKVVKQVQNGSVSKVRPHSDYDFTAPGLQPRLIDHDVFLEAQEYLARNSHKLPESYGIKNPLAGILVCSCCGKKMQRRPASRDGSSGRCPYDVLMCNTRGCPTIGSTLELVERELIQALSDWVAGYQLDPTLEVENKVPEKEQLLSSAVSNHDLLLKQNGNLYDLLEQGVYTTEIFLERSHELQKRIKESEAHIEILKKDLEYEKEKIANIENFIPSCKELLSCYWDLSAQDRNKALKMLLESVEYTKTKRNRKGDKDNPTFTLNLKPRIPRI

SEQ ID NO: 13138 - protein, 687 aa, synthetic construct
MQSAFFFIPFFGSWRKGLFMAYVRNKKKILKFWSKKKAALYVRVSTRYQVDKDSLPFQRKKLKEYCNFLGIEDFVIFEDDGYSAKNTDRPHFQEMMSRVRDGEFSHLIVWKVDRVSRNLLDFAAMYQELKDHKVTFISMNEQFDTSTAIGEAMLKIILIFAELERNMTSERVTGIMLDRAEQGLWNGARMPVGYRWNPEIKFPEPDPEETKIVQFIFDEYERVRSTTKIARYLNHNQIASKRGGQWTSKLIRDIIRSPFYIGTYRYNLRESGRGPLKPESEWIVRENNHPAIITKEQFDRCNAIMDENGTSRDTSELRARKYVHTFSGRLVCGKCGANMIASKDRARANGWRPSMYRCAQRSRMMDCDNSKTVNESYIGPFIFNYAANLARIQKNFKNIKTLEQLEKELLKGPEFENMKVSKESLRRTFDALAFQEVGKGAYLPDINLSDGDDDYTAAEQLSILKRELDKCKTAIDRLTDLYLYDPDSMTKEEFAKKKRDLVNKIAGYEKQIEASQATGDKDDLADLEFIRKASAFLVAQRIVSKKHVDYIQMALDLDNEILKDFVDQIIDRIEILEGRVQSIRFVNGLVHEFTYSTPADLPACQKCGGRIGSTCGCRTRTFDFSGKPYRRIKVGDPGDKFQGVSGAVCPECSAQAGRWHHWKCGIERCPICGEQLIACEHGPNGKD

SEQ ID NO: 13139 - protein, 421 aa, synthetic construct
MKLRKIEPLKPKQKKLRVCAYARVSTDSLKQGESFENQVSTYERVIKSNPEYEFVSVYADQGMTGRSENRPEFQRMIADCKAGKIDLIITKSISRFARNTTTVLKYTRELKEIGVGVLFEENNINTLSSEGELMMTVLASFAQEESRSISENNKWTLKKKFEHGEGMVNTARFMGYDKDETGDLVINKEEAKVVRLIFKMYLSGIGCHRIAKALNEEGVPTIAESSWHASTIKGMLTNEKYKGDFHIQKTYIPEGTHQSVKNNGQVQSYYVTEDHPAIISAEEWQQVQELMEYHRKQRNIGKGEKYQKRYPMSGMLVCPYCGKSLRRRYVYNRKVEWLCATYIHKGKEACKGIRIRDTELTGLSFSEPMVVEEVMINGEKHYGYTSKRAYDAGERAADRIEKESSSVLPRVNGPRRTVIKL

SEQ ID NO: 13140 - protein, 519 aa, synthetic construct
MRNVAIYVRVSTMHQAEQGYSIDSQLVDCRKKAHDLGAITINEYVDKGKSGAFLDRPELQRMLNDIKTEKESYDALIIYKLDRLSRDSMGLAYIIKILQQKNIKIISTDGAQYGANPQDVLTMQIMGSIAQFDNALRKERSIRGKIEKRKQGKLDKITKYGYIFNDEKQNLDIKEDEAIVIRKIFKWFTEDNLSAFRISKKLNTEKIPAPQPKINRKIINKDNIWFESTIRTMLKDETYAGIRHTMIYKFEKISLNNMKKTKRPPEEWISVPVPSIISRETWDKANNIMNRKSTNPRRTQRTWILQGLVYCEKCGQIMNIKQTPKIGKIKENEEKYNFYFKCRTNILNWFGSDKKCPNRQVPIYALEDSVWETLLNIFYSKETLEKYLKETQLKDNVYNLLDKLIEDRNKLSKNKNKIVEWFADGKIDQEIADNKINDLNNKINDLDKKISNLQSTNRSKKSFSINNLYDIFHKIKNPNREQKKEIIHSVVEKIFVERLDNKRSNAYTKPVLKIRIILR

SEQ ID NO: 13141 - protein, 587 aa, synthetic construct
MNREGKKCVLYPRVSTEMQVDGYSLEGQKNGLKRFADREEMEIVGIYEDAGKSGKSIEGRPAFKKMLSDIKNGLEIDYILVYKLSRFGRNAADILNSLEFVQSYGINLICIEEGIDSSQTSGKLLISVLSAVAEIERENIIEQTMNGRREKARQGGWNGGFAPYGYYLKDNQLLIEETEAEAIRIIFDKFANSDIGLGGVAKYLNLQGIKKIPRQNGTLETWSSHFIRLILDNPVYCGKIAYGRRTREKVKGTKNEYKQVHAEDYILEDGQHEGIISEELWQKVHAKRMATGIKQPSKIGKDRSHLLTGILKCPLCGSSMYTNKHAWTNKDGTYKEVYYYICGRNKQERGHHCDYKASLRKTDIEPLVIEAVKELVSDKYFAKEIEKRIGVQIDTTAIDKELANYESKLKEVDLNKARLEREIDNLPIDARFRERKIHDMTLRLDALYDTIVELEERIEDAKLRKSSIEMETITLDNIYKLMLNFGKLYDIISDEEKKSLITYLIKEIQIYPNGESEQPLKSIEFNFPIYRDGQEVRRLLWEKGNTVETVVVFQAARSKSNTPPGYAKMSKSDIDKLENALETDDKL

SEQ ID NO: 13142 - protein, 531 aa, synthetic construct
MNVVIYARYSCERQTEQSIEGQLRECEEFAEKHDMTIVDTYIDRAISGTSTNHREAFLKMIADSEKHAFEGVLMYKMDRFARNRYDSAVYKAKLKKNGVRVYYAKEQIPEGPEGIILESLLEGMAEYYSAELSQKIKRGMRENALKGKATGGSTAIGYKITPDKTFAIDEDYADVVRHIFRSYARGERVEDICKDLNEKGIRTPKGYLFNQSTMRKMLQNEKYIGVYICKDVRLEDAIPPIIDKSLFHEVQQILARNRKAPARAKAKVDYLLSGKAYCGKCGNGLVGESSNPNSDSGPHYYYKCANRKKGLGCDKKTIRKEELENLVAQKVAEVVLRPEKIKEIAQRCEEMQRDMVRTIRNPEADMLKKQLEKTKKSIANIMMAMEQGIFTKSTKEHLEALEQRKETLEIEIQRTSMVEKVDIITADQIEFMLLQFLPEANTDVTAYADDIISCFVHSVYLWDDSCAIWLNLSNQQPKPHKNRCAKVTPESIQRLQLSVDLLSGNVKKNLVQKNAGENSHLETSPPPHKNT

SEQ ID NO: 13143 - protein, 525 aa, synthetic construct
MQTAENRDKYHQLRVAAYCRVSTEQEEQQNSYQVQIAYYTDLINRKKEWTLAGIFADEGISGTQTKKRTEFNRMIRMCKNKKIDLVITKSISRFARNTVDCLEYVRQLKDLGIGVIFEKENINTLTMTSEFMIALYGSFAQAESESISKNVSWGKEKAYREGKVQFQYKYLLGYKKGTDGKPEIVPEEAEIVRLIYTLFLDGYSMTRIKKILENKGYLTAQGKKVWNESLIRSILKNEKYVGDALLQKTFTSDCITHKVVKNHGERPMYLVTDHHVPIVDRDTYNRVQQELARRSSKRKVSDKTTTEQGKYSSKYALTELLICGHCGTPYRRTTWAARGKKQIVWRCISRLEHGKKYCPDSPTIKEENLHQGIIKAINNYYSCRNDIARILKANIGTVLECQGQEEIIAAENRLKEIDRARNELVGLIATGGCDEDKLDSEFEKLYEEEQSLSERLAMLKSKNQTSAETQAKLDKIIDMIEHEKFELETFDNVLIRKLIECVKVLSKTEILVIFKGGYEVRTEIE

SEQ ID NO: 13144 - protein, 514 aa, synthetic construct
MPTVTVIQPIIAAEQNTKIRCAAYCRVSSDSEDQLNSFMAQTRYYSQVFKDSETEELIDIYADEGITGTREDKRDEFQRMLKDCRRGKIDRIYTKSISRFARNTKDCLKSVRELKALGITIFFEKENIDTANMTDEMMITIMGGLAQEESTSISQNMRWSIKKRMENGTFELSCPPYGYIKENGKLVVDPAQAQTVQNIFSWYLSGYGIISIVNRLNHFNTPCCKRSNKWHMFGVTYILTNEKYTGNTMFQKTYSGTTLPIQRYKNNGERNKYYAVNTHPAIVSQDDFDKVQALMSEKGEIFYKTEKQKCVLRKIMKCGQCGSTYIRKKSRDKYYWSCRKHDLKASECFSKRIPESDIYYAFIRICNKLISNYTQILIPLQTALQYLKLKKFSGQTQVMDIHKEVAKLKEQTHVLARLKTKGFLDEAKYIEQTTELTAKINKLQAELKKLTRSDDEDETLDQIDMLIDFFEKRENPMTEFEETAFESIVEKIVVIDQHELEFHLIGGLKFKENV

SEQ ID NO: 13145 - protein, 463 aa, synthetic construct
MRRKTTAPVEKILLRVAIYIRVSTDKQVKDGDSMRDQLATGQKYIDSHENMILVDTYIDDGISGQKLKRDDFQRLIDDVRAGRIDLIIFTRLDRWFRNLRHYLNTQDILDKHGVSWTAIEQPYFDTSTPHGRAFVNNSMIWAELEAQNDSDRILGVFDDKVDNGEVLSGSTPLGYTIVNKHLVPDDDAPTAVAIFQYYRKTGNLSMTLRYMESEFGLVRSAASLKNTLTNTKYIGEFRDNKNYCPAIIDHDLFFDVQRLLKINIKSGKKHDYIFSGLVVCDDCDHIMSGCQQRARGRVRADGTRIVYKYSVYRCRQGVNLHRCPNRKLVFETTLEKMLLERIRPELENYIAEYEVANLPALRTDAKRRSVEGKMQKLKDLYLNDLITMDEFKLDREKLLMQLEKINAEDSRPVKDLSYLKNFLKMDFESVYDSLSIPERRELWRSIVKEIRVDHDKNIHIIFL

SEQ ID NO: 13146 - protein, 527 aa, synthetic construct
MYELTQSMESISVDEIIVYLRKSRSDSPEMSVEDVLKKHEEMIQDYANTHFGSPIPEKNIYREVVSGETIDSRPQVKIVLQKIESPQIKAVLIVEPQRLSRGDLEDCGRLINILRYTNTMVLTLTHSFNLQEEYERKFFEMEITRGNDYLEYTKRILRRGRESSAAKGHYIGSVDPYGYRKIVIKKDGVNCHTLEIVPEEANVVKLIHELYAYTPGGIGFTNIAHKLDSMNLKPKKAAHWTPAIISSILCNPLYLGLIRWDTRKVVKYINDGQLEKSRPRSSDAKYYKGLHEPIISQELYDACMARRGTNPSLRRNKALCNPFAGLLYCGTCGHAMSLKIYKNHNSVSQIMLCNHQSYCHTKSVLYSAFLERFISSMENTIHDFELALLADNGNAQAVNQSIVANLETRLKKLQEKDMRQKDAYEDGIYSKEEFLERNIKTQQEIASTITALTAAKETKENYVDYGEKIRRFRDCINALNDPELSATEKNQFLKSCVSKIIYYNNMESKAGVGRYVENVFSLEIQYI

SEQ ID NO: 13147 - protein, 521 aa, synthetic construct
MKNVMIIPAKKQVGNIARQQEEKPKLRVAAYCRVSTDTEEQATSYEAQIAHYTEYIQKNPEWEFAGVYADDGISGTNTKKRSEFNRMIEDCEAGNIDMIITKSISRFARNTLDCLKYIRQLKEKNIPVFFEKESINTMDAKGEVLITIMASLAQQESQSLSQNVKLGLQFRYQNGQVQVNHNHFLGYTKDENGNLIIDPEQAEVVKRIYREYLEGYSMDKIAKGLEADGILTGAGKTRWWSSTINKILRNEKYIGDALLQKTYTTDFLSKTRVKNNGIVPQYYVEGNHEAIIPKDIFLRVQDELVRRRVVKTSANGKKRSYSCNHCFAQIVICGECGEMFRRIHWNNRSCKSIVWRCLSRLEPTGEECHARTVNETVLENVVVQAINTLLGDKSTYQAQLQQNIAKVIREAQKNTADGIDEQLIELQKELLQKANNKEAYDEIADQIFKLRGQREKCTVDTAARDAQIARINDLQDYIKKQPANLTEFDETLVKRWLKQITVWEEHFTVELKSGLKIDIEE

SEQ ID NO: 13148 - protein, 519 aa, synthetic construct
MKTVTKIDKVQPLKTEKKILRVAAYCRVSTDSDAQLESLEAQKKHYESYITSHRDWELVGIYFDEGITGTKAEKRLRLMRLIADCKAKKIDFVITKSISRFSRNTTDCLEIVRTLLNLNIPIYFEKENLNTGSMESELFLSILSSMAEEESTSISENNKWSAKKRFENCTYKLSYAPYGYCLVNGKLTIDKTQAEIVKRIFTELLSGKGTEAIAKILNQEQISSQKGGRWTSASIRGIIANEKYTGDCIFQKTYTDSNFNRHKNNGTLDRYYISEHHEAIISHDDFNAANALIEQRANEKGIERGSKKYQQRYAFSGKIICNKCGNTFRRRIHTSTYGSYTAWVCNTHLANSKKCSMLFIKDADIKLAFSTMLNKLIYGYRFVLNPYLKALQENTSDDVLLKIQHLEALLEQNAEQRETLHKLMGQGYIDQVLFAQENNTLLSQANDYRTEIEALNRSITGDSTKVYETERLIHFCKYGEMLQEYRDDLFELFTDHIQVYSRQKVGFTLRCGLTFQEKI

SEQ ID NO: 13149 - protein, 562 aa, synthetic construct
MDIHNIRQLLRSKTIYDLPLRVTFYARVSSESDEQLNSLGNQIGYYEDFIKKNPAWTFVPGYIDEGISGASTRHREDFNRMVEDAAAGKFDFVITKEISRFARNTLDSIQFTRQLLSSGVGVFFQNDNINTLDEDAELRLSIMSSIAQDELRKLSSRVKFGHQQAIKQSVVLGNSRIFGYTKDDGRLVVDETQAPMVRELFTLYATGAYSMKQIENLFWEKGYRNLNGKKIAHTTMSNMISNPKYKGYYVGNKVKVVDMFTKKQKFLPPEEWVMFKDETGQIVPAIVSEELWEKANAVLLRRSEDVKNRQGICNHANLLTGKLFCTHCGTAYYRRESKDKLGNQNSKWVCSNKIKSGADACDSFPIYEKELVPLLFEVFRDTRQASAAMIAEYERMYRSMTCDGNLEKKIEEAQANIDLAKKKKSKLLELVTLESITPADFKAMTAQCNQEIKSGEQALLELKDQQESSEEFRANMEHLRKVLRDAEKQCQTEAITKDFIDTFIDRIYVTPEDGNTLRLDIKIFTGDTCEKYLGKLKRRANPEGSTGHTFKKMIEAYESGMQ

SEQ ID NO: 13150 - protein, 502 aa, synthetic construct
MMYDALYGRQSIEKKDSISVESQLEYCRYETHGDPYIEYADRGFSGKNTNRPDFEKMMNDIRAGKIKRVIVYKLDRISRSILDFANMMEVFQEYHVEFVSSTEKFDTSTPIGRAMLNICIVFAQLERETIQKRVTDAYYARNKRGFYMGGRIPYGYRLKETIIDNIRTSMYEEVPEESEQLKLIYSLYADPANSLGDIIRYLNKHGIKQLRGGNWTSARISEMLRNPVYVEADIDVYNFFKSQGADVYNPASDFTGYNACYLYKGTVSTTRKQCDLTDKEIVLAPHKGFISSATWLACRIRCLNNRQSTQTCKPKNSWLTGKVKCGNCGYALVIRKAKTKWGRYFVCSQSGHNGNCKGTGSTVYADVLEEYMLKAIREKLSEFKKLSDEEENKSVPKVSKNKIRLTQIDEEINDLLSKVGSANAILMKYINDKVSELDTERQTLQEEIISLTCTHTENKMGQITDHVKKWDNISFEDKQAVVDALIKVIKVANGNIEITWKI

SEQ ID NO: 13151 - protein, 668 aa, synthetic construct
MAYVRNKKKILKFWSKKKAALYVRVSTRYQVDKDSLPFQRKKLKEYCKFLGIEDFVIFEDDGYSAKNTDRPHFQEMMSRVRDGEFSHLIVWKVDRVSRNLLDFAAMYQELKDHKVTFISMNEQFDTSTAIGEAMLKIILIFAELERNMTSERVTGIMLDRAEQGLWNGARMPVGYRWNPEIKFPEPDPEETKIVQFIFDEYERVRSTTKIARYLNHNQIASKRGGQWTSKLIRDIIRSPFYIGTYRYNLRESGRGPLKPESEWIVRENNHPAIITKEQFDRCNAIMDENGTSRDTSELRARKYVHTFSGRLVCGKCGANMIASKDRARANGWRPSMYRCAQRSRMMDCDNSKTVNESYIGPFVFNYVANLARIQKNFKNIKTLEQLEKELLKGPEFENMKVSKESLRRTFDALAFQEVGKGAYLPDIGLSDGDDDYTAAEQLSILKRELDKCKTAIDRLTDLYLYDPDSMTKEEFAKKKRDLVNKIAGYEKQIEASQATGDKDDLADLEFIRKASAFLVAQRIVSKKHVDYIQMALDLDNEILKDFVDQIIDRIEILEGRVQSIRFVNGLVHEFTYSTPADLPVCQKCGGRIGSTCGCRTRTFDFAGKPYRRIKVGDPDDKFHGVAGAVCPECSAQAGRWHHWKCGIERCPICGEQLIACEHGPNGKD

SEQ ID NO: 13152 - protein, 530 aa, synthetic construct
MRRNEEQIAIYSRKSKFTGKGESIGNQVELCKEYVRNMFGEEYVDRCVVFEDEGFSGGNLQRPDFKRMMEEVRKRKFKAIVVYRLDRISRNISDFTGLIDELTKLDVSFVSIKEQFDTSTPMGRAMMFIISVFSQLERETIAERIRDNMHELAKTGRWLGGNTPTGFKSGSVSKITIDGKERKSYKLIPIPEEIEIPKMIFDLYIETDSLTAVEAELLRQRIKTKQGKDFTRFAIKAILQNPVYMVADEDAYNYFIEKEAEIFFPKEAFDGSCGIMAYNRTNQEKGRTTQLLPVSEWIIAIGKHPGFIPSKQWIKVQESLDRNKSKAYRKPRNNEALLTGLVYCSCGERMYPKLSQRKTASGEVIYTYVCKMKERSKRERCNRRNANGNILDAAIIEQIRSLTDHDSSFISQLAKSREFYTGKREQYERQLEELRVEHEMNEKTINGLVDSLGMVGDSIAKPRVLKRIEELSDINRDVENRIHELEGLVNVNSLTDAEFDLLRQMLSMFRTSIDDMSIEEKRAAIRTVVR

SEQ ID NO: 13153 - protein, 478 aa, synthetic construct
MTNQAEKTSYIENVAAYIRVSTQEQKLHGISIEAQEEKLNEYAGSHGMKIVKFYKDEGVSGRKLIRKRPALQAMIQDAEKGNFRRIIFIKLDRFFRSVAEYHECMKRLAAGGVIWTATEEKYDLSTPSGEAFVNMKLTMAQFEADQVGERIRMINEYKVKSGQPLYGSQALPFCYQVKQSGDGDRRKYIAKRDEIIMEDLIDHFCKNRSVRAALHYINAKYSRAFSYSTIKNALTSELICGTYRGNPAYCEGYMTPAAFETMQKYIQHNPRTSQREHSYIFGGLIRCPCCGNMLVGSPTVLNRIGKSGQKLSYKYYGYRCYRGNLEKKCDFRTMAFEHRLEAIMLSEVEAVMRGKQMYLLRLQNAPQRVAQHDLAELQQELARLNYAWQKGRIKTAADYDRQYDDLMTRIDAANAERQELAANPDYRKISRILSDGWKQLYISLDNDHKRAFWRAFIEEIQLEWTKDVKRIRDITFFT

SEQ ID NO: 13154 - protein, 581 aa, synthetic construct
MSRTTNKRPGKAKSGLSRKQKVAIYIRVSTLYQVDRDSLPMQRKDLIAYASLILGIEEYEIFEDAGYSGKNTDRPAFQEMMQRIRKGEFTHVLVWKIDRISRNLLDFAEMYEELQDLRVTFVSKNEQFDTSTAIGEAMLKIILVFAELERNMTSERVTATMISRANSGLWNGGRIPFGYDYDPDKTAFSIREDEEKVCQMIKNDYLEHKSLVHTSRMLNASGYKTRAGAEWSPTAVWIIISSPFYAGIYRYNRYKGTERRVENPEDEWIMIQNHHPAIFSLEEHEKMLAILDENSRNHRSVGQKHQTERMHIFGGIAYCGKCGSKMVSTPGRLHANGYRPTNYSCPKHRKTKECDNPTVSDTQVGEFVINYILNMLGAKKKFSTIENPEDLERCLLYGNTFSEVEHIDSNGLNEYFNLLSRYSSDDSYTFSVKKSRKKKAEVDPEVEALRKEKEKQERAMKRLQDLYLYSDTSMSEKDFIIRKTEISKRLEEINAMLGMVAKNSEPSLSDEEFVRQASHLLISRELQNRQYIYFKNLAQNVSPEILKAYMETVLDSVLLVDGRVSSIVFRNGLTHKFKYKS

SEQ ID NO: 13155 - protein, 502 aa, synthetic construct
MEIQIREGNSRQKQKLKVCAYCRVSTDADEQENSLENQIRHYKEVITSNPDYEYAGVYSDFAISGFKEKRPGLQKMLADARKGKIDLILTKSVSRFARNTSIVLEATRKLKELNVGVFFELQNINTLSGEGELMLTILAAFAQAESESGSVGAKMVYQRKYEAGIPVQYLERSFGFKKDERGVYIADEEEAAWVRKIYEMAADGYTPASIKRYLNENGIKTAGGAEWIDSTVFRLIENEIYKGDYIMHKHFVNEERKLVRNRGEVDAWYIEDDHEAIVSPELWQRAQDALEAKRDYLAEGSVIEEFTEENYPYMNRIYCARCGHPLYKRIYSNGNRLNWGCSGTKRYGKSFCEGINIPDGVLRGAWHFDENMYIGEKQTDKGKKEFTYLKEASWKRRHKKKEPKPIPENTETEYPYREKIFCGSCGSRLVRHVNTKNHKVIWVCNGRKRKGKDFCDGTRVPDTIIRGWGEIKKDIYIQRKDDKNGKKRYSYTSKKPKGADRA

SEQ ID NO: 13156 - protein, 498 aa, synthetic construct
MEIQIREGNREQKRKLRVCAYCRVSTDADEQENSLENQIRHYETVIKANPAYEYAGVYSDFAISGFKEKRPGLQKMLADAQKGKIDLILTKSVSRFARNTSIVLEATRKLKELNVGVFFELQNINTLSGEGELMLTILAAFAQAESESGSAGAKMVYQRKYEAGIPVQYLERSFGYTKDERGVYIADESEAVWVRKIYEMAADGYTPAAIKRYLNENGVKTVGGTKWIDSTVFRLIENEIYKGDYIMHKHFVNEERKLVRNRGEVDAWYIEDDHEAIVSPELWQKAQDAIEAKRDYLAEGSVIEEFTEDNYPYMNRIFCAKCGHPLYKRIYSNGNRLNWGCSGTKRYGKSFCEGINIPDGVLRKAWHFDGNMYIDEKPSVKGTKEFTYLKESSWKRRHKKKVPEAIPENTEEAYPYRKKIFCGLCGSRLVRHVNPKSHKVIWICNGAKRKGVAFCRGTRIPDSVIRGWGEIKKDIYIQRKDDKNGKKRYSYTSKKPTA

SEQ ID NO: 13157 - protein, 562 aa, synthetic construct
MDIHNIRQLLRTKTIYDLPLRVTFYARVSSESDEQLNSLGNQIGYYEDFIKKNPAWTFVPGYIDEGISGASTRRREDFNRMVEDAAAGKFDFVITKEISRFARNTLDSIQFTRQLLSSGVGVFFQNDNINTLDEDAELRLSIMSSIAQDELRKLSSRVKFGHQQAIKQSVVLGNSRIFGYTKDDGRLVIDETQAPLVRELFTLYATGAYSMKQIENLFWEKGYRNLNGKKIAHTTMSNMISNPKYKGYYVGNKVKVVDMFTKKQKFLPPEEWVMFKDETGQIVPAIVSEELWEKANAVLQRRSEDVKNRQGICNHANLLTGKLFCTHCGTAYYRRESKDKLGNQNSKWVCSNKIKSGADACDSFPIYEKELVPLLFEVFRDTRQVSAAMIAEYERMYRSMTCDGNLEKKIEEAQANIDLAKKKKSKLLELVTLESITPADFKALTAQCNQEIKSGEQVLLELKDQQESSEEFRANMEHLRKVLRDAEKQCQTEAITKDFIDTFIDRIYVTPEDDNTLRLDIKIFTGDTCEKYLGKLKRRANPEGSTGHTFKKMIEAYESGMQ

SEQ ID NO: 13158 - protein, 531 aa, synthetic construct
MLYDIKSVDLENIIIYLRKSRSDDPSMSVEEVLASHERQLQEYSKTMFGEKIPEEHIFREVVSGETIADRPVMKEIMKLLETGMVKAVLVIEPQRLSRGDLEDCGRIVNTFRYTNTLIVTPPKTYNLSDEYDRKFFEMELTRGNDYLEYTKKILNRGRYASVKQGNFIGSIAPYGYKKVKNVSSHSKSYTLEIIPEEADAVKMMYHLYVDEGFGFARIARQLDELGIKPRHASHWSSSALKDMIENPVYIGKIRWNWRKTEKIMVDGQIVKTRPKTKDPSQWIYVDGKHEPIIDEETYNKAIGKRRINVSVRKSKEIVNPFAGLLFCGKCGKAMSYKRTYNRKKDGSKAYCLSMLCNDQAVCKTKSVKYDALEDRVIQVLKDSIADFELKLENDDGNAHKIQMDLIQDLQNTITNLKQKDARQKDAYEDGIYTKQEYAVRNAKVQEEIAEAKKALANAQNTLPPSVDYNEKIIKFTDCLNAFQSPDVSPREKNNLLKACVSKILYYNDGVSKVGIGRHVENKFNIEVTLRL

SEQ ID NO: 13159 - protein, 523 aa, synthetic construct
MRFFSYGRKSVFSDKSDSIDNQFRMNREYCESKFSCQVDSWQQFSDEDFTGANTSRPDLQRMLSFIKGGFCDVLVVYQLDRLSRDVRDFANIYALLEEHGVMFISIKENIDTTTPIGRAMMYVTVVFAQMERETIAARVTDNMLGLAKKGYWTGGNPPVGYVRKHIVVNGKKHCSIEVDPDGARYVTQIFDTFLAYNCSLQGMETRFKNQGIRTQSGKFFSTTQLHKMLTMPYCVEATPEVYDFYAAKGCIMDPGSPREMWDGSVGVIIYGRSTEKNKKHQAQPPEKWTVCLGKHKPFMPAEKWLAVQSRFTQNKCIKDAKWPVPLLKGVLRCKCGNLMQVSRKKKVDGTCSSWYYCRKRMRQGVDACDMGQIKCDLLDEEVLELFRGITADPALIQKFVKAETPADVSDLKAAQARVSACERKIGRLAASLALAEDSAASKYIIAEMERLDVELGALKREASLAEMESHRAAASAKDAKATAAEIAKLIHGLDGFDDKEKNAIARAVIQECTWDGERLFITL

SEQ ID NO: 13160 - protein, 584 aa, synthetic construct
MDMMVKERPRRVCFYGRVSTEHEAQTNALENQMEWYNELLKRHENWTLTGSYIDKGITGTLAKKRTHFLKMIKDAENGGFDLIVTREVCRFARNTVDTLAYTRQLKKYGVEVYFVNDNIWTFDNDGELRLSIMAALAQEESRKVSERVLAGQEISRKKGVLYGNGNILGYRLVRNINEDGKWNPEENTYKIEPEQAETVQMIYDMCCDGMGYLQISKELERRKRKDGAGNVSWCSSKIGRILHNKTYAGYKGYRKSYTTDYLDHDRAKNLDRESYQYVKGNWEPIISEEQWNRVQKICAEKTKTVGDHTMGKKPTDNVWLNKLRCSCAAHSKYRKNKWRTNKNTGETVFGYQCYSQLNKGSYKFRKENGLPTEGYCNISMIGEWKLELMAKILLQMLWTDRTGAIQEAVDMIRECYTEDNQTDDRKEQLAVQSQVDKYTKRLGNLLELRVDGEISKDEYQRMKAETEEKIATYKMQLLQFDQETDILPDIETQISQMEETLKQYIDFSDKNVPREILEKLLVQVIPCQNHRFVWIFNLLDRENEMLCSMDGRKNAPIFSWFEESPTLFSTQHRLLLLISRIRLY

SEQ ID NO: 13161 - protein, 511 aa, synthetic construct
MTKKERPANRPAGRLLFMEMIEMETYCIYLRKSRADAEAEARGEGETLARHEKTLLDLAKRQGLTIVKIYREIVSGDSIAARPQMQHLLHDIADSKYTGVLVMEIERLARGDTIDQGIVAQAFRESETKIVTPVKTYDPNSEFDEEYLEFSLFMSRREYKTIKRRMNAGRIASVKEGNYIGTNPPYGYRKISPEPKVHTLDIVPEEAEAVKMMFEMYINGDGARAIAARLNQLQIPPRKSNAWEPVSVRKILHSPIYSGKVEWRTKKDGIILADGLHPAIITPEQFQQATERHKRTAPQVPTGYTTQNYYHGILFCANCGHQMKRRPTPNGSAHMLCRRNECRGKVVSSAVEKIDEVVLAAIRYRMQEIALQKDAMELEEAQKNETAKKKREKLKKALEKLHRQKEKLHTLLETDVYTVETFLDRSKALESQIAELEAELNTIQQEDEAPHLPPGQALVQMQHVLDSFREADPERKNQMLCKIIRRIEYKKTEKMCYRKQKSDLSLCIDFL

SEQ ID NO: 13162 - protein, 438 aa, synthetic construct
MSTDQGEQLLSYENQVNYYTNYISENPLYEYAGTYADEGISGTNTKKRDEFNRMIADCRAGKIDMIITKSISRFARNTLDCLNYVRELKDLGIGIIFEKENINTLDAKGEVLLTILSSLAQDESRSISENCTWGIRRRFETGKHKMSTKRFLGYDTDETGKLVINRTQEPIVVRLYQEFLDGKTTDYIKRIFEREGVKNWDGGTKWQSTTLMSMLENEKYKGDALLQKSYTVDFLTKKRTQNKEEIQMFYVEDDHDAIISKRIWECVQLEIKRRKKYLEEHGTNSYSHRPESNPFASKIICGDCNKVFARKGWRSSTGVDRKVWQCSERYKVKGVMGCANRHVEEETLIKAYLMAWNALVENREDFMEQWTEQLQSENLLEGYRAEKFIEYTDGAEPLTEMDTDFMLKTLDHIKVFEDGTLLVVFLDGTEIECKNEEE

SEQ ID NO: 13163 - protein, 520 aa, synthetic construct
MKRITKIEENMLLEKRKLRVAAYCRVSTARDEQLVSLAAQKAHYESYIKSNDEWEFAGLYYDEGISGTKKEKRDGLLAMVAACERGTIDFVITKSISRFARNTTDCLELVRKLLDLKIYIYFEKENLNTGSMESELMLSILSSLAESESVSISENEKWGIKRRFQNGTFIISYPPYGYDNVDGEMVIVPEQAEIVKQIFADTLAGKSTHEIAEELNERGVATKKGGHWTPGTVNAIIGNEKYTGDVLFQKTYTDSSFNRHQNRGELDQYLMQDHHKAIISREEFELANAVLKQRGHEKGNGYDTGRYQNRYGFSGRICCGECGSKYKRRMHYKPSGQYVAWACANHLKDKESCSQKYITDDALKLAFVTMMNKLVFGHQMVLRPLLQSLRGLNDQSRLLKIEELETAIEKNREQKQVLTNLMASGYLEPALFNKESNELAAEAEILRQEKNGLMRSVNGDMVKIEELQRLLRFTSKGTMMTEFDDEIFLSFVERITVLSRKEVVFELKCGLSLKERLVEP

SEQ ID NO: 13164 - protein, 523 aa, synthetic construct
MELSRNITVIPARKRVGNTAAAEQRPKLKVAAYCRVSTDSEEQASSYEAQVAHYTQFIQKNPEWELAGIYADDGITGTNTKKREEFNRMIQDCMDGNIDMIITKSISRFARNTLDCLKYIRELKEKNIPVFFEKENINTMDSKGEVLLTIMASLAQQESQSLSQNIKLGLQYRFQNGEVRVNHSRFLGYTKDEEGNLIIEPAEAEVVKRIYREYLEGASLLQIGRGLEADGILTGAGKTKWRPETLKKILQNEKYIGDALLQKTYTVDFLNKKRVQNKGIVPQYYVENSHEPIIPRDLYMQVQEEMIRRANLHSGANRKKRVYSSKYALSSIVYCSKCGEIYRRIAWNNRGKHSTVWRCCTRVEYGPTACDAPTIQESDLQTAVVQAINLTLGSRENMMVTLQENVEAVIRQEDETSSEGIEAKLLELQKKLLKLANSKKDYNSVADEIDRLRELKQNALLESAEREGLKQRIKEMREFLEQQSTEVTEYDELLVRRLIEKVTVYDEQFEVEFKSGASISIQR

SEQ ID NO: 13165 - protein, 533 aa, synthetic construct
MQQYCLYLRKSRADAEAEARGEGETLARHERTLLELAKRQQLNVTEIYKEIVSGESLAARPVMQRLLSEVEHGIWAGVLVMEVERLARGDTTDQGIVAQTFKFSNTLIITPTKTYDPENEFDEEYFEFGLFMSRREYKTINRRLQRGRIASIKEGKFVGNKSPYGYERVKIKGDKGFTLKIVPEEAEIVKLIYEWYTHGVLQEDGSYRKIGCELIAQKLNQMKAPTRTGADWILPTVRDMLRNPVYTGKVRWNWRQTVKKMVDGKITKTRPRNDNVLIFKALHEPIISDEVFEAAQNIMSKNPPRPVVDSKRIQNPLAGIVICGICGKPMVRRPYQRPYPDTLMCPRAKCPNVSSDLRRVEQRVISALEVWLEQYKLEWESKDVSPAVKQSEVLKKSFEAQQAEIDKLYKQLSKTHDFLEQGVYNTETFLERSRSISERINIAKESLPKIQAQIDIETAKENNLINVIPKAEKLLETYYTLPTAESKNTMLKEVLEKVVYVKTKRCRKKTDSRDDFEITIFPKIPSQDSRPPA

SEQ ID NO: 13166 - protein, 478 aa, synthetic construct
MTNQAERTSYIENVAAYIRVSTQEQKLHGISIEAQEEKLNEYADSHGMKIVKFYKDEGVSGRKLIRKRPALQAMIQDAEKGNFRRIIFIKLDRFFRSVAEYHECMKRLAAGGVIWTATEEKYDLSTPSGEAFVNMKLTMAQFEADQVGERIRMINEYKVKSGQPLYGSQALPFCYQVKQSGDGDRRKYIAKRDEIIMEDLIDHFCKNRSVRAALHYINAKYSRAFSYSTIKNALTSELICGTYRGNPAYCEGYMTPAAFETMQKYIQHNPRTSQREHSYIFGGLIRCPCCGNMLVGSPTVLNRIGKSGQKLSYKYYGYRCYRGNLEKKCDFRTMAFEHRLEAIMLSEVEAVMRGKQMYLLRLQNAPQRVAQHDLAELQQELARLNYAWQKGRIKTAADYDRQYDDLMTRIDAANAERQELAANPDYRKISRILSDGWKQLYISLDNDHKRAFWRAFIEEIQLEWTKDVKRIRDITFFT

SEQ ID NO: 13167 - protein, 464 aa, synthetic construct
MARSVTVIPARNRQRETGRRAVQEKKIRVAAYCRVSTDQEDQLHSFEAQVDYYTKYINDHENYEMAGIYADEGISGTNTKKREQFKRMIADCEGGKIDLVITKSISRFARNTQDCLAYSRKLKNLGIGIIFEKENINTLDSTGELLFTILSSLAQDESRNISENCKWGIRTKFKNGEMHLNTFKFLGYDKDKNGKLVINKEQAKTVRRIYRDFLIGINPAQIAKELTEEKVPGCNGQTKWYPSTIVGILKQEKHMGDALLQKTYTADFLTKRQVKNNGEIAQVYVKDSHKGIIDKETWNAVQEEFERRERFMKDHGTDRYSYGADCMPFCEKVFCGECKSLFTRHSWKSRGIVQWQCKNHRTDGRVTCSNAYVDNSNLEKGFVKAFNKLVADREKFMERWNQMKTDGSPLEKIRAEQMMEATENEPLGRFVPEIAQLVLAEVTVLGAKKYEFFFLEGSRIKVSV

SEQ ID NO: 13168 - protein, 498 aa, synthetic construct
MEIQIREGNREQKRKLRVCAYCRVSTDADEQENSLENQIRHYETVIKANPAYEYAGVYSDFAISGFKEKRPGLQKMLADAQKGKIDLILTKSVSRFARNTSIVLEATRKLKELNVGVFFELQNINTLSGEGELMLTILAAFAQAESESGSAGAKMVYQRKYEAGIPVQYLERSFGYTKDERGVYIADESEAVWVRKIYEMAADGYTPAAIKRYLNENGVKTVGGTKWIDSTVFRLIENEIYKGDYIMHKHFVNEERKLVRNRGEVDAWYIEDDHEAIVSPELWQKAQDAIEAKRDYLAEGSVIEEFTEDNYPYMNRIFCAKCGHPLYKRIYSNGNRLNWGCSGTKRYGKSFCEGINIPDGVLRKAWHFDGNMYIDEKPSVKGTKEFTYLKESSWKRRHKKKVPEAIPENTEEAYPYRKKIFCGLCGSRLVRHVNPKSHKVIWICNGAKRKGVAFCGGTRIPDSVIRGWGEIKKDIYIQRKDDKNGKKRYSYTSKKPTA

SEQ ID NO: 13169 - protein, 516 aa, synthetic construct
MKAIYVRQSLDKKDSLSIDAQIEDCINLCKRSGWNDYKVYKDKGWSAKNLDRPAFRQLNQDVQNGLIDGVICYKIDRISRSIRDFVNLIVDYQDLGVHFISFADNINTAAPGGMMMATLFVSLAQMEREAIITRVTDNYYYRCELGFWGGGPAPYGFRLVKTTENGQKHTILEPVPEEAEVIRTFFAWYLEPGATVRSIMNRAHLARMQTRSGSDWTSRVLSDMLSKPLYAPNSMDIYNFYASQGVRVKISPEQCDGKQSLNIFGMRDRNSAHPKRSRPVSEMTLAIAKHKPIVDSDTYLKVQYKKKSRLAVTPRAGTSRTAVLSGLVKCGYCGRAMSPSGSKNGRYFTCSGRRNYAKGVCQGKSVKMDFLDDYVLNDLADFISQPEIKSMFKDGKAQRIPSSEQAKINEYKQRIATIDIDIQKFLDACLTSGDVAVKYLNERIDLLDTEKQNLQAEILAVQNKSNRKLELEGLDINSAPTALAGGEFDTKKYLCNFFIEQIIFYDRDNVQIRYKI

SEQ ID NO: 13170 - protein, 498 aa, synthetic construct
MEIQIREGNREQKRKLRVCAYCRVSTDADEQENSLENQIRHYETVIKANPAYEYAGVYSDFAISGFKEKRPGLQKMLADAQKGKIDLILTKSVSRFARNTSIVLEATRKLKELNVGVFFELQNINTLSGEGELMLTILAAFAQAESESGSAGAKMVYQRKYEAGIPVQYLERSFGYMKNERGVYIADEEEAVWVRKIYEMAADGYTPAAIKRYLNENEVKTVGGTEWIDSTVFRLIENEIYKGDYIMHKHFVNEERKLVRNRGEVDAWYIEDDHEAIVSPELWQKAQDAIEAKRDYLAEGSVIEEFTEDNYPYMNRIFCAKCGHPLYKRIYSNGNRLNWGCSGTKRYGKSFCEGINIPDGVLRKAWHFDGNMYIDEKPSVKGTKEFSYLKESSWKRRHKKKVPEAIPENTEEAYPYRKKIFCGLCGSRLVRHVNPKSHKVIWICNGAKRKGVAFCRGTRIPDSVIRGWGEIKKDIYIQRKDDKNGKKRYSYTSKKPTA

SEQ ID NO: 13171 - protein, 464 aa, synthetic construct
MARSVTVIPARNRQRETGRRAVQEKKIRVAAYCRVSTDQEDQLHSFEAQVDYYTKYINDHENYEMAGIYADEGISGTNTKKREQFKKMIADCEGGKIDLVITKSISRFARNTQDCLAYSRKLKNLGIGIIFEKENINTLDSTGELLFTILSSLAQDESRNISENCKWGIRTKFKNGEMHLNTFKFLGYDKDENGKLVINKEQAKTVRRIYRDFLIGINPAQIAKELTEEKVPGCNGQTKWYPSTIVGILKQEKHMGDALLQKTYTADFLTKRQVKNNGEIAQVYVKDSHKGIIDKQTWNAVQEEFERRERFMEAHGTDRYSYGADCMPFCEKVFCGECGSLFTRHSWRSRGIVQWKCKNHRKDGKVACTNAYVDNADLEKGFVKAFNRLVTDRDKHMERWNQMKTDGSPLEKIRAEQMMEATGNEPLGRFVPEIAQLVLAEVTVLGAKKYEFFFLEGSRIKVSV

SEQ ID NO: 13172 - protein, 559 aa, synthetic construct
MSKTVAIYVRVSTGKQADRDSIPFQIQECSNYVKHFLKTENFEVFKDAGRSGKNTHRPEYQRMIEKVKAGMISHVVVYKIDRISRNLVDFSIMYNDFKEHKVAFISLNEQFDTSSAIGEAVLKIILVFAELERKLTGERVRDIMMNRALEGKWNGARVPYGWDWDSKKQCPVHSDTEAEYARMMYRLYDESHSTCVVRDYCNAHDIPTKRGGEWTSKTVADFLRNPMNVGDYRYNYRKSARGKRNDPSEVIYVKDVFPPLIDRELYERVTHQMDLNTFGLGKDGRKVVSKKTHVFGGLIVCGLCGAFYHSDSDTPRADGFLPSQYRCGAHNRKIHCKAKGTSDVKLGPFIFNYISNLVKASKSKKLLHSVSDLEQILLTGPEFEQVAGIADAGLDVTFDTIMHGFKPKRYTAAPYTVIRSGDSDALTAKRDKTIRALERLKKLFLFEDDAMSEKEYLMSKRELEGTLSDIENELSALEADTADTKYDDMSFISTASGFLIAHQIASGEHINYRELACAVDAKVLKDFANSVIERIVLLDGRVASIEFKNGLVHEFLYRE

SEQ ID NO: 13173 - protein, 520 aa, synthetic construct
MQVIIKEAKKVDEKKLRVCAYCRVSTDADEQENSLENQIGHYEDAITSNPKYEFAGVYHDFAISGFKEQRPGFIRMMEDARAGKMDLILTKSVSRFARNTAVLLKATRELKGMGIGVFFELQNINTLSGEGELMLSILAAFAQAESESGSVGAKMVYQRKYEAGIPVQYLERSFGYRRDENGRFVPEPSEAKWVKKIFRMAADGYTPAAIKRYMNENNVKTVDGALWCDSTVFRILENEIYKGDYIMHKHYVNEDRKLVVNRRQEDAWYIENDHEPIVSRKLWQEASDRLNEKREYLAEGSFIADFTQENYPYMGHLFCGKCGYPLYHRIYSNGNRLSWDCSGVKRYGSGFCGGVNVPDGTVRERGIMENTYIMEKAGEKGRREYTFLKEASWKRRHRKKVFRHDVPELTLENYPYYKSIYCGKCGGRLVRYIDKGSKVLWICSKQKRKGSWYCEGMRVPDEEIRKMKLLDEKNYITERKMKNGKKCYGHSCEEPKRDTQGENGSQENQGCSVLPCVNGQ

SEQ ID NO: 13174 - protein, 436 aa, synthetic construct
MSTDNEDQIHSFKAQVSYYTDYIGKHENYELAGIYADEGISGTNTKKREQFRQMVKDCEDGKIDLVITKSISRFARNTQDCLEYSRKLKNLGIGIIFEKENINTLDSTGELLFTILSSLAQDESRNISENCKWGIRTNFKNGKVNICPSSFLGYDKDTNGKIIINEREAEIVRRIYREFLWGMNPQQIAKGLEDDGVEGCKGKKKWYASTIVGILKNEKHMGDALLQKYYTADFLTKKLVKNKGEITQYYVKDSHEGIIDKETWEAVQEELDRRERFKEAHGLSHYSYGTDYNPFTNRIFCGKCGYSYNHHCWKKRGIFQWQCKERTVQGSRKCMNDTVDQRDLEKATVSVVNEIIREKAKYLDRWNRMAENGTPLEKLRARQMIEITNQPELNIFVPELAQLLLYEVTVLGAKTYEFVFMDGSRKRIQTGTASAA

SEQ ID NO: 13175 - protein, 623 aa, synthetic construct
MKAKKTDNGKITALYERLSRDDDLTGDSNSIINQKKLLEDYAKEHGFTNCVHFTDDGWSGANFDRPNWKRMIAAIEAGEVSHVLVKDLSRVGRDYLQVGFYTEVMFKERGVRFIAIANGVDSDKRESSEFAPFLNIMNEWYVRDSSRKITSVLHARGMSGKHTNSHCIYGYKKDPNDKDHWIIDEEAAEVVRRIYRMALESKGPYEIARILALEKVERPSYYLAQRGVGKHQSNFNPAERYTWRGGTVADILSKPEYMGHTVNFRTYKESYKDKRSRMTPKEDLVIFENTQEAIIDKETWERVQSLRKTIRRTDTIGAANPLTGLMFCADCGAKMYNHRGGAGLARDWAGRPNGRKRPERDEYNCSRYDLGNQHYNRYCTTHLIRTAVVNELLLEAIKEVCDYALNNEAAFMEQVCSASSERQVKAAKAIRQRKQRSEKRADELSRLIRKLYEDNVNGRLSDKLFEQMLHDFEAELESLTESVTQDEQELDRISRETVNAEKFLALVKKYTDFSELTPAMINEFVEKILVHQAEGKGASRTQEVEIFFNFVGKVEIPHEEIVLTEEEKAALAEQERRRAKKAEYNRRYMEKKRREWREQREREQEQKPHKLPPVADEKGEKSA

SEQ ID NO: 13176 - protein, 467 aa, synthetic construct
MAREIVHIPARRGLSNRATVTDRKIRVAAYCRVSTDHEEQINSFENQVTYYTEYINRNPNYELADIYADEGISGTNTRRRDDFNRMIADCEAGRIDLIITKSISRFARNTQDCLNYSRKLKDLGIGIQFEKEGINTMDSSGELLFTILSSLAQDESRSISENCQWGIRSLFKQGVLHLNTNRFLGYDKDEKGNLVINEEQAVIVRRIYTEFMNGINPDVISRRLRDEGVPGCMGEAKWQASTIFGILRNEKYMGDAILQKTFTSDYLTKKTVKNEGQLEQYHVKGDHEAIIDPEYWDAVQLELERRQNYMTAHSLRTMGRYTDEQPFSNRVLCGECGKVFWRRTWYRLNNTYKVWQCGNRYREKGVVTCHSENLKESDLHGAFVMAWNGILESRAEFTETWKAQAENGNALERFRAKQMLELTKMKPMKEIDLLLVGKVLDYVIVQNGGELEFHFLDGTQLAVEVTE

SEQ ID NO: 13177 - protein, 507 aa, synthetic construct
MKGWYFFMAHGVIYARYSSNHQREESIEGQLRECKAFAKAQNIDIINTYIDRALSAKTDDRPGFLKMIADSSKQAFDYVIVYQLDRFARNRYDSAFYKMKLKKNGVKVLSAKENITNDPAGIILESVLEGMAEYYSVELAQKVKRGMTENALAARWASGRIPFGYRIDEQKHLIPDPATGRAVTTIFLRFARGEKIKSIVDYLNSLNYKTSLRNKFNRSSFQRMIVNPVYIGTFRWNDIVLEKVVPPLIDELTFETCQRRIAAKKRDKNAVNRKSDMFLLTTKLKCAECGGNMVGISGTSRNSQKYYYYGCYNTRRHNTACKIGYINRDELEDAVFEAAMDVLSSDENIDIIAEQAFKISQQQVENPRIKELEMQKKETEKKLANCVKALEAGLFSETLANAIKKNEDELKSINLALAHENLSSASFEITKQHIAFFLSQFRHMEPTKAREAVLNTLLREAVIKKESDSNYLVTVRFNYTATPTLSDTKEVSVRIMNDWWRQAGSNR

SEQ ID NO: 13178 - protein, 521 aa, synthetic construct
MARITKIEVARDFTEKKKTRVAAYARVSTKSDEQLLSLETQKEHYDNFISSNPEWEYAGLYYDEGISGTKVEKRDGLLALLKDCEDGKIDRVITKSISRFSRNTADCLEMVRRLAKLNIYLYFEKENIDTEHMSSELMLSILSSIAESESRSISQNSKWSVKHRYEEGTFIIGYPPYGYENKDGKMVIVPDEAEIVRDIFTMTINGMGTYVIAKELNRRGIPSKKGGKWCSTSVRGILQNEKYTGDVIFQKTYTDDNFNRHHNYGEKNMYLCKNHHEPIVSHEIFDKAAAVMEQRGKEKSIETGIGKYQHLYAFSGKIICGECGAKFKRRQHYKPSGKYVSWTCNTHITDKNACSMMFIRDEDIKLAFLRMIRKLQTAQTQVLKPFISDLKGTNNKGRLHQVLDLEEQIEQNAEQIMVLTNLMASGYIAPEIFHAEKNRLTLEADRLAKEKEVLSKSISGDLTHLDEAQKLMRFVSKKTEIKAFEDTLFLEYVDTITARSRDEITFNLKCGLNLTERLVRA

SEQ ID NO: 13179 - protein, 594 aa, synthetic construct
MAYAAMRKAGLVPEAAPDLRTVALYVRVSTGYQVDKDSLPFQKKELKNYCEHVLHIDKNRIEVFEDAGKSGKNTNRPGFERMMKKVRAGQISHVIVYKIDRISRNLVDFSLMYDDFKYNRVTFVSLNEQFDTSSAIGEAVLKIILVFAELERKLTSERVMDIMIGRALSGQWNGARVPYGWDWDEEAKFPKHSETEAVFGRLMYDMYEETRSTCKVRDYCNSHDVPTKRGGEWTSKTVADFIRNPMNRGDYRYNYRESARGRKKPEEEVIYIEGVFPPLVPPEQFDRCIAIMDENAAKKRAPGFSHQKIHVHPFAGLLVCGSCGSPFQVIKQDKPRANGFSPSLYRCGARCRKRSCMAPGCSDVVIGPFVFNYVSAMVRAAGMRVRIHSPEELERLLLSGPEFENVAGIASEGLNATFSLLSGRPAASGPSYAPDLLTAPAGAPDASELDELKQKIARIDRAMERLKKAFLFDDQAMSEKEYLETKTGLEADRVAAENRLKELSEVTFSTDAGELSFIKSASSFLLAHRIQSGDHIVYSDFAPLVGNETMRDFLNLIIEKIVIRNGRPEEITFKNGLTHIFLYRDETAENVAKS

SEQ ID NO: 13180 - protein, 462 aa, synthetic construct
MSYFNFNPDLVGVRVVKYIRCSHEGQVLHGDTLEAQNLILDEFIAANKMVLVDTFIDEAMTARKKYTKRKEFVRLLDGVRSHNFDLIIFTKLDRWFRNIGDYHKIQEILDANGVQWKAVTENYDTTTTNGRLHINIRLSVAQDECDRDSDRIKDVFAYKLKNKTFISGALPRGLMLDAEKHVVHDPEWKQWALDMFDHFESCCSKRDTLLFLMDKYNMYLCYDTIVRSLKNPLYKGFYRGDPDFCEPLIDPARFDRIQNLAIRNVRVRRSRQTYVFCGLLVCASCEHYMTGVATYHTLSGGKEKMYKRYRCNMHTSSHSCPHSKMYSEEMLEQYMISNVCSAFSCYIAEYAVAAASAKKKNTAAEIAKIERKLKKLYDLFMDDLIDKEAYKSEYDSFNKQLNELKSIPFAPANDYKKVQELLSGDWSAVYTSFNNNEKNAFWKSFIDKIVIHEDGKIDIIFL

SEQ ID NO: 13181 - protein, 563 aa, synthetic construct
MDEKIVALYVRVSTGYQVDKDSLPFQKKELRGYCEHVLHIDKKRIEIFEDAGRSGKNTKRPAFERMMEKVKSGQVSHVIVYKIDRITRNLVDFSLMYDDFKYNNVTFISLNEQFDTSSAIGEAILKIILVFAELERKLTSERVKDVMIGRAQNKQWNGARVPYGWDWDAEKKCPVHSEKEAPYAKAMYRMYLDGGSSVTICDYNNSHNIPTKRGGEWTSKTVADFLRNPINKGDYRYNYRESARGKKKSDDEVIYIKGVFPPLIDPKIWDEVNRRMDANSQNRNTSVFHPIRKRCNVFAGLMICGKCGSGYQVKGKDSRKGDGFRPSSYACTGKYQKKNCDNLNVSDVKIGPFVLNYIAAMVDASKSRRFIKDCDSLEQVILSHISFSDVAGISASSLQDTLDLLFGRSGSELLSGKPVSSETADGSKTEELKEKLQRTDRALERLKKAYLFDDDGMDEKEFLEMKSKLEVDRIKLENSIKGLESSSISENVDQAAFLKSASQFLISHKINSGDYIDYSRLAALDEESMKAFVNSIIDHIVVLDKRITEIVFKNGLTHTLLYR

SEQ ID NO: 13182 - protein, 624 aa, synthetic construct
MSKSEKITALYERLSRDDDMDGESNSISNQKRQLEDYAAQHNLPNIVHFTDDGISGTRFDRPGFLALMKEVEAGNVEYLCLKDMSRLGRDYLKVGQIMEILRQQGVRLIAINDGVDTARGDDDFTPFRNIMNEYYARDTSRKIRSTFQAKGKTGKHLTGLVIYGYLWNETRDQWLVDEYSAEVVKRIFSMTIEGMGPYQIANRLKEEKVLIPSAYLAQFNEGVNKNKTFKDVYGWGSSTICNILDKREYLGHTINFKTRKHFKDKKSHYVPEDEWTIFENTHEAIIDQETFDLAQKVRSKVRRYPDGWGDVAPLTGLLYCADCGGKMYVHRFNNGKRISQYTCSKYSKIPVGTLCKTQHRINESVVLELVKDLLKAIAEYAKHERAEFVRVVQEAQSSQQTAEVKKQRTRLATAKQRISELEVLLCKIYEDNILGKLSDSRYATLDAQYEKEQKELTAEISTLEKAISDYEKHEKDADRFIALIDKYENFDELTITMLNEFVEKILVHERDRKGSIQTTQEVEIYFNFVGRFVPPKFAEVELTPEELEEIRKREERKDRLHQNYLKRKASGWQRQYEDRTKAKKKAEMDAKKNALRAEDIAKGVFIPVSNMPKLEPKIAPQKGA

SEQ ID NO: 13183 - protein, 523 aa, synthetic construct
MTTAKNVMVIPARRRLGNTVQAEERPKLRVAAYCRVSTDSDEQATSYEAQVEHYTAFIKQNSEWEFAGIFADDGISGTNTKKREEFNRMIGECMAGNIDLIVTKSISRFARNTLDCLKYIRELKEKNIPVFFEKENINTMDSKGEVLLTIMASLAQQESQSLSQNVKLGLQYRYQNGEVQVNHNRFLGYTKDEDGHLIIEPVEAEVVKRIYREYLEGASLLQICRSLKADSILTAANKPHWRPETVKKILQNEKYIGDALLQKTYTVDFLSKKRVKNNGIVPQYYVENSHEPIIPRELFMQVQEEMVRRANLRGGKDGKKRVYSSKYALSSIVYCGQCGDIYRRVHWNNRGYKSIVWRCVSRLEEKGSECTAPTINEETLQTAVVKAINELLANKEPFLQALQKNIATILNEENDNATNDIDSKLEELQQQLLIQAKSKNDYEDVADEIYHLRELKQNALVENAEREGKRQRIAEMTDFFNEQSCELEEYDEQLVRRLIEKVTVFHDKFAVEFKSGVEIDVEG

SEQ ID NO: 13184 - protein, 536 aa, synthetic construct
MQTGKITALYVRFSYDDGIDAESGSIEHQKSLLRSYAESNGFTNLSYYADDGYTGTNFNRPDFQRMLGDIHKGLVSTVIVKDMSRLGRNYLMVGQYVEIEFPKHNVRFIAISDNVDSAKGMNDLLPIHNLMNEWYSRDISKKVRAMIRQKGNSGQSIASKLPYGYYNTPEDKQTWLIDESAANVVRRIFDLYLNQSFGMYQIARILKAEGIPRPTYHRRMAKGIKVEADDLCVWSASVVRDILQHREYIGDTVNFRTEITSYKNKKVIHNSDDKLKIFPNTHPAIIDKETFQKVQDKISKEIRHTRNVHSYLFADYLYCMDCHSRMHGRQCYLKGGRTLSAYECSTYRKSKGCCFHGVPEMYLQAEVLVKIQNVLAFAKSNPAEFRQNISKALEKQSDGSKAVIQEELDKAQARTSEIDKYIQGLFEAKVRGEIDGSLFASLKKTYDEEKEQLNKLIIDLITKLSRENEADEKIQLLYAAIRKYDAVWELTPEVLTDFIEKIEVGQVSAENKKISFELRDNQISVFFWGVGIIDFM

SEQ ID NO: 13185 - protein, 467 aa, synthetic construct
MLKAALYARVSSEEQAKRENSIPAQLRALREYCRKNNIEIFKEYKDEGITGQISKRPAFQQMLSAAFSGKINVILVHKFDRFARKVELSRSVKNSLQAAKVNVVSITEPIEDSPMGFFMEGLYELMAEYYVRNLSAEVFKGMNERALKGKHMGQMPYGYYCKDGNVYVNETQAEVIHKIYRFYDEGWGHMKIAKWLNESKIPTYKGIIGGWQTFQVKQILKNSKYIGENLWNGTVYPADFPAILEPALFHRVQEKSNLMTRTHTYRGNNYTKHHLLGLLYCGECGSIMRVKPNQDWQRRKFDTYTCRDASQYRGDCRFTKIFDATKLESEVDAYLRSVLAGAPISLIVSKDAEKVKPADASKSQIEKINAELKRAKDAYLSGVFDLDEYREIRQGLENNKKIIEAETKNVPAPLRANEKEDILRKKIKSAWDLYKNVQTAEEKRTILKTFIHKILIYRDRWEVVFYI

SEQ ID NO: 13186 - protein, 631 aa, synthetic construct
MNREGKKCVLYPRVSTEMQVDGYSLEGQKNSLKRFADREEMEIVGIYEDAGKSGKSIEGRPAFKKMLADIKNGLEIEYILVYKLSRFGRNAADILNSLEFVQSYGINLICIEEGIDSSQTSGKLLISVLSAVAEIERENIIEQTMNGRREKARQGGWNGGFAPYGYYLKDNQLLIEETEAEAIRIIFDKFGNSDIGLGGVAKYLNLQGIKKIPRQNGKLETWSSHLIRQILDNPVYCGKIAYGRRTREKVKGTKNEYKQVHTDDYILEDGQHEGIVSEELWQKVHAKRKATGIKQPSKVGKDRAHLLTGVLKCPICGSSMYTNKHAWTNKDGTYKEVYYYICGRNKQERGHHCDYKASLRKTDIEPLVVEAVKELVSDVYFAKEIEKRIGVQTDTSTVDKELANYENKLKEVDLNKARLENEIDNLPADARYRERKIHDMTLRLDALYDTMVELEERIEDAKLRKSSIEMEAITLDNVYKIMQNFGKLYAIMSDEEKKSLITYLIKEIQIYPNGESEMPLKSIEFNFPIYIDGKEVRKVLWESGNTVEPVAHANELLTSLRQHQLRGHAADIQGVPVHPDQSILGGYAAGGLHLPCKTTPGPHRQGGIAVGGEILHLPEGAQLSSCPPIQP

SEQ ID NO: 13187 - protein, 530 aa, synthetic construct
MAKKKKPAGGIAVIYARYSSHNQRDVSIEQQIEACRKHAAELGLTIIATYEDRAISGRTDNRPAFQRLMHDAEKGKFSYVLAWKSNRMGRNMMQAMVNESRLMDCGIIVYYAEEDFDDSAAGRFALRSMMNVNQFYSDNLAEDVRRGLMDNANKCMVNGRQPLGYKRGKDGKVVVDEPAAAIVREVYARVASGELFTDIARDLNRRGIKTADKGEWNKNSFHRLCSNEKYRGIYIYGDVRIEGGIPTIIDDTLWYKVQEALRVKKLKRNGRHRPGDEDYLLTGKLRCGKCGGYMIGMSGRSKTGDIHYYYACQNRRVGRTCDKKNIRRDVIEPAVAQAIKEYCLTDDAIEWIADKTVEYWEKADRNLQLDSIEGDLAAVQSSISNVMKAIEMGVVTETTRDRLIELEKQRTDLKSKLSLAKEEVVHVDRKKLISSLLLFRNGDIHDRQYQEDLFKTFLISVYVYDDDDNGHLKIVFNAFGDNHTVDLPIDFGETDNQSAFSDGAEKFDYSLHRSTRLKPSEEAQVAFLFV

SEQ ID NO: 13188 - protein, 464 aa, synthetic construct
MARSVTVIPARNRQRETGRRAVQEKKIRVAAYCRVSTDQEDQLHSFEAQVDYYTKYINDHENYEMAGIYADEGISGTNTKKREQFKRMIADCEGGKIDLVITKSISRFARNTQDCLAYSRKLKNLGIGIIFEKENINTLDSTGELLFTILSSLAQDESRNISENCKWGIRTKFKNGEMHLNTFKFLGYDKDENGKLVINKEQAKTVRRIYRDFLIGINPAQIAKELTEEKVPGCNGQTKWYPSTIVGILKQEKHMGDALLQKTYTADFLTKRQVKNNGEIAQVYVKDSHKGIIDKETWNAVQEEFERRERFMKDHGTDRYSYGADCMPFCEKVFCGECKSLFTRHSWKSRGIVQWQCKNHRTDGRVTCSNAYVDNSNLEKGFVKAFNKLVADREKFMERWNQMKTDGSPLEKIRAEQMMEATENEPLGRFVPEIAQLVLAEVTVLGAKKYEFFFLEGSRIKVSV

SEQ ID NO: 13189 - protein, 498 aa, synthetic construct
MEIQIREGNREQKRKLRVCAYCRVSTDADEQENSLENQIRHYETVIKANPAYEYAGVYSDFAISGFKEKRPGLQKMLADAQKGKIDLILTKSVSRFARNTSIVLEATRKLKELNVGVFFELQNINTLSGEGELMLTILAAFAQAESESGSAGAKMVYQRKYEAGIPVQYLERSFGYTKDERGVYIADESEAVWVRKIYEMAADGYTPAAIKRYLNENGVKTVGGTKWIDSTVFRLIENEIYKGDYIMHKHFVNEERKLVRNRGEVDAWYIEDDHEAIVSPELWQKAQDAIEAKRDYLAEGSVIEEFTEDNYPYMNRIFCAKCGHPLYKRIYSNGNRLNWGCSGTKRYGKSFCEGINIPDGVLRKAWHFDGNMYIDEKPSVKGTKEFTYLKEISWKRRHKKKVPEAIPENTEEAYPYRKKIFCGLCGSRLVRHVNPKSHKVIWICNGAKRKGVAFCGGTRIPDSVIRGWGEIKKDIYIQRKDDKNGKKRYSYTSKKPTA

SEQ ID NO: 13190 - protein, 544 aa, synthetic construct
MRVSVNLNAQKPDTTTNAVIYARYSSHGQTEQSIEGQLAKGHEYAAAQGYTVVHEYIDRAMTGRNDNREAFQKMLSDTGKHQFQVIIVWKVDRFGRNREEIAFNKHTCKKNGVRVEYVAESLPNSPEAVILESVLEGMAEYYSIQLSQNIRRGQLESAKKCQCVGGSVPLGYTLDSDKHFVIDPQTAPVVKKIFDLYAEGATISEITGQLNEQGIRTIRKQLFTKNSLTKLLKNEKYIGVYTYKDIVRVEGGVPAIVDKSTFDRVQELLKINRRAPSHTWTKVEYLLTDKLFCGHCGSPMVGESGFSHTGAKYSYYGCIKRRREKACDKKPVRQDWIEALVLDETVKLLHDDELMEYIIDRTWEYYQVTDKVQEEKAVLEAQLAEVDKAINNLVRAIEAGIFNAATKSRMDELDAQKAALTASLADLELTSGIRITRDHIEYFLLRLRDLDVKDRECQKRLVQTFVNAVFIYDDGRVKITYNYSGQSSTITLNQIASAEKGKGFVCCLPCSTFSPRFPRGVAALFLFWGKNGCESATNFSCIVL

SEQ ID NO: 13191 - protein, 602 aa, synthetic construct
MYITVTLDPNGIYDAYLRKSRADMELEKLKKFDTLKQHEKFLKDRANQLGIKIRKIYREVVSGESIQERPEMQEVLKNVETGTIDGILVVEVERLTRGDAKDQGTVTQAFKYSNTKIITLNKIYDPNSDEDEEYFEFGLFMSRREYKTINRRMQRARIANVLDGKYCASEPPFGYKKVRVKYGKGYTLEPVSEEAEIVKEMYQKRADGMGYDIICNWLNTLDFKPKKSDVWTPATIKGMLSNPIYIGKIRWNSNKQKKILINGQIIKKRKKGNNEDLILVEGLHPAIINNDLFDIVQGIKPNKASTKHNTELQNPLATLVKCADCGRSMQRRPYYDNKKQEPKLRRKYDIDKEKLRLCLREHKGEYSLRDIATALKVRKHCVDHWFASNQSKFTMPYADKWEELKKLLNINTTEFDKAITTYESNLIEPHEDTLICPKAHCTNIGSNLALVEQETIKALQEYISSQKELLATYNPAEEDDNVMFVSLSKELDKYNKQLDKAYELVEQGIYTPQEFTKRTKTIKDKITNTEKELNKYQIKLNKDRIEKLLPKIEKVIDSYYKVTSAEKKNKLLKSVISYIEYKKEKGGRGYENNFSIVIHPKF

SEQ ID NO: 13192 - protein, 498 aa, synthetic construct
MEIQIREANSGQKQKLKVCAYCRVSTDADEQENSLENQIRHYKEVIASNPDYEYAGVYSDFAISGFKEKRPGLQKMLADARKGKIDLILTKSVSRLARNTSIVLEATRKLKELNVGVFFELQNINTLSGEGELMLTILAAFAQAESESGSVGAKMVYQRKYEAGIPVQYLERSFGYTKDERGVYIADESEAAWVRKIYEMAADGYTPAAIKRYLNENGVKTVGGTEWIDSTVFRLIENEIYKGDYIMHKHFVNEERKLVRNRGEVDAWYIEDDHEAIVSPELWQKAQDAIEAKRDYLAEGSVIEEFTEDNYPYMNRIFCVKCGHPLYKRIYSNGNRLNWGCSGTKRYGKSFCEGINIPDGVLRKAWHFDGNMYIDEKPSVKGTKEFSYLKESSWKRRHKKKVPEAIPENTEDAYPYRKKIFCGLCGSRLVRHVNPKSHKVIWICNGAKRKGVAFCRGTRIPDSVIRGWGEIKKDIYIQRKDDKNGKKRYSYTSKKPTA

SEQ ID NO: 13193 - protein, 464 aa, synthetic construct
MARSVTVIPARNRQRETGHRAVQEKKIRVAAYCRVSTDQEDQLHSFEAQVDYYTKYINDHENYEMAGIYADEGISGTNTKKREQFKRMIADCEGGKIDLVITKSISRFARNTQDCLAYSRKLKNLGIGIIFEKENINTLDSTGELLFTILSSLAQDESRNISENCKWGIRTKFKNGEMHLNTFKFLGYDKDENGKLVINKEQAKTVRRIYRDFLIGINPAQIAKELTEEKIPGCNGQTKWYPSTIVGILKQEKHMGDALLQKTYTADFLTKRQVKNNGEIAQVYVKDSHKGIIDKETWNAVQEEFERRERFMKDHRTDRYSYGADCMPFCEKVFCGECKSLFTRHSWKSRGIVQWQCKNHRTDGRVTCSNAYVDNSDLEKGFVKAFNKLVADREKFMERWNQMKTDGSSLEKIRAEQMMEATENEPLGRFVPEIAQLVLAEVTVLGAKKYEFFFLEGSRIKVSV

SEQ ID NO: 13194 - protein, 476 aa, synthetic construct
MEEKRVIIYNRVSTIMQEKADSLNEQTDECIRFCNSKKYKIVKIFKDVKTGTTSDRYGYKELKKHIQKKDFDILVVLEISRLGRTMKELLFFFEDLNKQEIEFISLREPAFNTNTPDGKFLMNIRLSAIQFERDNTANRVTERMYFKASKGQWITGNPPIGYKLVDKKLVIDEEKAPIVREIFKDFLEGKTLCKISEKNNFTWGSKRVKRILTNPVYKGYIRYGNRSSDGKKGKKEPFLVKGWQEPIISEKDYDLAQELLKRIPKAIPVHYKPALLSGLLKCKHCGTNVLRKKGNTYNKNLYYGCHMNGLIFSDKLFYKNHEKCTAGTIKGELLEKAVIEALKKEIQKLDFNTVEISKDVDTDKKIITNKVKKNKARLERIYELYIDGEISKDKYISEKHSLEEEIFLLENQNFDNEEKEKKISNNELVKSYFEKLDLTDVVEANKILKIIIKKIVVYRDKKAAKDDFELEIYLNV

SEQ ID NO: 13195 - protein, 523 aa, synthetic construct
MAKSVTTIPATLSRFTAAPINSTKKRRVAAYARVSTDNEEQLTSYEAQVDYYTNYIQGRDDWEFAGVYTDEGITGTNTKKREGFKSMVADALAGKIDLIITKSVSRFARNTVDSLTTIRSLKEHNVECYFEKENIWTFDGKGELLLTIMSSLAQEESRSISENCTWGQRKRFADGKVTVPFKRFLGYDMGPDHNLVVNPEQAKLVKRIYGMFLQGQSPFQIARTLTEEGIPSPGGKDHWNPSNIKSILTNEKYKGDALLQKSFTVDFLTKKKKTNEGEIPQYYVKDNHEAIIDPETFEMVQTLMTTRTKGRNRKSSVSIFSSKVKCGDCGSWYGPKVWHSNDAYRKVIWQCNHKFDGRKCATPTLTEDEIKELFLRAANQVIDQKEQFIAIYDQVLSRSLDTTALESELSDLEAEINIAAELIEECIKENAHVALDQDEYQKRYDALVARFDKAKARHTEVTDLIAERMARKHQIEAYLKNLRSRESLTEFRETDWLAMVNYITVHSKKDIWVTFKDGNEIKA

SEQ ID NO: 13196 - protein, 590 aa, synthetic construct
MKTVEKIERKLPVLKARKRVAAYARVSMESERMQHSLSAQVSYYSALIQKNPEWEYAGVFADYGISGTGTKKRDEFNHMLAECEAENIDIILTKSIQRFARNTVDLLNTVRHLKDLGIEVRFEKENINSLSGDGELMLSILASFAQEESRSISENVKWGTIKRFKQGIPNGKFSIFGYEWQDDKLVIVPEEAEIIRWMYAEYMKGASRIEIGRALMDRGIYTRQGKPWVDSNVKVILTNITYTGNMLFQKEYCEDPITKHRRKNYGEMPQYFVEDTHEAIIPMDEWQAVQAEFKRRRDLGPFGNKSLKLSAFSTKITCGCCRKHYRHSGKRNTAGEVYYIWICQTKSQKGVSACPSKNIPEKMLQNTAAEVLGLDEFDEDVFSQQIEEVIVIGDDTLTFRFYDGHEVTTKWQSTAKTDWWTDERRKLWGERHKRKDTNPNRNTFYEFTGFIKCGCCGANYRCQSGKRKDGTPTRSWYCTGPRSECWNPAIRDETMKRLVADVLGLDEFDEAAMDARIENATILDHTVTFHFRDGHTESRDFLDKRHGTPWTEERREKARESMKAAWTDERRDAMSERIKKIRSEKKWPNP

SEQ ID NO: 13197 - protein, 508 aa, synthetic construct
MRAFIYCRFSSHKQQELSIEGQRDICQEYADKHNITVVGQYADRARSGKTENRADFRRLMRDAATGVVDCVLVWRYDRFFRNRAESALYRKQLEAAGVHLISVTEYIPEGSAGIITQGMIETVAEYFSAKLSEDVSRGMNKAAQHCQIVGRAPLGYRAGPNKRWQIDPVGAELVRRIFEWYASGKAMGQLAAQLNEEGHRTTNGTLYTRSSFNSILRNEKYIGVYSYGGEVRIEGGCPRIIEDELFFTVQRRLSANRHRPGAYKAEVPYLLSGKLFCGLCGAPMTGTAGTSHTGARHYYYICNNRRAKTCKKKNVRLDLIEEAVLQSALDILTDENIAYISAEVERRCAENSDSAALLASLNAQLEEVQRRLKNIGNAIAQGIITETTKELLEEAEADRTALRQQIDRAKVQAALVVKAEAVACWLDGFRRGDRTDPDFRRQVFGALVHSVFVYDDYLKIIFNVDSAGAAVVPYEAAQAATPSEAPPGSYLDTLGAPKKPYGNVRLFS

SEQ ID NO: 13198 - protein, 505 aa, synthetic construct
MSNAVIYARYSSGHQREESIEGQIRECTDFAKRNGLTIVEHYIDRAISAKTDDRPSFQKMVADSSKKTFDTIIVYTLDRFARNRYDSAVYKAKLKRNGVRVLSAKENITSDPSGIILESVLEGMAEYYSVELAQKVKRGMTENALACRWASGRIPFGYTIDADKHLHPDPALVPIVQEAFEMYAAGAKIVDIARKINSYHVVTGMGNKFGRSSFDRMIRSETYIGVFKWNDIRKENAVPPIITPELFYKCQARYNARNRKNVARPSAIYLLSGKLRCGCCGGSMCGMSGKSRNGTMHYYYSCYSTRRRTSHCDIGNIRRDEIEHIIAAHAASILKKPINLDIIANQALKTNNSVKNYRLESLLQQEKDLTQKLENCMKAIDQGLVSITLMDRIKQYEADLQSVKNDISLEKIKSNPIQVTKEHIIFFLEKFALLEGEEFKDRIISTMVKDIVIKKEKDGNYLVTVQYNYANSKELPNEESYSVPESIGSQDVELVETSGIEPLTS

SEQ ID NO: 13199 - protein, 515 aa, synthetic construct
MSTNAVIYARFSSDKQREESIDGQIRECKAFAQANQLNVIAIYIDRAMSARTDHRPDFLRMIKDSRSGSFDYVLVYQLDRFSRSRYDSAIYKHELKKNGVKVLSAKENITDSPTGIMLEAMLEGYAEYYSAELSQKVRRGMTENLLEHKWNGSPVPLGYALDANHRLVIDPDMAPHVKALFEMFLAGKSYAELARYLDEKHIRTVTGRKYTGPTVHNLMSRQLYTGTYTWGGQVIEDFCPAIISKSNFARAALRMANRKRTAKDGIPMSVRRSPEYALTGIIYCGECGRTMTGYSGRGQNGDRYYYYRCNSNNNRCRQTEKIKCKNHPIRRNRLEDLVLQTTVNILSDKEAVAAIAEQVSRIKLENPYASELSNIKSRLADLKKRHDNSVKAIEAGVMSQAIMDNVCKYEAEMDNLKARQEKIKLATPSLQIDPVAVEYFLKSLLLNKKQHDKYRLDLFEAFIHRVVVYQNKVEIQYNYLPGHKLENPITTPLPGCSNLNKVVGPLGFEPRTNRL

SEQ ID NO: 13200 - protein, 498 aa, synthetic construct
MEIQIREGNREQKRKLRVCAYCRVSTDADEQENSLENQIRHYETVIKANPAYEYAGVYSDFAISGFKEKRPGLQKMLADAQKGKIDLILTKSVSRFARNTSIVLEATRKLKELNVGVFFELQNINTLSGEGELMLTILAAFAQAESESGSVGAKMVYQRKYEAGIPVQYLERSFGYTKDERGVYIADEEEAAWVRKIYEMAADGYTPASIKRYLNENKVKTIGGAEWIDSTVFRLIENEIYKGDYIMHKHFVNEERKLVRNRGEVDAWYIEDDHEAIVSPELWQKAQDAIEAKRDYLAEGSVIEDFTEENYPYMNRIFCAKCGHPLYRRIYSNGNRLNWGCSGTKRHGKSFCEGINIPDGVLRKAWHFDGNMYIDEKPSVKGTKEFTYLKESSWKRRHKKKVPEAIPENTEEAYPYRKKIFCGLCGSRLVRHVNPKSHKVIWICNGAKRKGVAFCRGTRIPDSVIRGWGEIKKDIYIQRKDDKNGKKRYSYTSKKPTA

SEQ ID NO: 13201 - protein, 464 aa, synthetic construct
MARSVTVIPARNRQRETGRRAVQEKKIRVAAYCRVSTDQEDQLHSFEAQVDYYTKYINDHENYEMAGIYADEGISGTNTKKREQFKRMIADCESSKIDLVITKSISRFARNTQDCLAYSRKLKNLGIGIIFEKENINTLDSTGELLFTILSSLAQDESRNISENCKWGIRTKFKNGEMHLNTFKFLGYDKDENGKLVINKEQAKTVRRIYRDFLIGINPAQIAKELTEEKVPGCNGQTKWYPSTIVGILKQEKHMGDALLQKTYTADFLTKRQVKNNGEIAQVYVKDSHKGIIDKQTWNAVQEEFERRERFMEAHGTDRYSYGADCMPFCEKVFCEECGSLFTRHSWRSRGIVQWQCKNHRKDGKVACTNAYVDNADLEKGFVKAFNRLVADRDKHMERWQQMKSDGTPLEKIRAGQMMEAVGNEPLTRFVPEIAQLVLAEVTVLGAKKYEFFFQEGSKVKVSV

SEQ ID NO: 13202 - protein, 456 aa, synthetic construct
MRNKEIAPALVRVALYIRVSGEEQKIKGLSLEAQQERLEAYARERGWVIVGIYIDAAKTARKNIHKRTEFQRMMDSVKRDEVDILLFARLDRWFRSVADYYKVMEILQAHNCDWKTTDEEYDTTTANGRLYINVKLSIAQNEADIDGERIDVVFDSKIAHGTVVSGSAPFGFRVNEEKRLEVVPEDAAIVQDAFNYFENTVSQRATVRYIRETYGVNWCDATFRRMLKEKLYTGVYDRGGRYNDQFCPAIIDRQQFDRVQALLTRNVRSVPSGKVYIFTSILTCAECGHKLVGYKSSDYYYYRCNQHFQRGRCSHNHSAREDVVEAWLFDHLGEELERCQLEWDVEAAKKKASVARTDKAALKRKLTKLKELYVNDLIDIEDYKKDYQIYVSALNQIPEPAQEAPPDFAAVRRLLDNSFRTIYDTLTREEKRTLWRSVIKEIRIDNDQNITGVVFG

SEQ ID NO: 13203 - protein, 484 aa, synthetic construct
MNAVIYARYSCDRQTEQSIEGQLRECKAFAASEGINIIGEYIDRAISGTTANRPEFQRMIADSRYKTFQAVIVYKLDRFARNRYDSAMYKSKLKANGVKVLSAKEHITDSPEGIILEGLLEAMNEYYSAELSQKIKRGMRENAIKGKTTGGNVALGYRIGADKQMEIDPAGASLVRRIFTGYDSGMTFTEICDDLNHAGYTTSRGKQFRIDTISRILANQRYTGTFQCAGEDAHCPPIIEPELFRSVQERLTESRHKHRHTQSPHEYVLTGKAICGTCGRRLTGRAGTSKTDKRYYYYCCPNKCCGWLPAAELEHAVLDAIAQYTTPEACEQIANATYALYQQSTHENADLTAAQRRLQETEKKLENAVNAVLNGITSAALQATMQQLEQQKAALETEVRLLQTDAPELKLEHFQYFAHRLLEVQAEGTEKILQLLVNQVIVYKEQITVLVNLTDKTKTPPLEQVTAALRESSCSIACGGGDEN

SEQ ID NO: 13204 - protein, 536 aa, synthetic construct
MEERAKAVIYARFSSDKQREESIDGQIRECTAYAESQNLEVIGAYIDRALSARSDNRPDFLRMIADSARKTFQYVIVYQLDRFSRSRYDSAIYKNKLKKNGVRVLSAKEHIGDDPSSIILESMLEGYAEYYSAELSQKVKRGMTENILEGKWVGCRVPLGYKLTADKKLQIVPRDADAVRLIYKMYNSNERIIDIVRYLNAHRYKTAAGRTFNRSSLTKILGNKIYIGTYTWDGHVIEHFAPPILADGVWEAAQKRTKQHKQHPRPKRRSADYALTGLIYCGECGNPMTGQSGHSKNGSAYHYYRCSTKNNYHSRGKKQHINCKSRNISREKVEDLVLDATVRILSNPKAIKLIAKQAADVQRIDPTAREQVRIAQERKTIQAKLENSIAAVEKGLCSKTIAENIERYESQISELDQKIDELKFAYAPIRIDAIAVEFFLKSLLDKKKDHDKYRLDMFRTFIRQVIIYSDKVEIRYNYTNCPPILKNPVSIALTGSPECSDKAFMVHQKNSEKDPARRLLPSCGVLFHFIVCIIWL

SEQ ID NO: 13205 - protein, 440 aa, synthetic construct
MIADALAGKVDLIITKSVSRFARNTVDSLSTIRKLKEHNIECYFEKENIWTFDSKGELLLTIMSSLAQEESRSISENATWGHRKRFADGKVSFAYSRFLGYEKGPDGTIVVVPEQAKTVRLIYKLFLDGMTIHTIAGELTKRGIKTPGGKDKWNQSTVRSILTNEKYKGDALLQKSYTVDFLTKKTKTNEGEVPQYYVENNHEAIIDSQIFELVQAEIAKRNKGKEHYSGVSIFSTKVQCAECGGWYGSKVWHSNDKYRRIIYQCNNKFRNKTGCSTPHLTEYEIKEYFIKALNRLITEKDEIIANTEMIQKMLCDNSELEAKRDVLQEEIAVTVELTQNAVAENARVAQDQDNYNKRYNALVERYDRLKAQYDEVSTAISDNEARYEQMSRFITVLKDQEGVITEFDDALWSSLVEKIVVKSKEDVTVVFKDGTEMKAE

SEQ ID NO: 13206 - protein, 506 aa, synthetic construct
MPKKEANQPIKAVLYARYSSDRQREESIEGQIRVCEDYARRNNMVIVHTYADRAMTGRSDQRPEFQMMIQAAATQAFDVVLVYKLNRFARNRYDSAKYKHKLKKYGVHVVSAMENIADDPSGILLESVIEGMAEYYSAELAENVMRGMTENALECKWSGGLVPLGYKLDADHHLVIDEAGAQIVRRIYQMVLDGRTPTGIINELNAANCRTSTGRPFGKSSLTTILRNEKYIGTYTWNHIRKENAIPAIIDRKTFEAVQKTLQYRKNNHVKVCSENFLLTGKLFCGQCGSNMVGTSGTSKYKNTYYYYACTKHLKKDGCTARNIRADKLEELVCSVTTRILSSKEAVHAIARQAVEAQKKQKESLTVQSLKNQAAEINKKLKNCVQAVESGLISVTITNHIKEYEKRLTELNEAISREELLSGKSKLTEKHIEFFFYSIAQKIKTADKYKSILLSSLVRCVIVYDDYIEIQYNYKNELPLLQNPVRVKSSNLNGMVTQERFELPTP

SEQ ID NO: 13207 - protein, 520 aa, synthetic construct
MPRKKAPAAEAPRLVAYYRYSGGSRQTEQSIEGQRRDCEAYARAHGMTILREYVDRHISGKTDDRPAFQQLVADSAAHTFDAVICWKTDRLARNRYDSAVYKKKLRDNGVEILYAAESNISGAEGIIIEGLMEALAEYYSAELAEKARRGMRESALKGKALGSSRPLGLTVDADKHYIIEPTGAEAVRYIFEQYAAGLSSSSIVERLNVMGLRTSHGGPFNKSSINRIIQNEMYRGIYVSKKFDVRIEGAIPAIIDNDLWKRAQNMFERNRQSRTPHASRADYILSGKLYCGECGCLMKGVCGRSSGNGQMYHYYACPGRSIGRACTRKNIPQDELEAMVVNSVADLLLEPDLLEQIADAIVELQQAEAARPDPEKQALEKSLSDVRNKIQNILSAIENGTSSAALSARLADLEQQESTLSYQLSSLTAKKPLTFTRDQILFLLQQFRVSPSERTKAYCRRLVDTFVDHIELTNTELILYFNISDETIDKNKKAPRSNHSEESSTEKRLVRVARIELTAS

SEQ ID NO: 13208 - protein, 529 aa, synthetic construct
MKFTSTWKISDPLAQYIIYLRKSRKDMEAEALGQTDTLKRHRAALLSLSESRGLNVVEICEEVVTGDSIAVRPEVQKVLQLVETGSYAGVLVMEVERLARGDTIDQGIIAQTFKYSNTKIVTPNKVYDPNNEMDEEYFEFGLFMSRREYNTIKRRLSRGKEASLREGKWISGKTPFGWSREKLPNDKGYKLVPHPEQAPILQQIYSWYTGDGCARIGSSAIATRLNNLGVKTNSGNAWTASAVLDTLRNPANAGWIKSGGRPETKRIVDGSVVVSRPRTRQEDLNLYKGLHDGLISQEQYDKAVALSYSSGSPRGKGAWQTMTSLAGLVRCDQCGRVMVRRPSSGGRRDAFMCPSPDCPTVSAWYEDVEDAVLDALRGWLHELEVGEAERSDEHSLLDALAASISADQKQLAKLEVQEARAYEFVETGVYTPEIFLQRSQALAADKQVIISRIEENQRAQDEITRAKQARARLAPAVRHVLETYPLAATPQDKNDLLKTVLQKVLYHKQSKSYSKAGSDMRVTLYPLTD

SEQ ID NO: 13209 - protein, 564 aa, synthetic construct
MALLPRKPAKHPAKPKRGKKLEVEEPGVLYGRYSSHNQKDISVEQQFEKGYELAAEYGIRIIDTYADRAVSGRTDKRRDFQRMMTDAAKGKFRYVIAWKSNRMGRNMLEALINEARLQDLGVRVLYVEEDFDDTAAGRFAARSMMNVNQFYSENMAEDIKRGLYDNAANCMVANGHLPYGYKADETLHYAIDEPKAAVIREIFTRVSCGEAFVDIMASLNARGIKTSYGRPWGRSSFQKILSNERYRGIYIYGDVRKEGGIPRIVSDELYFKVQEVITTKKNPQGRHRVNGDYLLTGKLFCGHCKSPMTGISGTSRSGNLHYYYVCQKRRTEKTCEKKNLRRDDIELQVAKAIKRRTLDDDTINWIADSVVEYSQHQESASGIGLLEDQLKDTQRSIKNLMAAIEQGIITPTTKARLMELEKEQSDIDRKITMAKADVIPVNRDQLVGWLKKLQAGDVHDKKYQAELFDTFLIAVYVYDNPDGQDYMKVVFNYAGSKNTVEIPLDPSVIDNVENIETGAVRLSSAQVHQKTFAQKCGGFLLITYYFFTVTLSELRFFGKVKSKK

SEQ ID NO: 13210 - protein, 572 aa, synthetic construct
MASRIAEKLAAKKAAIYIRVSTHWQVDKDSLKVQRRELIAYVTLVLGITDYVVFEDPGYSAKNTDRPEYQAMMDRIRTGEFTHLVVWKIDRISRNLIDFAAMHDELQSLGVTFVSKNEQFDTSSAIGEAMMRIILIFAELERKTTAERVTAVMLSRASDGQWNGGRVPFGYSWSKETKTFSIVPEEAKAIRRMAELYEQYQSLLYVAKYLNDAGIVTKTGGQWTPTTVRTILTNPWYIGQYVYNVHSDGKGIEKRDSDEWITVENHHEPILNEDVFCRMKFLLTRNKRGGVPSHKTYVRKNIHIFAGLLCCGQCGSNMTANLDRRRANGFRPSQYACGSRRRKGTSCTNKYISDTTLGPFVLNYVANIIRASKNSSEATTPEVLERKLLRGEAFEDVASVSTDALGQLLDAFRSAGDAVEYRPQIAFSGDDNSIHEIDTLRARRRKLDNALARLNALYLYDDEAMPEKDFVMQRGQITKQLEEVNARIEELQNQESSEELGDGFIGKASYYIMANKLIEDRYIDYEKYIRAIDPSIPHSFLQQIIDHIVVNDGRVTSITFKNGATHTFTYKT

SEQ ID NO: 13211 - protein, 527 aa, synthetic construct
MYELTQSMESLSVDEIIVYLRKSRSDSPEMSVEDVLKKHEEMIQDYANTHFGSPIPEKNIYREVVSGETIDSRPQIKIVLQKIESPQIKAVLIVEPQRLSRGDLEDCGRLINILRYTNTMVLTLTHSFNLQEEYERKFFEMEITRGNDYLEYTKRILRRGRESSAAKGHYIGSVDPYGYRKIVIKKDGVNCHTLEIVPEEANVVKLIHELYAYTPDGIGFTNIAHKLDSMNLKPKRAAHWTPAIISSILCNPLYLGLIRWDTRKVVKYINDGRLEKSRPRSSDAKYYKGLHEPIISQELYDACMARRGTNPSLRRNKELCNPFAGLLYCGTCDHAMSLKIYKNHNSVSQIMLCNHQSYCHTKSVLYSAFLERFISSMENTIHDFELALLADNGNAQAVNQSIVANLETRLKKLQEKDMRQKDAYEDGIYSKEEFLERNIKTQQEIASTITALTAAKETKENYVDYGEKIRRFRDCINALNDPELSATEKNQFLKSCVSKIIYYNNMESKAGVGRYVENVFSLEIQYI

SEQ ID NO: 13212 - protein, 459 aa, synthetic construct
MSTTHFYSHYPTIEYKTCALYVRCSKEEQAKFGDTIEAQIEDLKAFAKLHHLKIYAIYVDEGHTARKKYNKRKEFMRMLQDVELHKFEYIIFTKLDRWFRNIADFYKIQEILDNNGVTWLTALERYEMETTNGKLNVNIRLSVAQDEADRDSDRIKDVFRLKVKKGEAITGSLPIGLMVGENGKVDIDPDTVQIAYDMFDYFEAHNSKRGTLLYLIDKYNRYFCYETIARALRNPLYKGEYRGNSDYCPKIIDPARFDRIQVLGKRNVKVRKNNRYYVFSGLAQCKECGHALVANTTVQKRYNREYTQYRCNYYSNSHLCTHSHGTNEKVIEKYLLDNIKPELEKYVTAYEVKQNAPTKKADPSKIKTKMQRLKELYVNELIDLDDYRIEYEQYKQELDKLTSTAAPEVKDLSAIRSFLALDLQSIYDSLTPQEKRTLWSSIIDKIIISDGGDIEIVFL

SEQ ID NO: 13213 - protein, 498 aa, synthetic construct
MKTAVIYARYSSDKQTEQSIEGQLYDCYNYAKANNITVIGEYIDRAMTGRNDDRPDFQRMISDSAKHTFELVLVWKLDRFARSTEDAAYNRGKLKRNGVRLLSIKEDFGDSSAGDLMMHVMESFNEFYSADLREKTVRGMHQSALKCQSTGGQIPIGYKIEGKKYVIDESARFIPETVFRMYAEGKRLAEIARYLNEKGYRTRMGRKFTTGSFYTMLSNEKYIGVYKYGDVRIEGGYEAMIDPVLFDAVQKKLVENKKRAPKISERENFYLTGKLFCGHCGEPMNGMSGNSAKGKHLYYRCNGVRKHTGCDKRTERKEELENEIIGAIQRAFANADPEELTRKVIENYEKNFRPADQVKVMKAELQKITNKVDNVVNAIAEMGGNETLYTQLRQLTEQKEQKETEIRIAEHKADDMPTVELVKKILDLIQNADTMTDEGRQLLIDGAVSRIYVYDDSLDIYFKGGKNTEIPLNPANKDDVSDNSFACCKEWGAKLSLK

SEQ ID NO: 13214 - protein, 473 aa, synthetic construct
MKVALYSRVSTQEQAINGYSIDEQQERMNKYCEAMGWQAYKEYTDAGYSGATTARPALQKMIKDVEAGKVDKVLVYKLDRLSRSQLDTLYLIEKIFLANNVDFISMSENFDTATPFGRAMIGILAVFAQLEREQIKERMMMGKEARAKKGLYHGSNSYPIGYDYVDGQLIPLDFEAMQIRIIFEKYANGDSPMTIAEYLNGNGYTTRYGRWNDTTIRKILKRKTYIGYVKYHDEWFEGQHEAIISRELFDEVQEIYNKKSRDYKYNKRRDGSVNSYLGGLLHCKYCGRKYLKVLGTSTKNGVKYKIAYYKCYSRAHRKRLLKEDPHCKNKTWRMDELDNLILGEIRKLVLDPESFDDEEEQSSNQNVEILKNEIVKIEKQIDKLMDLYSIGGMSIEAVQDKIHALDDQKKKLELQLESFEKETKMSKGDAKKIITSFGDLIDEGDFEDIRWLITTLIEKIVIDGEDLEIYWKF

SEQ ID NO: 13215 - protein, 588 aa, synthetic construct
MKRAALLLRCSTDAQDYERQKLDLLDTIKGMGYTTSDDLVFGQYITGKDDVRKKDRESVAECKQAVREGKVDAIFINEVSRLSRDSIAGRLFIREFNDEYNIPVYFRDLGMWTINPTTRIVDRSFETMLGFYFDMAQNELKSMKTRFASGKRKNAREGKTIGGAVPFGFYKDEDGKLQVDEEQAQVVRLVYNKYLEDGGSIPSVCRYLLSCGYDKKFNKKFGTGSVRNLLRERRYIGEQRYNLVNPDEPDEAKKQEVYIYKVDAIIDTTIYNKVQIKLDKNRTTETKKVNKDKKIHLLAKLITCPICGDSYTSKTASANKSGERYRIWNYCCVSKYNFSECTSDITLNADNIESIIWQLTKREILALQELSLEERQSKIDEAEQKLASYKDELDVIAKSIDKLNVKKKKLVALFLDIEDDDTAIFNEQREAINKEIDSYNNRIQFLNTEITICEGNIARFKEADFTDEVLDKIEQDLLKKKELIKEYIKVIRPYRLTKARLILEVESKQTNYCILFEPRNSKRRCWYIQSSLAQWQNGLLKTSTAPLGNFFYIPMASLLLDEPDDLDAIASFEDMKEICSINNYVIEY

SEQ ID NO: 13216 - protein, 520 aa, synthetic construct
MQVIIKEAKKVAEKKLRVCAYCRVSTDADEQENSLENQIGHYEDAITSNPEYEFAGVYHDFAISGFKEQRPGFIRMMEDARAGKMDLILTKSVSRFARNTAVLLKATRELKGMGIGVFFELQNINTLSGEGELMLSILAAFAQAESESGSVGAKMVYHRKYEAGIPVQYLERSFGYRRDENGRFVPEPSEAKWVKKIFRMAADGYTPAAIKRYMNENNVKTVDGALWCDSTVFRILENEIYKGDYIMHKHYVNEDRKLVVNRGQEDAWYIENDHEPIVSRKLWQEASDRLNEKREYLAEGSFIADFTQENYPYVGHLFCGKCGYPLYHRIYSSGNRLSWDCSGVKRYGSGFCGGVNVPDGTVRERGIMENTYIMEKAGEKGRREYTFLKEASWKRRHRKKVFRHDVPELTLENYPYYKSIYCGKCGGRLVRYIDKGSKVLWICSKQKRKGSRYCEGMRVPDEEIRKMELLDEKNYITERKMKNGKKCYGHSCEEPKRDTQGENSNQENQGCSVLPCVNGQ

SEQ ID NO: 13217 - protein, 436 aa, synthetic construct
MSTDNEDQIHSFKAQVSYYTDYIGKHENYELAGIYADEGISGTNTKKREQFRQMVKDCEDGKIDQVITKSISRFARNTQDCLEYSRKLKNLGIGIIFEKENINTLDSTGELLFTILSSLAQDESRNISENCKWGIRTNFKNGKVNICPSSFLGYDKDTNGKIIINEREAEIVRRIYREFLWGMNPQQIAKGLEDDGVEGCKGKKKWYASTIVGILKNEKHMGDALLQKYYTADFLTKKLVKNKGEITQYYVKDSHEGIIDKETWEAVQEELDRREKFKEAHGLSHYSYGTDYNPFTNRIFCGKCGYSYNHHCWKKRGIFQWQCKERTVQGSRKCMNDTVDQRDLEKATVRAVNEIIREKTKHLDRWNRMAENGTPLEKLRARQMIEITAQPELNIFVPELAQLLLYEVTVLGAKTFEFVFMDGSRKRIQTGTASAA

SEQ ID NO: 13218 - protein, 514 aa, synthetic construct
MAKRKFNKGGEVRLVAYYRYSGGSGQTEQSIEGQRRDCEAYARLHNMTIQKEYVDRHISGKTDDRAAFQQMIADSDKGAFDMVICWKTDRFARNRYDSAVYKKRLRDNGVEIVYAAESNISGAEGIIIEGVMEALAEYYSAELAEKMRRGMRESALKGQAISRCRALGLKTDEHKRFVIDEKTAPTVRFIFEHYAAGESAMSIVEQLNAKGLRTSQGNPFNKSSIPRIIQNEAYRGVYISKSYDVRIEGAIPAIIDDELWERSQTMLKLNRQLKAKNEPKADYILSGKLYCSCGSLMRGMSGHSATGEVYRYYTCPNKDCHLRNIPKDDLEGKVMQSIVDHLLQPESMEALAEAMVEVQKADVEKPNAERVAIEQSLSDVRRRSKNILDAIENGTANAQLCARLDDLTEQEQTLSFQLSSLEKEKPVVFTKEQYLFLLEQFLMEPSERTPEYGRRLVNTFVTSIVVSDRELVINFNVSEETVNKNKKTSQTNLQKESSSGMRLVRVARIELTAS

SEQ ID NO: 13219 - protein, 558 aa, synthetic construct
MLQTDKITALYCRLSQEDMQAGESESIQNQKLILQKYADEHHFFNTRFFVDDGFSGVSFEREGLQAMLHEVEAGNVATVITKDLSRLGRNYLKTGELIEIVFPEYEVRYIAINDGVDTAREDNEFTPLRNWFNEFYARDTSKKIRAVKQAKAQKGERVNGEVPYGYIADPNDRNHLLPDPETAHIVKQIFAMYVRGDRICEIQNWLREHEVLTVSELRYRRSGSCRHPRPHPTCIYNWPDKTLYDILGRKEYLGHTITGKSYKVSYKSKKTKKNPEEKQYFFPNTHEPLIDEETFDLAQKRIATKHRPTKVDEIDIFSGLLFCGDCGYKMYLQQGAGTLERKHAYTCGKYRNRIRTGELCTTHYIRKSVLKELVLADLQRVLSYVKEHEQEFIETANECSAKAVQKTLTQQRKELDKAQSRISELNILFRKLYEDNALGKLSDEQFAFLTSGYDEEKKTLTRRIAELSQEIDNATERSADVKRFVALVRRYTAITELTYENVHEFIDRILIHELDKETNTRKIEIFYSFVGRVDTGDKPTESISYFRQIGADVKSYAI

SEQ ID NO: 13220 - protein, 578 aa, synthetic construct
MEVEVIKANNPFDETAKVRKIDRLRVAAYCRVSTDDEDQIKSYNSMVKYYTELIKNNNQWIFAGVYADKAITGTKVDKREDFQRLIQDCMDGKIDMVIAKSLPRFARNTLDTLKYVRMLKEKGIAVYFEVEKINTMKDGEFLMTILSSVAQQEVENTSAYVKKGLKMKMKRGELVGFQGCLGYDYDVATKSLSINEEGAKTVRYIFDRYVSGAGSTMIARELNEQGITTIKGNPWTTSSVMGIINNEKYKGDILLGKTFTVDPISKRRLENLGEEDRFYIRDHHQPIVSEETFARAQEIRERRNGGRKSPTPGKREKYSRQYAFSCMLECGFCGSSLSRRRWHSNSKYKKTIWQCVTSTKSGKRYCPDSKGIPEQVIEEAFVESYKMLCSDNKDILEEFISRVEKTLSEDTARDKLMKYQKSADNLQSKRKTLLEKYLEGVVSQDIYEETDVGYERKLSNIRANIEMLEQQMEDEVSLKRRVEDFKKALSQNEVLQEFDRGIFESIIEKVIVGGYDEDGNKDPYKITFIYKTGFRNEVRNAKERFDKAKSVGDKAKELCSHIADEVKDVCSYVSDNTL

SEQ ID NO: 13221 - protein, 463 aa, synthetic construct
MARSVTVIPARNRQASGHRAAQQKKIRVAAYCRVSTDQEDQLHSFEAQVDYYTKYINDHENYEMAGIYADEGISGTNTKKREQFKRMIADCEKGKIDLVITKSISRFARNTQDCLMYSRKLKNLGIGIIFEKENINTLDSTGELLFTILSSLAQDESRNISENCKWGIRTKFKNGEMHLNTFKFLGYDKDENGKLIINREQAKTVRRIYRDFLWGLNPAQIAKELEEEQVSGCLGQTKWYASTVVGILKQEKHMGDALLQKTYTADFLTKRQVKNNGEVAQVYVKDSHKGIIDKETWNAVQEEFDRREKFMQKHGTDRYSYGSECNPFCEKIFCGECGSLFTRHSWKSRGIIQWQCKNHRKDGKVACTNAYVDNANLEKGFVKAFNRLVNEREKNMERWNAMKAEGTPLEKIRAVQMMEATESGQLQKYVPEAAQLVLEEITIFGVKKYEFAFLEGSRVKVSV

SEQ ID NO: 13222 - protein, 501 aa, synthetic construct
MEIQIREGSREQKRKLKVCAYCRVSTDADEQENSLENQVRHYETVIKANPDYEYAGVYSDFAISGFKEKRPGLQKMLADAEKGKIDLILTKSVSRFARNTSIVLEATRKLKELNVGVFFELQNINTLSGEGELMLTILAAFAQAESESGSSGAKMVYQRKYEAGIPVQYLERSFGYTKDERGIFVADEDEAVWVRKIYEMAADGYTPAAIKRYLNENGVKTVGGAEWIDSTVFRLIENEIYKGDYIMHKHFVNEERKLVRNRGEVDAWYIEDDHEAIVSPELWQRAQDALGAKRDYLAEGSVIEEFTEENYPYMNKIYCSKCGYPLYKRIYSKGNRLNWGCSGMKRYGKSFCDGINIPDGVLRSAWHFEENTYIDEKASDKGVKEFSYLKERSWKRRHKKKQPPSIPENTEAEYPYREKIYCALCGSRLVRHVDTKSHKVTWVCNGRKRKGKDFCDGTRISDTILKGWGEIKKDIYIQRKDDKNGKKRYSYTSKKPSGIGA

SEQ ID NO: 13223 - protein, 505 aa, synthetic construct
MTKNAVIYARFSSDKQREESIDGQIRECRTFAEANEITIINTYIDRAMSARTDQRPSFLQMVKDSAKHLFDYVIVYQLDRFSRSRYDSAIYKHRLKKNGVKVLSAKENIKDDPSGILLESVIEGMAEYYSAELSQKVKRGMTENLLERKWIGGVLPFGYKLNENSQLEIDASTGPLVPKIFDACLHGKKITEIISYMNEHGYHTARGNKFSRNSLSRIINNLIYTGTFTWSNTEYPNYAPALITKEQYTAMQNLLESRKKSHNHARVVSPHYALTGKIYCGECGLPMTGYCGKSHTGATYYYYRCSSKNNKKEKSNRENISCNMKNINRDKLEKLVLDTTVSILKNPDAVKCIAEQCMAVQKAELENKPTEQLRLESQIKDIEKRLKNCVNAVENGLISQTITNNIATYEKQLAELHSQIDTIKLENRIIPITEEAVIYYLNELTKRATKKDGCSLETFDDFIRRVVVKDGQIDIYYNYTPVPNILENPAVKMLRGSSENHLVTR

SEQ ID NO: 13224 - protein, 509 aa, synthetic construct
MPKVTVIPPSINRTTRQSTTTPTRRKVAAYARVSNDFEEQLTSYEAQISYYTNYIQRNPDWEFVRIYTDEGISATSTKHREGFNSMIADALDGKIDLIITKSVSRFARNTVDSLTTIRKLKEHHVECFFEKENIWTFDSKGELLITIMSSLAQEESRSISENVTWGQRKRFADGKVSLPYAHFLGYRKGENGLPEIVPEEAEIVRYIYQRFIDGLTPYKIANELTAQGIPTPCGKEKWSASTVKSILTNEKYKGDALLQKKFTVDFLTKKQQINEGQVPQYYVENSHPAIITPEEFDFVQSEFQKRCVKPYSSTSIYAAKIICGDCGSYFGAKVWHSNSKYRRVIYQCNSKFKGSHFCTTPHLYEPEIQEKFLQAFAQYFSQKDVVIKNCQFALTRLKKQESKKAELQDELVAVNEKLKDYIQHGGENFDALNAKYEELSAKLDAEETAESDRKRRIAKMQKILLMLKKTDSVLETFDESVWNAVLENLTVFHDGSLVFLFRDGTEIKV

SEQ ID NO: 13225 - protein, 430 aa, synthetic construct
MERKVHRVRQRPPKPKLLKVAAYARVSSGKDAMLHSLAAQVDYFQNLIRQHPGWEFCGVFADEAKTGTKDERPEYQKMLEKCRNREVDLVITKSISRFARNTVTLLETVRELKSLGIDVWFEKENLHSTSGDGELMLSILASFAQEESKSVSDNMKWRIRNDFQQGKIGSITIFGYRRNADGILEIEPSEAKIVQMIFANYCSGMGQCAIAKKINAMGIPTRQGNRWTGQRVKEILVNEKYVGNMLLQKYYRQDPIGKRKMKNQGELPKYFVEQSHEAIISAELFEKVQELVKERTEQFSHPGATNRYPLSGTVQCAACGKSYQRKIYKQGAVWMCATYLRQGKLHCPMAKQISERILYEKICYVLQIKEFDVEIVKSKIENILVSPNWLTFLFKDNTEKAISWKNYSRSESWTPEMRQAAAERSRKCQK

SEQ ID NO: 13226 - protein, 668 aa, synthetic construct
MAYAKAKKHLKIWTKKKAALYVRVSTRYQVDKDSLPFQRKKLKEYCKFLGLEDHVIFEDDGYSAKNTERPHFQEMMSRVRSGEFSHLIVWKVDRVSRNLLDFAAMYQELKDHKVTFISMNEQFDTSTAIGEAMLKIILIFAELERNMTSERVTGIMLDRAEQGLWNGARMPVGYRWNGETKFPEPDPEEVKIVQLIFDKYEEWKSSIKIARYLNNNNFKSKRGGQWTSKLIHDIIRNPFYIGTYRYNLRESGRGPLKPESEWIVRENNHPAIIDKAQFDRCNKIMDQNGSRRDTSDLRARKYVHTFSGHLVCGKCGANMIASKDRARANGWRPSMYRCAQRSRMLDCDNSRTINESYIGPFIFNYIANLARVQKNFKNIATPEKLERELLKGETFGGVAGILPEGLNLTFQALSFRQVGNGTYIPDIDFLGDSDGASDRDQIELLKSEIEKSKNAVTRLTDVYLFDPDSMTKEEFATKKKELAKKIEGMERQLADLLDDSGNDDLADMSFIKKASAFLVAQRIVSKSFVDYVGMAQELDNEILKDFIDQIVDQIVVLDGRVQSITFINGLKHEFRYTAPAELPVCKKCGGRIGSTCGCRTRTFDFSGKRYQRIKVGDPRDMLHGKKNPVCPECFAQEGRWHHWNCKVETCPICGGRLAECEHGPDNKN

SEQ ID NO: 13227 - protein, 582 aa, synthetic construct
MNQDKLTDKLSSQKCALYIRVSTHWQVDKASLPVQREDLINYAKYALGIDKYEVFEDAGYSAKNTDRPSFQQMMARLRTGEFSHLLVWKIDRISRNLLDFAGMYSEIKKLGITFVSKNEQFDTSNAMGEAMLKIILVFAELERNMTSERVTAIMLSRANNGQWNGGKVPFGYDYDKENRTFTINEAEASVVNLIYDAYEANNSLLTVSRTLNEKGLLSRKGSPWTPTTISIILKNPFYIGVYRYNYHDETKSGGNARSTQLKNKSEWIYVKDHHPAIIDAERQARIISLLERNRRSNKDSAKSYVRKNTHIFAGLLYCGCCGSQMQSTIDRERSDGYRPSIYACTRKRRFNDCDNKYISDVTIAPFVLNYIANILKAQNNFGKSTSIETFERKLLRGKMFEDVEHIERIGLTEMYDILKRGNLSDAVYSTRLQGTIDEQAIIDERNLLSVEKRKKERALARLKSLYLYNDDAISERDYIIEKKTLTDSIERIDKRLEEIERNSSQHFTMTDDEFMTKASVFIMTHHLQGKRYIEFEKLIRKIDSRVIKDFVSSVIQKVVIKNGRVMSIRFRNGIEHNFLYKT

SEQ ID NO: 13228 - protein, 530 aa, synthetic construct
MNAVIYARFSSHNQQEQSIEGQIRYCTEYAKKNDLTIINSYIDRAISGTSDNRPEFLQMIKDSNNHQFNVVLVWKLDRFARNRYDSAIYKNALKKNSVKVVSVTEYLGEGSESVLLEAMLEAMAETYSRQLSENVRRGMRESALKCQVVGGSVPLGFDTVDKKYVINEKEAEIVRFIFDEYVSGTSKKEIVNKLNAKGWRTKNGSTFVFNSLNKILSNRKYIGEYKYEDIVIEHGIPAIIDEQTFELAQKQLAKNKRTAGRKKAKVEYLLSGKIFCGYCGENMLGESATNRHGKKYHYYICNSKKKYKNCKKKREGKETLEKYLVQQTILFFSDKNNIDKVAKKVVKLYNSELHNGHIDSMIANKKELEKQLDNLTNSLIKTSNDRVLNTINEKINSIDTQLNDLEIEIAREKSLASIEMTVSDVVCFINDIINGDINDVIFKKQIIDTLINAIYIYDDKIIVYFNGSEDAKTITYDDLCSDLEKIDNGGEFVFQPLTSTKQVLDEHLLFQRRICRQMCSLIQKQNAVSV

SEQ ID NO: 13229 - protein, 514 aa, synthetic construct
MSMNAVIYARYSSHNQTEQSIEGQLRDCYDYAKRNDLTVIGEYIDRAISGKTDDRPDFQRMIEDAPKRQFERVLVWKFDRFARNMFDSVTYKHELKKHGVKVISAMENIGEGDESVLLEAMLEASAEYYSLDLKKKIARGMRESALKGKFVGGAVPWWCSVNAEHKLIVIDERAVIVKEAFARYDSGEGSKSIVDDFAKRGLRSNRGMPVTLSWLLSILKNRKTIGEYTYNGIEIPGGLPAVVDKPLFDRVQERIARKRRTGGGEATSKTEYLLQGKLFCGLCGSPITAECGQNRKGVVYNYYACSLKKKKHQCKKANERKDFLEWYVVEQTLDYVLTPDRTDYIAEAIVAEYERQFDKSGIKALEQKIALTEGEIQKTMDLCIQATTDAMRKRFMKRCEELDAKKADMEIDLSKLRVAASITYTKEEVRAWLRQFCAGDSFNPAFRRRIIDVFINTVYLYDDKLIIYYNLRDSRQVSYIEAIGASSEIENLRPVPDNKKTAVECSTADKNGGA

SEQ ID NO: 13230 - protein, 457 aa, synthetic construct
MECVAYMRVSTEKQAEDGNGLESQKRDIDNYCNKNGYIISDYYIDDGYTGANMDRPELQRLISDCVAKRIKCVVAFKLDRLSRSMVDGIYIIERVFQANNILFKCVHDSISYDSPMEQAYTQMMAVFAQLDKNTMMLRMRGGMLERVKQGYWMGGGNTPYCYKYDKEKGILVPIPERKEQANQALDLFIDGYSDVAIKKMLNFTHEHTVKMVLTSPVNIGMIPYKGNLYKGLHEPIFDKDRFQLAQEARKNRRKKKTVSLNKEPNLLTGLCYCGVCGCKMRYQKWGSESDAPKKIYCCSRNKDLFYLPNYNKDCDNSIEWATDIEKQVEAEIIKISLNLSSQKPIAKQSKIDIIQSQIKKEKYRRNRLFNLYADGNDDVLDMIKQSDNTISSLKEQLETELSSKEANKKKSIAYENIKKIADVWDSIDKRNKNMILKTIIDKIIIVNGDIEIQLKNF

SEQ ID NO: 13231 - protein, 544 aa, synthetic construct
MRVSVNLNAQKPDTTTNAVIYARYSSHGQTEQSIEGQLAKGHEYAAAQGYTVVHEYIDRAMTGRNDNREAFQKMLSDTGKHQFQVVIVWKVDRFGRNREEIAFNKHTCKKNGVRVEYVAESLPNSPEAVILESVLEGMAEYYSIQLSQNIRRGQLESAKKCQCVGGSVPLGYTLDSDKHFVIDPQTAPVVKKIFDLYAEGATISEITGQLNEQGIRTARKQLFTKNSLTKLLKNEKYIGIYAYKDVVRVEGGVPAIVDKSTFDRVQELLKINRRAPSHTWTKVEYLLTDKLFCGHCGSPMVGESGFSHTGAKYSYYGCIKRRREKACDKKPVRQDWIEALVLDETVKLLHDDELMEYIIDRTWEYYQITDKVQEEKAVLEAQLAEVDKAINNLVRAIEAGIFNAATKSRMDELDAQKAALTASLADLELTSGIRITRDHIEYFLLRLRDLDVKDRECQKRLVQTFVNAVFVYDDGRVKITYNYSGQSSTITLNQIASAEKGKGFVCCLPCSTFHRDSQEGSRHFFCFLGKTGRKYTTNFSCIVL

SEQ ID NO: 13232 - protein, 474 aa, synthetic construct
MKVGIYSRVSTQEQAREGYSIGEQVERLKNYCAAKGWILYKTYTDAGFSGANTDRPGMQQLISDVADGKIDMVLVYKLDRLSRSQKDTLFLIEDVFIKNNVNFASITENFDTSTPFGRAMIGILSVFAQLEREQFRERSIMGKDARAKEGLHHGDGAPTGYDYIDGQLIINKEEAELIKEAYRLFLEDDMTMMGIAAKLSVFSEKFKYDHRIRKMLTNPLYAGWTHCRDELYKGQHEAIISQEVFDNVQTKLKIRAENNPHYRNAFNRTSLLAGILWCKKCGARYFKRVRRYEKGSKVYYYNKYQCYSRSSYKNMVRDKSCKNKIWTMDVLDKAVIDEIKALVANPAEVDNIIKLNQSNNNITEKKEFYKKRIKEIEKQMNKLTDLYSIDGIDIDFVAKKITALNTDKKRIESEMNAINEHKPLISAEDAKKRLSGISNILDNGEFTEKVKVITSLINRIEVDDDDIYIYWNFV

SEQ ID NO: 13233 - protein, 524 aa, synthetic construct
MLGYGYCRYSSEMQDEKSIEQQKMEINEYAQRSGITITNFYCDEAKSGTKDNRENFQCMISDACKNKDIECILVWKTDRFARNTQDSLFYRNKLKKNGTKLISITQPIDDSTPEGQLMSTFLAGIDEYYSQNLASNIKRAQKSKAQKFEFQGGIPPLGYKIIDKHYEIEEKEANIVKTIFKKYLEGYSLIDISEYLNSLNFKTRKNKKFGKNSVYDILGNIKYTGTYIHNKAYKHNSHIFRDDAFVYEGAIPAIISKEDFNMVQQKRKKRNSGEFSSKHLYLLSGLIVCGKCGKTYTGSTSVKNKNGKRYETGYYRCSGRNKLDKCDAPVLKQAELENLIIKLLADKLLNSADIDNVVTKVQEEYQKMYDESLDIIKQLESEISNVDAKIENVTSVIAEGVSSKALSNKLIELEEQRELLQEKLSFSKNINKHEIKVEDIKNLLKSDIMNLTKNTHSKEIIKKWVKKIEVHNNELVVNFSLNADSAPCMVARVRFELTTYRVWTDCSSQLSYLAICYLLTRFTL

SEQ ID NO: 13234 - protein, 468 aa, synthetic construct
MLYGKPQNYSWYRARVVLYIRVSTDEQARHGYSLGAQREALREFCDTFQCQIVAEYSDDGVSARKEIQRRPGLLRVLEAVKAGGVDYVLFIKLDRWFRSVREYYRVQDVLDAAGTNWKAILEDYDTSTTNGRLNLNIRLSVAQDESDRTADRIKFVFSERVKNGGAIFGSKSLPYGLEVRDHRVQIVEDQAVIVRAFFDHYEAAHSTRSTQVWLRDQYGVDLPRATIGRMLRNGLYCGQYRDNKNYCPAIISPDQFQRVQEILARQASGHTRQSKYSYVFTGLLRCPVCGCTLKAFPQFDYKWNRLYLRYRCTQHWIERRCSWKTTPWEPRLEGWLLDHIQPQLDAYIAQFDVQEAQRRRAVVDVGAIQRKLSRLQDLYVDGMIDRTAYDEKYQALIRQQEAAQAAQQSQSAGRDLEPLRQLLAGDFRSIYATLSPQERHTLWASVIDHIVVKDGRYGHFDLDVIFLP

SEQ ID NO: 13235 - protein, 535 aa, synthetic construct
MKKKQPNTRHGRAAIYARYSSHNQREASIEQQVKACRELAVRLGLDVVETYEDKAISGKSDRRPSFQRLLRDAEKGYFDCVLAWKSNRMGRNMLQAMTNEARLKDWGVRTFYAEEDFDDTAAGRFALRNMMNVNQFYSENMAEDITRGMMDNASKCLSNGALPLGYKAGENGRIVLDKAQAAVVQEIYTRVACREPFVDIAADLNRRGIKTKRGGPWTKSSFYTICRNERYRGIYIYDDVRVEGGVPRIVSDGLFYRVQEVLKVKKTPQSARHHTGAEDYLLTGKLFCGKCGRPMTGVSGTSRSGEMHYYYTCQKRRREHACDKKNVIREQIEKSVAQAIKQYMLTDEMIQHMADATMAYNARQEKDLHLQDLQGQLAAVKTSAANLLKAIEMGVITETTKARMVELEQEQGRLNAQIENARAELVPITRDNFVSLLHIYRDGDINDSKYLASLFETFLVRVDLYDDHFLIWFNPLGQKTPADIPITSIENGDVDEFFDECRSENVFDWGGKWSTKIKAPAVPRRVFLFWCSVSC

SEQ ID NO: 13236 - protein, 519 aa, synthetic construct
MRNVAIYVRVSTMHQAEQGYSIDSQLVDCRKKAHDLGAITINEYVDKGKSGAFLDRPELQRMLNDIKTEKEYYDALIIYKLDRLSRDSMGLAYIIKILQQKNIKIISTDGAQYGTNPQDVLTMQIMGSIAQFDNALRKERSIRGKIEKRKQGKLDKITKYGYTFNDEKQNLDIKEDEAIVIRKIFKWFTEDNLSAFRISKKLNSEKIPAPQPKINRKIINKDNIWFESTIRTMLKDETYAGIRHTMIYKFEKISLNNMKKTKRPPEEWISVPVPSIISRETWDKANNIMNRKSTNPRRTQRTWILQGLVFCEKCGQIMNIKQTPKIGKIKENEEKYNFYFKCRTNILNWFGSDKKCPNRQVPIYALEDSVWETLLNIFYSKETLEKYLKETQLKDNVYNLLDKLIEDRNKLSKNKNKIVEWFADGKIDQEIADNKINDLNNKINDLDKKISNLQSTNKSKKSFSINNLYDIFHKIKNPNREQKKEIIHSIVEKIFVERLDNKRSNAYTKPVLKIRIILR

SEQ ID NO: 13237 - protein, 524 aa, synthetic construct
MPKKEALFMPKTEEKQAAKAVIYARYSSDRQREESIEGQLRVCEDYARRNNITILHTYADRAMTGRSDQRPEFQMMIRDAATMAFNVILVYKLNRFARNRYDSAKYKHKLKKYGVKVVSAMENIADDPSGILLESVIEGMAEYYSAELSENVLRGMTQNALEGKWPGGVIPLGYKLDKGGRLIINEEKAPIVRMIYQMFLDGMSVARIERKLNDKKYTTDAGKVFSRSRVYYILHNERYIGTFQWKDIKKEGIIPPIISKEAFHAVQERINAMKSSSYRTNNNYLLAGKAFCASCGAKVSGTSGKSQNGNKYCYYGCSHHHRSARYEYCETKNIRADVLEKLVCDKTHEILSSKKAIKEIARQAVKLRPRDESELEIRAIKNHISSCQKKIDNCIKAIENGVMSNALVESLNENERTLDVLKEKLAKASLMQGSGLLTEEKIQFFFETIREKAKETEKYNDILLTSLVRAVYICNEYVEIQYNYAEQLPILTNPVRIESCSYKCTNGGTIWIRTKDLFDVNEAL

SEQ ID NO: 13238 - protein, 463 aa, synthetic construct
MARSVTVIPARNRQVSGNRAAPQKKIRVAAYCRVSTDQEDQLHSFEAQVDYYTKYINDHENYEMAGIYADEGISGTNTKKREQFKRMIADCGKGKIDLVITKSISRFARNTQDCLMYSRKLKNLGIGIIFEKENINTLDSTGELLFTILSSLAQDESRNISENCKWGIRTKFKNGEMHLNTFKFLGYDKDENGKLIINREQAKTVRRIYRDFLWGLNPAQIAKELEEEQVPGCLGQTKWYASTVIGILKQEKHMGDALLQKTYTADFLTKRQVKNNGEVAQVYVRDSHKGIVDKETWNAVQEEFERREKFMQKHGTDRYSYGSECYPFCEKIFCGECGSLFTRHSWKSRGIIQWQCKNHRKDGKVACTNAYVDNADLEKGFIKAFNRLVGEREKHIERWNSMKLDGTPLEKIRAGQMMEATESGQLQQYVPEAAQLVLEEITIFGAKKYEFAFLEGSRVKVSV

SEQ ID NO: 13239 - protein, 501 aa, synthetic construct
MEIQIREGSREQKRKLKVCAYCRVSTDADEQENSLENQVRHYETVIKANPDYEYAGVYSDFAISGFKEKRPGLQKMLADAEKGKIDLILTKSVSRFARNTSIVLEATRKLKELNVGVFFELQNINTLSGEGELMLTILAAFAQAESESGSTGAKMVYQRKYEAGIPVQYLERSFGYTKDERGVFVADEAEAVWVRKIYEMAAEGYTPASIKRYLNENGIKTVGGVQWVDSTVFRLLENEIYKGDYIMHKHFVNEERKLVRNRGEVDAWYIEDDHEAIVSPELWQKAQDALAAKRDYLAEGSVIEEFTEENYPYMNKIYCAKCGYPLYKRIYSKGNRLNWGCSGTKRYGKSFCDGINIPDGVLRSAWHFEENTYIDEKASDKGVKEFTYLKERSWKRRHKKKQPSAIPENTETEYSYREKIFCALCGSRLVRYVNPQNHKVTWVCNRRKRKGKEACDGTRVPDTVIKGWGEIKKDIYIQRKDDKNGKKRYSYTSKKPSGIRE

SEQ ID NO: 13240 - protein, 513 aa, synthetic construct
MARITKIEATKDNSKRKLRVAAYARVSTDSNEQLVSLETQKNHYERYIKARPDWEYVGLYYDEGVSGTSMDKRDGLLHMLDDCDRGLIDYIIVKSISRFSRNTVDSIETVRRLCEKGIYIFFEKEKIDTGKMEGELLLSILSSLAESESHSIAENNKWSIQKRFQNGTFKIGYTPYGYDNVDGQMVVNEEQAKTVRWIFEAILSGMSPGTIARKLNEKGIRTKRDGRWTGHTVNGMIRNEKYTGDVIMQKTYTDDRFNRHINRGERTQYLARDHHEPIISHEAFEAANAIINANGLEKGIHKDEDKYKNRYAMSGKIICGECGGTWKRVKLANHFGFSCNTHVRNKTACSMKTIAEEPVKAAFITLMNKLTYGRSLILIPYAEMLKSSQRSGNIDRLTELDEMLEKNTERRSQITQFFTKGLLDPAVYAEESDDLTEEADRLSEERDFLTTQMNGNRDQTEALDRLLKYTAKGTMITEFDPSLFTEHVDRIVVYERTEIGFAMKCGPMFRERI

SEQ ID NO: 13241 - protein, 578 aa, synthetic construct
MAYPMKNRTADNRIIAIYVRVSTGYQVDKDSLPFQKKELKAYCKHILHVDLSQVEIFEDAGRSGKNTKRPAYERMMDKVRAGLVSHVLVYKIDRISRNLVDFSLMYDDFKYNRVTFISLNEQFDTSSAIGEAVLKIILVFAELERKLTSERVKDIMIGRATEGKWNGARVPYGWDWDPDAEQPVHSKVEAPYARGMYEMYLEVRSTGKIRDYNNSHNIPTKRGGEWTSKTVSDFLRNPMNKGDYRYNYRESARGRKKPEDEVIYQEGIFEPLVDPEVWERVNRIMDDNASKRNTGGLHPIMKNCNVFAGLIQCAECGSGFQVVKKDRRRKNGFAPSMYGCTSRFRKIHCPAPNVSEVQIGPFVINYISAMMHATKERFKIHSPAALESMLLSDPIFANIVGIESQGLNETFALLTGVSVSGSALWRTDPVRQSDTAATSSEIENLKKQIQKYNRAKERLEDAYYFSDDAMSEKEYLEKKNKFDAARVAAENKLKELTEVQIASHVNDSGFMKSASAFLLAHQLHAGVHIEYRDFAVTVEEESLKEFMNLVLDHISVKDRRVVEIVFSNGLSHRFIYRE

SEQ ID NO: 13242 - protein, 484 aa, synthetic construct
MINDAKNNPEFKAVLVHKTDRFSRNLSDSIQYKKILEEYGVQVIFVNERFEDNPESHLLYHIMGSVNQFYNENLAREVMKGLKENAYQCKFTGGRPPLGYDVDKDLKLVINEKEAEAVRLIFEMSAEGYGYGETIDKLNILGYKTKKGLPFVKNSLYEILRNEKYKGTYIFNRSCSANALNKRNNHRRKPEEEIIRIENGCPAIVSSGLWHRANAVKKATRSSFTNAKNTYLLTGLIHCGECGGKFHGNIRYNKNNTNLVYRCSAKKNKRKCESKEIRCEYLDSFVIDKFVEFFFNDDNIKVITKKLNEQYSKSCISDLEYNEAKSTLKILEKSRNNLVEAIAKTGINDIMSDKIKEYEEQIKKTSEFIHKYEKQKIDRVITEDEVREQINHLKDYFYNPKNIIRTKFVLSQYIDRIDISNENVQVHFKVSMSPSGNTDGDYFCVHTETIKRKYLFDYVCEKVDFEQWNIEKLNKSESEHRKGA

SEQ ID NO: 13243 - protein, 572 aa, synthetic construct
MRKRIVGYARVSTEKQDLERQKILIREHCSNNNYDLVKIISEKVSGAKKDRESINELLAVTKDTADMVVVSELSRISREKECLTVLNTINDILENGLDVLFLDDTSKVYSAYTELNVIDIITLTVKAHSAAEERDKITARMRTGKITKLNINPYMYTGSLVPYGFKVIDNPDYKGQKCNIPARKLMVIDESKTKDVQFIYQLVLNGTTLRDAAEEVNKLGLRTQLNKPFCETSISKMIKNPIYNGRRRFKGLNLPLMDKIISDNDWNRAQICVSQNQLFKGKTTKNFNPLKGLVFCPCGYALMLHKMIRRDGSGYFVMTCCKKNDKEYRKKCRNSGIVSHVLLPTVWKCVKDTLLLSEYTTKTTSEVHRINGIIEGLEDRISGLIDEIDSHKKEMARLSKAITLVTVKGLITQYENEYVTEEAKVTEIEAKINNIRDEISNYKANITKINSITYNSQLINLTDQEKASVYQKVLSKVVYYSIDYFRGFIVISYKNGLENIIAINKTTTGYISPLPSSFSFNAETRKIRVTIAKKQTSIKEFSLSDIENIEYSFKELEANFNPQQWDIQSQIL

SEQ ID NO: 13244 - protein, 541 aa, synthetic construct
MEKDKKVTALYCRLSKDDGSNSESLSIRTQKAMLMEYATRNGFGNCQYYVDDGYSGTNSDRPAFQELLDDIREGKVATVITKDQSRLGRNHIETGTYMEIFFPEHGVRYIAINDGYDSNEQSQMDIAPFRNIINEMYAKDTSRKIKSALRTRKKSGKYISSGAPFGYQKDPADHNHLVIDPNTAPVVEYIYSMAEEGLGLHRIAKRLHDEKVLKPCYYKKEMFGRFIDDEKMYDWDSAYISQVLHSPVYAGHIIYEAKPTVSMKSKKRRYIPFEERAIVPNTHEAIIPQDRWENVQRILYGRSSSFMCDKTDYDNIFKGIVRCADCGRTMLVKVEHRRKRNSVLDQTFYCCSTYRKYGAKACDSHNLEARVLHEAVFADIQAHAKAAVSNREALVKKIANQMHLRVSSDRAQHKRDLKQCKARIAEIEDLYAKLYEDVSKGLLPEKRFQMLADRYDKEQAELTEKIEQYEREGRAEHDQLDKIQDFIDEVSKYAGITELNYKILHQLIDKILVSRAEKVDGEYVQKIQIFYRFIGPLDAIE

SEQ ID NO: 13245 - protein, 447 aa, synthetic construct
MVKKHVALYVRVSTEEQKNHGLSVDSQIDALEKYCAEHDYAIFHIYNDAGHSAAKRYTTRPALLQLMEDCSHGMFDLILFTRLDRWFRSVPDYYQVQSVLDHNHIAWRAIWEDYETETSEGVFKVNIMLSIAQAEAQRTSEKIRSVLQYKRDSGGYVGQPPMGYIRINKRDLIFDDSIKDAIRELFKVYLTTNSIVKAVQSAHDNGLQISAQQAYRILKKEAYAGLAVGGYKCPAYISWEDHEKILSMMKQHTRKTTPARTYYFSGLLFCENCGYRLAAGASHKRSASGEDYYIKYYRCNGFRTMRSDCPGSYLNEKKLEKYLLDHLNAELDQYNVNLMTHSKDYDPDEIKKQIVALESRMRRIGDRYEDGDISREEYRNKRYEITYRINTLRSLIAKNPTPIHLADDWMAVYQGFDAEHKRQFWRSIIERMDVPVEDSYHVKIHFC

SEQ ID NO: 13246 - protein, 464 aa, synthetic construct
MARSVTVIPARSQKVRTGHKAVQEKKIRVAAYCRVSTDQEDQLHSFEAQVEYYTKYINEHENYEMAGIYADEGISGTNTKKREQFKKMIADCEGGKIELVITKSISRFARNTQDCLAYSRKLKNLGIGIIFEKENINTLDSTGELLFTILSSLAQDESRNISENCKWGIRTKFKNGEMHLNTFKFLGYDKDENGKLVINKEQAKTVRRIYRDFLIGINPAQIAKELTEEKVPGCLGQTKWYPSTVIGILKQEKHMGDALLQKTYTADFLTKRQVRNNGEIAQVYVKDSHKGIIDKQTWNAVQEEFDRREKFMEAHGTDRYSYGADCMPFCEKVFCGECGSLFTRHSWRSRGIVQWQCKNHRKDGKVACTNAYVDNADLENGFVKAFNRLVTDRDKHMERWQQMKSDGTPLEKIRAGQMMEAVGNEPLTRFVPEIAQLVLGEVTVLGAKKYEFFFLEGSRVKVSV

SEQ ID NO: 13247 - protein, 502 aa, synthetic construct
MEIQIREGNREQKRKLRVCAYCRVSTDADEQENSLENQIRHYETVIKANPAYEYAGVYSDFAISGFKEKRPGLQKMLADAQKGKIDLILTKSVSRFARNTSIVLEATRKLKELNVGVFFELQNINTLSGEGELMLTILAAFAQAESESGSAGAKMVYQRKYEAGIPVQYLERSFGYTKDERGVYIADESEAVWVRKIYEMAADGYTPAAIKRYLNENGVKTVGGTKWIDSTVFRLIENEIYKGDYIMHKHFVNEERKLVRNRGEVDAWYIEDDHEAIVSPELWQKAQDAIEAKREYLAEGSVIEDFTKENYPYMNRIFCAKCGHPLYRRIYSNGNRLNWGCSGTKRHGKSFCEGINIPDGVLRKAWHFDGNMYIGEKQTDKGKKEFTYLKEASWKRRHKKKEPEPIPENTETEYPYREKIFCGLCGSRLVRHVNTKNHKVIWVCNGRKRKGKDFCDGTRVPDTIIKGWGEIKKDIYIQRKDDKNGKKRYSYTSKKPKGADRT

SEQ ID NO: 13248 - protein, 469 aa, synthetic construct
MLEKILRVALYIRVSTQEQVMHGYSLEAQEAALYDWCKNFKNDRAYKDYDSIEIVDIFKDEGKSAFKPCKKRPEFMRLINDFVIPEKVDLIIFIRLDRWFRRVGEYHEMQKILEDHNVHWKAILEEYETATSNGRFMVNIKISTAENEAENTRNRILDVNRYKRRIGKVMSGNQPFGYTVGIVDGSKRPVIHEIKGKIYRDMISYFFLSGSVGKTADYCNQKYHMNSNYSWYSKVLNNIDTYLGYSEGIGGYRPPLLSLDEAEKLRNLLGNNARRPRSQRIYIFSGLLTCPVCGNRLTSCISVYTNSNGKKKYYKRYRCQNAKVSHLCSFGTSFSERKIEAALLKGVGSAFADFETACQKNMKKSRDSAEELKKIQGQLDRLNKIFLMGNIQEDEYEATSFSLKKRMESLRLSPSRIDKKTADLLKTGEFIDYYRLLDDEHKQFFWRGIIKSVTLCNDHSNMISSILFL

SEQ ID NO: 13249 - protein, 428 aa, synthetic construct
MSTDQDEQLSSYENQVNYYREYILKHEDYELVDIYADEGISATNTKKRDAFNRLIQDCRDGKVDRILVKSISRFARNTLDCIKYVRELKDLGIGVTFEKENIDSLDSKGEVLLTILSSLAQDESRSISENSTWGIRKKFERGVVQVNTTNFMGYDKDEKGNLIINHEQANVVRYIFDRFLEGYSPEFISKELREQEIPGCTGKAKWCPSAIWKMLQNEKYKGDALLQKTYTVDFLTKKRIDNDGQVNQYYIENNHEPILDREKWEIVQLEIARRKKFREQHNLQFYIMQKENNPFTTKVFCAECGSAFGRKNWTTSRGKRKVWQCNNRYKVKGHIGCQNNHIDEEMLEKAFMKAVGLLQKHRSDVVDKWQKLEQGANLLHKHYAKQMYQILDLDKFDEVIMNQVLDHISISETGQIVVTFLEGTEVDL

SEQ ID NO: 13250 - protein, 413 aa, synthetic construct
MNIRKIEAKNNKRKKRICAYVRVSTTNGSQLDSLENQKVYFEKLYAERDDVEFFGVFCDKGISGSKYDRPDFQTMLDACRKGQIDVIHTKSISRFARDLINVLEISRELKTLGIDIFFEEQNIHTLSNEGEVILTVLASLAEEELQSMSGNQRWSFRRKFQKGELLINAKRFLGYDLNEKGELVINKAEAQIVRTIFYSYLEGMGTHRIAKKLNEGKVPTVAGKKWYDSTIRNILKNEKYKGSLLLQKYFHDGVNGPKKLNQGQVEQYYIEDNHEGIVSKEIWEKVQVKMKSRSRIQGTNKTYKFSRMLKCQYCGSTLKRQVSYKKKIIWCCSKYIKEGKNSCKGMRVPEMDIEDWKLSSPVIVLERIEDGEKHYSYTGQKTSANSQISNSEKGQGSRLLSSVYRPRRAAIKL

SEQ ID NO: 13251 - protein, 562 aa, synthetic construct
MRAFIYCRFSSHKQQELSIEGQRDICQEYADKHNITVVGQYADRARSGKTENRADFRRLMRDAATGVVDCVLVWRYDRFFRNRAESALYRKQLEAAGVHLISVTEYIPEGSAGIITQGMIETVAEYFSAKLSEDVSRGMNKAAQHCQIVGRAPLGYRAGPNKRWQIDPVGAELVRRIFEWYASGKAMGQLAAQLNEEGHRTTNGTLYTRSSFNSILRNEKYIGVYSYGGEVRIEGGCPRIVEDELFFTVQRRLSANRHRPGAYKAEVPYLLSGKLFCGLCGAPMTGTAGTSHTGARHYYYICNNRRAKTCKKKNVRLDLIEEAVLQSALDILTDENIAYISAEVERRCAENSDSAALLASLNVQLEEVQRRLKNIGNAIAQGIITETTKELLEEAEADRTALRQQIDRAKVQAALVVKAEAVACWLDGFRRGDRTDPDFRRQVFGALVHSVFVYDDYLKIIFNVDSAVAAVVPYEAAQAATPSEAPPGSYLDTLGAPKKALRKRKAFFIMIAALCECFRFAADFNPSQRLFLFCRRNARTFSVRETVAYMQLPIKVSSKIIS

SEQ ID NO: 13252 - protein, 519 aa, synthetic construct
MKTITEITRQKPTPPQIRLAAYCRVSSDSSDQLHSFAAQIKYYSEYCKRHPEYKFVDIYADEGVTGTSMEKRDDFRRMLRDCKKGLIDRIIVKSMSRFARNTEEMLTALRALEQMEVSVYFEEQGLDTRSMNSEMFATFPGMIAQQESISISQNMRWSYQKRMNSGEFNCCAPAYGFDLINGELVINETEAAVIRRIFNLYLQGIGMQKIANLLNADEVSRRYGQEKWYHTTVNYVLNNERYMGDALLQKKITTQTLPFKKQKNHGEQTMYYIEDSNPAIVSRETYEAVQALIKSRQPNCKRSYKTYPLSKMLRCPECGRSFRRQTIKGTAYWICAGKATGQTNCTWRRVREQEVYAAFNLMIRKLSANREYLLGTLIRQLEQLQYRTTGSQQRIKELDREIADLAAQNLVLSRLHGKGLLNAADYTAQSDALESRITELRIERRTKITESDEDEMLDGLKLLNDILTETELGKDFDAELFGQTVDSITVDGNDQLTFHLIGGISLPEKIREKGRCNRA

SEQ ID NO: 13253 - protein, 545 aa, synthetic construct
MTQTATMKPQKKVHIIPATIDTKAAITQNYRQLRVAAYCRVSTAQDEQLNSYEVQKTHYEERIRTEPKWTLVGIFADKGITGTSMKKRDEFNKMLRLCYKGKIDMIIVKSISRFARNTLDVIKTTRKLRDVNVDVFFEEQGIHSIDPASEFYITIYGSIAQSESENISANVKWGKAQSAKQGVVPFQCKHFLGYTKSADGEIEIVPQEAEIVKEIYTRYLSGESLHGIKCYLEGKGIPTPGGCTEWQHRTIRSILTNEKYKGDAVVNKTFVTDCISKRVKVNNGERTKYYIEENHPAIIDAGTFARVQEEIARRAGKPKVKQKGTITELSRYSSKYALTELLICGECRTPYRRCTWTVHGKKKVVWRCINRLDYGKKYCHNSPSIEESLLQDAIMRAIMQTAKQNTEVLKTLKLHIGMGLTDETTEDKTLDIQIRIAELDAEFQKMLKAVSADNADAIDEGRIAELMSEKQRLTVQLEQYAAMRQKRESAKSRLDEIYTILDGLQNHPMEYDDKLVRQIIECVVVESKEKIKVVFIGGTEIEMAL

SEQ ID NO: 13254 - protein, 533 aa, synthetic construct
MQTGKITALYVRFSFDDGIDTESGSIEHQKALLKNYAVSNGFTNLSYYADDGYTGTNFNRPNFQRMMNDIKNELVGTVIVKDMSRLGRNYLMVGQYVEIDFPKYDVRFIAISDHVDSAKGMNDLLPINNLMNEWYSRDISKKIRSMVRQKGNSGQHITSKLPYGYYNTPENKQDWQVDEEAAEVVREIFELYVHHAMGTKQIALQLQAEKRVGVEYHKKIRKGIAVTAENIYLWNSRTIASILKRQEYVGDTVNFRTQIASYKNKTVIYNESDKIRIFPDTHPAIISRELFQMAQDRREKTIRHPSRPHKYLFGDYLYCMDCHARMHGRRCGTKSENALYCYECTTYRKSKGCYFHGVPEKYLETEVLQAIQSVIYKANANPDEFYKTIQKRVEKKSDDCKAVVLAELEKSQLRITEIDKYIQGLFEAKVRGEIDGSLFASLKRTYDEEKEQLNVLVAELIGKLHEKNESVNKVKLFMQAIKTYDAVTELTPQVLADFIEHIEVGKCQNTSKKLPFSKRDNAVSVFFWGIGIF

SEQ ID NO: 13255 - protein, 521 aa, synthetic construct
MARITKIEVARDFTEKKKTRVAAYARVSTKSDEQLLSLETQKEHYDNFISSNPEWEYAGLYYDEGISGTKVEKRDGLLALLKDCEDGKIDRVITKSISRFSRNTADCLEMVRRLAKLNIYLYFEKENIDTEHMSSELMLSILSSIAESESRSISQNSKWSVKHRYEEGTFIIGYPPYGYENKDGKMVIVPDEAEIVRDIFTMTINGMGTYVIAKELNQRSIPSKKGGKWCSTSVRGILQNEKYTGDVIFQKTYTDDNFNRHNNYGEKNMYLCKNHHEPIVSHEIFDKAAAVMEQRGKEKSIETGIGKYQHLYVFSGKIICGECGAKFKRRQHYKPSGKYVSWTCNTHITDKNACSMMFIRDEDIKFAFLRMIRKLQTAQTQVLKPFISDLKGTNNKGRLHQVLDLEEQIEQNAEQIMVLTNLMASSYIEPEIFHAEKNRLTLEADRLAKEKEVLSKSINGDLTHLDEAQKLMRFVSKKTEIKEFEDTLFLEYVDTITARSRDEITFNLKCGLNLTERLVRA

SEQ ID NO: 13256 - protein, 536 aa, synthetic construct
MQTGKITALYVRFSYDDGIDAESGSIEHQKSLLRSYAESNGFTNLSYYADDGYTGTNFNRPDFQRMLGDIHKGLVSTVIVKDMSRLGRNYLMVGQYVEIEFPKHNVRFIAISDNVDSAKGMNDLLPIHNLMNEWYSRDISKKVRAMIRQKGNSGQSIASKLPYGYYNIPEDKQTWLIDESAANVVRRIFDLYLNQSFGMYQIARILKAEGIPRPTYHRRMAKGIKVEADDLCVWNASVVRNILQHREYIGDTVNFRTEITSYKNKKVIHNSDDKLKIFPNTHPAIIDKETFQKVQDKISKEIRHTRNVHSYLFADYLYCMDCHSRMHGRQCYLKGGRALSAYECSTYRKSKGCCFHGVPEMYLQAEVLAKIQNVLAFAKSNPAEFRQNISKALEEQSDGSKAVIQEELDKAQARTTEIDKYIQGLFEAKVRGEIDGSLFASLKKTYDEEKEQLNKLIIDLITKLSRENEANEKIQLLYAAIRKYDAVWELTPEVLTDFIEKIEVGQVSAENKKISFELRDNQISVFFWGVGIIDFM

SEQ ID NO: 13257 - protein, 520 aa, synthetic construct
MNVAIYARKSKATKKGESISNQIELCKKYFLNTTNEDVNFLIYEDEGWSGGNINRPQFTKMMNDAKLKRFSTLICYRLDRIARNVADFSSTYKILEENNIAFISITEQFDTSTIMGRAMINISATFAQIERETIAERIKDNMLELSRTGRWLGGISPLGFKSVQITENNKKLYKLEVVNDELEIVKLIFNLYPQYKSTVPVARYLVSNHIKGKNGGDFSKNTVLQILKNPVYCCSDTEAIKYFKGKDSTLNCIDNKELGLMVYNKKKSGKKENPIDEWVVATGKHQGIIPGAEWVNCQNILEEISRKASPRKATGNKFLLSGMLKCARCGSSMCSWSRTSRGIYYRSYRCELKNRAATRCDSKMVNADDLESFVIELCKNINLEEIINIKKTKNNNSTLKRELTSLNKTLVENDKLLQGLVKKLALIDDIDILTIIQAEIKKIKSENENINKRINEINLSMFDSEDEYKNQQILLESHKLFKDTIDLVKDVEAKRNLIMSFIEYFTYDSQTNEIGYKLRL

SEQ ID NO: 13258 - protein, 529 aa, synthetic construct
MAKRVTTIPATLNRFDSRPLQSVRKRRVAGYARVSTDSEEQATSYEAQVDYYTRYIKSNPDWEFVGIYTDDGITATNTSHRDGFKQMVEDALEGKIDLIITKSISRFARNTVDSLVTVRELKEKGIEIYFEKENIWTLDAKGELLITIMSSLAQEESRSISENTTWGKRKSFADGKASVSFSRFLGYDRGSNGEFIINEEQAVTVRYIYKRFLEGLSTYQIAKELTQMGVKTAAGKDKWYTSSVLSILKNEKYKGDALLQKSFTKDFLTHKRVNNNGEVPQYYVEGHHEGIVTADQFEQVQAELYRRQNMDRYSGVGCFSSIIKCGECGSWYGAKVWHSNDKYRRVIYRCNKKYEKGCKCRTPHITEDEIKDMFIKAANELFSEKNEIIKNTKIMMDMVCNTNELDKELGDKVAELNIIAGQMQTAIAENSRTALDQNEYERRYVALTERYNTIKADYDKISEQIESKKAQRELFKGFIWALEKQGALVEEFDEELWSSLVQEVVVNTKDDIRFVFKSEFEKKVMLEIN

SEQ ID NO: 13259 - protein, 503 aa, synthetic construct
MANIRRIEPVLPRLKARKRVAAYARVSMETEQLHHSLSAQVSYYSALIQSNPEWAYVGVYADEGITGTATKHRDEFKRLMADCDAGKIDIVLVKSVSRFARDTVDTLKATRHLKELGIDVYFERENIHSISKEGELLLTLLAAFAQAESRSISENIKWSIRKKFKLGIPNGIKAPYGYEWNGDSFSIIPEQGEVVREIYDRYLVGEPAYSIAKRLAEKGVKGKSGVPMDDSTIKNILSSLSYTGTMLLQKNFFTEGHKRRKNRGELPMYAVEEMFETLVSKADFEKVQQIMKDRAEAMPNSNPNLTAFSGIVRCANCGCSISRRTSKYGKKWVCNTKERKGKAVCDFRDVYESELEDAATKALSLDEFNAEEVKSRIALITIDNVYITFRMKKGTSRQVLRKYKKGYSGFSTRLFCGCCGGMLESDTWNMGPAGKKTKYKVWVCRNCSAPREFDSTFRKATQKLFHEEQCDGLFAQNIEKAINYDEKIEFYYKKGEVVTWQKE

SEQ ID NO: 13260 - protein, 491 aa, synthetic construct
MDSSKNAVIYARYSSDNQREESIEGQIRVCEDYARKNGFNVINIYADRALTGRTDKRPQFQLMIKDSETMTFRHVIVYKLNRFARNRYDSAVYKNKLKKNGVKLVSAMENIADDPSGILLESVIEGLAEYYSAELAENVRRGMTENALDCRYTGGAVPMGLKIDENGHFMPDYPAANIIYQIFKAAASGAEYREILDRFNSPDNVAVLGRKITRGTLLKMLKNEKYIGTYSWNGIRKENAFPAVVDKKTFEFIQDLRRSRMHKHQSKPYEYPLSGKLFCRCGAPMVGTSGTSKNGSIYNYYSCTAHLKSTENCKQKSIPRDDIETTIVRAVTDILSDEKAIDILAQQVVALAKSKGEPQEILAIESQISDLDKKISHAVAAIENGISSPALFSSLNENEAKKSELSAALARERLRHRGTNITEETIRQFFRSMRDKDFSNEQYRRILLRSIVNKVQIGDGEIIIAFNYTQKLPTLPNPVKVESSYTATLAE

SEQ ID NO: 13261 - protein, 565 aa, synthetic construct
MPEKEKIVALYVRVSTGYQVDKDSLPFQKKELKAYCEHVLHIDKKRIEIFEDAGKSGKNTKRPAFERMMEKVKSGQVSHVIVYKIDRISRNLVDFSLMYDDFKYNNVTFISLNEQFDTSSAIGEAILKIILVFAELERKLTSERVTDVMIGRAQNGQWNGARVPYGWDWNEEKQMPVHSKKEAQYGIDMYHRYLEGYSTLRIARYNNEHNIPTKRGGEWSSKTVGDFLRNPINKGDYRYNYRNSARGKKKAKEEVVYIKNVFPPLIDPPIFDEVNRRLDENYKKQNTNYMFPIRKQCNIFSGLIICGKCGAHYQVCRKDERRLDGFRPSNYVCTRKRQKAICDSLNVSEVKIGPFMINYIAAMVDISQKRKKLKDKKELEQLILSHMQFTDLAGIADDSLQETMDLLYGRSTNIWSPSPIAKESQDNENKKSKLKENLQKTDRALERLKKAYLFDDDGMDEKEFLEMKSKLEIDRVKIENEIKDIDNDAIANNVNQIDFIKTASQFLIIHKINSGEFIDYRSLAILDEESLKAFMNSVIDHIVVLNRQITEIVFKNGLSHKLLYR

SEQ ID NO: 13262 - protein, 464 aa, synthetic construct
MARSVTVIPARSRQRETGRRAVQEKKIRVAAYCRVSTDQEDQLHSFEAQVDYYTKYINDHENYEMAGIYADEGISGTNTKKREQFKRMIADCESSKIDLVITKSISRFARNTQDCLAYSRKLKNLGIGIIFEKENINTLDSTGELLFTILSSLAQDESRNISENCKWGIRTKFKNGEMHLNTFKFLGYDKDENGKLVINKEQAKTVRRIYRDFLIGINPAQIAKELTEEKVSGCNGQTKWYPSTIVGILKQEKHMGDALLQKTYTADFLTKRQVKNNGEIAQVYVKDSHKGIIDKQTWNAVQEEFERRERFMEAHGTDRYSYGAACMPFCEKVFCGECGSLFTRHSWRSRGIVQWQCKNHRKDGKVACTNAYVDNADLEKGFVKAFNRLVADRDKHMERWQQMKSDGTPLEKIRAGQMMEAVGNEPLTRFVPEIAQLVLAEVTVLGAKKYEFFFQEGSKVKVSV

SEQ ID NO: 13263 - protein, 498 aa, synthetic construct
MEIQIREGNREQKRKLRVCAYCRVSTDADEQENSLENQIRHYETVIKATPSYEYAGVYSDFAISGFKEKRPGLQKMLADAQKGKIDLILTKSVSRFARNTSIVLEATRKLKELNVGVFFELQNINTLSGEGELMLTILAAFAQAESESGSAGAKMVYQRKYEAGIPVQYLERSFGYTKDERGVYIADESEAVWVRKIYEMAADGYTPAAIKRYLNENGVKTVGGTKWSDSTVFRLIENEIYKGDYIMHKHFVNEERKLVRNRGEVDAWYIEDDHEAIVSPELWQKAQDAIEAKRDYLAEGSVIEDFTEENYPYMNRIFCAKCGHPLYRRIYSNGNRLNWGCSGTKRHGKSFCEGINIPDGVLRKAWHFDGNMYIDEKPSVKGTKEFTYLKESSWKRRHKKKVPEAIPENTEEAYPYRKKIFCGLCGSRLVRRVNPKSHKVIWICNGAKRKGVAFCRGTRIPDSVIRGWGEIKKDIYIQRKDDKNGKKRYSYTSKKPTA

SEQ ID NO: 13264 - protein, 506 aa, synthetic construct
MPKTEEKQTIKAVIYARYSSDRQREESIEGQLRVCEDYAHRNNMTILHTYADRAMTGRSDQRPEFQIMIRDAATMTFDVVLVYKLNRFARNRYDSAKYKHKLKKYGVKVVSAMENIADDPSGILLESVIEGMAEYYSAELAENVMRGMTENALEGKWPGGVVPLGYKLDAEHHLQVDAKTAPAVQYIFRAYTAGATKKSIAEALNERAVLTSAGKKFTSSSFNKILRNDVYIGVFTWGNVKKENAIPPIIDEDTFRMAQLLNERRKRHIVRNPEAYELSGKVFCGRDGARMDGKSGKSHQGFTYYYYVCSERLKKHCASRPIRADWLDTTVAQTTTQLLSTPRAIDLIAKQAVKLQSHQKKSPIVEALEAEIAENKKKVENCIKAIEQGLMSEALTNHIHEAEGRIRDLAERLQREKILHSHRPVTEDEIRFFFYSIREQVQTKEAKEYRRILFTSLVQSVIVHDHSIEIRYNYKSELPVLQNPLEVESSHCVTMVDHQGFEPRTP

SEQ ID NO: 13265 - protein, 456 aa, synthetic construct
MRNKEIAPALVRVALYIRVSGEEQKIKGLSLEAQQERLEAYARERGWVIVGIYIDAAKTARKNIHKRTEFQRMMEAVKRDEVDILLFARLDRWFRSVADYYKVMEILQAHNCDWKTTDEEYDTTTANGRLYINVKLSIAQNEADIDGERIDVVFDSKIAHGTVVSGSAPFGFRVNEEKRLEVVPEDAAIVQDAFNYFENTVSQRATVRYVRETYGVNWCDATFRRMLKEKLYTGVYDRGGRYNDQFCPAIIDRQQFDRVQVLLTRNVRSAPSGKVYIFTSILTCAECGHKLVGYKSSDYYYYRCNQHFQRGRCSHNHSAREDVVEQWLFEHLGEELERCQLEWGVEAAKKKASVARTDKAALKRKLTKLKELYVNDLIDIEDYKKDYQIYVSALNQIPEPAQEAPPDFAAVRRLLDNNFRTIYDTLTREEKRTLWRSVIKEIRIDNDQNITGVVFG

SEQ ID NO: 13266 - protein, 514 aa, synthetic construct
MAKRKFNKGGEVRLVAYYRYSGGSGQTEQSIEGQRRDCETYARLHNMTIQKEYVDRHISGKTDDRAAFQQMIADSDKGVFDMVICWKTDRFARNRYDSAVYKKRLRDNGVEIVYAAESNIAGAEGIIIEGVMEALAEYYSAELAEKMRRGMRESALKGQAISRCRALGLKTDEHKRFVIDEKTAPTVRFIFEHYAAGESAMSIVEQLNAKGLRTSQGNPFNKSSIPRIIQNEAYRGVYVSKSYDVRIEGAIPAIIDNELWERAQTMLKLNRQLKAKNEPKADYILSGKLYCSCGSLMRGMSGHSATGEVYRYYTCPNKDCHLRNIPKDDLEGKVMQSIVDHLLQPESMEALAEAMVEVQKADAEKPNAERVAIEQSLADVRRRSKNILDAIENGTANAQLCARLNDLTEQEQTLSFQLSSLEKEKPVAFTKEQYLFLLEQFLVEPSERTPEYGRRLVNAFVTSMVVSDRELVINFNVSDETVNKNKKASQTNLQKESSSGMRLVRVARIELTAS

SEQ ID NO: 13267 - protein, 520 aa, synthetic construct
MKKITKIDELPQGQLPNTKLRVAAYARVSTDSDEQLESLKAQREHYERYIKSNPEWVFAGLYYDEGISGTKMEKRTELLRMIRDCKQGRIDFIITKSISRFARNTVDCLELVRKLIDIGIYIYFEKENLNTGDMESELMLSILSGFAAEESASISQNSTWSIQKRFQNGSYVGTPPYGYTNIDGEMVIVPEEAEIIKRIFAECLSGKGGGTIARGLNKDKIPARRGNHWSSGTVIDMLRNEKYMGDVLLQKTYTDSNYNRHPNTGEKDQYYYKDNHEPIVSRDDFAKVQDIIDERARMRSKGIKKNVYLNRYALSGKMVCGECGRNFRRKTNYSVGRSYIAWSCIGHIEDKESCSMLFLRDGEIKATFTTMMNKLAFSNKLILEPLFKSISQIDEESDRERMDAIDKRMEQLMEERNTLITLMAKGFLEPPLFNQERNVLDSEMKNLSTEKTNLGSNSASEILRANEIKDLIDYVSADNFNGDYTEELFEEFVENIIVNSRDELTFNLKCGLSLKEKVVR

SEQ ID NO: 13268 - protein, 462 aa, synthetic construct
MSYFNFNPDLAGVRVVKYIRCSHEGQVLHGDTLEAQNLILDEFIAANKMTLVDTFVDEAMTARKKYTKRKEFVRLLDGVRSHNFDLIIFTKLDRWFRNIGDYHKIQEILDANGVQWKAVTENYDTTTTNGRLHINIRLSVAQDECDRDSDRIKDVFAYKLKNKTFISGALPRGLMLDAEKHVVPDPEYSEYVVDLFGHFESCGSIRNTLLFLQDKYGFSISYKSISNALRNPLFKGQYRDDPDFCTQIIEPERFDHIQLLLSRNVRIRRNRQTYVFSGLLTCAECNHALVGYSAYYTTKEGEERATKTYRCNHYITRTCTHKNQMSQKKLEKYLTENIQLAFSDYIASFNVVSSAAKKKDTAAEIARIERKQKKLYNLYMDDLIDAATYKEEYNSFKKQLEELRSIPFSPAVDTRKKTEELLSGDWISVYSSFTDLEKNAFWKSFIDKIIIDVNGNIDIIFL

SEQ ID NO: 13269 - protein, 518 aa, synthetic construct
MGYRYCAYLRKSRADSENRSASDAEILARHERLLVEAARRRGVAISAVYREVVSGDSISARPEMQRLLSDVMAGKWDGVFVVEVTRLARGDTIDQGVVAQVFKYSGTQIITPDRVYNPSSDSDEEYFEFGLFMSRREYKMINQRQQRGRLASVQEGKWVSNKAPYGYIRVKLDRQKGWTLRPNEHAPVVQDIFRWFTGTDAPPIGVSRIVRRLNESGIPSPAGGVWTNSVVRGLLSNPTYAGFVRWGNRAMKKTYRDGHLTISRPRARPGEAMLFPSLHPAIVEKGVFDLAQAQLSKNSSRPGPKQVAMKNPLSGLIICADCGRAMVRRPYQSGRQDTLICPYTDCHNVGSNLSDVERTLLDSMRLWLAEFERCSDAAPNGREELESIRRTISEHEKALETLSSQLNRAYDLVEQGVYTSDVFLARSRSIADKQEYHNEKIRSLEQELSDRELVASSRDEIAPKMRHVLDAYPLASSPEEKNALLKSVLEKVLYKKTQRDRWGGNGMQLELFPLLPHF

SEQ ID NO: 13270 - protein, 529 aa, synthetic construct
MDAVIYARYSSNNQREESIEGQIRECREFAEKNNLQIVDEYIDRAISGKTDNRPAFQRLIKDSSKGKFDVVIMYTLDRFARNRYDSAIYKAKLKKNGVRLLYAKQPMPDTPEGIILESVLEGYAEYYVENLRRGVKRGMRENALKGYVNGKTPLGYRRGKDKKYEIDPYEAKAVREIFERYARNEPIIDIARWLNDNGYKTTTGGQFNKNSLRRILTNDKYIGVYRYDDIVIEDIVPPIIDRELFERVQSTFEYNKHFRAKQKAIDPYLLTGKLFCGHCGAMMIGESGTSRHGTTYRYYKCATRKREHTCDKKIERKEWIERIVVEYTKNYVLTDENIEKIAEKVVELITQEYSDKSMLAELTARLDDVTTRFSNLLKALEQGVISESVANRVSELEKEKKSLEKKIASEKMSKPTITKDMVVYWLLSFKNGDIDDESYQKRIIDTLVNSVFIYDDDNGNARLVLNFNTSSNNNVTIKVSDTTSLAIPTIKSLENTAFISVSRLFHCFIYVRILSENRSQSFPIVPKSV

SEQ ID NO: 13271 - protein, 567 aa, synthetic construct
MQPKKNNKIGITALYCRLSRDDGMDGESNSIVNQKTLLSQKAKEKGLTDIKFYVDDGYTGTNFNRPGFGQLISDIEMGYIYAVMVKDLSRLGRDYVSVGNYTDVYFPDHDIRFIAVNDGIDSEEGESEIAPFKNILNEMYARDISKKIRSSHRLRGSMGEPLSQPPYGYMKSAENKKKWVIDPEAADVVKSIFKMCLEGKGNETIARILQEKQILVPMAYWQSKGLPRGGKKTQPNPYKWCKTTIQKILSQQEYCGDVINFKTCSKSFKNKTRLPNDPENWAIFRDVHEPIIARGDFEKVQTLIAKTKRRAPKPQNGEKSIFCDLLFCGDCHGKLRHHTNTINKDIHYFVCANNKVDYRGECPGRHYVRADAVEQVVMLELRRMAEFLESDEEAFAELLAQKTDRELLKEKKHDEEELQKVTVRNDTVCRLYEKLYEDNATGKVSDEWFMQLSHKYEAERMELKAKIKALRQKLSECGQRESERESFTSAIREFMRMDRLTAPLLRELIDIEVFETEGKGKNRTQRIVIYYRFVGYVEIPEVSDRRHIKAETRRGVAVEYLTEPKTA

SEQ ID NO: 13272 - protein, 529 aa, synthetic construct
MSKYCIYLRKSRADLEAEAHGEGETLSRHKTALLELARRKGITISATYEEIVSGETIAARPQMQRLLSEVGAGEWDGVLVMEIERLARGDTMDQGLVAQTFKYSGTKIITPLKTFDPQNEFDEEYFEFGLFMARREFTTTNRRLVRGREASAKEGKYVGSVPPYGYRKVKIPNDKGFTLEIIEEQAKVVRMIFEWYAEGAEVNGQKKRIGPYTIAVRLNELGIKSVAGKDYWTIYGVQHMLINPVYIGKIRWGYRKVKKTVTPEGMKKKSREFAQDGNYIVVDGLHEPILSEELFYKVQDLIAANPPTPIKYRNNNINPFAGLIFCAKCGHCLSYRKGYGRHPGYLGCNIAGCNNKAAPFELIEQRVLSILNSWVKDYSVDKAQIKHEADLNAELSNAISLAEKEIETLQDQLDKVYSFFERGTYTEKIFKQRSSAIEQQITDISEKIDRLKSEHQQVLERQNVQAEFVPSIKHLLEIYDTLEPVEKNKWLKQIIDRMVYEKNANGKYRNVDPGDFTLGILPRLPKKGS

SEQ ID NO: 13273 - protein, 513 aa, synthetic construct
MLYAIYLRKSRADLEAEAMGQGETLARHRAALLDYAAHHGLEIGAVYEEIISGESIDARPKMKQLLREVEQGRWAGVLCMDIDRLARGNSADQARVSNTFRISGTLIITPSKVYDQSRESDEEYVDFELFMARREYKAISRRIMRGRIASVKEGHFIGSTPPYGYDKVKVEKGRGFTLLPNSESDTVKQIYSMCISGMGCNAIARRLDMMGVTPRKGSSWSSASIQDILKNPVYCGKIRWQYRKEEKSLTDGIVTTRRRENPDCIIAQGLHPALISEEEFEKAQQFLNSRRIPHKKESTELRNPLSGLVYCGMCGSMMTRLGTGSRNHSDTLRCPNRNCGNVSAKLELVESALVEGVARWLNDCRVNVSRKPAADTAKAERTAAEKVRAELAKLDSQREKIYSFLEQGVYSAGEFRERMESLEKRRTQLSENLRQAEQAVSEAEGNRQLYARIIPRVERVMDIYAQSTPEEKNRLLKTIISRAEYIKTERNTRGNADRCNFTLNVTPLFPETD

SEQ ID NO: 13274 - protein, 524 aa, synthetic construct
MPKKEALFMPKTEEKQAAKAVIYARYSSDRQREESIEGQLRVCEDYARRNNITILHTYADRAMTGRSDQRPEFQMMIRDAATMAFNVILVYKLNRFARNRYDSAKYKHKLKKYGVKVVSAMENIADDPSGILLESVIEGMAEYYSAELSENVLRGMTQNALEGKWPGGVIPLGYKLDKGGRLIINEEKAPIVRMIYQMFLDCMSVARIERKLNDKKYTTDAGKVFSRSRVYYILHNERYIGTFQWKDIKKEGIIPPIISKEAFHAVQERINAMKSSSYRTNNNYLLAGKAFCASCGAKVSGTSGKSQNGNKYCYYGCSHHHRSARYEYCETKNIRADVLEKLVCDKTHEILSSKKAIKEIARQAVKLRPRDESELEIRAIKNHISSCQKKIDNCIKAIENGVMSNALVESLNENERTLDVLKEKLAKASLMQGSGLLTEEKIQFFFETIREKAKETEKYNDILLTSLVRAVYICNEYVEIQYNYAEQLPILTNPVRIESCSYKCTNGGTIWIRTKDLFDVNEAL

SEQ ID NO: 13275 - protein, 459 aa, synthetic construct
MSTTHFYSHYPTIEYKTCALYVRCSKEEQAKFGDTIEAQIEDLKAFAKLHHLKIYAIYVDEGHTARKKYNKRKEFMRMLQDVELHKFEYIIFTKLDRWFRNIADFYKIQEILDNNGVTWLTALERYEMETTNGKLNVNIRLSVAQDEADRDSDRIKDVFRLKVKKGEAITGSLPIGLTVGENGKVDIDPDTVQIAYDMFDYFEAHNSKRGTLLYLIDKYNRYFCYETIARALRNPLYKGEYRGNPDYCPKIIDPARFDRIQVLGKRNVKVRKNNRYYVFSGLAQCKECGHALVANTTVQKRYNREYTQYRCNYYSNSHLCTHSHGMNEKVIEKYLLDNIKPELEKYVTAYDVKQNAPTKKADPSKIKTKMQRLKELYVNELIDLDDYRTEYEQYKQELDKLTSTAAPEVKDLSAIRSFLALDLQSIYDSLTPQEKRTLWSSIIDKIIISDGGDIEIVFL

SEQ ID NO: 13276 - protein, 528 aa, synthetic construct
MTKRKWGELMKTITKIEEIESVGPAKKIRVAAYCRVSSSSDDQLISLETQKAHYETYIRANPEWEFAGLYYDEGISGTKTSKREGLLSMLKDCGRGKIDYIVTKSISRFARNTADCLTMVRKLIDLGVHIYFEKENINTGLMESELMLSILSGLAESESISISENTKWAIQRRFQNGTFKISYPPYGYQNIDGQMIVNLKQAEVVKYIFAEVLSGKGTQKVANDLNQKGIPSKRGGRWTATTIRGILTNEKYTGDVILQKTYTDSHFNRHTNYGEKNMYLVENHHEAIISHEDFEAVDAVLNQRAKEKGIEKRNSKYLNRYAFSSKIICSECGSTFKRRVHSSRRKYIAWCCSKHISNITECSMQFIRDEDIKTAFATMMNKLIFGHKFILRPLLDELRSKNNAKSFRRIEELETKIVNNMEQSQVLTGLMAKGYLEPALFNKEKNALEAERERFLAEKDQLTRSVNGNIAKVDEVDRLLKFATKSKMLTAYEDELFENYVEKIIVFSREKVGFELKCGITLKERLVN

SEQ ID NO: 13277 - protein, 413 aa, synthetic construct
MNIRKIEAKNNKRKKRICAYVRVSTTNGSQLDSLENQKVYFEKLYVERDDVEFLGVFCDKGISGSKYDRPDFQTMLDACRKGQIDVIHTKSISRFARDLINVLEISRELKTLGIDIFFEEQNIHTLSNEDEVVLTVLASLAEEELQSMSGNQRWSFRRKFQKGELLINAKRFLGYDLNEKGELVINKAEAQIVRTIFYSYLEGMGTHRIAKKLNEGKVPTVTGKKWYDSTIRNILKNEKYKGSLLLQKYFHDGVNGPKKLNQGQVEQYYIEDNHEGIVSKEIWEKVQVKMKSRTRIQGTNKTYKFSRMLKCQYCGSTLKRQVSYKKKIVWCCSKYIKEGKNSCKGMRVPERDIEDWKLSLPVIVLERIEDGEKHYSYTGQKTSANSQISNSEKGQGSRLLSSVYRPRRTAIKL

SEQ ID NO: 13278 - protein, 430 aa, synthetic construct
MSTDQDEQLSSYENQVNYYREYILKHEDYELVDIYADEGISATNTKKRDAFNRLIQDCRDGKVDRILVKSISRFARNTLDCIKYVRELKELGIGVTFEKENIDSLDSKGEVLLTILSSLAQDESRSISENSTWGIRKKFERGVVQVNTTNFMGYDKDEKGNLIINHEQANVVRYIFDRFLEGYSPEFISKELREQEIPGCTGKAKWCPSAIWKMLQNEKYKGDALLQKTYTVDFLTKKRIDNDGQVNQYYIENNHEPILDREKWEIVQLEIARRKKFREQHKLQFYIMQKENNPFTTKVFCAECGSAFGRKNWTTSRGKRKVWQCNNRYRIKGQVGCLNNHIDEEMLEKAVMMAVSILKENRELLQSKWNKLMETDSSLEQYYSERLREIVSRNKWDFNGVEMCRILHSITISEKGEISVKFLEGTEVNL

SEQ ID NO: 13279 - protein, 519 aa, synthetic construct
MKKVTKIDKIQPAKNAENKLRVAAYCRVSTATDAQLESLEAQKNHYENYINSRDDWCFAGVYYDEGITGTKASKRPELMRLLADCKAKKIDFVITKSISRFSRNTMDCLKIVRTLLNLNIPVYFEKENINTGSMESELFLSVLSTMAEGESASISSNNKWSIKKRFENGTYRLSSAPYGYKLESGGLQVVSEQADIVKQIFRELLSGKGMYSIAKKLNAEQVPTQNGGRWTSTSVHNILTNEKYTGDCIFQKTYADSNFNRHINNGELNRYLIQNHHEAIISHEDFKAAAALIKQRATERRIESGSDKYQQRYAFSEKIICGECGNTFRRRIHKGKYNSYVAWVCNTHLSDTNRCSMLFVRDDALKLAFATMLNKLIFSYRLLLKPYLAVMQSNTADEALLRIQYLENQLDQNAEQRSTLHKLMAQGYIDQILYTQESNELLLQARDFRSEIEVLNNTVAGDTTKVYETERLINYCKRGEMLTDFNESLFELFVDHILIYSRQKIGFVLRCGLTFEEMI

SEQ ID NO: 13280 - protein, 468 aa, synthetic construct
MLYGKPQNYSWYRARVVLYIRVSTDEQARHGYSLGAQREALREFCDTFQCQIVAEYSDDGVSARKEIRRRPGLLRVLEAVKAGGVDYVLFIKLDRWFRSVREYYRVQDVLEAAGTNWKAILEDYDTSTTNGRLNLNIRLSVAQDESDRTADRIKFVFAERVKNGGAIFGSKSLPYGLEVADHRVQIVESQADAVRGMFDHYEATNSTRETHAWLRDQYGVDLPYNTIRNMLRNSLYCGEYRGNVNYCPAIISREQFQNIQKIVSRQGANRTRQSKYSYVFTGLLRCPVCGCTLKAFPQTDYKFHRVYLRYRCTQHWIDKRCTWKTTPWEPRLEHWLLDHIQPQLDAYIAQFDVQEAQRRRAVVDVGAIQRKLSRLQDLYVDGMIDRAAYDEKYQALIRQQEAAQAAQQSQSAGRDLEPLRQLLAGDFRSIYATLSPQERHTLWASVIDHIVVKDGRYGHFDLDVIFLP

SEQ ID NO: 13281 - protein, 462 aa, synthetic construct
MSFFTPNPALFGLRVVKYIRCSHDDQVLHGDTLEAQDLILDDFIKTNRLILVDTFVDEALTARKKFNKRKEFVRLLDGVKAHNFDLIIFTKLDRWFRNIGDYHKIQEILEANGVQWKAVTENYDTTTTNGRLHINIRLSVAQDECDRDSDRIKDVFAYKLQNKTYVSGSLPRGLKLDEGKHIIIDPEWNCFALDMFDHFEATCSKRDTQLFLQDKYGIRVCYDTVVRYLKNPLFKGQYRNDPDFCPKTISVERFDRIQNLADKNIRKKRSPRQFIFSGLLVCSSCDHYFVGASTYYKLANGTQVCRKSYRCGYHTESKLCDRSKTYREEYVEEYMLNHIRPALSDYITDFGVGTAGTINKNPAGEIAKIERKMKKLYDLFMDDLIDKESYRIEYESFKNQLEELQRRPTPPVRDVSAVKKLLNEDWESVYRTFSDHEKNVFWKSFVDRVRIYEDGSMDIIFL

SEQ ID NO: 13282 - protein, 528 aa, synthetic construct
MPTSKNMARKYAAGGGSDNSCDVEPLRAVIYARYSSSGQREESIEGQLRDCYDFAKKHGIIVIGEYIDKAMTGRVDRRPDFQRMMKDSEKGRFNCVLLWKMDRFARNRYDSAMYKYKLKKNGIRIFYAKETIPDGPEGIILESVMEGYAEYYSENLAQNVKRGNYDSALELKTLGKTCLGLKTGPDGRYMVDQAEAAIVRRIFEEYAEGERAKDIYERLNSEGYRTSRGGKFNKNSLRRILSNKKYIGVYEYEDIYVENGIPAIITDRDLFERVQKMLKINHDAPARGKAQNFLLTTKLFCGLCGSPMIGDGGTSHTGKAYAYYSCTKRKRGRSCKKESVPKDWIEDLVVGELVKIVHNDELIEQIADRVMEYQKREKDQSGLHALEIRQKENEKAISNMLAAIEAGIITPSTKTRLMELEADRADIEKGIAHELLAEPEFERDQIIYFLERFRSGDINDEAYRIMLVDTFLNSVYLYDDDHLVLVMNYSGENCKVDLKLVEGAVSGDGCKGSAFAPSSALIIEWEAL

SEQ ID NO: 13283 - protein, 510 aa, synthetic construct
MAKIIKVEQTVPTIKTKKKVAAYARVSMESERMNHSLSAQISYYSTLIQKNPDWQYAGVFADDGISGTSIEKRDEFKRMIAAAEKGDIDIILTKSIQRFARNTVDLLETVRRLKDIGVEVRFEKEHINSMDGDGELMLTILASFAQEESRSISENVKWGTRKRFEQGIPNGKFQIYGYRWDGDQLVVEPEEANIVKLIYDNFLNGLSAETTEKQLEAMGVKSYKGQHFGNTSIRQILGNITYTGNLLFQKEYVADPISKKSKINRGELPQYWVENTHEAIIPMEVYQAVQAEKARRRELGALANWSINTSCFTSKIKCGRCGKSYQRSNRKGRKDPNANYTIWICGTRRKSGNAHCRNKDIPETTLKQACATVLCLDEFDESVFSEQIERIEVPAPNEMLFYFKDGHTVPHHWESTLRKDCWTDDRRAAKGRYVQAHQLGPNSSCFTSRIRCDSCGENYRRQRSRHKDGSFDSVWRCASGGKCNRVQKLFTILSRRAPGPLRPGPPGRTR

SEQ ID NO: 13284 - protein, 580 aa, synthetic construct
MSVDIKWAIPQTGSQVTTEGDLAAVYTRYSSHNQGEQSIEGQLAAARRYAAEHGYTIVREYTDRAKSGRTDDREAFQQMLRDTAKKQFSVIILWKVDRFGRNREEIAINKMKCRKNGVRVEYVAEQIPDSPEGVILESVLEGFAEYYSLQLSQNIRRGLAKSAEKCKVTGGNRPLGYKTGPDKEFLIDEDNAPTVKLIFDMYAKGSTVKEIVDHLNQKGLRTLTGKAFTKNSLHTVLKNEKYRGVYTYKDIRVEGGVPRIVDDDTWYKVQEMLKINKRAPAKTWTRADYILTDKLFCGKCGGVMFGECGTSRTGVRHNYYTCSNRKKHHACDKKAVRQEDIEDLVIKATCNIFRDKELLDAIIENTWQYYLAQSDNQAELKGLTKQLNQTELAIKNLLRAIEAGILTEDTKARMDELTAQKAELKAAIADLQLARGFHLQKSHIAYYLTKLCDANYKDRDVQKRLIQTFVNAIFVFDDHLKITFNFSGDKNTVTLSTVQDAESGNVFGHRALCSTKIGKHRKMLADFILLFSVQRKFYVNSFSTLDKNPRSNSAVIVRNFCFFSTNYAFGACIQPLREVK

SEQ ID NO: 13285 - protein, 529 aa, synthetic construct
MQTIPIDLSALTPEERQQFADNPSVLSSDCEAVCCLYMRYSSDRQTEQSIEGQLRELIAYCKHHSYRVAAIYVDRAISAHASMDKRPAFQQMLSDSARSSWKTVLVYKLDRFARNREDSAIARMRLRKNGCNVESAKEGISKNPEGVILEALLEGMAEYYSLELSQKVRRGMSETARKGNSTGGTTPLGYTVVDKRLQIDPITSHLVEEAFRRYADGDTVAAICDDFNARGYRTTRGTKFNKSSFKNVFRNEKYIGVYKFDDVRTDNAVPRIISDELWRAVQSRLKTSEQAPARGKAKVPYLLSGKIFCGHCGAPMVGECGRGKGGKTYNYYSCANRKKTRLCDKKPVPKDWLEDVVAQDALDVLTDEIIEFVAEVAAQQSEEDIQKNTQIPVIRKKISEIEIKIRNLTKALECAPVAPDAIVERLAELEAQKKGLSTQLSDEERGVIPLTKESVVVYLKAVREKAVPLETQKAMLIEMLVNSVTVYDDEPGFLKFVTAYRLTQIPSKTYRVPTPAASSCSDIGRVGSP

SEQ ID NO: 13286 - protein, 544 aa, synthetic construct
MEKTVYKSNVPRVYTLYRVSTIGQVEKDDIPMQKQVCRDFAKKQGWVVIKEFSEKGISGYKVSAKDRDAIQEIQHDAALGKFDILLVFMFDRLGRRDDETPFIVEWFVKNGVEVWSAMEGQQRFDNHVDKLMNYIRYWQASGESLKTSIRTKTRLGQLTEEGHYTGGTVPYGYRAVDKGRVNKRNRTVLDLEIDEDEAEVIRLIFHKYVDEGYGAQRLSHYLHEQGIKSRDGKGFPNTTVNRIIKNIAYTGIIKNGESQSGYIDELRIIDVSTFSKAQEIMRQRTLPHGNVPLNCKGKSLLVGNIFCAHCGNRLTLTTSGRRVYRADGTVKYEPRMRYQCHYNVRHPGECDGQSGYGVTKLDGIVEKVIRMKFAEIAAAPESEILNHQHKKEIELARIRLDQANAHLAEKQKDLSDYKAETLKVIRGQSNLSVELLNALVKETETMIALAQTRIDAAQTEYESLLASAENLRQEYDRLLTWADLFDTCSFEAKKMIVAQFVKAVRVSRDYNIEIDFNVSFEEFQNFSVKNGEPVILQPPRSHTA

SEQ ID NO: 13287 - protein, 528 aa, synthetic construct
MNTATVRSVTVIPPTINPLTHISMAATRKRRVAGYARVSTDSDEQFTSYEAQIDYYTQYIQRNPEWKFVKVYTDEGISGTSTKHRTGFNEMIDDAMSGKMDLIVTKSVSRFARNTVDSLVTIRKLKEKGVEVYFEKENIYTFDSKGELLLTIMSSLAQEESRSISENVTWGQRKRFADGKVNLPYKQFLGYRKGVDGLPEIVPEEAVIVRRIYARFMEGLTPCAIAKELTADGIPTPSGKTNWPTTTVESILQNEKYKGAALLQKCFTVDFLTKKQKVNEGEVPQYYVEHSHEPIITPEDFDRVQNEFVRRKQLGRQYSGKSIFASRIVCGDCGSFYGPKVWSSNSKYRRVIWQCNNKFKGGHRCETPHLDEKTIKARFVDAFNAVLDGKGGILADCRLMQTTLTDCTGIDAEIERLLTEIDVVTELTRRCISENAQSSQNQQEYTARYNSLVERYEKAKVQLEQLRATKTAREAQAEAIGAFMFEVQELDAFTEFDEKLWLAVIDKVTVHTNGRMTFRFRSGTEIDA

SEQ ID NO: 13288 - protein, 434 aa, synthetic construct
MERVIERVDFQIPMQPKALRVCAYARVSSGKDAMLHSLSAQVSYYNSLIQSHSGWFYCGVFSDEAITGTKSQRDGFQRMLASCRAGEIDLVITKSISRFARNTVTLLETVRELKSLRVDVFFEEQDIHTMSADGELMLTILASYAQEESLSASENQKWRIRKAFENGELVNLRFLFGYNITASGIQVNEREATIVREIFTRFNGGESLSAISRDLNDRGCERPLGGTWCADRIRNLLSNEKYTGNALLQKQYRKNHIDKKLVPNRGELPMYYVAGSHESIIDQAAFDKAQVRLNELARQAEKREKPTRSTFSGLIRCGLCGSTYKRVTCRGKRFWNCTTFQTKGKAECPAKKIPAETLKSLTCEVLGADALDSDMVRSKITMIRAEKNNVVVFCMDDGSEIVKRWKDRSRAESWSPEMKEQARQRALQTRRGQE

SEQ ID NO: 13289 - protein, 610 aa, synthetic construct
MARKKNIAAGLDAVIYARYSSHNQREVSIEQQIAECTKHAAALGLRIVGTYEDRAISGKTDNRPRFQQMMRDAEKGKFQAVVAWKSNRIGRNMLQAMVNEAKLDDYGVKVFYAEEDFDDTAAGRFALRNMMNVNQFYSENMAEDITRGLYDNANKCMANGRQPLGYKRGADGKVMLDEPAAAVVREIFTRVAAGDLFVDIARDLNAKGIKTSKGAAWNKGSFQSICQNERYKGIYIYGNVRIVDGIPRIVSDELWYKVQEAMRVKKNPVGTRHRVGAEDYLLTGKLRCGHCGSYMTGVSGTSRNGELHYYYTCQKRRTEHACNKKNVRRDVIEPAIAQAIKMYCLTDDVIEWMADQTVQYWEKHDNDLQIEALEQQLAENKKATSNMLKAIEMGIITEATRSRMVELETENSKLTAQLSAAKRDVVKINREDLIDELHVLRSKDIHDREVQAELFKDFLVAAYIYDDNRLKLVFSFMGKDNSVEIPLETGEDPPDGEDSPDAKMFVLTPDCSTRKKSTAQECAVLFCCVCPAMQLLNSCWTFAESYGIILSAIAGIVHRLVYQPSKLRRWVRFPLPAPKDLNLERSGSFLFVLHWAVILQTGGGNATIEP

SEQ ID NO: 13290 - protein, 607 aa, synthetic construct
MRKNEEKIAIYSRKSKFTGKGESIGNQIELCKDYVRNMFGERYVELCEVFEDEGFSGGNLKRPAFQRMMADVRKRKFKAIVVYRLDRISRNISDFTGLIDELTKLDVSFVSIREQFDTSTPMGRAMMFIISVFSQLERETIAERIRDNMHELAKTGRWLGGTAPLGYRSKPVSKITIDGKERKSFCLEPVPEEIDIPKLIYDLYTQSDSLTAVEAELLRRRIKTKLGKNFSRFAIKAILQNPVYMVADEDAYDFFLGRKAEVCFPKSEFDGSCGIMAYNRTDQEKGRAMILLPMEEWIIALGKHPGIVPSKQWITVQQSLERNKSKGYRKPRNNEALLTGLIYCSCGERMYPKLTERRTGSGELIYTYVCKMKERSKRTRCNKRNANGNILDAAIIEQLKTLTEKDSAFMKQMEKSRQFYTGNREQYDTQLTKLREELAQNEKIVAGLLDSLGLVGDSIARPSMLRRIEELTEANRVIDCQIRELEGLVTANHLSDGEFDLLRQILAMFRENVDQMSVEEKRAAVRTVVRKVIWDGENAHVILFGAEDGDLDYPNIDERLSKAGEDDENDVEDLVDIECEESDINDAFIEENGTFTASKSRWGDGSK

SEQ ID NO: 13291 - protein, 485 aa, synthetic construct
MINDAKNNPEFKAVLVHKTDRFSRNLSNSIQYKKLLEEYGVQVIFVNERFENNPESHLLYHIMGSVNQFYNENLAREVMKGLKENAYQCKFTGGRPPLGYDVDKDLKLVINEKEAEAVRLIFEMSAEGYGYGETIDKLNILGYKTKKGLPFVKNSLYEILKNEKYKGTYIFNRSCSANALNKRNNHRRKPEEEIIRIENGCPAIVSSGLWHRANAVKKATRSSYTNAKNTYLLTGLIHCGECGGKFHGNVRYNKNNTNLVYRCSSKKNKRKCESKEIRCEYLDSFVIDKFVEFFFNDDNIKVITKQLNEQYNKSCISDLEYNEAKSTLKILEKSRNNLVEAIAKTGINDIMSDKIKEYEEQIKKTAEFIQKYEKQKIDRVITEDEVREQINHLKDYFYNPKNLIRTKYVLSQYIDRIDISNENVQVQFKVSMSQSDNTDGDCFCVHTEMIKRKYLFDYVCEKVDFEQWNIEKLNKSESEHRKKGA

SEQ ID NO: 13292 - protein, 509 aa, synthetic construct
MNVVIYARFSSHSQTEQSIEGQLKVCYEYAEQNHYTIIGEYIDRAVSGKYDNRAEFQRMISDSEKHAFEGILVYQLDRFARNRYDSAIYKSKLKKNGVRVLSARENITDDASGILVEGVLESMAEYFSAELSQKIHRGMEINAQKCLSNGSNPGLGFKVDKDRRFYVDEEEAKIVREIFERYASGETKAEIVKDLKRRKIKTSLGNDFTYNSLSRMLSNKRYIGVYMYNGQETPGGMPRILDDNIFYKVQDILDKNKKASARTHGEGEYLLTTKLFCGHCKNMMVGYGGTSKTGKQYHYYICKEARKKRCDKTIVSKKKIEDRVIAECLKLLTDDNIKFIAQKVSEECSKSPDNLTVKQLKKAIREADIAIENLWRGIEQGQSVPMLTKRLNKRQAEKDALEEQLAIEENKRICLSEAQILAFLYFICEMPLDDVNKRRAIINILVHSVYLYDAHFTLIINASKKPMSVDDIPLEEIEEAFNSDKTCTEQCSTMTSPAPPSRSRLHMQS

SEQ ID NO: 13293 - protein, 522 aa, synthetic construct
MGNVMLIPARRQVGSNARKQEEEKPKLRVAAYCRVSTDSDEQATSYEAQVEHYTEYIQKNPDWEFAGIYADDGISGTNTKKREEFNRMIDDCKAGNIDMIITKSISRFARNTLDCLKYIRQLKDMNIPVLFEKESINTMDAKGEVLITIMASLAQQESQSLSQNVKMGLQYRYQQGKVQINHNRFLGYTKDADGNLVIDPEQAETVKRIYREYLEGLSMDKIAAGLERDGILTGAGGKKWHTSTINKILRNEKYIGDALLQKTYTTDFLNKTRVKNNGLVPQYYVEGDHEAIIPKDIYLQVQEELVRRRVGKTSANGKKRNYSCNHCFSQIVICGECGEMFRRLHWNNRSVKSIVWRCISRLESTGLECHARTINELVLQDAVVKAINQMLGDKSNYQAQLQLNIAAVIRASQATAIDSIDEKLMALQQELIQKANSKEDYDEIADEIFRLRELRQKTTVDTAARDEQIKRINDLQDYISQQTSYLTEFDEALVRRWIKQITIWDDRITVELKSGVSIDVDA

SEQ ID NO: 13294 - protein, 486 aa, synthetic construct
MRRVVIYVRVSTQEQATEGYSIGEQLERLRLYCQAHGWILVEEYIDPGYSGANLDRPAISKLISDIGSGTFDTVLVYKLDRLSRSQKDTMHLIEDVFMANNIDFISMSENFDTSTPLGRAMIGILSVFAQLERDQIKERMGMGKEARAKEGKWQGGSTVPVGYEYDVSTGELIINEYEAMQVREVFNLVLSGMPYKTIANKLTAKCYTYNAISGHVGIWDAKRIKYVLTNKLYIGYIRYKDTWFPGTHEPIIDTETFEKAQLLFKERSASNVVCIKKRQGQTSYLGGLLYCKKCGARYARNSGKKWKNNEPPLYYSCYSRSHKVPKMIKDPNCKNKTWRMTDLDNIVLDEIKKLSLEPEYINTIKERETSKQATSNKADILKKEIRKIEEQVSRFLDLYGLGAFTIEQVTAKVQPLNQRKQDIEQELTELVTDETILSEDETREIVRNFDKVLERSDFNEIRMTIDSLVRYIELNDDTVYIHWKFT

SEQ ID NO: 13295 - protein, 445 aa, synthetic construct
MKNKRVALYIRVSTEEQARQGLSLDAQLADLRSYADKHNYKIVGVYTDDGASARKKPFSRRAFKSLIEDIKQNKIDRVLFIKLDRWFRSVKDYYKAQEILDMHEVDWETTQEDYNTTTTNGRLMLNIKLSIAQNESDMTSDRIHFVFAQKRARHEICSGKVPFGYSVQDKKLVPNENAKYVQPLFEHFVKTQNLTEAARWMCGHGFYYTYASISHVLKNERYIGRSHGDDNFCQPLVTEDVFYKAQKIIKSKKLIKRTPTGRIFLFTGLIRCPMCGHPYTGIGCVGKNNGKTYYYYQCPQSVSPFKPCTHRGRVAEKKLEEALLDSFDKAYRDFQYSVRKKQKQQPVTTDVEKLKRKLERLKELFLNELIDLDEYKKTHAELSAAIVEAETPKIQPSTPLNYYLPGGIRPYYEKMTREQRRQFWQQTVDRIDLDEDDTPRITFLS

SEQ ID NO: 13296 - protein, 413 aa, synthetic construct
MNIRKIEAKNNKRKKRICAYVRVSTTNGSQLDSLENQKFYFEKLYAERDDVEFLGVFCDKGISGSKYDRPDFQTMLDACRKGQIDVIHTKSISRFARDLINVLEISRELKTLGIDIFFEEQNIHTLSNEGEVVLTVLASLAEEELQSMSGNQRWSFRRKFQKGELLINAKRFLGYDLNEKGELVINKAEAQIVRTIFYSYLEGMGTHRIAKKLNEGKVPTVTGKKWYDSTIRNILKNEKYKGSLLLQKYFHDGVNGPKKLNQGQVEQYYIEDNHEGIVSKEIWEKVQVKMKSRSRTQGTNKTYKFSRMLKCQYCGSTLKRQVSYKKKIVWCCSKYIKEGKNSCKGMRVPERDIEGWKLSSPVIVLERVEDGEKHYSYTGQKATANGHISSSEKGQGSRLLSSVYRPRRTAIKL

SEQ ID NO: 13297 - protein, 428 aa, synthetic construct
MSTDQEEQLSSYENQVNYYREFILKHEDYELVDIYADEGISATNTKKRDAFNRLIQDCRDGKVDRILVKSISRFARNTLDCIKYVRELKELGIGVTFEKENIDSLDSKGEVLLTILSSLAQDESRSISENSTWGIRKKFERGVVQVNTTNFMGYDKDEKGNLIINHEQANVVRYIFDRFLEGYSPEFISKELRKQEIPGCTGKARWCPSAIWKMLQNEKYKGDALLQKTYTVDFLTKKRIDNDGQVNQYYIENNHEPIFDREKWEIVQLEIARRKKFREQHKLQFYIMQKENNPFTTKVFCAECGSAFGRKNWTTSRGKRKVWQCNNRYKIKGQIGCLNNHIDEEMLVKAFMKAVGLLKEHRSDVVAKWQKLEQGANLLHKHYAKQMYQILDLDKFDGAIMNQVLDHINISETGQIVVTFLEGTEVDL

SEQ ID NO: 13298 - protein, 588 aa, synthetic construct
MRIVNKIEAKTPQMPRRKRVAAYARVSMESERLQHSLSAQISFYSSLIQSNPAWEYVGVYADNGITGTKADAREEFNRMIADCEAGKIDIVLTKSISRFARNTVDLLNTVRRLKELGVSVQFEKERIDSLTEDGELMLTLLASFAQEESRSISDNVKWGTRKRFEKGIPNGRFQIYGYRWESDHLVIHEEEAKIVRLIYDNYLNGLSAETTEKQLAEMGVKSYKGQHFGNSSIRQILGNITYTGNLLFQKEYVADPISKKSKINRGELPQYFVENTHEAIIPMEVYQAVQAEKARRRELGALANWSINTSCFTSKIKCGRCGKSYQRSNRKGRKDPDANYTIWICGTRRKTGNAQCQNKDIPEQMLKEACAEVLGLDTFDEIIFSEQIDCIEIPAPNEMVFYFKDGRIVPHHWDSTMRKDCWTDERRAAKGRYVQEHQLGPNSSCFTSRIRCDSCGENYRRQRSRHKDGSFDPVWRCASSGKCQSPSIKEEVLKKLCAEAMGLESFDEMAFREQIACIHITAPFQLSIRFFDGHTFEAAWENKRNMPRHTEQRKQHMRKVMIQRWREKRGESNDDTGDNQSLHCNADQ

SEQ ID NO: 13299 - protein, 523 aa, synthetic construct
MAKVTTIPATISRFTATPINEKKKRRTAAYARVSTDSEEQLTSYSAQVDYYTNYIKSRDDWEFVSVYTDEGITGTNTKHREGFKRMVADALAGKIDLIVTKSVSRFARNTVDSLTTVRQLKEKGVEIYFEKENIWTLDSKGELLITIMSSLAQEESRSISENCTWGQRKRFADGKVTVPFKRFLGYDRGPDGNLVLNKDEAVIIRRIYSMFLQGMTPHGIAARLTADSIKSPGGKDKWNAGAVRSILTNEKYKGDALLQKSYTVDFLTKKKKVNEGEIPQYYVEGNHEAIIQPEVFELVQQEMERRKTSGGRHSGVHLFSGKIHCGQCGEWYGSKVWHSNSKYRRVIWQCNHKYDGEEKCSTPHLTEDEIKAMFVTAANKLIGKKAAIISPLRASLDIAFDTSTLEAETEKLQEELMVASDLIQKCIYENAHMALDQTEYQKRYDSLTARFDTAKARLEEIEAAIADKKSRRAAIEAFLDTLAQADLMDKFDPALWCGLVDYVTVYARDDVRFAFKDGQEIRA

SEQ ID NO: 13300 - protein, 434 aa, synthetic construct
MARTIKKVEFLPKMPKLLNVAAYARVSSGKDAMLHSLSAQVSYYSEKIQKHTGWKYCGVYADEAATGTKDNREQFQKLLEKCRAGSVDLILTKSISRFARNTVTLLETIRELKDLGVDVYFEEQNIHSLSADGELMLTILASYAQEESRSASENRKWQIRKDFKEGKIGSITIFGYRRNADGILEIEPTEAEIVKMIFSDYLSGMGGLKIAKKLNEMGIRTAQGNLWTSPRIKELLSNEKYVGDMLLQKYFRNNHIEKRKMQNNGELPKYLVEDAHEAIIDRDTFQKVQELIAQRQSKFSHTGSKNRYPLSGMIQCGCCGKNYQRKVFKQGSAWICATFARRGKKYCPAAKQIPENILQSVLCEVLGLEKYDDDAVLKYIRQIIVPEPNELIFIFYNGKQVQKHWENPSRSESWTEEMKQKAKERSLQWHEKSQ

SEQ ID NO: 13301 - protein, 507 aa, synthetic construct
MNVVIYARFSSSGQREESIEGQVKICTEYAENNDYTVIGTYVDRALTGRNDKRPDLQRLLSDSNNNNFQAVIVYSIDRFGRNLQQCLTNENKLKQNGVALFSATEHFTNDPAGIFYRNLMMAHSQYYCDELSQKIRRGMDINAEKCLSTGGNIALGFKVDDKKNFQIDPDTAPIVQYIFESYASGKTVTEIINQLNSQGLKTSRGVPFNKNSLHSMLKNKRYIGIYTYKGTEKIGGMPRIISDELFNKVAEIMDKNRKAPARARAKVEYLLTTKMFCGYCKEMMTGFSGTGKSGKVYRYYVCNGTKKKACKKKKVNKEYIEDLVVNECRKLLTNENIKKIANSISKISESEKDTAHLKFLKKALSENERKHKNALNAIIECDLESVRKSLYEQIPILEKEHSELQKQIALEEKNFPVLTVPMVHFFLRKLKDGNVDDIKYRKTLINVFINKIYLYDDKLTIIFNSGDNPVTINDFLLSEIEDNSKKAEGLFLDGVAPPYLHPYFDTK

SEQ ID NO: 13302 - protein, 667 aa, synthetic construct
MAYAKNKVVKLWTQKKAALYVRVSTRYQVDKDSLPFQRKKLKEYCKFLEIDKYVIFEDDGYSAKNTDRPHFQEMMSRIRTGEFSHVIVWKVDRVSRNLLDFAAMYQELKDHKVTFISMNEQFDTSTAIGEAMLKIILIFAELERNMTSERVTGIMLDRAEQGLWNGARMPVGYRWNEQTKFPEPDPEEVKIVQLIFDRYEEWRSSIKVARFLNNKNFKSKRGGEWTSRLIYDIIRNPFYVGTYRYNMRESGRGPLKPESEWIVRENNHPGIISKDQFDRCNKIMDENASRRDTSEMRARKFVHTFSGRLVCSNCGSNMIACKDHARANGWRPSIYRCAKRSRMMTCDNSKTVNETYLGTFVFNYIANLARVQKNFTKITSTEKLESELLKGEAFEAVSGIIHDSLNSTFQALLYSNLGNGTYVPDIALLSKFDEVQDHNQIDLLNTEIEKSKNAITRLTDVYLYDPASMTKEEFAAKKKELIKKIEEMEHQLAELLDNSEDNDLTDLSFIKKASAFLVTQRIVSKSFIDYVQMAQELDNEILKNFVDQIVDRIVIKDGRIQSITFVNGLTHEFFYSRPAELPVCKKCGGRIGSTCGCRTRTFSFNGKRYQRIKVGDPRDALYGQKNPVCPECYAKEGRWHHWLCGIELCPICGKPLQTCEHGPNGKE

SEQ ID NO: 13303 - protein, 564 aa, synthetic construct
MPRAQKAAIYCRVSTLHQVDKDSLPMQRQDMINYARYALGIEDYEVFEDAGYSGKNTDRPAFQDMMERIEAGEFSHVLVWKIDRISRNLLDFATMYARCKKLGVTFVSKNEQFDTSTAMGEAMLKIILVFAELERNMTSERVSSTMNARAAEGKWNGGRVPFAYRYDRETDSFSIRDDEARIALELKDIYLRTHSLTYTARLLNEAGRRTRRGYAWTPATVAIILRSPFYRGTYRYNYRDESETTFSFKNKNDWIMCAKHHPPLFSEADCRQIDFWLTKNQRRHGKATHVQRKLVHVFAGLIRCGFCGSNYIASIDRVRASGYQPSMYNCGGRRQKGMCKNRYVTDIRIGGFIFNYISNVIRLRDAFRPQWSKARIQRFLLHGDDFCGASLSDDALRRVRAALLGSRLSTAEYQPADEQHDDSATQTRKANLQAELEKNRRALSRLMHLFLYAEDEMPQADFLREKKHLQDTIARLQAELEKARQSSVFASSLTDEEFLDKAARLLFQSAMVRGGIDFPELAMRVGNLELKNFVNAVIKQIVVLDGHVTQITFVNGETHTFLYH

SEQ ID NO: 13304 - protein, 529 aa, synthetic construct
MAGKVTCIPATKNRFTALPVTSVSKRRVAAYARVSTDSDEQFTSYAAQIDYYTNYIQQHPEWEFVKVYTDEGISGLNTRHRDGFNEMIADALAGKIDLIVTKSVSRFARNTVDSLTTIRKLKEHGVECYFEKESIYTFDGKGELLLTIMSSLAQEESRSISENVTWGMRKRFADGKVSMAYKQFLGYEKGPDGTPAVNEKEAEIVRLIYRLFLEGKTPFGIKEVLEAAAIPSPSGKSKWSVTTINSILRNEKYKGDALLQKSFTVDFLTKTMKPNRGELPSYYVKESHPPIISADEFDMVQAVIERRSRQGRGYSGNSIFSSKLFCGDCGGLYGAKVWHSNDAYRRVIWQCNRKFSKTQEQCKTPHLTEDTIKEMFLKAYNRLMRQRKQLIEDCELMKSLLTDCAEQEAGMEQLRQEIEEIADMTQNLVRQNTRQIQSQEAYNAKYNALVERYEKASAKHDKLEAEIARRNNKARQLASFIDHLEKAPTSLEEWDSQVWSLLLEKGTVNRDGSIAFEFRNGKEIKVEAK

SEQ ID NO: 13305 - protein, 420 aa, synthetic construct
MPAIAKRERVAAYARVSCGKDAMLHSLSAQANYYSQYIQQNPAWEYAGVYVDEALTGTKDSRPEFQRMLADCKAGKIDRILTKSLSRFARNTVTVLESVRMLKSLGINVYFEEGNIHSLGADSELILTLLASFAQEESLSVSENQKWRIRKGFEQGEVMCWRFMLGYRIEHGKVEIDPDGAEIVRDIFRRAIAGETYGSICRRLNAQGKTGALGKPFRSAHIRDILTNEKYTGNALLQKTFVRDHLSKRQVANEGELPQYYATETHPAIIDEATFEAAQEIVRQHAERRKDCAQPQRSEFTTKIRCPFCGQAYKRVTSNGTVGWNCSTYQDKGKRYCRGKKIPEAVLKALVADVLELPCYEAPEMEAQIDHIEVPADNHLTFFLKNGHIEERIWKDRSRRESWTPEMKEKARQNAMKRKR

SEQ ID NO: 13306 - protein, 465 aa, synthetic construct
MPKTEEKQAVKAVIYARYSSDRQREESIEGQLRVCEDYASRNNMTIIHTYADRAMTGRSDQRPEFQMMIRDAATMTFDVVLVYKLNRFARNRYDSAKYKHKLKKYGIKVVSAMENIADDPSGILLESVIEGMAEYYSAELAENVMRGMTENALEGKWPGGVVPLGYKLDEQHHLVIDGPKAEVVRLIYQLALEGHNQKYIIDELNRRHYTNSAGGPFSYNTLRTILRNEKYIGVFTWGTVRRENACPAILDKATFEAVQEHLNFRTKHHIRSCNEDFLLTGKLFCGCCRSKMIGVSGTSKTGAIYYYYACAAHLKKKCKTRNIRKDAIEDLVCEVTTRILSSKEAVEAIARQAIEMQKNKKDSLELQAIKNQIADINKKLQNCVKAVENGLISETITNHINEYEKELTRLKDDAARVKLLDGDIELTQQHIEFFFWSIAQKIKVADKYKSILLSSIVRSVIVSKD

SEQ ID NO: 13307 - protein, 521 aa, synthetic construct
MKKVQVIPATLQNYTEKPIHSQKKRRVAGYARVSTDRDEQLTSYEAQVDYYTNYIKGRSDWEFAGMYTDEGISATNTLHREGFKSMIRDAMDGRIDLIITKSVSRFARNTVDSLTIVRKLRDNGVEIYFEKENIWTLDAKGELLITIMSSLAQEESRSISENVTWGHRKRFADGKVSLAFSHFLGYDRGADGNLVVNKEQAETVKLIYRLYLSGYTFHSIAKKLTEQKIPTPARCKIWRPNTVRSILMNEKYKGDALLQKKFTVDFLTKKSKRNEGEVPQYYVQNNHEAIISPQVFDLVQEEMRKRKNSKIRHSGISIFSSKIKCGQCGSWYGAKVWHSTDKYRQTVYRCNDKFKRHCKTPHLTENEIENIFVRAVNQLIKNKDEILSNIILLKIRLVDTTDLEKKRNALEFNMNLLAERVQQLISENACLTQDQVQYNQEYSELVNRYEKIKIKYDQICDTMKQRTSRGQQLERFIENLQKQEFISIFDKRLWCSLVDFITVNERDDIWVTFKDGTEIKA

SEQ ID NO: 13308 - protein, 547 aa, synthetic construct
MEKKMWKIEQKVTEISKRKRVAAYVRVSVESERMQHSLSAQISYYSSLIQKNPAWEYAGVYADYGITGTKIIKRKEFQRMLADAEARKIDIILTKSIQRFARNTVDLLKTVRHLKEIGVEVWFEKENICSLSGDGELMLTILASFAQEESRSISDNIKWRFQKKYEKGIPHAKFFIYGYRWKDGELVIQNEEAAIVRRVFKGDLAGKTRRDIQRELANIGAHTMYGNLFQDSTIKQMLQNPVYKGNLVIQKTFVIDPITKHQVINHGEKDKYVVENHHEAIIDAATFNQVQEEMAWRKEAGKQRGGYARNFLNTSCFTGIIKCGICGKSYIHNIRKYKGKPSEYWSCLSNKGKAEERCGAYGAIPQPALERACMSALEMAIFDKTEFLQRVEKIVVPAYHSLLFYLKDGKVIKQPWKSTALKDMWTEKRKEQVQQRMVQYRKSGLSSRYSAFSERIFCPACDVKFVRCLETRKNRRVAYWRSRNKHKCVHTSGIQEDWLKKTAAALLGESTFDEQKFREQVEWIEVQKNRTLLFRFYSGENKEVQLP

SEQ ID NO: 13309 - protein, 574 aa, synthetic construct
MICVDSNGQAIEISVADQMWLDDAYFKGKQIHLEADAPRVALAYRVSTKGQVDHDDIPMQKIDCRKFAQKQGWRVVKEVAEKGVSGSKVSASKRDAIQQLKEEAANGEFDILLVYMFDRLGRIESETPFVLEWFVQHGIQMWSTHEGQQKIETHGDKLMNYIRFWQAAGESEKTSIRTRDRIRQIVSSGHYTGGFVCYGYQLVDQGRRNKRDKPVMDLVVNEEEAAWVRELFYKVVHEGASGYALAEMLNNRGLRTRAGAKFQSSNILRIIRHEGYTGYIITKNARSEYIPELQIIDRETFDKANDIINRRKAKSEQERKIAHTSQNPTLLAGIVYCAHCGAKMSGFMHTDRYKLADGSIREKVQPKYNCFQRGQKNKGGRDCDGQALYLAERVDAIVLQAVSKIFEQIRDTPYSRMAENRIRQESDLQKSKRASVEKKIKTAQHALERFEGEILKCLDGTSNFTEDMIAKQIRRYQQELDDAKAEYAELQNARLNEAAEIRKLRTYYDDFRGWAEEFDAAPLEMKRMILSHLIDRVEVGRKYQVTIKLNMEYQQLLDNTVEAICEEGLETQRK

SEQ ID NO: 13310 - protein, 543 aa, synthetic construct
MTDKITALYCRLSQDDMLQGESNSITNQKAILKKYAEDNGFSNTVYYVDDGVSGTTFERDGFKAMMADVEAGKVSTVITKDLSRLGRDYLKTGEYIEIIFPDYDVRYIAINDGVDTLKSENELMAFKNIFNDWYARDTSKKIRAVFKAKGQSGKHLSSPIYGYKHSETDKNLWVIDDETAEVVRKIFRLCIDGYGPAQIARILTEEGIPTPTAYALSQGRDNGHKNAKLDRWGSETISGILEKPEYCGHTVNFRTHVKSYKNKKRVNNPKEDWLIFENTHEPIITQQEFDLVQELRKNKRRPTKHEEVNPFSGMVYCADCGKKMYLCRATSLTADQEHLKCSTYSLDKDACSAHFIRTIVMKEIILGELNKMISFVKENEDEFVQAAMDNSIQKQSSELAKSRKELRDAEKRIAELDRLFIRLYEDNVSGKISDERFSIMSAGYEDEQKKLRATAAELADFIETAVQKSADVNAFIQVVQKYENITELTPEIMHELIEKIVVHAPDKSSGHRTQEIEIYYRFNVAVATAVADSMKYDKKRKAA

SEQ ID NO: 13311 - protein, 521 aa, synthetic construct
MRAFIYCRFSSHKQQELSIEGQRDICQEYADKHNITVVGQYADRARSGKTENRADFRRLMRDAATGVVDCVLVWRYDRFFRNRAESALYRKQLEAAGVHLISVTEYIPEGSAGIITQGMIETVAEYFSAKLSEDVSRGMNKAAQHCQIVGRAPLGYRAGPNKRWQIDPVGAELVRRIFEWYASGKAMGQLAAQLNEEGHRTTNGTLYTRSSFNSILRNEKYIGVYSYGGEVRIEGGCPRIIEDELFFTVQRRLSANRHRPGAYKAEVPYLLSGKLFCGLCGAPMTGTAGTSHTGARHYYYICNNRRAKTCKKKNVRLDLIEEAVLQSALDILTDENIAYISTEVERRCAENSDSAALLASLNAQLEEVQRRLKNIGNAIAQGIITETTKELLEEAEADRTALRQQIDRAKVQAALVVKAEAVACWLDGFRRGDRTDPDFRRQVFGALVHSVFVYDDYLKIIFNVDSAGAAVVPYEAAQAATPSEAPPGSYLDTLGAPEYLAILLRGIFVLQKPCIDPRGGA

SEQ ID NO: 13312 - protein, 528 aa, synthetic construct
MNNKAVLYLRLSKEDRNKVNKGDDSESIINQRIMLSDYAMQHDFQVVKIYSDDDESGLYEDRPGFSQMMQDAQTGLFDTIIAKSQSRFTRNMEHSEKYLHHKLPLWGIRFIGVVDGVDTLDENNKMVRQIKGLTNEWYCEMLSKSVRSVFHSKMNQGKFVGSSCPYGYMRDPEDHNHLIIDEYAASIVRKIFRLYLEGNGKAHIGSILSSENILIPSLYKTRVLQQNYHNSKLKDTTKTWCYQTIHTILNNQTYLGKMIQHKDIKISYKDKKKRRLPKDQWIIIDNTHEPIIDQETFDRVQALQKIKRKSVNTEYSDNIFAGILFCADCKHAMNRAYAKGNKKGSIGYICKIYKTMGKKHCPSHMIKNEELEEAVLSSIKNEARKILTEDDISDLDKVQKIDSREQFYKKQMQIVDAELEKYQKFKKRAFTGYMEEMITPKEYRSYVAEYEEEMSKLEKQKEEILTKLADENSLQNQHDEWVEAFKDYINIEKLTREVVIELIEKIEVHEDGGLDIYYRFRNPFQVAN

SEQ ID NO: 13313 - protein, 526 aa, synthetic construct
MDEYCLYLRKSRIDLEAEANGQGDTLARHRAALLKLAQKRGFNITGCYEEVRSGESIAARPEMQRLLNDVEDGRWAGVLVMEVERLARGNTTDQGIVADTFKYSDTKIVTPNKIYDPGDEFDEEYFEFGLFMSRREYKTINRRLQRGRRASLSEGKYIAGKATYGYERYKLSGEKGYSLRIIPEQAEIVRQIYDWYVNGELLPDGTLRPLGSYTIAKRLDARGIPSPTGGKWPPCTVKDILTNPTYIGKLRWSYRPTVKRMVDGELVKTRPVDRSVHLSDGRHEPILDEVLWHRAQLMLKNRSHAPVPKSTNIRNPLAGLLICSKCGRSMERRKFKHGRDTVACPNKDCTCKSSVLEEVEAGMLDSLRIWLSDYKVKLAQSQETISHTGPTAEQEITSLQRTLGTLQAQMENLYNLVEQGVYSTDLFLQRSQALTARMAEVNQQIESTQAALTASRRIARNRFEIIPRIERVLALYPTLTDPREKNTILKEVLEKILYTKTTGSRWEASDMNLYVFPRVETDGEQL

SEQ ID NO: 13314 - protein, 581 aa, synthetic construct
MAYRSTITPPSAASRKVKAALYIRVSTLYQIDKDSLPFQRQELINLAKYMLGTDDYEVFEDAGYSGKNTDRPSYQRMMTRIRQKEFSHLCVWKIDRISRNLLDFAAMYDELKKYNVTFVSKNEQFDTSSAMGEAMLKIILVFAELERKLTSERVMGVMLDRASKGLWNGARMPLGYKWDTNAKFPVIDADEAVTIRFIFDKYEEVKSTLQISRILNRNHIKTKRGGEWTSKTVNDIVRNPFYKGTYRYNYRESARGAIKNEEEWIIVPNALPAIITEEQWTRCNALMDSHHETKDTSSFRVCHTHIFAGILKCCDCGGGFSSNRDRPRLSGWRPSTYRCTRSAKMQDCPTFGISDVVLGPFIFNYIANFVRLQRKGTNYTVESIEKALLSGKPFENIAGIDSASLEETLLALKQYNSSSNAANYSPDLLEELPNQSDNGSNIDIELLRQEENKYKTALQRLLDLYLFDPTAMPQKDYLLRKEELEGKLQEVQASIKRNSASTPEAAGATDISFIKKASAFIISQRILSKQDIDFEDLIQKCTPELLKDLVNSTIKEIGIRGKRVEYIEFQSGLRHTFIYKD

SEQ ID NO: 13315 - protein, 590 aa, synthetic construct
MRVSVNLNAQKPDTTTNAVIYARYSSHGQTEQSIEGQLAKGHEYAAAQGYTVVHEYIDRAMTGRNDNREAFQKMLSDTGKHQFQVIIVWKVDRFGRNREEIAFNKHTCKKNGVRVEYVAESLPNSPEAVILESVLEGMAEYYSIQLSQNIRRGQLESAKKCQCVGGSVPLGYTLDSDKHFVIDPQTAPVVKKIFDLYAEGATISEITGQLNEQGIRTIRKQLFTKNSLTKLLKNEKYIGVYTYKDIVRVEGGVPAIVDKSTFDRVQELLKINRRAPSHTWTKVEYLLTDKLFCGHCGSPMVGESGFSHTGAKYSYYGCIKRRREKACDKKPVRQDWIEALVLDETVKLLHDDELMEYIIDRTWEYYQVTDKVQEEKAVLEAQLAEVDKAINNLVRAIEAGIFNAATKSRMDELDAQKAALTASLADLELTSGIRITRDHIEYFLLRLRDLDVKDRECQKRLVQTFVNAVFIYDDGRVKITYNYSGQSSTITLNQIASAEKGKGFVCCLPCSTSSPRFPRGVAALFLFWGKPGVNRLPISAVLCYNGSENGGGGTENEKAACCVPDGARLLGLCGVRGRNAGRRYGHVRTI

SEQ ID NO: 13316 - protein, 468 aa, synthetic construct
MLYGKPQNYAWYRARVILYIRVSTDEQARHGYSLGAQREALREFCDTFQCQIVAEYSDDGVSARKEIQRRPGLLRVLEAVKAGGVDYVLFIKLDRWFRSVREYYRVQDVLDAAGTNWKAILEDYDTSTTNGRLNLNIRLSVAQDESDRTADRIKFVFSERVKNGGAIFGSKSLPYGLEVRDHRVQIVEGQAVIVRAFFDHYEAAHSTRSTQVWLRDQYGVDLPRATIGRMLRNGLYCGQYRDNKNYCPAIISPDQFQRVQEILARQASGHTRQSKYSYVFTGLLRCPVCGCTLKAFPQFDYKWNRLYLRYRCTQHWIERRCSWKTTPWEPRLEGWLLDHIQPQLDAYVAQFDVQEAQRRQAVVDVSAIQRKLSRLQDLYVDGVIDRAAYDEKYRALIQQQDAAEAARAAQSAGRDLEPLRQLLAGDFRSIYATLSPQERHTLWASVIDHIVVKDGRYGHYDLDVIFLP

SEQ ID NO: 13317 - protein, 544 aa, synthetic construct
MPAALAYCMASVNLVFAWADLRIYYTIISLVLERRTDYIMTKNAVIYARFSSDKQREESIDGQIRECRAFAEANEINIINTYIDRAMSARTDQRPSFLQMVKDSAKHLFDYVIVYQLDRFSRSRYDSAIYKHRLKKNGVKVLSAKENIKDDPSGILLESVIEGMAEYYSAELSQKVKRGMTENLLEGKWIGGIVPFGYELTSENKLAISPTTGHLVSEIYDKYLSGVKTTDILSKLNSLGIKTQRGCNFTRNSLNRILKNQIYTGTFTWAGTSYPDYAPALITQEQYTAMQNLFESRKRKSNTARRVSPQYALTGKIYCGTCGLPMTGYCGKSHTGTTYYYYQCSSKNNKSEKAARSQIACDAKNISRDKLEKLVLDTTISILKNKDAVKCIADQCMAIQKAELEHKPAEQLRLESQIKEIEKRLKNSVKAVENGLISQTITNNIETYEKQLTELNTQLDGLKLETHIIPITEEAVIYYLNQLTERANKKDGYSLDTFDDFIRRVVVTGKRVDIYYNYTAVPNILENPAVKMLRGSSEDCLVTR

SEQ ID NO: 13318 - protein, 537 aa, synthetic construct
MSDTNKITALYCRLSHEDELAGESNSISNQKDILQKYADEHGFYNTAFYIDDGYTGVDFERPAFKRMIDDVDNGRIGTIITKDLSRLGRNHLHVGLYTEEYFPRRNVRYIAINNNIDSDNPDSSAVDMAAFYNIFNEFHVKDTSRKIKASCVIKSERGQRVASRPPYGYMKSQEDHNKILPNPETALVVKYIFQLCADGLGPAQIAHRLEEEQIYTPAMYEYSQTGNVISNFDTSYPYRWNPTAVANILEDVSYLGHTCNFRFGRASYKDHRKLKLPKSEHKLIENTHEPIIDINIWEIVQRLRQSKRRFTRSGEKSIFAGIVFCADCKQKLYFHRHAREKSENWKFICSSYRKNSREQCTMHGIKESHLKEIVLHEIRNVTAFARERTDDFAEYISRESNTAAKKELSEANKKLKKSEKRLAEVGIIFRKLYEDHVLGTIDDDQFRMLSQGYTDEQNQLKAEISDLKHTMQELQSQTANTARFAALAKKYTDITELTQEILHTFVSRIEVHEKLKDDNGSITQEIDIYFTHIGIVK

SEQ ID NO: 13319 - protein, 516 aa, synthetic construct
MARKKKVSPGNRLVAYYRYSGGSQQTEQSIEGQRRDCEAYARQHGLTIVHEYIDRHISGRGVESRLAFQQMIADSSKHLFDLVICWKTDRFARNRYDSAVYKKKLRDNGVRILYAAESSVEGPEGIILEGLMESLAEYYSAELAQKMRRGMRESALKGKAINPNRPLGLTTDEHKRFIIDEKNAPTIRFIFEHYAAGESSASIVDQLNAAGLRTSKGNSFNKCSIPRIIQNEAYHGVYICKAYDVRIDGAIPAIIDDDLWKRAQKMLTLNKQHRAPHSSHADYLLSGKLFCGCCHSLMRGISGHNCRNDVYYYYACGNKADGGTCKKKNIPKDVAENLVVNAICENILRPDTLEDLADAIAAAQQADVNKPDPERAMLEQNLADVRRKINNIIESIENGTASSRLSARLADLEQQESTLNYQLESLKEVHPPVLDRERILFLLEQFLISPNERTEDYNRRIIDTFVNRIEITDTEMLIYFNLSEASASEKQKNSQPNSCSTGNHLVRVARIELTAS

SEQ ID NO: 13320 - protein, 588 aa, synthetic construct
MKRAALLLRCSTDAQDYERQKLDLLDTIKGMGYTTSDDLVFGQYITGKDDVRKKDRESVAECKQAVREGKVDAIFINEVSRLSRDSIAGRLFIREFNDEYKIPVYFRDLGMWTINPTTRIVDRSFETMLGFYFDMAQNELKSMKTRFASGKRKNAREGKTIGGAVPFGFYKDEDGKLQVDEEQAQVVRLVYNKYLEDGGSIPSVCRYLLSCGYDKKFNKKFGTGSVRNLLRERRYIGEQRYNLVNPDEPDEAKKQEVYIYKVDAIIDTTIYNKVQIKLDKNRTTETKKVNKDKKIHLLAKLITCPICGDSYTSKTASANKSGERYRIWNYCCVSKYNFSECTSDITLNADNIESIIWQLTKREILALQELSLEERQSKIDEAEQKLASYKDELDVIAKSIDKLNVKKKKLVALFLDIEDDDTAIFNEQREAINKEIDSYNNRIQFLNTEITICEGNIARFKEADFTDEVLDKIEQDLLKKKELIKEYIKVIRPYRLTKARLILEVESKQTNYCILFEPRNSKRRCWYIQSSLAQWQNGLLKTSTAPLGNFFYIPMASLLLDEPDDLDAIASFEDMKEICSINNYVIEY

SEQ ID NO: 13321 - protein, 522 aa, synthetic construct
MREQYLIYLRKSRNDAQLEAMGVDVLERHEKTLLALAKSMNLQIGAIYREVVSGDSIAARPEMQRTLKEVEAGLWKGVLVMEVERLARGDTVDQGIVQRTFQYSETLIVTPAKIYDPNNEFDEEYFEFGLFMSRREYKTIRRRMRAGVTAAVREGKWPFNKAPYGWKRVKLEDARGWVLAPDPDEAPVVKLIFDMFTGPDRVGITSICKYLESHGIPPRNGDRWLECTILGILGNIANDQKVGIGHCKQITTVKDGVLTKSRESRLSNNYDLIATGLQPRLIDHDVFVEAQGYLGKGTPKPPESYGTKNPLASLIVCSCCGKKMQRRPKTTTPGCHGAPYDVLMCHTRGCPTIGAPLELVEKEVINALSDWVTGYQLDPSQEVKNNVTEKQALLSAAVANRDALLKQNEKLYDLLEREIYTTDVFLERSNTLHERIEEAELSISALKKDLEYEKQKFENSSRFIPECKELLSSYWDLSVPDRNKALKLLIDRVEYKKTVKNKRGTVDTPTFELTLKPRIPRI

SEQ ID NO: 13322 - protein, 558 aa, synthetic construct
MAYRRITDIRDTIGMRAVFYARVSTAEEEQLNAIELQIEENRGCIKDHGWKLVGEYIDRSKSGTMVKGRDDYQRLYEDLYEDLFDIVVIKDQERLQRNTLDWYLFINRVVQTGKLLFMYMDGKFYSPDDALITGVRAIIAEEFSRNLSKKLHNYHDHRIEKARQGQEIALQGSGNVYGWDKKDGKYYINPEQAKVRRLMCEGIMARKGSTLIAKELNDAGYRNTVGKPWKPMDIPKFVYDCKNVGTMIINKERHDFESKQTIKLPKEEWVYVENALPPIVTQEEWDLICKIHEERVIATGSDRRGKKTSGYSFSGKLVCGICGAPYWRKQRVSKDEYWVCSTKQTKGRRTRKRDSTMGKAGEINPLGCDNENISYNSLMEIMGVVSERLQANTDTIKQDMINWLTKLRKQLLEANGGHTEADLQRELSRKSKLLDAYLDGILNKQEYQKKAEELDERIIQLKAETEKNKANSGDIAEIDKVLANIDEEVSRYVDGNEKLKVEYLLEHLEQVQIFPDKVIVIVPILSEGIVVEKTQYVSREKWCWKDNTYVNYDRTESS

SEQ ID NO: 13323 - protein, 501 aa, synthetic construct
MRDMDSARLRVVCYVRVSTREQAEKGYSVSEQQERLKAYCLAKDWVVAQVITDPGFSGAKLERPGMQQLISLVQAKKCDAVLVWKLDRLSRSQKDTLYLIEDVFLKNGCAFVSMNENFDTSTAFGRAMIGILSVFAQLEREQIRERMAVGRVGRAKAGLFHGGGFAPIGYDYKTIAEGGAGLVVNEYEAMQVREVFSLYLQGWPVNRIRKYMAAHYTTKDGDWGSDTTVRDVLKNPLYTGKINWAKKVYDGQHEPLISQETFDAAAARLATSSWKRTCSDGMERNSPFKSTHLLGGIIWCARCGARYFASGNYSGRGENKRYWPYYVCYSRAKSAKHMIRDPNCRNDRWAVAKLDAIIEGEIRKLAFDPAALELAVSGPQQDEDVAQRRAALQQRLNNLRAQMGRVLDLYQMGGSLPASMVGDRVAKLQAEIDGVEAALAEAVEEPPARRMDAARTALVGAEDVLDNGTLDERRELVHSLIRRIDLDGENIDIHWSFSPEA

SEQ ID NO: 13324 - protein, 523 aa, synthetic construct
MRFFSYGRKSIFSDKSDSIDNQFRMSREYCESKFSGQVDSWQQFSDEDFTGANADRPDLQRMLSFIKNGFCDVLVVYQLDRLSRDVRDFANIYALLEEHGVMFISIKENIDTTTPIGRAMMYVTVVFAQMERETIAARVTDNMLGLAKKGYWTGGNPPVGYVRKHIVVDGKKHCSIEVDPDGARYVTQIFDTFLAYNCSLQGMETRFKNQGIRTQGGKFFSTTQLHKMLTMPYCVEATPEVYDFYAAKGCIMDPGSPREMWDGSVGVIIYGRSTEKNKKHQVQPPEKWTVCLGKHKPFMPAEKWLAVQSRFSQNKCIKDAKWPVPLLKGVLRCKCGNLMQISRKKKVDGTCSSWYYCRKRMRQGIDACDMGQIKCDLLDEEVLELFRGIAADPGLIQKFVKMEAPADVPDLKAAQARVSVCERKIGRLAASLAMAEDSVASKYIIAEMERLDVELGALKREASLAEMESHRAAVSAKDAKATAAEIAKLIHGLEGFDDKEKNAIARAVIQECTWDGERLFITL

SEQ ID NO: 13325 - protein, 543 aa, synthetic construct
MEVTKVPKKIVTVIEPKRSMTVDKEKYRQKRVAAYCRVSTDSEEQLVSYANQKKVYTEMIASRKDWCFAGLFADEGKSGTRADKRPEFNKMINDCLAGKIDYIITKSVSRFARNTVDCLDYVRMLKSKGIGVYFEEQQIDTLKTDSELYLVIYAGFAQSESESISKNITWSVRKKFEDGTPVFMYKRFLGYRKGADGEPEIVPSEAVIVERIFNLYLAGETVDKISKMMQAENYDIPGKTISFSKGMIMNMLSNERYCGDAILQKSVTIDCIEKKRKKNTGEAPMYYVQNNHPAIIDRVTFNKVQEELARRKTKTPGSAKSSITSTGKYSRYALTDVLICGNCGTRYRRVTWSRNGVKRIVWRCISRLDYGKKYCSDSPTIMEDKLQEAIVRAVNKFNEQDNATYKALMRATISEALGLNGDPEEVDMLERKVEALNNKMLALVDESVSSGDGIEAHESEFMTLSQETELLKQRIAAIQESTAKDNGEQSRIEQIQAIISERESKCMEYDDSIVRQMVECIKVYPGGKLEIIFGGGYLVEESV

SEQ ID NO: 13326 - protein, 513 aa, synthetic construct
MPEVRLITPITRQSTKKMQVAAYCRVSSNSADQLNSYAAQIRAYKKCIGARDDWELVDIFADEGLTGMKSETRDEFQRMIRMCELKQIDLIITKSISRFARNTKDALAYVRKLKLLGVGVQFEKEGISTLSMGDEMLLNTFSALAQEESQSISMNQRLSIVKRMELGEYVDSNAPYGYRLVDKMLTVYEPEAGIVRNIFALYLQGFSTSEIARELNKLNIPTKAGKEIWRPSRVAYILKNERYIGDSFYQKTYRETTVPFNQHPNRGQEDRFYAKGTHPGIVEKDVFDAAQTLIEKRKDVFAKATTQNIYPLTSRIQCSECGSFYRRRIVSGTVKWVCSLHKDDSTACSSNYYSEERIYDGFISMVNKLRFSEDNILGQVISRLEMTLAAMKRNNTAARDLSKSIAELNAKLLMLEQLRSKGYLAPEVYQAQANEINAELAKLKDVRQEKFNSKAATMLEEVRKLKMLIFEQEEPLEAFDEKLFLEIVKSIQINKEDEMSVELLGGLRFRERI

SEQ ID NO: 13327 - protein, 529 aa, synthetic construct
MSRYCIYLRKSRADLEAEAHGEGETLSRHKTALLELARRKGITISATYEEIVSGETIAARPQMQRLLSEVGAGEWDGVLVMEIERLARGDTMDQGLVAQTFKYSGTKIITPLKTFDPQNEFDEEYFEFGLFMARREFTTTNRRLVRGREASAKEGKYVGSVPPYGYRKVKIPNDKGFTLEVIEEQAKVVRMIFEWYAEGAEVNGQKKRIGPYTIAVRLNELGIKSVAGKDYWTIYGVQHMLINPVYIGKIRWGYRKVKKTVTPEGMKKKSREFAQDGDYIVVDGLHEPILSEELFYKVQDLIAANPPTPIKYRNNNVNPFAGLIFCAKCGHCLSYRKGYGRHPGYLGCNIAGCDNKAAPFELIEQRVLSILNSWVKDYSVDKAQIKHEADLNAELTNAISLAEKEIETLQDQLDKVYSFFERGTYTEKIFKQRSSTIEQQITDIGEKIDRLKAEHQQVLERQNVQAEFVPSIKHLLEIYDTLEPVEKNKWLKQIIDRMVYEKNADGKYRNVDPGDFTLGILPRLPKKGS

SEQ ID NO: 13328 - protein, 453 aa, synthetic construct
MECVAYMRVSTEKQAVEGNGLDSQKRDIENYCRKNELVITDWYIDDGYTGANMDRPGLQRLVNDCSRKRVSCVVAFKLDRLSRNMIDGIYLIEKVFQKCNVVFKCVHDSVSYDSPMEQAYTQMMAVFAQLDKNTMMLRMRGGMLERIKQGYWMGGGNLPYCYSYSKEQGILIPIPERAEQARKALELFISGYSDVKIKEICGFKSELVTRNILTGIVNIGMIPYKGKIYQGKHEPIFDKGRFNLAQELRKARAKSRATCQTEPNLLTGLCYCGVCGCAMRYQKWTHEKQKIYCMSRNKSMSYLPNYNANCNNSLEWADDIEKQVEKEILKISLNLSSYKPKEKATKLEIMQSQLDKEQTKLKRLYNLYADGNDTVLEMIKESESLVKTMKANVLSESKSTANTQKKEFVYENIKKLADVWDNIDKKKKNMILKTIIDKIVIVNGNIEIQLKNF

SEQ ID NO: 13329 - protein, 433 aa, synthetic construct
MSRKITIVSKPPKLERKKRVAAYARVSSGKDAMLHSLSAQVSYYSDLIQSHGEWLYAGVYADEAKTGTKDSRAGFQSLVADCRAGEIDMVITKSISRFARNTVTLLQTVREFKALGVDIYFEEQNIHTMSGDGELMMTILASYAQEESRSASENQKWRVKRNFEAGIPWDRTLLGYRMENNHYVIVPKEAEIVRRIYNEYLSGSGYQLIAKRLNEEGVPSRFGGKWNQSAVSRILSNHTYTGNLLLQKTFRENHITKRKIFNNGELPKYLAEESHEAIVDEETFQAVQEEKSRRSARFNKKSVSKKTYPFSSFMVCDNCGKNYRRKVTKSGPVWVCNTFNSLGKSACASKQIPEPILQQVTAEVLGKADFTGEQLRSRIQKIVVCNENVLIFRFRDGSEVARKWKDRSRSESWTDEMKAAASQKALGRNKHNA

SEQ ID NO: 13330 - protein, 526 aa, synthetic construct
MPKVTMIPATINPMTHLPKETTQKRRVAGYAHVSTDSDEQFTSYEAQVDYYTKFIQSKPEWDFVKVYTDEGISGCNTKHRDGFKEMISDALAGKIDLIVTKSVSRFARNTVDSLVTIRKLKENGVECYFEKEGIYTFDGKGELLITIMSSLAQEESRSISENITWGQRKSFADGKIHLAYKHFLGYKKGEDGRPAIVEEEAVVVRLIYRLFLDGKTQAGICRYLEDLEIPSPSGKAKWSKTTVTSILTNEKYKGDALLQKSFTVDFLQKKTKQNEGEVPQYYVEGSHPAIIEPYEWDHVQAEFARRKELGNAYSGKSVLSAKLVCEDCGGFFGSKVWHSTDCYRRTVWQCNNKFKGGERCLTPNVDTETVQQPFIKAYNQMIGNRKQIIEDCELMRKKLTDFKSLDADIERQFEETQIVAELVKAAVKDNAVTAQSQEAYLKKYEALTKRYETAAAELERLQNLRTLRSQKDKAMALYIRTLKKQPTVLSEWNDTLWTVMVEKAIVHRNSEITFAFYNGTKVKVRQ

SEQ ID NO: 13331 - protein, 535 aa, synthetic construct
MRIQNIHRVGIYLRLSRDDGNSNAESMSIVTQKRMLTDYVKERGWDLTETYIDDGYSGTTFDRPAFQRMLKDIERGHIDCVITKDLSRLGRNYAKTGYYTEEYFLEHGVRYIAVNDNVDTMKDDNDIAPFKNILNEMYAKDISRKVRAARAVNAKQGKFLGSKPPFGYTRCPTDKHKLIIDEKPAQIIARMFEMFASGDSGRHISDIFNKEGIPSPRAYFYQQAGRENPLNESMTWNSNTVMQLLKNQVYIGNMVQGKRRVTSFKTKSRAVVPEEDWIVVENTHDAIIGKDLWAKVQKKIATGKSPHVTKSGEISLFAGIARCADCGAAMTFNTKQYDGKTYYIYKCSRYAVHGKSSCSIHHVPASALEEAVLQNIRFNAQLLSENDEELLGKLIELGARGQQREIREAETKLNESVKRLEVVEGMAQKLFEERCTGNVPDSVFKKLMQNYDVEQANLNQIIAEKRNVLMEMENAAIDISAWAEEFKQYTNIDKLDRRIVTTLIDSVEVHESTKENGVVRQHITVNYKFVGQLNA

SEQ ID NO: 13332 - protein, 519 aa, synthetic construct
MKTVTKIGGQLVFPTQKHKLRVAAYCRVSTDSEEQLVSLATQRKHYEAYITANPDWEFAGIYYDEGITGTKKEKRPALLRLIDDCEHKKIDFIVTKSISRFARNTTDCLELVRKLLELTVYIYFEKENLNTGSMESELMLSILSGLAENESVSIAENSTWSIQRRFQNGTFKLAYAPYGYDVIEGKLVLQPEQAPIVKAMFDQTLAGIGTDAIAKELNAKKIPAKRGTHWTATTVRGILKNENYTGDAIFQKTYTDSHFNRHHNHGEKDKYRVEHHHEAIITKDMFEATQQVIRQRGKEKGALPQDKKYQNRYPFSGIIRCHQCGATFKRRIQGGHNSYVAWCCATHVADTTKCSLKYIKEAALEYAFVTMMNKLIFGHAFVLKPLLASLRTLHSNDSITVIQDLDTKLAENAEHQKTLAYLLTKKYLEPAMYQKGNNELLQEAEQWQHQKDSLVDFLNDDNKTVHETRELLQYTCKAKMLTGFDEAVFQQFVEQILAYSRTNIGFKLKCGITLRERLV

SEQ ID NO: 13333 - protein, 492 aa, synthetic construct
MAAYCRVSTDSDEQATSYETQIEHYTTYIHNHPDWKLAGIYADDGISGTNTKKRNEFNRMIEDCMAGTIDMIITKSISRFARNTLDCLKYIRQLKDKHIPVFFEKENINTMDTKGEVLLTIMASLAQQESQSLSQNVKLGLQYRYQRGEVQINCNHFLGYAKDENKHMVVVPEEAEIVKRIYREYLEGASMLKIARNLTADGLKNGAGHTKWRDSNIRQILQNEKYMGDALLQKTYTVDFLTKKRVKNTGIMPQYYVKDNHEAIIPRDIFLQVQEEMVRRSSIHLKNGRKLTYSSNHCFSQRIRCGKCGEIFRRIHWNNRGKKSIVWRCVNRVDHTGKCDARTISEPALEQVCLTAINQVLCEKKDFLAMLQHNIETVLSHSNDETLVAIDTRLEELQTQLVKLASSKAGYDDVAEEIYHLREQKQQALAKNANQDEIRSRIENMATFLKTTSTAITQFDDYLVRQLIKTITVFEDSCTVEFKSGVTVDVEK

SEQ ID NO: 13334 - protein, 506 aa, synthetic construct
MPKKEANQPIKAVLYARYSSDRQREESIEGQIRVCEDYARRNNIVIVHTYADRAMTGRSDQRPEFQMMIQAAATQAFDVVLVYKLNRFARNRYDSAKYKHKLKKYGVHVVSAMENIADDPSGILLESVIEGMAEYYSAELAENVMRGMTENALECKWSGGLVPLGYKLDADHHLVIDEAGAPIVRRIYQMVLDGRTPTGIINELNAANCRTSTGRPFGKSSLTTILRNEKYIGTYTWNHIRKENAIPAIIDRKTFEAVQKTLQYRKNNHVKVCSENFLLTGKLFCGQCGSNMVGTSGTSKYKNTYYYYACTKHLKKDGCTARNIRADKLEELVCSVTTRILSSKEAVHAIARQAVEAQKKQKESLTVQSLKNQAAEINKKLKNCVQAVESGLISVTITNHIKEYEKRLTELNEAISREELLSGKSKLTEKHIEFFFYSIAQKIKTADKYKSILLSSLVRCVIVYDDYIEIQYNYKNELPLLQNPVRVKSSNLNGMVTQERFELPTP

SEQ ID NO: 13335 - protein, 519 aa, synthetic construct
MKTVTKIGGQLVFPTPKHKLRVAAYCRVSTDSEEQLVSLATQRKHYESYITANPDWEFTGIYYDEGITGTKKEKRPALLRLIDDCEHKKIDLIVTKSISRFARNTTDCLELVRKLLGFTVYIYFEKENLNTGSMESELMLSILSGLAENESVSIAENSTWSIQRRFQNGTFKLAYAPYGYDVIEGKLVLQPEQATIVKAMFDQTLAGIGTDAIAKELNAKEIPAKRGTHWTATTIRGILKNENYTGDAIFQKTYTDSHFNRHHNHGEKDKYRVEHHHEAIITKDIFEVAQQVIRQRGKEKGALPQNKKYQNRYPFSGVIRCHQCGATFKRRIQGGRNSYVAWCCATHVADATKCSLKYIKETALEYAFVTMMNKLIFGHAFVLKPLLASLRSLHSDDSITVIQDLDTKLAENAEHQKTLAYLLAKKYLEPAMYQKGNNELLQEADQWQHQKDSLVDFLNDDNKTVRETRKLLQYTCKSKMLMGFDGAVFQQFVEQILVYSRTYIGFKLKCGITLRERMV

SEQ ID NO: 13336 - protein, 700 aa, synthetic construct
MDSNAFLNDLMSKMKLPEAKGKKKVEQSESVAQILAAMQKVRAEKKMPPVTSYAPVKEMPVNEPESMEEFSQLASDVMQECRPAMPTVKTSISEKAVRVAAYIRVSSTNPAQEDSYEMQERYFMSLLAGNAGWTSAGIYSDHGISATSRDGRTGFNRLLRHCKQGKIDRVICKSISRFARNTQDFLVALRTLKENNVTILFEREAMDTADAYSEFILTTLAAIAQEESRSISANIAWSNQKRFPAGNVCNKDIYGYEFRKGEYTVNENGYRYRAVFIIPEEAEIVRMVFRLFTKEELGFTQIAQKLDALHIPPPNSGCRQRQKRKPTVLPAGTLKEEDKRGWTATDVRYMIANVRYCGSVLCQKTYTDHRNGHKQKVNKGEKPKYLIRNHHPAIISEELWQEAQEVWKVYTAKYRGIEKGRNERNYSKLLLCGECGRYFQGHSTTRTTIWRCATKLAQQGQKRCRMEPIYEEQIQMLLCKAFAEKFKLGEEMDAEVHEVMQMISKAPVDSARNQALKNLTEKLREIHDFDHMEQEGDFLKRQLSAVNYSIRDVHQHIRDIQAEKEALKVRCEVLGEPRDKEAVTELENRLLNEEEQLEKLEHEAQQQAEQVRYMEDYWKKLEQTHEIREKTLQWLDSLAGGTQMFLDEAVGTYVKAFVLSVTIFSPKHFRIHWFDDTCTEVECDSVFGGYQQPGMIRRKY

SEQ ID NO: 13337 - protein, 562 aa, synthetic construct
MKNKIAVYIRVSTTHQIDKESLPFQRRELENYAKYVLNIDDMEFFEDAGYSGKNIMRPAFQSMMSRIRLGEFSHILVWKIDRISRNIIDFANMFEELKKLNVTFVSKNEQFDTSSAIGEAILKIILVFAELERNLTAERVSDVMISRASTGQWNGGRVPLGYNYDKENHTFTVNQQEAEIVKFIFDYYIDNGSMVSLVNALKDKEIKTRTNGAFSLSAVATVLNNIFYTGKYRYNYRKQGDRQQVKPESEWIVIDNHHPAIISEEVFKRAEEIKQTNLRLKNEKGKIVKKNNIHLFANLLECDVCHNNFSSSLDRPRVNQGGYRHSMYNCYGRRIGACKSKYVSDVYLGKFVFNYIANLYKAYCSFGKSTTFETFKKKMLRGNIFSDIKEVTNLEGIYNIFCSKYNDKATANIINYKNTQQDLGNELRIALSEKGKYERALARLKDAYLFSDDAMTQNEYISQKHSIEVKLSATNKKLDKLQSKDDTPFDDVEFLNILSYFILNQNLQDKREIDFVDFITSVDKKIISDFVHKMFVKFIISKGKIKSMTFRNGITNTFVYDD

SEQ ID NO: 13338 - protein, 518 aa, synthetic construct
MVAIYVRQSLDKKDSLSIESQINDCITLCKRNGWDDYQVYKDKGWSAKNLDRPEFQKMNNDVEAGKIKAVVCYKIDRISRSIRDLVNLIEDYHELGVHFVSFADNINTAAPGGLMMATLFGSLAQMEREAIIARVTDNYYYRCELGYWGGGPAPYGFNLKKIVENGQKHTVLEINEREAAVVKQFFKWYLEPDGTIYEILKKADKAGITTRKGGAWTSRVVSELLSKPMYAPNSMDIYNFYAAQGVRVRVTPEQCDGKLSLNVFGRRDRGSKHPKRSRPVNEMTLAICKNPPIIDSDTFLKTQFKKKAKLQVSPRTGTAKTTMLSGLVKCAICGRAMSPSGSSRGVRYFTCSGKRNYAAGTCTSKSIKVSALEKIVIDDILRYATNPKVIDMFHAMQGSKLTAEQSHEVNLLQQEAAKLDIEIDNLLDACSAGNTTAIEYLNKRIEKIDTRKHEILTRINEIKRDTENVISLFSGIEIENVPYILAHGSIAEKKNVCQFLLSSVLFTNADDVKVYYKM

SEQ ID NO: 13339 - protein, 514 aa, synthetic construct
MAKRKFNKGGEVRLVAYYRYSGGSGQTEQSIEGQRRDCEAYARLHNMTIQKEYVDRHISGKTDDRAAFQQMIADSDKGAFDMVICWKTDRFARNRYDSAVYKKRLRDNGVEIVYAAESNISGAEGIIIEGVMEALAEYYSAELAEKMRRGMRESALKGQAISRCRALGLKTDEHKRFVIDEKTAPTVRFIFEHYAAGESAMSIVEQLNAKGLRTSQGNPFNKSSIPRIIQNEAYRGVYISKSYDVRIEGAIPAIIDDELWERAQTMLKLNRQLKAKNEPKADYILSGKLYCSCGSLMRGMSGHSATGEVYRYYTCPNKDCHLRNIPKDDLEGKVMQSIVDHLLQPESMEALAEAMVEVQKADAEKPNAERVAIEQSLADVRRRSKNILDAIENGTANAQLCARLNDLTEQEQTLSFQLSSLEKEKPVAFTKEQYLFLLEQFLVEPSERTPEYGRRLVNTFVTSMVVSDRELVINFNVSDETVNKNKKASQTNLQKESSSGMRLVRVARIELTAS

SEQ ID NO: 13340 - protein, 413 aa, synthetic construct
MNIRKIEAKNNNRKKRICAYVRVSTTNGSQLDSLENQKVYFEKLYAERDDVEFLGVFCDKGISGSKYDRPDFQTMLDACRKGQIDVIHTKSISRFARDLINVLEISRELKTLGIDIFFEEQNIHTLSNEGEVVLTVLASLAEEELQSMSGNQRWSFRRKFQKGELLINAKRFLGYDLNEKGELVINKAEAQIVRTIFYSYLEGMGTHRIAKKLNEGKVPTVTGKKWYDSTIRNILKNEKYKGSLLLQKYFHDGVNGPKKLNQGQVEQYYIEDNHEGIVSKEIWEKVQVKMKSRSRIQGTNKTYKFSRMLKCQYCGSTLKRQVSYKKKIVWCCSKYIKEGKNSCKGMRVPERDIEDWKLSLPVIVLERIEDGEKHYGYTGQKTSANGHISNSEKDQSSRLLSSVYRPRRTAIKL

SEQ ID NO: 13341 - protein, 428 aa, synthetic construct
MSTDQDEQLSSYENQVNYYREYILKHEDYELVDIYADEGISATNTKKRDAFNRLIQDCRGGKVDRILVKSISRFARNTLDCIKYVRELKELGIGVTFEKENIDSLDSKGEVLLTILSSLAQDESRSISENSTWGIRKKFERGVVQVNTTNFMGYDKDEKGNLIINHEQAKVVRYIFDRFIEGYSPEFISKELRKQEIPGCTGKAKWCPSAIWKMLQNEKYKGDALLQKTYTVDFLTKKRIDNDGQVNQYYIENNHEPILDREKWEIVQLEIARRKKFREQHNLQFYIMQKENNPFTTKVFCAECGSAFGRKNWTTSRGKRKVWQCNNRYRIKGQIGCLNNHIDEEMLKKAFMKAVGLLKEHRSDVVDKWQKLEQEANLLHKHYAKQMYQILDLDKFDGVIMNQVLDHISISETGQIVVTFLEGTEVDL

SEQ ID NO: 13342 - protein, 523 aa, synthetic construct
MAKSVTTIPATLSRFTAAPINSTKKRRVAAYARVSTDNEEQLTSYEAQIDYYTNYINGRDDWEFVGVYPDEGITGTNTKKREQFRQMVADALDGKIDLIITKSVSRFARNTVDSLTTIRKLKEHNVEVYFEKENIWTFDSKGELLLTIMSSLAQEESRSISENCTWGQRKRFADGKVTVPFKRFLGYDMGPDHNLVVNPEQAKLVKRIYGMCLQGQSPFQIARTLTEEGIPSPGGKDHWNPSNIKSILTNEKYKGDALLQKSFTVDFLTKKKKTNEGEIPQYYVKDNHEAIIDPETFEMVQTLMTTRTKGRNRKSSVSIFSSKVKCGDCGSWYGPKVWHSNDAYRKVIWQCNHKFDGQKCATPTLTEDEIKELFLRATNQVIDQKEQFIAIYEQVLSRNLDTTALESELSDLEAEINIAAELIEECIKENAHVALDQDEYQKRYDALVARFDKAKTRHTEVTDLIAERMARKHQIEAYLKNLRSREPLTEFRETDWLAMVDYITVHSKKDIRVTFKDGTEIKA

SEQ ID NO: 13343 - protein, 590 aa, synthetic construct
MKTVEKIERKLPVLKTRKRVAAYARVSMESERMQHSLSAQVSYYSALIQKNPEWEYAGVFADYGISGTGTKKRDEFNHMLAECEAGNIDIILTKSIQRFARNTVDLLNTVRHLKELGIEVRFEKEKINSLSGDGELMLSILASFAQEESRSISENVKWGTIKRFKQGIPNGKFSIFGYEWQDDKLVIVPEEAEIIRWMYAEYMKGASRIEIGRALMDRGIYTRQGKPWVDSNVKVILTNITYTGNMLFQKEYCEDPITKHRRKNYGEMPQYFVEDTHEAIIPMDEWQAVQAEFKRRRDLGPFGNKSLKLSAFSTKITCGCCRKHYRHSGKRNTAGEVYYIWICQTKSQKGVSACPSKNIPEKMLQNTAAEVLGLDKFDEDVFSQQIEEVIVIGDDTLTFRFYDGHEVTTKWQSTAKTDWWTDERRKLWGERHKRKDTNPNRNTFYEFTGFIKCGCCGANYRCQSGKRKDGTPTRSWYCTGPRSECRNPAIRDETMKRLVTEILGLDEFDEAAMDAQIESATILDHMVTFHFRDGHIESRDFLDKRHGTPWTEERREKAKKSMKAAWTDERREAMSERIKKIRSEKKWPNP

SEQ ID NO: 13344 - protein, 593 aa, synthetic construct
MKQKLVAAIYARKSVILKKGDTLNIQEDKCRENLKLRYKYDYDLTIKCFTDEKTGKDMDREEMQSMIEQIKEGKVQVVCAYKLDRFGRNAIELVNFIELLKKYNVKLHCVDDQINYDPTDDNDVMTKLMIVLLSVLAEMERNNIRQRVIVTVYSLARKGFWLGGTAPYGFVSVRVPNEGIIDDVGAKSICILNPYAEEIQVVKYMYATYKDEDVSYSELANRCNDLGYEPRFASMFDQHTIQGMLMNLVYVKAAPQIYDWLISKGYSVENIPARDKFDGKHALLTYGKTLRGEEADNNIEAENKNRKDVKDWIVAIAPHEGVIEANDWLVVQNKIERNKGSKSKKNTKHNNVLITSDMFRCGCCGGVISSFNRKSRTDDNVLYPHYRCENKRKRRGKLCDVDNLPATDVDEKIIDLIFEKRDEIASSVEYIKRNLMPARKEYVKKNIIPKLEKEIKVQLKKIDGFLENMSSGKLNDNVLEMVNNKIEECNVKIKELEERIAEEDNKMLSMDKNHQNLDLLIDKFFSLDKTDFMKLPMKDKRNLVRLLIKEVVWDGENVHVYFKTPDSVCGGDTTDSLSINTALTNVDMVKQHF

SEQ ID NO: 13345 - protein, 535 aa, synthetic construct
MARKTDKPLSNIAVIYARFSSHNQREESIEQQVAECKLFAAQQGLEVTEIYSDAAQSGRTENRSQFLRLQRDAKKGKFTNIVAYKSNRIARNMVNALTFENDMEKLGVKLYYAKEEFGNNAAGRFALRMMMNVNQFYSENMAEDIRRGMEDNAMKCKVNGPAPYGYKSGKSGTYEIDEPAAAVVREIFTRVACGDSFVDIYTDLNNRGLKTRKGNKWGRSSFQSILKCEKYTGVYIYDNIRVEGGMPEIISKEMFLKVQRILGTKGNPQGRHRINGDYLLTGKLFCGECGHHMMGLSGTGKNGLLHYYYGCSGKKEKPRCSKKNVRRDELEYEVARLVQTYILQDDVITWLADTLTKYQEEHSSDGDMAILNTQLSETEKSIKNLMAAIEQGIITPSTKERLMELESEKSKIENNITLLKADTITVSKEQIGGWLDSFRDGNIKDKRFQKRLFDSFLSAVYVYDDNRVRIVFNLCGLNKGDIDTKLMLGDTEAIEKISDCSYKRCYGSPDLNPPNGFTKPFGGFSISGKVHLIIV

SEQ ID NO: 13346 - protein, 459 aa, synthetic construct
MSTTHFYSHYPTIEYKTCALYVRCSKEEQAKFGDTIEAQIEDLKAFAKLHHLKIYAIYVDEGHTARKKYNKRKEFMRMLQDVELHKFEYIIFTKLDRWFRNIADFYKIQEILDNNGVTWLTALERYEMETTNGKLNVNIRLSVAQDEADRDSDRIKDVFRLKVKKGEAITGSLPIGLTVGENGKVDIDPDTVQIAYDMFDYFEAHNSKRGTLLYLIDKYNHYFCYETIARALRNPLYKGEYRGNPDYCPKIIDPARFDRIQVLGKRNVKVRKNNRYYVFSGLAQCKECGHALVANTTVQKRYNREYTQYRCNYYSNSHLCTHSHGMNEKVIEKYLLDNIKPELEKYVTAYDVKQNAPTKKADPSKIKTKMQRLKELYVNELIDLDDYRTEYEQYKQELDKLTSTAAPEVKDLSAIRSFLALDLQSIYDSLTPQEKRTLWSSIIDKIIISDGGDIEIVFL

SEQ ID NO: 13347 - protein, 509 aa, synthetic construct
MPKNKETQSIKAVIYARYSSDRQREESIEGQIRICEDYARRNGMTIVHVYADRARSGRSDRRPEFQMMIRDAGTSAFSVVLVYKLNRFARNRYDSAKYKHRLKKHGVKLVSAMENIADDPSGILLESVIEGMAEYYSAELSENVMRGMTENALEMKWPGGIVPLGYKLDKDHHLIIDEEKAAIVRKIFKMNLAGHTDASIVKYLNEHHYVTAIGHPFNRSSLRSIYKNERYIGTWMWNTIRKPHAIPPIIDEQTFWAVHEKRKYRQKNKIRVCGGENYLLSGKLYCGQCGKNMVGTAGTSRNGTRYHYYSCTPHKESNSCPAKRIRTDKLEDLVVKTTTQILSRPDVIRAIAHQAAATQSNQAESLEMQALQNEIADIRKKLDNCLKAIDNGIFSDALTNHMHEYEKRLTELNDDLSRQKILVSAPNLTEKHIEFFFHSIAEQIKKADKYKNILLSSLIRCVIVYPDYIEVQYNYKKELPILQNPVKLRSSYLYTMVGDNGLEPLTSCL

SEQ ID NO: 13348 - protein, 559 aa, synthetic construct
MRTIRKIERSIPKLKQRKKVAAYARVSMESERMHHSLSAQVSYYSSLIQKNPDWEYAGVYADYGISGTRMKKRQEFLRMLEDAEAGKIDIILTKSIQRFARNTVDLLRTVRHLKELGIEVWFEKENIHTMSGDGELMMTILASFAQEESRSISENVRWRVKKRFEKGIPNGRFRVYGYRWEGDNLVVVPEEAAVVRRIFQNFLDGKSRLETEREFAAEGITTRNGCRWMDSNIRVVLTNVTYTGNMLFQKEYVTDPILKKRKKNRGELPRYYVENTHEPIIDKETFDYVQQEMARRKELGALANKSLNTTCFTGKIKCGICGRSYMHNRRKDRGFEEFWDCGSHKLKGRNCGAKGSIPQAVLLKECTEVLGLDDFDEQAFLDQVEKIVVPEYHVMVFCMKNGQKFTKHWVSTAKKDCWTEEYKNCQRAWMKNYMANGKGTRFSAFTTRVRCALCGSSFRRCKTKHDRPVYWRCSKGGKCESVSIREDDLKRVAAEAMGVKAFDEDRFREKVEYIEAGKPNCLTVHFKDGRTEEISYTPTPSKRRSKARRKESREKWRRQ

SEQ ID NO: 13349 - protein, 522 aa, synthetic construct
MAKTVRTIPATISRYTAAPINSRKKRRVAGYARVSTDHDDQVTSYAAQVDYYTNYIKERNDWEFVGIYTDEGISATNTRHRDGFKRMVRDAMDGKIDLIVTKSVSRFARNTVDSLTTVRKLKDKGIEIYFEKENIWTLDAKGELLITIMSSLAQEESRSISENVTWGHRKRFADGKVCVPFGHFLGYDRGPDGNLVVNREQAKTVKLIYRLFLDGYTFHSIARELTSRGLETPARKKRWYPGTVESILTNEKYKGDALLQKRFTVNFLTKETKANEGEVPQYYVENNHEAIISPQVFDWVQEEIKRRREGRGRYSGVSIFSSKIKCGQCGGWYGAKVWHSTDKYRRTIYRCNDKFKSHCKTPHLTEDDIKEAFVRAVNQLIENKADVLDSITLLKERLTDTEDLEEERDRISTDLNLLADKIQQLIAENARVAQNQDDYDRNYNELVSRYEAAKTQYDKTCEAIQYRKARSRQMDSFIKELRNQDLIKEFDARLWGSLVDFITVYSKDDIRVTFKDGTEIRA

SEQ ID NO: 13350 - protein, 505 aa, synthetic construct
MSRNAVIYARFSSDKQREESIDGQIRECRAFAEANEITIINTYIDRAMSARTDQRPSFLQMVKDSAKHLFDYVIVYQLDRFSRSRYDSAIYKHRLKKNGVKVLSAKENIKDDPSGILLESVIEGMAEYYSAELSQKVKRGMTENLLEGKWIGGIVPFGYELTPENKLAVNPATGHLVPEIYKKYQSGVRTTDILSKLNSLGIETQRGCKFTRNSLNRILKNQIYTGTFNWAGTTYPDYAPALITQEQYAAMQNLFESRKRKNNTARRVSPQYALTGKIYCGTCGLPMTGYCGKSHTGTTYYYYQCSSKNNKSEKAQRSRIKCDAKNINRDKLEKLVLDTTISILKDKTALKCIAEQCMAIQEAEIAHKPAEQLRLESQIKDIEKRLKNSVKAVENGLISQTITNNIETYEKQLTELKAELDGIKLETHIIPITEEAVIYYLNQLIERANKKDGYSLDTFDDFIRRVVVTGKRVDIYYNYTAVPHVLENPAVKMLRGSSEDCLVTR

SEQ ID NO: 13351 - protein, 536 aa, synthetic construct
MPRKKKLQEVGGLRLVAYYRYSNGGQQTEQSIEGQRRDCEAYAKAHGYKIVHEYIDRHISGKSDSRPAFQQMISDSDSHLFDAVICWKTDRLARSRYDSIIYKTRLRRNGVKILYAAETVVDGPEGIIIEGLMESLAEYYSAELAQKLRRGQRESALKCIALGGNRSFGYDIGPDKHYCINEKQAPAVRYIFEQYAAGATAADIVRELTARGYRTSRGNPFNKNSICRIITNEMYLGVYKYADIRIEGGVPAMIDRELFNRCQTQLAFNRAHGGGKGAPRADYVLVGKLDCGLCGHAMKGASATGHTGSKHYYYTCTQHVEKKCPKTSIEKNYLEQVIVDGVAKYVLTPEKISQIVDCMMELQAKEQEPKGNPEKDALEAELAECRRKQNNILEAIEEGGSARLAARLRALEEQEAQLTFALGEINNAPAPPQFSREALTFMFEQFRREEDEVDEEYRRRILDTFVSSILLYEDRAEVKFNITDQKTGDFERVILPISANKKPPEDDDIPSNSEGSTALRLVEAMGVEPMSEKSSV

SEQ ID NO: 13352 - protein, 572 aa, synthetic construct
MRKRIVGYARVSTEKQDLERQKILIREYCSNNNYDLVKIISEKVSGAKKDRESINELLAVTKDTADMVVVSELSRISREKECLTVLNTINDILENGLDVLFLDDTSKVYSAYTELNVIDIITLTVKAHSAAEERDKITARMRTGKITKLNINPYMYTGSLVPYGFKVIDNPDYKGQKCNIPARKLMVIDESKTKDVQFIYQLVLNGTTLRDAAEEVNKLGLRTQLNKPFCETSISKMIKNPIYNGRRRFKGLNLPLMDKIISDNDWNRAQICVSQNQLFKGKTTKNFNPLKGLVFCPCGYALMLHKMIRKDGSGYFVMTCCKKNDKEYRKKCRNSGIVSHVLLPTVWKCVKDTLLLSEYTTKTTSEVHRINGIIEGLEDRISGLIDEIDSHKKEMARLSKAITLVTVKGLITQYENEYVTEEAKVTEIEAKINNIRDEISNYKANITKINSITYNSQLTNLTDQEKANVYQKVLSKVVYYSIDYFRGFIVISYKNGLENIIAINKTTTGYISPLPSSFSFNAETRKIRVTIAKKQTSIKEFNLSDIENIEYSFKELEANFTPQQWDIQSQIL

SEQ ID NO: 13353 - protein, 518 aa, synthetic construct
MQENETYVIYLRKSRADSEKSSLEEVFAKHESELQSLAERTLGNRIPEDKIFREVVSGETITDRPVISQILKVMESKKIKGVFVVDPQRLTRGDLLDKGHLINVFKYTNTKIITPYKTFDLNNDFDLKLFKMELDKGSDYLEYYKMIQARGRIASVRSGQYIGSTAPYGYDKYSYKENKHTVNTLKPNSDEATVVQLIYHLYVNESLSCAAIANKLNTMNIKPRKSTSWSPYSLKEILHNPVYIGKVRWNRRKTVMKYKNESLLKTRPIALNDSIISDGIHEAIIDEALFDSAQECNGKTPRNHSSSKLINPLAGLIFCGNCGRAMSYKTYKNNAGSEKQPPRYLCNNQSNCHTKSAKATDVINQIISALECYIEDFKVKLENDDGNSFNVRSQIISVLNKQLQDLEVREETQYEMLENKIYTPELFKKRRQKLLEEREVLLDKLQEAKVQEPVKIDYQEKIISFTDTVEALKNPDIDILQKNMLLKKCIKKITYTTDKEKGNRWRESTFEIDITPLI

SEQ ID NO: 13354 - protein, 504 aa, synthetic construct
MNYNDSKGIYLMYLRKSRADEYNQDVENILKRHEEELQSLAKREFCELIPEKYIFREVVSGGTIKDRPLMKEILKMMESGIIAGVLVVDPQRLSRGDLLDQGHIINAFKYTNTLIITPYKTYDLNDTTGTDMKLLKMELNHGADYLDYYKMVQARGKLASVRAGNFIQPIPPFGYRKVRYGKVTTLEPIEDEARIVRIIFQKYAEGKTICGVTNELNAEGYIPPSKQIWTKGSVKRILSNPVYDGKIRWGFTPNKTVMEDGKLKKYRPERHDYLLFDGKHDAIVNHGLFMSVQERLSKNKSFTNDRSLKNPLYGIMYCKRCGRKISRLNVSESRGGHRYACPNKLCDVQSSRYDLVIEAVIDTIQCAIDDFDITFHNCNSSGSDEKIRELRQELTRLNNKEDTLFELLETKVYSTSVFTQRHAELEKKRQEIIGKINTLSLIPPPESCNDKKMRFKDALLALKDESMPPKEKNHLLKKCIERIDYDIEGVRYHSKVKLDVYFKF

SEQ ID NO: 13355 - protein, 523 aa, synthetic construct
MRFFSYGRKSVFSDKSDSIDNQFRMNREYCESKFSGQVDSWQQFSDEDFTGANTSRPDLQRMLSFIKGGFCDVLVVYQLDRLSRDVRDFANIYALLEEHGVMFISIKENIDTTTPIGRAMMYVTVVFAQMERETIAARVTDNMLGLAKKGYWTGGNPPVGYVRKHIVVNGKKHCSIEVDPDGARYVTQIFDTFLAYNCSLQGMETRFKNQGIRTQSGKFFSTTQLHKMLTMPYCVEATPEVYDFYAAKGCIMDPGSPREMWDGSVGVIIYGRSTEKNKKHQAQPPEKWTVCLGKHKPFMPAEKWLAVQSRFTQNKCIKDAKWPVPLLKGVLRCKCGNLMQVSRKKKVDGTCSSWYYCRKRMRQGVDACDMGQIKCDLLDEKVLELFRGITADPALIQKFVKAEAPADVPDLKAAQARVSACERKIGRLAASLALAEDSAASKYIIAEMERLDVELGALKRETSLAEMENHRATASAKDAKATAAEIAKLIHGLDGFDDKEKNAIARAVIQECTWDGERLFITL

SEQ ID NO: 13356 - protein, 523 aa, synthetic construct
MRFFSYGRKSVFSDKSDSIDNQFRMNREYCESKFSGQVDSWQQFSDEDFTGANTSRPDLQRMLSFIKGGFCDVLVVYQLDRLSRDVRDFANIYALLEEHGVMFISIKENIDTTTPIGRAMMYVTVVFAQMERETIAARVTDNMLGLAKKGYWTGGNPPVGYVRKHIVVNGKKHCSIEVDPDGARYVTQIFDTFLAYNCSLQGMETRFKNQGIRTQSGKFFSTTQLHKMLTMPYCVEATPEVYDFYAAKGCIMDPGSPREMWDGSVGVIIYGRSTEKNKKHQAQPPEKWTVCLGKHKPFMPAEKWLAVQSRFTQNKCIKDAKWPVPLLKGVLRCKCGNLMQVSRKKKVDGTCSSWYYCRKRMRQGVDACDMGQIKCDLLDEKVLELFRGITADPALIQKFVKAEAPADVPDLKAAQARVSACERKIGRLAASLALAEDSAASKYIIAEMERLDVELGALKREASLAEMESHRAAASAKDAKATAAEIAKLIHGLDGFDDKEKNAIARAVIQECTWDGERLFITL

SEQ ID NO: 13357 - protein, 514 aa, synthetic construct
MSMNAVIYARYSSHNQTEQSIEGQLRDCYDYAKRNDLTVIGEYIDRAISGKTDDRPDFQRMIEDAPKRQFERVLVWKFDRFARNMFDSVTYKHELKKHGVKVISAMENIGEGDESVLLEAMLEASAEYYSLDLKKKIARGMRESALKGKFVGGAVPWWCSVNAEHKLIVIDERAAIVKEAFARYDSGEGSKSIVDDFAKRGLRSNRGMPVTLSWLLSILKNRKTIGEYTYNGIEIPGGLPAVVDKPLFDRVQERIARKRRTGGGEATSKTEYLLQGKLFCGLCGSPITAECGQNRKGVVYNYYACSLKKKKHQCKKANERKDFLEWYVVEQTLDYVLTPDRTDYIAEAIVAEYERQFDKSGIKALEQKIALTEGEIQKTMDLCIQATTDAMRKRFMKRCEELDAKKADMEIDLSKLRVAASITYTKEEVRAWLRQFCAGDSFNPAFRRRIIDVFINTVYLYDDKLIIYYNLRDSRQVSYIEAIGASSEIENLRPVPDNKKTAVECSTADKNGGA

SEQ ID NO: 13358 - protein, 579 aa, synthetic construct
MRNKSLAGRANNRAERPRKVAIYIRVSTTHQIDKDSLPMQRKDLIAYCELILGIEDYEIFEDAGYSGKNTDRPAFQEMMQKIRAGSFSHLLVWKIDRISRNLLDFAEMYEELQSLRVTFVSKNEQFDTSNAMGEAMLKIILVFAELERNMTSERVTATMISRANQGLWNGGRIPYGYSYDAETSAFSIIQDEADVCQLMKTDYFEHKSIIHTARLLNDKKIPTRSGALWSPTAVWKILSSPFYAGVYRYNHYKGTENRTLNPEEEWVLVPDHHPAIFTLEEHEKLCDILDANKRTANLPGRKHRAKNVYVFSGILYCGKCGNKLVSTPGRLQADNFRTTTYSCPKKRKTHECDNPSVNDLIVGEFVINYILNMLNAKSSFSSINSPAELEERLLYGGSFKDVQHISEDGLNEFYNLLSRYGSDSSYVFAVKHPRKKKAAVNPEVEALRKDKEKQERALKRLQDLYLYSERAMTEKDFIIQKNEISSRIQDINTRLGMVTHDANSTLSDEDFVRQASHLLITKKLIGRDYIYYKALAQTVSPDVLKIYMETILDSVYVIDGRVSSIVFRNGLTHTFIYQK

SEQ ID NO: 13359 - protein, 523 aa, synthetic construct
MAKVTTIPATITRFTAAPISEKKKRRTAAYARVSTDSEEQLTSYTAQVDYYTNYIRGRDDWEFVEVYTDEGITGTNTKHREGFKRMVADALAGKIDLIVTKSVSRFARNTVDSLTTVRQLKEKGVEIYFEKENIWTLDSKGELLITIMSSLAQEESRSISENCTWGQRKRFADGKVTVPFKRFLGYDRGPDGNLVLNKDEAVIIRRIYSMFLQGMTPHGIASRLTSDGIKSPGGKDKWNAGAVRSILTNEKYKGDALLQKSYTVDFLTKKKKVNEGEIPQYYVEGNHEAIIQPEIFELVQQELERRKNSRGRHSGVHLFSSKIKCGQCGEWYGSKVWHSNSKYRRVIWQCNHKYDGEEKCSTPHLTEDEIKTMFVSAVNKLISNKDAVLAPLRASLDIAFDTSALEAETEELQSEIMVTSDLIQKCICENAHVALDQTEYQKRYDGLTARFDSAKAQLEEIDSAIADKKSRRATIEAFMDTLAQADLMEKFDPALWCGLVDFVTVYSKDDVRFTFRNGMEIKA

SEQ ID NO: 13360 - protein, 553 aa, synthetic construct
MINLKVAIYSRKSVLSEKGDSIENQIELCKNYCESYFQGEDLEYIVYEDEGFSGKNLNRPKFKELINDIKSNKINLLICYRLDRISRNVADFSTTLELLQKYNVNFVSIKEQFDTTTPMGRAMIYIASVFAQLERETIAERVKDNMLQLAKMGKWSGGCLPLGFNSEKVSYLNSEMKEKSLVKLIPINSELETIKFIYNTYLSKGSILATLTELNTLGYKTKLKSNFELSGVKRILKSPIYVISNEDTHNYLKSLGYDVFGTPNGNGYLTYQQKSSNNSIVAIAGHKGVISSYDWLRVQKRFESNKQKAKKSSNRSGTGQNTSLFSGLLKCSKCGSNMVIKYNSKNKQGFNYIYYICSGKQKTNIAIKCDCPNLRTDLVDDIILAKIKTHNKDIIIKTYEDKLKELQLSSNKQLTNDLNKNINEKTDQIRSLIRELSLVSDESIKEMLRNEIASLNSELIQVKEKLNNSNKIQSDIENLIINIKQTLINFKNFYNYFDKCNDVNVRRTLLNNIIENIIYDVESKSFNINFINLNMQLSSVRKSLDCNLYSSKR

SEQ ID NO: 13361 - protein, 484 aa, synthetic construct
MNAVIYARYSCDRQTEQSIEGQLRECKAFAASEGINIIGEYIDRAISGTTANRPEFQRMIADSKYKTFQAVIVYKLDRFARNRYDSAMYKSKLKANGVRVLSAKEHITDSPEGIILEGLLEAMNEYYSAELSQKIKRGMRENAIKGKTTGGNVALGYRIGADKRMEIDPAGAALVRRIFTSYDSGMTFAQICDDLNHAGYTTSRGKQFRIDTISRILANQRYTGTFQCAGEDAHCPPIIEPELFRSVQERLTESRHKHRHTQSPHEYVLTGKAICGTCGRRLTGRAGTSKTDKRYYYYCCPNKCCGWLPAAELEHAVLDAIAQYTTPEACEQIANATYALYQQSTHENADLTAAQRRLQETEKKLENAVNAVLNGITSAALQATMQQLEQQKAALETEVRLLQTDAPELKLEHFQYFAHRLLEVQAEGTEKILQLLVNQVIVYKEQITVLVNLTDKTKTPPLEQVTAALRESSCSVACGGGDEN

SEQ ID NO: 13362 - protein, 516 aa, synthetic construct
MQKNNNIGNRCVIYARYSCSNQTEQSIEGQMHDCEQFAARNNLQIVNSYIDRATTATTDKRPQFLKMIADSKQCVFDVVLVWKLDRFSRNRYDSAMYKKKLKDNGVRVMSAMENITDSPEGVLMESVLEGFAEYFSKDLSQKVKRGMRETAAKHKITNRIPFGYCKSEEDTYIPDPHTANAVRKVFDMYITGFRKSDIADWLNSNGYKTSYGNQFTLTAITPLIKNTRYIGKYYYADNEYTDETQRIVTDDIFYKAQQKAIANQHGGSCKAIERYLLSNKLYCGYCHNKMIGECGKNQNGLAYHYYTCVGRKRKHICNRKNIKKKDIEQYVINAISCLLNDEYAINKIIETAINYQQNDVEHINEIKDIESTIKEIERKISNILSAIEAGIFTDSTKNRLQELENQKTRLTQELNYKNQSSTKIPRTTLKQILKNLDLSKDATNPEKQNIIDLLIHRIYLWQDKILIVFNQSNLCDNEISVDDTDVNTIIKTLSEPNASSSDSVEYGTPDQSRTGD

SEQ ID NO: 13363 - protein, 483 aa, synthetic construct
MKMAAYCRVSTEKEEQLSSLENQREFFEQYADKEGDTLVKIYADEGISGKSMNKREAFTQLLEDSQTGAFDYVAVKDISRFARNTSDFLYGIRTLRSNGVDVRFLSNNQTVIGESEFVLTVFAALAQEESSNLSKRVIFGKRQNAKKGRVPNVVYGYNKIDTYTLEINEKESYIVQLMFKWYIEGEGTRRIAIKLNEMAIPTKKQAKWVPKTIRRILQNPIYIGKIINNKSVTKDFLSGTREAIPPEEWYIHERPELRIISDDDFELVQQKFKERQEQYKNDNPGNRFSNRHLFSNLIKCGECGKSFTAKVYQWKNRYVRYRCCVHNNNGNAHCTNSVTVDEQELLNEVKAYLLTAIEDKKAFADKLMKQYQAQTTNVDVSKLTDTRQSLEKRRSKFKEMFAADIITMDELKKEMSAIDEGMRSIDEELKVYDEIQKKATHIDDIHKDIEQILMQNEYTNDDMRRIIENIVVYPDKSVEIFMK

SEQ ID NO: 13364 - protein, 575 aa, synthetic construct
MKKKFSSVPDPDIQDAVIYARYSSHSQRDCSIEQQVADCELFAQQNGLRVVKIYADRHLSGTTDNRPEFQQMLKDAAHGHWPFVICWKIDRFARNRYDSATYKYKLKKAGVRVLYAKESIPDGPEGILLESVLEGSAEYYSASLAQNIRRGMRFNAENCKVNSGSIPFGYCKGPDGRFAIHETNAEIVREIFRKAAAGVPFVDIATELNNKGLKTSRGGRWNKNSFVLLKNESYIGVYHFSDIRIEGGMPAIIDPGTFLAANERMNANRRVRGRHHDGGDYLLTGKLKCAHCGSYMIGFSGTAKNGESHYYYGCQKRRRERACKKANVPREWIEKVVVKAALDYVLQPDVMEWITDAVMEYQEREAASSQLAALTAELEENQKATDNLMKAIEAGIITATTKQRLLDLETKAKDLKRAIELEKLSHVRLEREQILYWLEQFQGGSLQSQEFRRKVIDTFVSVVYLSDDHLRIAFNYSGQNRSEADFNLIMDAETASADYPINSFSLPLSPPHKKNPNLFPSGKGSDFFVCRISYRVIFISSLSSAAFLSMPPAYPVRLPFAPTTRWQGMMIEITL

SEQ ID NO: 13365 - protein, 520 aa, synthetic construct
MKRITKIEENKALSVKTKTRVAAYCRVSTASDEQLISLDTQKAHYEDYIKSNNEWEYAGIFYDEGITGTKKGCRDGLNSLIDSCEKGLVDLVITKSISRFSRNTTDCLELVRKLMALNVTVIFEKENINTDTMESELMLFILSSLAESESVSISENNKWSIQKRFQNGTYIISYPPYGYENAGGEMIVVPEQAEVVKKIFEDTLAGKSTHAVAKELNDSGVRSKKGGKWTPGAINAIIRNEKFTGDVIFQKTYTDSQFSRHTNDGELNQYLCENHHEPIVSHEIFDKANEVLNQRGKEKGNGERTERYQNRYGFSGRIKCGECGGVFKRRIHYKPSGSYIAWCCTHHIEDRHSCSMKYITDDGIKTAFLTMMNKLIFAHQSILKPLLYSLQGFDDKNRLLQIQEYETKLEKNMEERQVLTSVMASGLLEPALFSKKITALTLEEKRLQEEKKHMINTVSGDRTKIEALEKLMKFALGSGMLTEYSDEIFLSHAEGAIVFSRKEIVFELKCGLKLKERLVG

SEQ ID NO: 13366 - protein, 521 aa, synthetic construct
MKTVTKIEANQRTTGSEKKLRVAAYCRVSTDSDDQLESLAEQKKHYETYIQAHENWDFAGLYYDEGISGTKKEKRSELMRLLSDCEAGQIDFIITKSISRFARNTTDCLEMVRKLLAINVAIYFEKENINTTSMESELVLAVLSSLAENESVSISGNEKWSIRQRFQSGTYKMNPPPYGYRWNGKRLEVNNDQSEIVKRIFAEFLSGKGVMHIARNLDSDNIAPARGKQWCQSSILRILKNENYTGNAVFQKTFTDESFRRCVNYGQLDKYLVADHHEGIISKADFEAAAALIDRHAVEKNVTKGSHKYQQRYCFSGKIVCGECGATLKHRTHRLGGETYEAWCCSTHIYNKESCSMKFIRDDDIKLAFVTMMNKLIFGHKLILKPYLLTLRSSSTDSSIQRIQQLRLLIEQNTGQQETLTRLMANGFIDRTLFGRELNAIMAQTDEYRTEIDTLSSSVTGDGAKLKETERLIKLVERGRMFKEFDADLFSKLVNRICVFSRNEIGFALKCGLTLRERIGE

SEQ ID NO: 13367 - protein, 598 aa, synthetic construct
MRKINKIEPLMPTLPSRKKVAAYARVSMETERLQHSLSAQVSYYSELIQSNPEWEYAGVYADDGITGTKSTRAEFQRLLQDCEDGKIDIILTKSISRFARNTVDLLETVRHLKELGIEVRFEKERINSLSGDGEVMLTLLASFAQEEVISLSNNVKWGTRKRMEQGIPNGHFRVFGYCWEGDQLVIVPEEAAVVRRIFQNFLDGKSRLETEREFAAEGITTRDGKRWVDSNIKVVLTNVTYTGNLLLQKEYIEDPLTKKRKKNRGELPQFYVEDTHEAIIDKETFDYVQAEIARRKELGAFANKSLNITCFTSKLKCCHCGCSYVRNQRSNRTKHTSTYDDTIVAWGCGTTKKKGGRCSNKDIPERVLREACATALGLDEFDEDVFLERVDYIQVLEGQVLEFHFYDGTTALQEWVSTAKKDCWTDEHKDRQREWIKNYMANASDGRFSEFTTRIRCEHCGSTFRRNTQPSKSATGGKMHYWRCPTSGDCVTTGIREDRLKDITASVMGLVEHDADAFKEQVEYISVSHDMKLTFHFFDGHEETVQYNTKRQGTPWTEERHKKFSASMQGKYTEERREAMSQKMKQIRSEKHWSSKRK

SEQ ID NO: 13368 - protein, 527 aa, synthetic construct
MVVQKKVTTIPASLTRFTATPITELKKRRVAGYARVSTDHDDQFTSYAAQIDYYTNYIKSRDDWEFVDVYTDEGITGTSVKHREGFKRMVADALTGKIDLIVTKSVSRFARNTVDSLTTIRQLKEKGIEVYFEKENIWTFDGKGELLLTIMSSLAQEESRSISENCTWGQRKRFADGKVTVPFNRFLGYDRGPDGNLVVNPEQAVIVQQIYAMFLQGMSYHGIAKKLTADRIPTPGGKDKWSISTVRSILSNEKYKGDALLQKSYTVDFLTKKTKINEGEIPQYYVEDNHEAIISPDVFAMVQREMTKRGRGKNYHSSVHAFSSKIRCGHCGSWYGSKVWHSNSQYRKTIWQCNHKFDGDERCDTPHLSDEDIQRLFLSAANKLLVDKTEVIANCREMMDLLFNTTELEAEQATLLEETQLISDMVQQTIYENAHIALDQTEYQKRYEGLTQRFETAKQRLETVMAELDRMQTQRADIEAFLESFEALPDTLTEFKLENWHSLVDYATVYSTDDIRFTFKHGQEVQA

SEQ ID NO: 13369 - protein, 492 aa, synthetic construct
MAAIDFNNVVDLYIRVSTSEQAEEGYSVAEQEERLRSYCSAYNYTINAIHVDPGFSGASLDRPGIKKVMYDVEHGRCKKVIVWKLDRLSRSQKDTLILLEDVFLANDCNFISLMESFDTSTPFGRCIVGILAAFAQMERENIKIRTMMGRQARIREGHFHGSRCPLGYKFQYAPDGTLLSNDLVVDPYTSKLVQEVYRLSLGGSSFSSIAAHMASTYGCSLYDWSRNTAIRRILSNPIYMGKVKVGNELYPGIHEPLVSETDWYMVAAMLKHNKEQQKRTYAYQISCGVYADNLLTGLLFCGDCGARMYARRVSQNKKKYICHSVAKTSPAMIKSDHCTNRLHPFTVHQLDEMVIDEILKLSLDRPGFDMLCDQPDDSSKSEDKEIYEERLAEVNRQLDRLVKLYQTGLIDLDNISARLGDLNQEKNFLEGNLATINEVTPADLREMAWKSIQSLQTVLDRGDMGEVHRIIHTLIDKVVVLNADVTIYWSFC

SEQ ID NO: 13370 - protein, 502 aa, synthetic construct
MEIQIREGNSRQKQKLKVCAYCRVSTDADEQENSLENQIRHYKEVITSNPDYEYAGVYSDFAISGFKEKRPGLQKMLADACKGKIDLILTKSVSRFARNTSIVLEATRKLKELNVGVFFELQNINTLSGEGELMLTILAAFAQAESESGSVGAKMVYQRKYEAGIPVQYLERSFGFKKDERGVYIADEEEAAWVRKIYEMAADGYTPAVIKRYLNENGVKTVGGAEWIDSTVFRLIENEIYKGDYIMHKHFVNEERKLVRNRGEVDAWYIEDDHEAIVSIELWQRAQDALEAKRDYLAEGSVIEEFTEENYPYMNRIYCARCGHPLYKRIYSNGNRLNWGCSGTKRYGKSFCEGINIPDGVLRGAWHFDENMYIGEKQTDKGKKEFTYLKEASWKRRHKKKEPEPIPENTETEYPYREKIFCGLCGSRLVRHVNTKNHKVIWVCNGRKRKGKDFCDGTRVPDTIIKGWGEIKKDIYIQRKDDKNGKKRYSYTSKKPKGADRA

SEQ ID NO: 13371 - protein, 459 aa, synthetic construct
MSTTHFYSHYPTIEYKTCALYVRCSKEEQAKFGDTIEAQIEDLKAFAKLHHLKIYAIYVDEGHTARKKYNKRKEFMRMLQDVELHKFKYIIFTKLDRWFRNIADFYKIQEILDNNGVTWLTALERYEMETTNGKLNVNIRLSVAQDEADRDSDRIKDVFRLKVKKGEAITGSLPIGLTVGENGKVDIDPDTVQIAYDMFDYFETHNSKRGTLLYLIDKYDRYFCYETIARALMNPLYKGEYRGNPDYCPKIIDPARFDRIQVLGKRNVKVRKNNRYYVFSGLAQCKECGHALVANTTVQKRYSREYTRYRCNYYSNSHLCTHSHGISEKVIETYLLDNIKPELEKYITDYEIKQNVPTKKADPSKIKTKMQRLKELYVNELIDLDDYRIEYEQYKQELDKLTSTAAPEVKDLSAIRSFLALDLQSIYDSLTPQEKRTLWSSIIDKIIISDSGDIEIVFL

SEQ ID NO: 13372 - protein, 563 aa, synthetic construct
MESERMQHSLSAQVSYYSALIQKNPEWEYAGVFADYGISGTGTKKRDEFNHMLAECEAGNIDIILTKSIQRFARNTVDLLNTVRHLKELGIEVRFEKEKINSLSGDGELMLSILASFAQEESRSISENVKWGTIKRFKQGIPNGKFSIFGYEWQDDKLVIVPEEAEIIRWMYAEYMKGASRIEIGRALMDRGIYTRQGKPWVDSNVKVILTNITYTGNMLFQKEYCEDPITKHRRKNYGEMPQYFVEDTHEAIIPMDEWQAVQAEFKRRRDLGPFGNKSLKLSAFSTKITCGCCRKHYRHSGKRNTAGEVYYIWICQTKSQKGVSACPSKNIPEKMLQNTAAEVLGLDEFDEDVFSQQIEKVIVIGDDTLTFRFYDGHEVTTKWQSTAKTDWWTDERRKLWGERHKRKDTNPNRNTFYEFTGFIKCGCCGANYRCQSGKRKDGTPTRSWYCTGPRSECRNPAIRDETMKRLVTEILGLDEFDEAAMDAQIESATILDHMVTFHFRDGHIESRDFLDKRHGTPWTEERREKAKKSMKAAWTDERREAMSERIKKIRSEKKWPNP

SEQ ID NO: 13373 - protein, 571 aa, synthetic construct
MTAISEKLNSKKVAIYIRVSTRYQVDKDSLQVQRRELIAYSEMILGTSDYVIFEDAGYSAKNTDRPDYQRMMDRLRTGEFSHLLVWKIDRISRNLLDFAEMYSELKKLGIAFVSKNEQFDTSNAVGEAMLKIILVFAELERQMTSERVTAVMLSRANNGQWNGGRIPYGYDYDKKTKQFSVNAKEADIVKKIYLLYDQYRSLIYVCRHLNNLGIKTRAGNEWNVPGVHKILTSPFYIGAYQYNVHNDRKGNKKNKEDEWVTIENHHQPIVSKTDFDRISKALSDNCLGGVSKNKTYLRKNIHTFAGIMRCGICGTSMTASLDSPHADGWSPSIYTCRKRRENTAICSNKMVSDSTFGGVIVNFIANIIRAKDTVTDQTTLSSLENILLKNLSSSGITGIERPGLEALKQAIISGKTGIEYNPPIAESGLSNTSSEKSLLESKHRSKESALSRLKSLYLYSDSGMSEREYASERNKIISELQDIEKRLGEIRSEDQETMISSEDFISRASYFVMVENLIGDSKIDYKKFSQTVDKSIQKSFFTSIIAEIDIVNGKVTSVVFKNAITVRFKYE

SEQ ID NO: 13374 - protein, 517 aa, synthetic construct
MKKLTKIKIRDAVHQKKKLKVAAYCRVSTASDKQLVSLDVQKEHYENYIRSNEEWEFAGIYYDEGITGTKKDIRAGLLSMIADCEAGKIEFIVTKSISRFARNTMDCLEMVRKLTGLGVAIYFEKENINTGSMESELMLSILSSFAEKESVSISENNKWSVQKRFQKGTFIISYPPYGYYNNNGTMSIVPEEAEVVKEIFAACLAGKGTLAIAKELNDKGIKAKKNGKWYAGSIKNILTNEKYTGDVIFQKTYTDDSLNRHINYGERDRFLCKDHHEPIICHEVFDRVRAVLDQRAMDKGNGIETFRYKKRYCFSGKIKCGECGKTFKRRQHYKPSGNYVAWTCETHLENKEKCSMLYINDESVKLAFLTMMNKLIYSNKEILKPLYRKICHVYEKDRLLKINELETRINENADRKHILANLMAKGILDTAILNKENAALAMEEQTLWSEKEKLVVLDNKRVKELRKLVDFAAKSKMLKVFREETFIDFVERITVESRLTLVFHLKCGLNLKERLVK

SEQ ID NO: 13375 - protein, 523 aa, synthetic construct
MNVSKNITIIPARRRVGNTAKSVQTPKIRVAAYCRVSTDSDEQATSYEAQVEHYTTYIRMNPEWEFAGIFADDGISGTNTKKREQFNRMIERAMAGEIDMIVTKSISRFARNTLDCLKFIRKLKEKNIPVYFEKENINTMDAKGEVLLTIMASLAQQESQSLSQNVKLGIQYRYQQGYVKVNHNRFLGYTKDENGKLIIEKEGAEVVKRIYREYLEGASLQKICMGLEADGILTGAGKKIWRSDALRLILKNEKYIGDALLQKTYTVDFLEKKRVPNDGLMPQYYVENSHEAIIPRDVFMRVQEEMHRRANLHSGRQGKKRVYSSKYALSSIVYCSNCGDIYRRIQWRAHGEKYTVWRCCNRVENGPAACDADAILEEELHDVVVQAINRTLSKRENMKVVLASNIESVLTEVNGIPLGTIDSQLEELQNELIKVANAKGNYDSITDEIYRLRELKQNAMKKTAECKGIRLRVEEMRRFLEEQEVDITEYDERLTRRLIKRITVYDDHYSVEFKSGISVDIHK

SEQ ID NO: 13376 - protein, 557 aa, synthetic construct
MIKKTKVYTYKRVSTSMQVDGYSLDAQDERITKYADAFDYEIVGEYVDAGKSGKSIEGRAEFKKMLEDIESNKDGVSYVLVFKLSRFGRNAADVLSTLQFMQDYDVNLICVEDGIDSSKDAGKLMISVLSAVAEIERENILVQTMEGRRQKAREGKWNGGFAPYGYRLNNGKLEIEESEVEAIRLIFDKYANTDMGANGIAKYLGQQGIMKKERQNGKSPFFSAKLIREILDNPVYNGKIAFGRRRTEKISGTRQYHIVKQDDYMVCDGIHEAIIDDGTWEKVQEKRKLQAKRYEHVNKGKDEKIHLLSGLLCCPMCGAGMYGNKSIKKKNGKHYKDYFYYGCKHRSMMQGHRCTYNKQLQEEKLDSAVAEVIGKLVSNPKFADMMKEKINIKTDTSEVEKEIVNYQKQLSQYIGTKRSLENQIDCLNYDDRHYDRKLSDLQDRLDKMYDNIDDVEHSLKDCKDRKRAIEAEKLTGDNIYKTLIYFDKLYDVMEDADKRALLTALIKEIHVYEEEQANGQWLKSIIFKLPIVEDNMNISLDNDTHVESIVLLQKSVK

SEQ ID NO: 13377 - protein, 424 aa, synthetic construct
MDRIIEKVHFDMPVQPKATRVAAYARVSSGKDAMLHSLSAQISYYSEMIQSRPGWLYAGVYSDEALTGTKENRRGFQALLEDCRAGKIDMVIVKSISRLARNTVTLLETVRELRSYGVDVYFEEQNIHTLSSEGELMLTILASYAQEESLSVSENQKWRIQKNFKEGKPWNGAMLGYRNVNGTLTVIPEEAELVKRIFNMYLSGMGIQSIANTLNREGVSTRLGAKFKYTGIHKMLRNEAYAGNLLLQKTFKDNHITKRTIINRGELPMYYVENAHEPIIPPETFKRVQEMIAQRAEKYAPPATKSPLTYRFTSLITCTKCGKHFRRKLVRGKPIWICPTFNYEGKAACPAKQIPEEILEEITADMDMERLTGITADDGNRLLFHFSDGTAAEKIWRDRSRSESWTDEMRQNARARTKARNQNK

SEQ ID NO: 13378 - protein, 529 aa, synthetic construct
MTERNVTVIPATKTSIHRMPGTAAKKRRVAGYARVSTDKDEQYTSYEAQVDYYTQFIRRHADWEFVKVYTDEGISGLGTRKRDGFNEMIEDAMSGAIDLIITKSVSRFARNTVDSLVTIRKLKDKGVEVYFEKENIYSLDGKGELLLTIMSSLAQEESRSISENVTWGQRKRFSDGKVSLPYKQFLGYERGEKKDDPPVVNPEQAVLVRRIYRTFMEGKTVGAIAKELTAEGVPTPAGKDKWRASTINSILQNEKYRGSALLQKCFTTDFLTKKQKVNEGEVPQYYIEHSHEAIIDPMEWDAVQEEIKRRKQIGRAYSGTSVFSAKLVCGDCGSWYGHKTWHSTDKYRTTIWRCNHKYADEKCRCHTPSVNEDEIKSRFLKVFNSIISSKKPYISACLTAKKAVTDTTGIDTEMNDLLREMEVVAGLTKKCIEDNSTTVQDQEEYTARYNGYVDRYETLKSRYDTLAAERESKLEKAKAIDRFIHTVKSREDLLTEFDQHLWMTTVENVTITDDGKMLFRFFDGTEIYG

SEQ ID NO: 13379 - protein, 463 aa, synthetic construct
MEERIITRVEHIPALPKRLALSERKRVAAYARVSTSSDEQLNSIDAQKSYYKEYIRKHKNWIYVGLFADEGISGLSHFKRTEFNRMIADAESGCIDMIITKSISRFARNTVDTLTYIRRLKGKGVAVYFEKEDINTLDAKGEFLITLLSSMAQEESRSISENVKWGIRKRMADGIFHLPYSRFLGYEKRESTLAIVPGEATTIRYIYYLFLAGKTAKYIASFLTESNITTPSGLNSWHPSAVISILRNEKYCGNALLQKTYITDFLTKKAKKNLGELPQYFVENDHEGIIDVDVWNEVQSMIDNRDRTYSGYSVFSHKLVCSVCGGTFIRRTRYYKSQPEAPVIFYNCRNKFNKSCKCKNVIIHETDLNSIFHEAVKSFMQAKREKVMVAVKETLRICLPEEKFQSVTDHLSLAANTDSTQRLSDMTLECLINRVAIFTDRRIRFEFRDGNSMELKIRHERKQ

SEQ ID NO: 13380 - protein, 428 aa, synthetic construct
MPKKVAKVAQIPKLQRKKQVAAYARVSSGKDAMLHSLSAQVSYYNDLIQKEDGWEFVGVYADEAITGTKEGRTDFQRRLTDCRNGKIDMIITKSISRFARNTVTLLETVRMLKALEVDVFFEEQNIHTMSADGELMLTILASYAQEESRSASENQKWRIKKNFEEGMPWCGRMLGYRIRAGQYYIIPDEAEIVRRIYREYLDGAGPNGIANRLTEDGVPTRNGGIWQPQTIAKILRNYTYTGNLLLQKTFRENHITKKTIRNTGQKTQYLLENAHEAIIPLKTFNAVQTEIERRSESRKSSPPAKPNFTYTGLIQCAKCGKNYRRKTTATRIVWICATFNTRGKKYCASKQIPEELLDALVAEVFDTPANIQKIIADDGNTLHFHLVDGSVVTRIWSDRSRAESWTPEKRESARKRAKERSQTQCQKQ

SEQ ID NO: 13381 - protein, 407 aa, synthetic construct
MKSGKTRVCAYARVSTMTEKQQDSLTNQQAYFIHFYQNQKDVDFIGVYYDQGISGKLAKRPGFQQMLEDCRAGKIDVIHTKSISRFARNTELLLAVSRELKTIQVDIFFEEQNLHTLSNEGEVMLTVLASYAEEELRNMSENQRWAFQKKFQRGELVINTKRFLGYDKDENGELIINLEEAKIVQRIYNLYLSGMGVHAIAKLFNEEKVSTVDGGKWYSSTITNILKNEKYRGDAILQKYYFAEIKAKQRLNQGQVQQYLITDNHEAIVSREDWEAVQKRLQQNRKANLSIDYNRRYPLSGLLKCEHCGSTLKRQKYYKGKVVWVCSKYIREGKVACIGMRVPDSAVQDWSIHEPTVVKEENIGGKKYYSYSSKENDTSRAEATHSENPNGSLLPSVHRPRRTAIKL

SEQ ID NO: 13382 - protein, 435 aa, synthetic construct
MAAYCRVSTDQDEQLSSYENQVRYYQDYIRQNPLYELVDIYADEGISGTNTKKRTEFNRLIGDCRKGKIDRIIVKSISRFSRNTLDCLKYVRELKELGIGVTFEKENIDSLDAKGEVLLTILSSLAQDESRSISENATWGIRKKFERGEIRVNTTKFVGYDKGENGNLIINEEQAKIVRRIFQDFLQGETPESIARSLKEEGVPGWNGKANWYPTTIQRMLQNEKYMGDALLQKTYTVDFLTKKRSENQGQVNQYYIEGNHEAIINKEDWDLVQLEVERRNQYRQDNHINFYIIQCEQNPFICKVFCKECGGLFGRKNWTTSRGKRPVWQCNNRYKVKGIQGCTNRHIDEETLQQAFLRAIEILHEKKEQLLEKWNSLNEEQKLEKYHAAQLKRLLDSEQEVFDGRKMCQVLEKIMLGEDGSITVKFLEGTEVNL

SEQ ID NO: 13383 - protein, 526 aa, synthetic construct
MAQRKVTAIPATISRYTATPINSTKKRRVAGYARVSTDHEDQSTSYEAQVDYYTSYIKSRDDWEFVAIYTDEGISATSTKKREGFKAMIADALAGKIDLIVTKSVSRFARNTVDSLTTVRKLKDEGIEIFFEKENIWTLDSKGEILITIMSSLAQEESRSISENVTWGQRKRMADGKVSFAYSRFLGLDKDKETGKIVVNPEQAETVRLIFHLFLEGMTPHSIAAELTSRGIKTPAGKDVWNQQTVRRMLSNEKYKGDALLQKEFTVDFLQKKMKKNEGEIPQYYVEGNHEAIISPAVFDMVQAEIAKRTKSGSRYSGVSIFSNKIKCADCGGWYGSKVWHSTDRYRRVVYRCNRKYNGKKCETPHVTEEEVKAAFISAYNQLVTEKKEIIANAEIIRKTLCVTDALQEEKGKLEEEMAVLVEMTQNIVAGNARVAQDQEEYRKRYDGIVRRYDDAKTRYDAVVAAISAKEAQSARLTDFIRHLQSQKETVRDFDSHLWGSMVEFITMGRNKEAAVTFRDGTEVNV

SEQ ID NO: 13384 - protein, 591 aa, synthetic construct
MPKITRITPTVAVLKAKKRVAAYARVSMETDRLNHSLSAQISYYSALIQKNPEWVYAGVFTDNDISGTGIKKREGFKRMIEAADNGEIDIILTKSIQRFARNTVDLLETVRHLKNLGVEVRFEKENINSMNGDGELFLSILGSFAQEESVSISNNVKWGTRKRFEKGIPNGRFRIYGYRWEGERLVVIPDEAAVVKRIFQNFLDGKSRLETEREFATEGITTRAGCRWVDSNIKVVLTNIHYTGCLLLQKYHAENVLTHRQIKNCGELPQYLVENSHEAIIDKETFDYVQSEIARRKEMGPRANKSLHLTCFSGKLKCPFCRISYAHSKRTDRGFTEYWACGSRKKKGGRCPVGGSINHENLKKACAAVLGLDEFDEGAFSDKVDFINVPERYVLEFHLKDGSIVTKKCPNTGHRDCWTPEYRAKTSEKRRKKPNCKGSSVMTGKIKCAGCGCNFRRATQPSSASESGKAYYWRCAERNECGTVGLREDLLKPFIAQVLGIATFDDGEFDRQIDHIDVLSATEIVFHFKDGSAVSSTWELPKRAGRRWTDAQREKFKKSIKGSYTPEVRQRMSERMKQLRKERGKSWRKEK

SEQ ID NO: 13385 - protein, 523 aa, synthetic construct
MSTAVIYARFSSDKQREESIDGQIRECKAFAQANQLNVIAIYIDRAMSARTDHRPDFLRMIKDSRSGAFDYVLVYQLDRFSRSRYDSAIYKHELKKNGVKVLSAKENITDSPTGIMLEAMLEGYAEYYSAELSQKVRRGMTENLLEHKWNGSPVPLGYALDANHRLVIDPDTAPHVKALFEMFLAGKSYAELARYLDEKHIRTVTGRKYTGPTVHNLMSRQLYTGTYTWGGQVIEDFCPAIISKSDFSRAALRMANRKRTAKDGIPMSVRRSPEYALTGIIYCGECGRTMTGYSGRGQNGDRYYYYRCNSNNNRCRQTEKIKCKNHPVRRNRLEDLVLQTTVNILSDKEAVAAIAEQVSRIKLENPYASELSNIKSRLADLKKRHDNSVKAIESGVMSQAIMDNVCKYEAEMDNLKARQEKIKLATPSLQIDPVAVEYFLKSLLLNKKQHDKYRLDLFEAFIHRVVVYHDKVEIQYNYLPGHKLENPITTPLPGCSNLNKVVGDNGFEPSTPSMSTRYSNQLS

SEQ ID NO: 13386 - protein, 461 aa, synthetic construct
MKLERCAIYIRVSTAEQMMHGKSLEAQREYLEVYAREHNMVIAGVYADEGKTARKELKKRKAIHALLEDVKAGKIDVILFWRLDRWFRNLSDFYKVQDILDEYHVRWISTSEPGINMETRDGRLQLNVVLSIGQNEVDTTSERIKFVNEASIRQGKLIFGDANMGYGYKSGTVDGVKCMIKDPEREEAVNAFYQYFFKHQSKTGALKYIQENYDPDFSYSSMRTLLSSEFYKGTYRGAPYCPAYLSPEDWDRLQKISDKNIKVNRSNRVYLFSGLIYCPNCGNLLSGCGCSSIINRKTGAKRTYCYYRCNKAYMDNHCNYRHRLSQNLVESYLLEHLEDEYQKYHVRSGQIREKQKKEKKIKTPEKLRSELERLNLLFQKGRVEWEYYNKEYSRIEYELKEALAMQPEIERDVSYVNEIIQSDFRSMYAKLSLENRRAFWRSIVSDIHVAKDSTVKEVNFL

SEQ ID NO: 13387 - protein, 464 aa, synthetic construct
MMTNKIIRCALYIRVSTAEQCMHGKSLEAQESYLQQYASDHNMIVVGVYADEGKTARKELKKRKAIHSLLEDVKAGKIDIILFWRLDRWFRNLSDFYKVQDILDEYGVRWMSASEPGINMETRDGRLQLNVVLSIGQNEVDTTSERIKFVNEASIRQGKLIFGDANMGYGYKSGIADGRKCMIKDPEREETVNAFYKYFFKHQNKCATLRYIQDNYDPNFSWAIMRTLLSSEFYKGTYRGFPYCPPYLTEDQWNELQKIAHKNIKRAKSGRIYLFTSLIRCPVCGQLLCGNGCKSIINRKTREKRDYCYYRCSRAHNDRICTYRHRLSQNLIEQYLLDNLDTEYRKYQIRVKKIEEEKKKIAQTKTPEKLNAELERLNLLFQKGRVEWDYYSSEYDRIEQELKDLSRIKPEVKRNLSFLEDLLQSDFKTLYASLSPENRRAFWRSTIKQIHLNEDSTIKFVDFL

SEQ ID NO: 13388 - protein, 529 aa, synthetic construct
MPQMFIDVADNQSERLQVAAYARVSTEKEEQEDSFERQVEHYKQLIYSKPDWQFVDVYADPGISGTRAEKRPDFLRMIEDCRAGKIKKVLVKSISRFARNTVDALQYIRELKDLGISVYFESENIDTLTPGGEVLLTILAAMAEQESRTISSNIKWAWQRKFQKGDIILNTGLMLGYRKIGKDDEGHDVYEINEEEAEIVRRIYREFIAGYSITQIAKRLQADGVKTKLGRESWRHNVIESILTNEKYTGNALLGKTFKPDVLTKYRQKNDGKKAPIYYVEGSHPAIIEKGLFDLAQQEMQRRRDANDNKVGGGRYSSRYPFSGMLVCGICGSKLRRQVRTMGSGKRTASWGCCNRINNGRAVCDSHHVNEDVLEAAYLTAMRRLVDSAEEVVEAVRDGAELALEPENKAAMDRIDEETIQLQEAALALHKAKQRMEIGSVEYASRVKEYSERMKELEAERNELQGTAAKYAEVRLWLDTFIEQTMQSDTLTTVDGTTMKMLVDRIHVRNDGIVVEFKCGVAIEQEYVK

SEQ ID NO: 13389 - protein, 488 aa, synthetic construct
MEKARAVAYIRVSTERDAQLHSYEFQEHYWQSAFEDDPDTELIGIYADKGISGHSVQKRPKFLVMMQDAREHKFDKIYTKSVSRFARNTTQLLEAVRELRDLGIEVVFENENIHTFQPTSEIFLTIAATIAENDLEVDSARQRWSIQHRCENGWISVGSGLFGLKLTADNELEIVPEEAAVIRYIYESYVDGGIGSKRIADALNAAGVQSRNGYPWDAKHIIGLLRNEKYKGDVIMGKSVRHFGEYHKNPNAEYAPRYYMEGTHEAIVDKDMWEAAQRILEERSRNHCRTRIAHSFTGMIECGCCGKNYLHKVNNSQCKWQTDIWACRTYLRDGKKACGNSRIKDTVLKEKFISAYNEFIERRPQGDSMVALQEVLEDLRQQEQELAELMMQRLITKAAYEEERKSVKMQITDISEKISERRSKRVPESEYVPITEFSEEKTKRFLSKVVVTMFTVTFVFYNGAKITRTYDNGQPGNKVGWNKKREES

SEQ ID NO: 13390 - protein, 543 aa, synthetic construct
MEVTKVPKKIVTVIEPKRSMTVDKEKYRQKKVAAYCRVSTDSEEQLVSYANQKKVYTEMIASRKDWCFAGLFADEGKSGTRADKRPEFNKMINDCLAGKIDYIITKSVSRFARNTVDCLDYVRMLKSKGIGVYFEEQQIDTLKTDSELYLVIYAGFAQSESESISKNITWSVRKKFEEGTPVFIYKRFLGYKKGADGEPEIVPSEAAIVERIFNLYLAGETVDNISKMMQAENYDIPGKTISFSKGMIMNMLSNERYCGDAILQKSVTIDCIEKKRKKNTGEAPMYYVQNNHPAIIDRVTFNKVQEELARRKTKTPGSAKSSITSTGKYSRYALTDILICGNCGTRYRRVTWSRNGVKRIVWRCISRLDYGKKYCSDSPTIMEDKLQEAIVRAVNKFNEQDNATYKALMRATISEALGLNGDPEEVDMLERKIEALNNKMLALVNESVSSGDGIEAHESEFMTLSQEAELLKQRIAAIQESTAKDNGEQNRLEQIQAIIAERESKCMEYDDSIVRQMVECIKVYPGGKLEIIFGGGYLVEESV

SEQ ID NO: 13391 - protein, 513 aa, synthetic construct
MPEVRLITPITRQSTKKMQVAAYCRVSSNSADQLNSYAAQIRAYKKCIGARDDWELVDIFADEGLTGMKSETRDEFQRMIRMCELKQIDLIITKSISRFARNTKDALAYVRKLKLLGVGVQFEKEGISTLSMGDEMLLNTFSALAQEESQSISMNQRLSIVKRMELGEYVDSNAPYGYRLVDKALAVYEPEAAVVRDIFDLYLRGFSISEIGRELKSRNIPTKAGKESWHPYRIAYILKNERYIGDSFYQKTYRETTVPFNQHINRGQEDRFYAKGTHPGIIDKDVFNAVQQLIQKRKETFSRTTTQNIYPLTSRIQCSECGSFYRRRSVSGTVKWVCALHKDDSTACDSHYYSEERIYDGFITMVNKLRFSEDNILGQVISRLEMTLAAMKRNNLVARDLSNSIAELNAKLLMLEQLRSKGYLAPEVYQAQANEIGAELARLKDVRQEKFNSKAASMLEEVKKFKMLIFELEEPLEAFDEKLFLEIVKSIQINKEDEMSVEFLGGLRFRERI

SEQ ID NO: 13392 - protein, 587 aa, synthetic construct
MTNPTVLVRKATKQTVNRRKGVHLNTLRVAAYARVSTDSEEQLESYQSQVKYYTELISNNPEWQFVGVYADEAITGTQTTKREDFNRMVNDCMNGDIDLIIVKSISRFARNTVDTLQYVRALKEKSVAVMFEEENINTLTMDGELLLTILSSVAQQEVQNISEHVKLGLSMKMQRGEMVGFNGCLGYDYHKEDKTITVNEKEAEAVRYIFNRYVEGAGGKVIARELKNLGYKNKRGESSFSEHGVIGIIKNEKYKGDLLMGKTFTVDPITKRRLDNMGEADQYYTENHHEAIVSRELWDKANEILNKRKGSHSRSNGKRDKYSRQYSFSCLLKCGFCGGNLTRRTWNSRTDYKKTIWQCVTATKHGKKECPYCKGVPEALIEEAFVRAYNALCTYDGEFIDGFLEHVRAGLQNNDTDRELKNLNKKITRLKERKSSLVDMRLDDKIDEEIYQIKVTEINEKMDGLLLQKQSLKDKMQDQQDINKRLTEFQNIISKHEILQKFDRHVFESIIDRVIVGEKAESGEINPYKLKFIFKTGYEKDEVASSQPFSFANSCSNGNNDCGIISLQGDNDTRRDGCQIIPQKRYT

SEQ ID NO: 13393 - protein, 559 aa, synthetic construct
MKKQQKCYIYTRVSTSMQVDGYSLDAQKDKLRKYAEYQEMSIVGEYSDEGKSGKSVEGRPQFKQMLADVESGKDNVDYVLVFKLSRFGRNAADVLSSLQKMQDYGVNLICVEDGIDSSKDAGKLMISVLSAVAEIERENILVQTMEGRRQKAREGRWNGGFAPYGYQLVNGELIIAEDEAEIIRIIYDKFVNTTMGMAAIAAFLNNSGYKKKLRQNNTMEGFSTSFVKGVLDNPIYCGKLAFGRRKNEKIQGTRNEYHIVKQKEYMLNDGIHEAIISEEMWNQAHRKRQETGVLQVKTHSLEHEHILSGIIKCPVCGSGMYGNVNRKKHPDGGYYKDYFYYACKHRKLVDGHRCTYKRQWNEDRINAAVEKIIRKFVKNPKFEREIRKQIGSSIDTSELDRKYDGLKDRLSQTTGAKNRLADQMDRLSVSDKNYDKKYNDMQERLDKLYDEITDIENAMEEVETRLYNIRQDKISEDNVYQFLLFFDKLYDKFTDLEKKTFLKSFLSDVFIYEEEQKDGRILKGLRFKFPIYMNGRNVLGVDWDNESTDETVVLLTRVN

SEQ ID NO: 13394 - protein, 526 aa, synthetic construct
MQYCLYLRKSRADSEAEARGEGETLARHEKALLDLAKKLNLNITAIYREIVSGETIAARPVMQQLLQEVEQGIWDGVLVMEVERLARGDTIDQGIVAQTFKFSDTKIITPIKTYNPNNEFDEEYFEFGLFMSRREYKTINRRLQRGRMASVKDGKYVANKAPYGYNRIRIENDKGWTLEINKEEADVVRLIFELYTVGEKQSDNTFNRLGTGFIAKRLNTMKVSPKRGKVWVVASIRDILINPVYIGMIRWNWRPQQKKMIDGQLHISRPRATDYVLCNGLHPPIISKETFDMAQELMRHNPARPIGEKNTVKNSLSGIVICGNCGRHMVRRPHTKYPDMLICSEPTCNNVGAQLRVVEERILQSLKEWLGEYKISWDITSPPVERISQVSIKKKALQKEQHELDTLNKQISKTHDLLEQGIYTTDVFLERSRALSLRIDEVKEHIAILDKELKTEITREDSAVNIIPKVEKLLEVYHDLPSPKAKNDMLKDVLEKVVYTKKERSKKGNLDNFNITIYPKIPKYIT

SEQ ID NO: 13395 - protein, 587 aa, synthetic construct
MRKCTNHFRNMNSEVKLMICVDQNGQAVEISVADQMWLDDAYFKEKQLRLGTDAPRAALAYRVSTKGQVDHDDIPMQKIDCRKFAQKQGWRVVKEVAEKGVSGSKVSASKRDAIQQLKEEAANGEFDILLVYMFDRLGRIESETPFVLEWFVQHGIEMWSTHEGQQKIETHGDKLMNYIRFWQAAGESEKTSIRTRDRIRQIVSSGHYTGGFVCYGYQLVDQGRRNKRDKPVMDLVINEEEATWVRELFYKVIQEGASGYALAEMLNNRGLRTRAGAKFQSSNIIRIIRHEGYTGYIITKNARSEYIPELQIIDQDTFEKANDIISRRSAKTAQDRRIAHTSQNPTLLAGIVYCAHCGAKMSGFMHTDRYKLADGSIREKVQPKYNCFQRGQRNKGGRDCDGQALYLAERVDAIVLKIVEEVFEQIRDTPYSQVAENRIRQESNLQKTKRAAAEKKIKAAQHALERFEGEILKCLDGTSNFTEDMIAKQIRRYQQELDDAKAEYAELQNARLNEAAEIRKLRTYYDDFKGWAEEFDTAPLEMKRMILRHLIDRVEVGRKYQVIVKFNMKYRQFLECTAETYNTEIGA

SEQ ID NO: 13396 - protein, 574 aa, synthetic construct
MNAVIYARYSSDNQREESIDAQVRAIKDFAAREGINIIRIYADEAKSATTDQRPQFLDMMKDAETGMFQAVIVHKLDRFSRDRFDSAYYKRHLKKCGVRLISVLENLDDSPESIILESVLEGMAEYYSKNLSREVMKGMKETAYQCKHTGGIPPLGFDVGPDKSYVINEWEAEAVRMIFEMFADGKGYSAIIDALNAKGYKTKAGKTFGKNSIHDLLTNEKYIGVFVFNKVYNKINGKRNGHKLKPDDEIIRIPGGCPAIVSQELWERVKKRLEANKRASGAYSAKAVYILSGRIFCGKCGAAMTGKRARMGRNKTVYSYYECSARKSKRTCDMKPINKDFVEQKVIDALYDNLFCDEVIEAATDMIYNHAASRNTEIPEMIKKYEKQLQTVEFEISNIVNAIAKGMFHESMKAKMDELEASKAQLMIRIEEAKLQQQSHSLTREQIYAFLARYRNIKEMTPEQQKTAIQVFVERVTVYEDKIDMDILTVPGKGPGPGKNKKTASDNTDSSIESNMPENGHSGLSGDSCTLMVEARGVEPLSETISTRTSPGAALILKFPQPNAQGQALDIGIL

SEQ ID NO: 13397 - protein, 525 aa, synthetic construct
MSSQVTVIPAIKRIEIKNPIIAKRRVAAYARVSTDNEEQLTSYEAQVDYYTRYIKSNENWEFVGIYTDEGITATNTKKRDGFKKMIQDALDGKIDLIITKSVSRFARNTVDTLIAVRQLKEKGVEVYFEKENIYTLDSKGELLITIMSSLAQEESRSISENVTWGRRKRFADGKVSLPYKQFLGYEKGEDGLPKIVEEEAKIVRLIYRLFLEGKTPTGIVKILTSKGIPSPGGKSKWHASTVRSILTNEKYKGDAILQKTFCTDFLTKKMKVNEGEVPQYYVENSHPPIVSKEVFDLVQHEFKRRKNSRNYTTGTSCFSSRIVCGCCKGIFGPKVWHSNSKYRRTIWQCNNKFKSEKKCATPHLDEETLKRLFVEAFNSLIEDKEAIISGYDAIIQALTDTTALDKETEKVQGECDVVLELMRKLVDENAHTALDQEDYGRRYNAYAARFEKAKKKLEKINEQKVNQQAKRENIEAFMKTIKENDHLLTEFDEELWCATVDRLIVHTTNNVTVIFKDGTELPWHI

SEQ ID NO: 13398 - protein, 401 aa, synthetic construct
MERIVRKIEPVLPALPTKKRVAAYARVSSGKDAMLHSLSAQVSYYSGYIQRHKDWQYVGVYADEAITGTKESRSEFQRLLDDCRAGLIDMIITKSISRFARNTLTLLEVTRELKELGIDVYFEKENLHSISEDGELMLTILASFAQEESLSVSENCKWRIRNNYKDGIPNTFNILGYDFHKGVLTVNKQEAETVRMIFEWYISGMGRLAIVKKLKSLGIKPKNNGEWDSRKIKEILCNEKYVGDLLLQKVFVADHLTKKNVPNNGELPKYYVKDNHEAIIDRELFDRVQEEIKRREKQYSAKSKTTAIYPYTGKIVCNNCGKRFHRKMNNSGTKYQKAVWICSTYNTMGKEYCNAKQIPEYVLDSLTSEFDKEIDTIIAYPNHVLKFIFNDNTIVEKEWCY

SEQ ID NO: 13399 - protein, 553 aa, synthetic construct
MAKRRAGNNDAPSAVAVIYARYSSHAQKDESIEQQVAECMEYAAKNNLEVIEVYADRHLTGRSDKRPEFQRMMRHAEKRQFQVVIAYKSNRIARNMLHALMYEDKLSKYGIRVVYVKEEFGDTAAGRFALRTMMNVNQFYSENMAEDIKRGLYDNAMNCMVTNGHLPLGYQKGEDGKYEIVEEEAAVVREIFSRVACGEAFIDIARDLNERGIKTSRGKPWGKNSFHSILNNERYTGVYIYGDVRIEGGVPQIIGKELFYTVQELLKNKKNPQGRHRVNGDYLLTGKLYCGKCKSHMVGMSGTGKLGKLHYYYICQKKRLEKACNKDNVRRDWIEEQVAAAIREYILKDDVIKWIADCVQEYGRKRRSQSQLGLLESQLAENKKAIKNLLAAIEAGIITATTKERLLELEAEQARITAKISLEKAEVPEVAKEDVIAWLESFRDGDIKDKKYQAKLFDTFLIAAYLYDKKLKIAFNFSGKKNTISVPLDASVVDNIEKGETLNKCSPGSLLVEARGVEPLSETISTRTSPGAALILKFPQPNAQGQALDIGIL

SEQ ID NO: 13400 - protein, 527 aa, synthetic construct
MYLKGGERVRKVRKIEANSITVKPKLRVAAYARVSTDSEEQLVSLEAQKTHYESYIKGNPEWEFVGIYYDEGITGTKKEKRTELLRLITDCENGLIDFIITKSISRFARNTMDCLELIRKLTDLGVFLYFEKENINTQSMDGELMLTILSSLAENESVSIAQNSKWSIQRRFRNGTYKLSYPPYGYDYVDGALVVNKEQAAVVRRVFFEALSGKGAQKIADGLNADGIPPKKAAVWSATTVLGMLVNEKYTGDAILQKTYTDDNFNRHYNNGEKDQFLIKKHHEAIISYEEFEMAHGLLKQRGIEKGIQKGSGKYQKRYPLSGKIICSECGSHFKRRIHYGGGSQYIAWCCSKHLNEISKCSMRFIREGSLHQAFITMANKLIYGHKFILKPLLQSLRSMNYSDNLIQIQELELKMEENAEKSRVLTSLMTKGYLDPSLFNTQSNELQKETAMLKEKQKTLSRSVNGGMVILSEVEQLLKWAAKADAVDCFEGTLFERIVENIIVYSQEEVGFKLKCGLTLKERLVR

SEQ ID NO: 13401 - protein, 537 aa, synthetic construct
MKKRVCAYCRVSTDKDDQINSFNSQKQFFEEYIKQNDEWELVDIYADEGITGTSTEKRTEFLRMIEDVQYKKIDLILTKEISRFARNTLDSIYYTRKLKNMGVGVIFINDNINTLDEDAELRLTIMASLAQEESRRTSQRVKWGQKRQMEKGVVFGRELLGYNLRNGVLTINEQEAEIVRMIFHKFTNEGKGTHVIARELYEAGIKTKRGNLNWSNTMILKVLRNEKYVGDLCQKKTITPDFLSHKKKYNKGQEEMVYIKDHHEPIISRELWEATQKELEKRTTSREQKSKYSNRYWCSGKIFCGLCGSRFVGRLKKLKNGGTYRAWRCQKAAEHGTQKIDKYGNTIGCNQESINHVVLGEIIGFILKNIIVENKEEIINDLKSLIKKYEKPVKIKNTDTLLKQIESINTKKQKLIDSMLEGIISKQDMVLMNEKYDKEIEELKQKVKEIEEANINNQKQADRLKSYIDRLNEIVNDFDNCNPDELYKRTVEKVIIHKGKIIEVYFTCLVNPIKVRYSATGKLNYKIEVDWLNSEQF

SEQ ID NO: 13402 - protein, 544 aa, synthetic construct
MFGMATRKKRVCAYCRVSTDKDDQVNSFESQKRFFEEYIRKNDEWELVDIYADEGISGTSTEKRTEFLRMIEDVKYKKIDLILTKEISRFARNTLDSIYYTRKLKSMGVGVIFINDNINTLDDDAELRLTIMASLAQEESRRISQRVKWGQKRQMEKGVVFGRAPLGYDLKNGVLSVNEEEAEIVRMIFHKFTNEGKSLHTIARELYEAGIKTKRGNLHWSNVTVLKILRNEKYVGDLCQKKTFTPDFLTHKKKYNKGQEEMIYIKNHHEPIISRELWEATQRELQRRNTIKEQKSKHSNRYWCSGKIFCGKCGSRFVGRVKKLKNGDTYRAWRCEEFVRHGTKKTDKLGNVIGCNQGSINHVVLGEIIGYILKNVIIDNKEQIVNDLKELIKKYETPVRVKSVDGLLKQIENINRKKEKLIDSMLEGVISKQDVALMNERYDKEIEELKKKIKSIEEININNQKRADTLKSYIDRINALVDDLESQNPEEVYRRVVEKIVVHEDKILEIYFNCLVKPIKVRYKATGKLNYRIQVELLNDEQYC

SEQ ID NO: 13403 - protein, 559 aa, synthetic construct
MNAVIYARYSSDNQREESIDAQVRAIKDFATREGYNIIRIYADEAKSATTDQRPQFLDMMKDAESGLFQVVIVHKLDRFSRDRFDSAYYKRHLKKCGVRLVSVLENLDDSPESIILESVLEGMAEYYSKNLSREVMKGMKETAYQCKHTGGIPPLGFDVGPDKTYVINETEAEAIRLIFNMYADGHGYGAIIDTLNSKGYKTKRGNTFGKNSIHELLTNEKYIGTFVFNKASKMFNGKRNSHRLKPDDEIIRIPGGCPAIISNELWERVQARLKANKRASGAYSAKIVYLLSGRIFCGSCGGAMVGNRAKMGRNKTEYAYYGCSNRKTKRTCDMKAVNKAFIEEKVLDALYENLFADHVIDLATEMIYNHAATQNTEIPKQIATIEKQLGKVEIEIRNIVNAIAAGMFHESMKEKMDELEATKSTLRIRLEEAKLQQQTHSLSREQIRSFLARYRNIKEMPPEEQKKAVQVFVERITVYDDRIDMDILTIPSNSPSEKKNKKTASRPTGGYDETTQESGSGPLGSSLDLLVEAGGVEPPSENPYIVVSSIIVVILKFPW

SEQ ID NO: 13404 - protein, 519 aa, synthetic construct
MADGNGSLATPRRSTVRCAIYTRKSTEEGLDQEFNTLDAQRDAAESFIRSQRGEGWVALPDHYDDGGYTGANMDRPALQKLLQDVRDGLVDCVMTYKVDRLTRSLLDFARIMEVLDKHGVSFVSVTQQFNTTSSLGRLTLNILLSFAQFEREMIAERTRDKMSAARRKGRWVGGIPMLGYDLSDRGGALVVNEDEAARVRAIFDLYLEHGSLIPVVQELNRRGWRMKEWTTRKGSVAGGQPFAKNRLYNLLTNMVYVGKVKYGGQIYDGEHEGIVDPEIWQRVQDRLRYNGRTGGRQVRNKYGAVLKGILRCASCDAGMVHTYTQKTPNKLYRYYVCVNAHQKGYNQCPTRSVSAPAIEQAVIEQIRGIAANPSVVDRVVESLGEQRVGDIETLEREKRLIERELERLSQELAGLVRTGGKLAVDRMAEVQERASALERKLREVRDQLAEWEGQTVDVADVRKTLREFDRIWAEMTPREQEKFVKTLVEQVTYDGRSGEVTVGFRTAAIKQLCAEVRNQ

SEQ ID NO: 13405 - protein, 523 aa, synthetic construct
MGNLKNITVIPARARVGNTVKAEDRPKLRVAAYCRVSTDSEEQATSYEAQVEHYTNYIKGNSEWELAGIYADDGITGTNTKKRDEFNRMIEDCMEGKIDMVITKSISRFARNTLDCLKYIRQLKDKNIPVFFEKENINSMDSKGEIMLTIMASLAQQESQSLSQNVKLGFQFRYQQGEVQVNHNRFLGYTKDENKRLVIVPEEAEVVKRIYREYLEGASLLQIARGLEGDGILTAANKRKWRPETLKKILQNEKYIGDALLQKTYTVDFLSKKRVVNNGIVPQYYVENSHEPIIPREIFMQVQEEMVRRANLQVGKSGKRRIYSSKYALSSIVYCGECGDIYRRVHWNNRGCKSIVWRCVSRLEERGSDCSSRTINETTLQEAVVKAINEVLGSKNTFLPILRENIETVLGEDNDQTTQEIECRLNELQQELLRLVNAKADYQKVADEIYRLRELKQNILTENAEREGKRERIKEMMEFLHEQSVELQEYDEQLVRRLIEKITIYDEKLIIEFKSSVEIDVEV

SEQ ID NO: 13406 - protein, 601 aa, synthetic construct
MSRAVGYVRVSTEEQTQHGYSLEAQTEAIKKYCEIQGWELLRIYRDDGYSGASMERPALEQLLSDLHLRHFGTVVVWKLDRLSRNLKDTLYLLDDVFEKNGIGFTSIQEKFDTTTAFGKAAMQIVAVFAQLEREMITERMKMGKYQKARLGQFPGGHVLYGYKKNPATGEFEINEEEARIIKLIYHWYVYGDESGQPLGMEAIADKLTQMGVLPPSAVRGVRVGVRGKRGQKGEVIKHWSNATVRQILTHQAYIGKNFFGRDGKNAEPEYTKDDWIPIPFPQIIDDHLFQMAQERRKRAKFWQRTHEMPLLVSIIHCGICGLQFRGAYDHGTKPVYSCYGRLKRYHRDGSPICDSPRVPADWLDEQVTQKVLEALREPAKMKEAIEAHLESWERRRREIELLVGPSTRQVKQLQDELGNLNYLFRKGRIPVGEYEKEASALEKQIADLRNQHKHQSEELRRLQKLEQDLDFIRQALEKGYWQVGYQAVQQEVQMTWDAAATIDATTGQVVTTKPRKETHIQVDFSQAVEGGETGDELFNLAMHGSGKVMMRQLFDRLRITVHVYHDRVEVRGLIPVGNINISSFPSFVHILLLQKALDRFF

SEQ ID NO: 13407 - protein, 504 aa, synthetic construct
MRAFVFTRVSTPDQSDNFSIPSQLKRVYSYLEKNDLFIQSPKDIYQVVETASRRHERKTFKEMLKRVDELNSVVALVFDTIDRGMRNFGDSVALDDLRKSNKIEVHFIAENLVINQDSRSHELLRWDMGVMFAKSYALSVSDNVKKVINERISKGLSLGKAPYGYKNVPNNIVVDEFTSKVVQKIFNLYVYDGMSIREIVQSLKEDNVKLVSSKIGRILMDDFYIGIATYKKKNIKYKHVYPQIISEELFRKAEDIRSNRLINPVKLMGKINFIYRGLIKCSICGCSMVPERHKGFHYYSCSQGRKKHAVSYVREEILTEQIAEALKQIKIKPQIALELKETIKKTNNDRAGYSEDLIKELQDRKIKLRNRLSKMYDEYLDEKISKDLYDVKYAEYSNEIRMITTKLKNIDLADKNFFTTANKIVELSQEAHELFLQEGEENNADKSKIVNLVLSNANWDGAKLHYDYKIPFSTLVEMNQRPTWGGKWDSNPRPPLPQRGALTN

SEQ ID NO: 13408 - protein, 475 aa, synthetic construct
TKFIKARDDWEFVTVYTDEGISATNTKYRDGFNQMVQDALDGKIDLIVTKSVSRFARNTVDSLTTVRKLKEHGTEVYFEKENIFTFDSKGELLITIMSSLAQEESRSISENVTWGQRKRFADGKVSMPYKQFLGYDKGEDGNPVINEEEAGIVKLIYQLFLEGKTPAGICRYLDKQGILTPSGKKKWSQTTVNSILSNEKYKGDALLQKRFTVDFLMKTMKVNEGEVPQYYVENSHEAIIDPTDWDLVQAEIARRKTLGRAYSGNSVFSSRLICGDCGSFFGQKVWHSNDAYRKVIWRCNGKFKGEKKCTTPHLDIETIQQKFLFAYNQLMENRDGVISDCNQIRQLVSDCTALDAEIDKLTEEIEVLAEMVKACVKENAASVQSQEEYTKKYNALVKRYEKTSARLDALAADKSRKQDRDRELRLFIESIKKQPLVLEVWSERLWVGLLEKATVFHDGRMVFQFKNGTEIEVEL

SEQ ID NO: 13409 - protein, 518 aa, synthetic construct
MVKSVTTIPAKINKKTAMPIDSPRKRRVAAYARVSTDSEEQATSYEAQVDYYTNYIKNRKDWEFVRVYADEGITGTNTKDRVEFKAMINDALDGKIDLIITKSVSRFARNTVDTLTTVRKLKEKNIEVWFEKENIQTLDSKGELLITIMSSLAQEESRSISENCTWGQRKRFADGKVTVPFSRFLGYDRGEDGNLIINPEEAKSVKLLYALFLEGRSCYGVAKELTTRGIKTPGGKDKWSARSVKSILTNEKYKGDALLQKSFTVDFLTKKKKKNEGEIPQYYVKNNHEAIIEPETWDFVQTLLEHDYRKSKNSVSIFSGKLKCEDCGDWYGSKVWHSTSKYKRTIWQCNSKFKEKCQTPHFTEDEIKDAFMNAVNILMKEREQIQANFQAIETIAYSTKELEIERDKLYAEMESISNLMEHAIQNNARVALDQEKYNQEFDEMTERFNGVKKKYDAINEKIEDKKTRHIQAGRFIKTLLSEDEMATFSPLLWQSLLDYAKVSRNGKLIFIFRNGMEI

SEQ ID NO: 13410 - protein, 518 aa, synthetic construct
MIEQIKAALYVRLSQEDRNKLHPEDNSESINNQIMLLKSRCEKEGWIIYDIYNDDDFSGSDRQRPEFNRMIEDARLHKFDVLLCKTQSRFCRDLELVEHYLNYMFPVWNIRFLSIIDNADTSNRQNRKARQINGLIDQWYLEDISENVKAVLSAKRKKGEWVGSQAPYGYAKSPEDKHKLIIDEPAAKIVRYIYRLYINGLGYASIVRRLNDEQIPPPAKYKNLKEVSSHKKTATRGLWCYYTIQKILSSQVYIGNTVQGKSEKLSYKGEERRYKPQSEWDIVENTHDAIVSYDTWHKAQIIRSTRSTPYKQDMKNTVFSRMCKCVYCGATLNKHTYHNSPMLECPTKHIKTGICPGCVITVKRLEEIVIDEIKDHCQRLMDVSAVKSKIDSNVEINNRRQEILKSIESAIKKQKLLKNRLTSLYMDKADGIISIKDYYQFKNAIDADSVEIDTTIKLLESKLLCIDDEIKALESNHTIVNQYSNIEKLTHNELMFLVDYIEVGGTRDNRIVRIHWKF

SEQ ID NO: 13411 - protein, 519 aa, synthetic construct
MRNVAIYVRVSTMHQAEQGYSIDSQLVDCRKKAHDLGAITINEYVDKGKSGAFLDRPELQRMLNDIKTEKESYDALIIYKLDRLSRDSMGLAYIIKILQQKNIKIISTDGAQYGANPQDVLTMQIMGSIAQFDNALRKERSIRGKIEKRKQGKLDKITKYGYIFNDEKQNLDIKEDEAIVIRKIFKWFTEDNLSAFRISKKLNTEKIPAPQPKINRKIINKDNIWFESTIRTMLKDETYAGIRHTMIYKFEKISLNNMKKTKRPPEEWISVPVPSIISREMWDKANNIMNRKSTNPRRTQRTWILQGLVYCEKCGQIMNIKQTPKIGKIKENEEKYNFYFKCRTNILNWFGSDKKCPNRQVPIYTLEDSVWETLLNIFYSKETLEKYLKETQLKDNVYNLLDKLIEDRNKLSKNKNKIVEWFADGKIDQEIADNKINDLNNKINDLDKKISNLQSTNRSKKSFSINNLYDIFHKIKNPNREQKKEIIHSVVEKIFVERLDNKRSNAYTKPVLKIRIILR

SEQ ID NO: 13412 - protein, 523 aa, synthetic construct
MAQGKSVTVIPARIRAGNNVSKEVKPKLRVVAYCRVSTDSDEQATSYEAQVEHYTNFIKKNDDWEFAGIFADDGISGTNTKKREEFNRMIGECMAGKIDMIITKSISRFARNTLDCLKYIRQLKEKNIPVFFEKENINTLDSKGEVLLTIMASLAQQESESLSNNVKLGWQFRYQNGEVQVNHNRFLGYTKDKNGHLIIDKKEAVIVKRIFREYLEGASLRQIGEGLMADGILTAAKKPIWRPEAIKKILQNEKYIGDALLQKTYTIDVLTKKRVKNNGIMPQYYVENDHEAIIPRSVYTQVQEELIRRANLHSGKNRKKRVYSSKYALSSIVYCPKCGDIYRRVVWNNRGKQSIVWRCCTRMEHGPGTCDADAIHESELQNLVVRAINMALGKRDSMNDALQRNVEAVLSGTDGVPLDEIDARLEELQKELLKVANAKGNYDSIVDEIYSLREAKQNAQVAGAEREGMKKRISEMQQFLAEQQQDIAEYDEQLVRRLIEKITVYDEMVTVEFKSGTSVDVRR

SEQ ID NO: 13413 - protein, 520 aa, synthetic construct
MRKVTKINKSEKAVTKNTKIRVAAYCRVSTGSDEQLESLETQKEHYSSFIRANPEWEYAGLYYDEGITGTKKKCRKGLLSLISDCKKGLIDLVYTKSISRLSRNTTDCLEIVRQLLDVSVFVYFEKENINTGSMKSELMLSVLSSIAENESFSISKNEQWSIQKRFQKGTYVIACPPYGYENNDKGELVVVPEQAEIVKRIFKETLAGKGTTVIARAFNQEQVPTKKGGKWTQSTIADILHNEKYTGDAIFQKTYTDSNFNRHINRGEKDMYLCKNHHEPIVSHEDFEMAQQVLKQRGIEKGNDGNSDKYSKRYAFSSKIICGECGSVLKRRKHYLLNGEYIAWCCSQHIENKDACSMKYITDEAIKNAFLTMMNKLVFGYDFILKPLHTAIIQVNIEKSGQRLKELDALMKDNVEQRKTTAGLLSKGYIDRAIYLETNNKLLTEKDNLKSEKEFLLKMNESGYQVESDIKEFIAFLSKSKYFSDFDEKLFSRFVYKAVVISRKEIEFEFKFGLKLRERL

SEQ ID NO: 13414 - protein, 404 aa, synthetic construct
MIIKKVMPKIPVAKKRVAAYCRVSTFRNEQDESFETQQKYYEELIQSHPDWELVKVYADRHSATRVKNRPGFQEMAAAAEAKKLDIIICKSISRFSRNMVDCQQYAKWFRTLGVTIIFEEQNIRTDDPTCDFVLSILAAVAQDESYSISENEKAAYASRFARGEYNLGNNRILGYDCVDGELVPNKDAWIVKEVFRRFIEGESYRQIAKGLEELGAQSLHSKKGFGVETLRYMVSNETCVGDKRLQKKAPLDYLTKKPNPNQKVESNYLWDDHEAIIDRETWDKAQEILEKRKELAKVGIHKTNREHHFLYGKVFCGECGAPFLRRTLKAAGGFKTQSTYKAWNCRNRQKGKGNERCGNRFIKEEELIDAILRELDWLNMDQERFEKEVSKVLVYPDHIEVEKN

SEQ ID NO: 13415 - protein, 509 aa, synthetic construct
MKAVIYARYSSDNQREESIEGQVRECQSFAERKGYTVIRTYIDRALSGTRADNRPEFQQMISDSTLREFQYVIVWKIDRFSRDKFDSVKYKYALKSSGVSVISATEPIDGSPEGQMMESVFEGISVYYIKDLAQKTSRGMTENAIKGKFNGGTLTFGYTIDENHHFQLDPVNAPIVLDVFTRYSEGETIRSILDDINSKMSNNGRKFTYHFLNWMLNNRRYLGEYKFQDTINNEAIPPIISQELFDKCQHRLNVNKHKAGSFKNNKEKYLLTGKIFCGICGATISGISGTGKCKSIYRYYKCMNVKKHKCNKKPVQKELIENIVLNAAMDIFKDKALVKRISKACFDLQSKESPMLPALKRRLRENQKEIKNLMKAIKAGIVLKTTKSELEKLEAEQEQLETNIAIEKLVKPVIPQEKIQAWLMNFAAADLSDKSQKQKIIDIFVNSVYVYDDRVVIFFNYKDGERCVDFSVLSDSENTEGAISSNEKKTNTHENECSPLIKSGDPYGN

SEQ ID NO: 13416 - protein, 437 aa, synthetic construct
MERLIQKIEPSVDISHKLRNVAAYARVSSGKDAMLHSLSAQVGYYSELIQSNPEWRFCGVFADEAITGTKESRPEFQKMLAECRKGKIDLIITKSISRFARNTITVLETVRELKMLGIDVYFQEQNIHSISADGELMLSILSSYAQEESFSASENQKWRIRNDFEQGKICNIRMLGYRRTTNGSLEIVESEAEIVRFIFLNYLSGNGKLLISNKLNEMGIATINGCEWTTADIHRILQNEKYAGNMLLQKRFRENHLTKRMIRNDGQLPKYFVEESHPAIIEKSIFDAVQKKLEEQRQRFSSSKSVVSYPFTGKIQCTCCGKNYRHKITATGNVWICATYNTRGKKYCPTAKQIPESTLISVCCEILSITEFDANIFENQVEKILVPAPNKLIVQLTNGKCINTTWKDRSRSESWTEEKRAAAAESSKTRRWRKCQK

SEQ ID NO: 13417 - protein, 524 aa, synthetic construct
MPKVTKIPPRLNPATFAPLESVEKRKVAGYARVSTDSEEQKTSYTAQVDYYTKFIKERIDWEFVGVYTDEGISATNTRHREGFNRMIADALNGKIDLIVTKSVSRFARNTVDSLTTIRKLKEKGVEVFFQKENIYTLDSKGELLLTIMSSLSQEESRSISENVTWGQRKRMADGKVSLPYSHFLGYRKGKDGIPEIVPEEAEIVRYIYRSFMEGKTPNHIAECLTFKHIPTPAGKEIWSPSTIESILTNEKYRGSALLQKSFTVDFLSKKKKINEGELTQYYIPESHEAIIPPDEFELVQAEYTRRKRIGRAYNSKSIFSAKLVCECCGGYFGSKIWHSTSKYRRTVWQCNGKFKNGKKCMTPHLYESHIKEKFLTAMNQVLANKTEIIENCLLFKETFSNTDMIEEKIENIQKQMEQLTKQIRMLIQKQSITPIKSEDYYRQYDGFVISFEKLKSKQDTLIQKQDEMENKLKFIMDYIEFLKSQENLITEFSETLWFRAVDQVTVCTDGKMIFAFKDGSEIKV

SEQ ID NO: 13418 - protein, 502 aa, synthetic construct
MSKIAVIYARYSSDRQREESIEGQIRECKAYAKKNGITVIRVYCDRAMTGKTDKRPEFQAMIKDAKKQDFDYVLVYKLNRFARSRYDSARYKNVLKQHGIRVISAMENIAEDSSGILLESVIEGLAEYYSAELAENVLRGMTENALECKWPGGIVPLGFKLDKNKHLVIDDDKAFIVREIFQSIIDGKRTSTIIDELNARHLKTAAGKPFRKNSLEKILKNERYTGTFVWKDIRKENALPAIITNDMFNAVQKILKNRKKTRSRVCSDNYLISGRLFCGLCHEKMIGMSGRSVTGLPYYYYACSNRRNRIGKCHTKNIRADKLEELVVDTTINILSDDTAIEYIAKQAIAAQEENRAQSSIPAIKEEIKELSKKLKNCIQAVENGIISQTIAENIPMYEKRLVELNSELSDELEKDNDLKVDEDMIRFFFERLVQRTKKETKFKSLLLSTMVRCVVIYDDYIEIQYNYKKELPILTNPVRINSSILFAVVGDDRIELPTSCL

SEQ ID NO: 13419 - protein, 523 aa, synthetic construct
MRFFSYGRKSIFSDKSDSIDNQFRMSREYCESKFSGQVDSWQQFSDEDFTGANADRPDLQRMLSFIKNGFCDVLVVYQLDRLSRDVRDFANIYALLEEHGVMFISIKENIDTTTPIGRAMMYVTVVFAQMERETIAARVTDNMLGLAKKGYWTGGNPPVGYVRKHIVVDGKKHCSIEVDPDGARYVTQIFDTFLAYNCSLQGMETRFKNQGIRTQGGKFFSTTQLHKMLTMPYCVEATPEVYDFYAAKGCIMDPGSPREMWDGSVGVIIYGRSTEKNKKHQVQPPEKWTVCLGKHKPFMPAEKWLAVQSRFSQNKCIKDAKWPVPLLKGVLRCKCGNLMQISRKKKGDGTCSSWYYCRKRMRQGIDACDMGQIKCDLLDEEVLELFRGIAADPGLIQKFVKTEAPADVPDLKAAQARVSVCERKIGRLAASLAMAEDSVASKYIIAEMERLDVELGALKREASLAEMESHRAAVSAKDAKATAAEIAKLIHGLEGFDDKEKNAIARAVIQECTWDGERLFITL

SEQ ID NO: 13420 - protein, 464 aa, synthetic construct
MKSKTLRCAIYIRVSTTEQMMHGKSLEAQKDYLIHYAKEHDMNIVGIYADEGKTARKELKRRKAIQELVKAVERDEIDVILFWRLDRWFRNLSDFYKVQDILDQHNVRWISASEPGINMETRDGRLQLNVVLSIGQNEVDTTSERIKFVNEASIRQGKVIFGDSNMPIGYIVGTVDGVKRMVKDPEKEDLVNAFYRYFRTHQSKMKTLKFIQENYDPTFSYSQLRNMLESDFYHGAYRDNPHYCPAYLTEKEWAEIQEISNRNVKHPSSGRVYLFSGMMRCPVCGQLLAGRGGSSIINRKTRETRTYCYYRCNKACIDHMCTYRHNVSQNLIEEYLISNLEEEYNRYKIQSQNIHSKADLPKKKRTPAQVKKEMQRLNLLFQKERIEWDYYNEEYEKLTTELSSLKESDQQPKTNFDNIEKILHNDFRKTYDNLSPENRRAFWRSIIKEIHINTSHEVTGIDFY

SEQ ID NO: 13421 - protein, 428 aa, synthetic construct
MSTDQEEQLSSYENQVNYYREYILKHEDYELVDIYADEGISATNTKKRDAFNRLIQDCRDGKVDRILVKSISRFARNTLDCIKYVRELKELGIGVTFEKENIDSLDSKGEVLLTILSSLAQDESRSISENSTWGIRKKFERGVVQVNTTNFMGYDKDEKGNLIINPEQANIVRYIFDRFLEGYSPEFISKELREQEIPGCTGKAKWCPSAIWKMLQNEKYKGDALLQKTYTVDFLTKKRIDNDGQVNQYYIENNHEPILDREKWEIVQLEIARRKKFREQHKLQFYIMQKENNPFTTKVFCAECGSAFGRKNWTTSRGKRKVWQCNNRYRIKGQIGCLNNHIDEEMLEKAFMKAVVQLQEHRSDVVAKWQKLEQGTNLLYKHYAKQMYQILDLDKFNGVIMNQVLDRISISEAGHIVVTFLEGTEVEL

SEQ ID NO: 13422 - protein, 513 aa, synthetic construct
MIAALYARYSSDNQREESIVAQLRACREYCKRKGYTIVRDYADEAYTGTNDNRPQFQQMLTDAEAGMFEVVVAHKIDRIGRNAYDFYKNSHRLQAAGVQMEFAAQEISNTPEGSMMKAVMVGISEWYSANLSREVKKGKRENLLAGKAAGGVPLYGYDVGPDKKYVINETEAVAVRMMFEMYDAGRSYQDILKWLNGHGYKTKRGQPFGKNSLYDLFHNRRYIGWSVGGKHRRTGKPRNSHAPDDDGVTIVKGVCPVIIDEELFERVQSRMEKNKHASGGRHKAKEPYLLSGYVFCDVCGGAMTGGATTSKKGVRTRYYRCETYMRKGNTVCANRAINANDLEQTVLDHLRGVLYDEGVLDTLVGKVQVEYAKLQQNENASAKMMTEARDKARKALDNFYDRIREGDQFDEIDEAEFQRTKDAFRKAEYNLKQIATKGHLPKIPPAKIREYIQTTFGELTQDIQNDKEGTEKFRALLENLIDSVRVGPSTVIIKLKVRCNWCAWRDSNARPTV

SEQ ID NO: 13423 - protein, 536 aa, synthetic construct
MLRQTNQQPITALYPRLSHEDELQGESNSISNQKRILETYAKQNGFSNLRWYTDDGYSGANFQRPGFQAMLADIEAGKVGTVIVKDMSRLGRNYLQVGMYTEMIFPQKGVRFIAINDGVDSAQGDNDFAPLRNIFNEWLVRDTSKKIKAVKRSKGMSGKPITSKPVYGYLMDEDENFIIDEEAAPVVKQIYNFCLAGNGPTKIARMLTEQQIPTPGTLEYRRTGSTRRYHPGYECKWATNTVVHILENREYTGCLVNFKTEKLSYKVKHSVENPLEKQVIFENHHEPIIDTQTWERVQELRKQRKRPNRYDEVGLFSGILFCADCGSVMYQQRYQTDKRKQDCYICGNYKKRTHDCTAHFIRTDLLTAGVLSNLRKVTSYAAKHEARFMKLLIEQNEDGGKRRNAAKKKELEAAEKRIAELSAIFKRLYEDSVTGRISDERFTELSADYEAEQRELKERAAAIQAELSKAQEATVNAEKFMNVVRRHTSFEELTPTLLREFVEKIVVHECSYDENKTRRQDIEIYYSFVGKVDLPE

SEQ ID NO: 13424 - protein, 407 aa, synthetic construct
MKPGKIRVCAYARVSTMTEKQQDSLTNQQSYYNHFYQNKKDVDFIGVYYDQGISGKLAKRPGFQQMLEDCRAGKIDIIHTKSISRFARNTELLLAVSRELKTIQVDIFFEEQNLHTLSNEGEVMLTVLASYAEEELRNMSENQRWAFQKKFQRGELVINTKRFLGYDKDENGELIINPKESKIVKRIYNLYLSGMGVHAIAKLFNEEKVSTVDGGKWYSSSITNILKNEKYKGDAILQKYYFAEIKAKQRLNQGQVQQYLITDNHEAIVSREDWEAVQKRLRQNSKRDPLIDYNRRYPLSGLLKCEHCGSTLKRQKYYKGKVVWVCSKYIREGKASCIGMRVPDSAVQDWSIDKHTVVKEENISGKKHYSYSCQENYTSRAESTHSENPDGGLLPSVHRPRRTAIKL

SEQ ID NO: 13425 - protein, 435 aa, synthetic construct
MAAYCRVSTDQDEQLSSYENQVRYYQDYIRQNPLYELVDIYADEGISGTNTKKRTEFNRLIGDCRKGKVDRIIVKSISRFSRNTLDCLKYVRELKELGIGVTFEKENIDSLDAKGEVLLTILSSLAQDESRSISENATWGIRKKFERGEVRVNTTKFVGYDKGENGNLIINEEQAKIVRRIFRDFLQGETPESIARTLKEEGVPGWNGKVNWYPTTIQRMLQNEKYMGDALLQKTYTVDYLTKKRSENQGQVNQYYIEGNHEAIINKEEWELVQLEVERRNQFRQDNHINFYIIQCEQNPFTCKVFCKECGGLFGRKNWTTSRGKRPVWQCNNRYKLKGVQGCTNRHIDEETLQQAFLRALEILRENKEKLQEKWDNFREEQKLERYHATQLEELLGGDQEEFNERKMCQVLEKVTLGEDGSITIKFLEGTEVNS

SEQ ID NO: 13426 - protein, 407 aa, synthetic construct
MKPEKIRVCAYARVSTMTEKQQDSLTNQQSYYNHFYQNKKDVEFIGVYYDQGISGKLAKRPGFHQMLEDCRAGKIDVIHTKSISRFARNTELLLAVSRELKTIQVDIFFEEQNLHTLSNEGEVMLTVLASYAEEELRNMSENQRWAFQNKFQRGELVINTKRFLGYDKDKNGELIINPEEAKIVKRIYNLYLSGMGVHAIAKLFNGEKVSTVDGGKWYSSTITNILKNEKYKGDAILQKYYFAEIKAKQRLNQGQMQQYLITDNHEAIVSREDWEAVQKRLKQNRKAKLSIDYNRRYPLSGLLKCEHCGSTLKRQKYYKGKVVWVCSKYIREGKVACIGMRVPDGAVQDWNIHEPTVVKEENIGGKKYYSYSSKENDTSRAEATHSENPDGGLLPSVHRPRRTAIKL

SEQ ID NO: 13427 - protein, 429 aa, synthetic construct
MSTDQDEQLSSYENQVRYYKEYIRQNPLYELVDIYADEGISGTNTKKRTEFNRLIADCRKGKVDRIIVKSISRFSRNTLDCLKYVRELKELGIGITFEKENIDSLDAKGEVLLTILSSLAQDESRSISENATWGIRKKFERGEIRVNTTKFVGYDKGENGNLVINEEQAKIVRRIFRDFLQGETPESIARSLKEEGVPGWNGKANWYPTTIQRMLQNEKYMGDALLQKTYTVDFLTKKRSENQGQVNQYYIEGNHEAIINKEEWDLVQLEVERRNQYRQDNHINFYIIQCEQNPFTCKVFCKECGGLFGRKNWTTSRGKRPVWQCNNRYKVKGIQGCTNRHIDEETLQQVFLRAIEVLRENMGKVEEKWANFSEEQKLEKYHATQLKILLDSEKEVFEGRKMCQVLEKISLGEDGSISIKFLEGTEVNL

SEQ ID NO: 13428 - protein, 491 aa, synthetic construct
MPKTQASENIQRAALYIRVSTQEQANEGYSIEAQTERLTAYCKARGWAIYGTYTDPGFSGSNVQRPALQQLFSDIKAGDIDCVLVYKLDRLSRSQKDTLYMIEDVFAANNVAFVSMNENFDTSSPFGRAMIGVLSVFAQLEREQIKERSAMGRRERAKSGLWHGGGWEPIGYSYADGHLQVNPAEAIMIRDVYKLFLQNVPLTRIGSITKERYGRFLSHSAVRSILSTSLYLGLIRWNGETYQGEHEAIIDENSFKRAQVLLEDRHRIAETKPFPFKPRHLLAGLLVCAHCGANYTTKGNYAGHGAKKKYRPYYYCYSRSKTNPRRIIDPNCRNPAYAVVDLDKRILYEVERLSSDRRYFQQVLKKQQTYREEDHKQHDRIGIMHRLDEIDAQLSRVIDLYQLGTIPREAISQRTNKLQLERTALQNTLRTLTEKDRAPRLSENEAFVLLNTFDTVMASNSFDDQRHLLQALIQKIIVLPVQGEFEILWNF

SEQ ID NO: 13429 - protein, 407 aa, synthetic construct
MKPEKIRVCAYARVSTMTEKQQDSLTNQQSYYNHFYQNKKDVEFIGVYYDQGISGKLAKRPGFQQMLEDCRAGKIDVIHTKSISRFARNTELLLAVSRELKTIQVDIFFEEQNLHTLSNEGEVMLTVLASYAEEELRNMSENQRWAFQNKFQRGELVINTKRFLGYDKDEKGELIINPEEAKIVKRIYNLYLSGMGVHAIAKLFNGEKVSTVDGGKWYSSTITNILKNEKYKGDAILQKYYFAEIKAKQRLNQGQVQQYLITDNHEAIVSREDWEAVQKRLQQNRKENPSINYNRRYPLSGLLKCEHCGSTLKRQKYYKGKVVWVCSKYIREGKFACIGMRVPDSAVQDWSIHEPTVVKEENIGGKKYYSYSSQENDTSRAEATHSENPDGGLLPSVHRPRRTAIKL

SEQ ID NO: 13430 - protein, 429 aa, synthetic construct
MSTDQDEQLSSYENQVRYYKEYIQQNPLYELVDIYADEGISGTNTKKRTEFNRLIADCRKGKVDRIIVKSISRFSRNTLDCLKYVRELKELGIGVTFEKENIDSLDAKGEVLLTILSSLAQDESRSISENATWGIRKKFERGEIRVNTTKFVGYDKGENGNLIINEEQAKIVRRIFQDFLQGETPESIARSLKEEGVPGWNGKVNWYPTTIQRMLQNEKYMGDALLQKTYTVDFLTKKRSENQGQVNQYYIEGNHEAIIDKEEWELVQLEVERRNQFKQDNHINFYIIQCEQNPFTCKVFCKECGGLFGRKNWTTSRGKRPVWQCNNRYKVKGIQGCTNRHTDEETLQQAFLRAVEVLRENEEKLQEKWGNFSEEQKLEKYHAAKLKETLNSNQEEFNGRKMCQVLEKISLGEDGSISIKFLEGTEVNL

SEQ ID NO: 13431 - protein, 407 aa, synthetic construct
MKPEKIRVCAYGRVSTMTEKQQDSLTNQQAYFIHFYQNQKDVDFIGVYYDQGISGKLAKRPGFQQMLEDCRAGKIDVIHTKSISRFARNTELLLAVSRELKTIQVDIFFEEQNLHTLSNEGEVMLTVLASYAEEELRNMSENQRWAFQKKFQRGELVINTKRFLGYDKDPDGELIINPEEAQIVKRIFSLYLSGLGGHAIAKLFNKEKVPTVDQKQWHSTTVLNILKNEKYKGDALLQKYYFAEINKKQRLNQGQVQQYLITDNHEAIVSREDWEAVQKRLKQNRKAKLSIDYNRRYPLSGLLKCEHCGSTLKRQKYYKGKVVWVCSKYIREGKDSCIGMRVPDSVVQDWQVTKPTIVKEEIISGKKHYCYSSKENNSSGNSEAGSENPDGGLLSSVYRPRRTAIKL

SEQ ID NO: 13432 - protein, 435 aa, synthetic construct
MAAYCRVSTDQDEQLSSYENQVRYYREYINQNPLYELVGIYADEGISGTNTKKRTEFNRLISDCRQGKLDRIIVKSISRFSRNTLDCLKYVRELKELGIGITFEKENIDSLDAKGEVLLTILSSLAQDESRSISENATWGIRKKFERGEIRVNTTKFVGYDKGENGNLVINPQQAKIVRRIFHDFLEGESPESIAKTLREERVPGWNGKPNWYPSSIQKMLQNEKYKGDALLQKTYTVDFLTKKRSANQGQVNQYYIEGNHEAIIAPKEWELVQLEMERRKNYREKYGVKNYIIQCAQNPFTSKVYCKECGGQFGRKNWTTSRGKRPVWQCNNRYKIKGIQGCVNRHIDEETLRQAFIRALEILRENKDPLLKKWANFSEEQKLEKYHSEQLKKLVESDQTVFDGRRMCQVLEKIALGEDGTISIRFLEGTEVDL

SEQ ID NO: 13433 - protein, 481 aa, synthetic construct
MDKINKVALYVRVSTTSQLEEGYSIEEQKAKLESYCDIKDWHIYKVYTDGGFSGSTTERPALEQLIKDAQSKLFDTVLVYKLDRLSRSQKDTLYLIEDIFLKNNIEFVSLLENFDTSTPFGRAVIGLLSVFAQLEREQIKERMQLGKLGRAKSGKSMMWAKTSYGYNYNKDTGTMTVNEYEALAVKEIYASYLAGMSITKLRDKINEEYPKQPAWSYRTIRGILANPVYCGLNQYKGQTFQGTHKPIISIVDFEQTQRELAKRQQTAKELSNPRPFQAKYMLSGLAQCGYCHAPLKVILGAVKKDGTRFKRYECYQRHPRKTKGVTVYNDNQKCDSGYYDMDLLEHYVLTRIAQLQNDPDKIKELFSDDTSPAVDRQAIQKQIDSLTLKLSKLNDLYLDDRITLDELRSKSSDFIKQRTALEEEIKKASTDKQAGQREKIEKLLDASSVLDMSYDNQKVIVRELIDKVQVTSDKIVIRWKI

SEQ ID NO: 13434 - protein, 417 aa, synthetic construct
MKTIQKIDVKRELFVEKKRVAAYARVSKDTDKLQHSLSAQVSYYSRTIQSNPEWEFKGVYSDYGITGTSMDKRPEFLQMIEECKKGNIDIILTKSIKRFARNTVDLLRVVRNLKSMGVEVRFENEKIHSLSGEGELMLSILASFAQEESRSLSDNIKWSLRKRYAEGLLSKQQEAYGYRWNGENLVINKEEASVVRRMFTEYLNGYSRRRIAKGLNHDGIRTGHGNQWADYNVKAILKNISYTGNIVLQQYFTIDPISKIKKLNQGELSKYFIENNHEPIISKEMFENTQKEMQRRKEGGAFTNPAIQTSELTSRICCPYCGKSFRRCTRRKKNGFRKYWICTTRKRGEGNPCHTGDLNEDIIKSQLCEVLGVEKYDPQAVDERLDHVDVIKKEKCIFYLVDGTVVEKKYRQLLQTK

SEQ ID NO: 13435 - protein, 523 aa, synthetic construct
MNVKKVTTIPATINQFNQLPINTMKKRKVAGYARVSTDSEEQLTSYAAQLDYYTHYIKGREDWEYVGVYTDEGITATNTKNRDGFKRMICDALDGKIDLIVTKSVSRFARNTVDSLSTIRKLKENGTEVFFEKENIWTFDSKGELLITIMSSLAQEESRSISENCTWGQRKRFADGKVSVPFKRFLGYDRGEDGNLVVNQEQAKLVKRIFRLFLQGYSMFGIAKLLTEEGILTPGGSEKWRVGNIKSILTNEKYKGDALLQKTFTVDFLTKEKKKNEGEIPQYYVTGNHEAIIPVATFNRVQRLIEQRAKSVGRPSYVSVYSSKIKCGCCGGWYGSKVWHSNSKYRQVIWQCNHKFQEKCTTPNLTEEEIQDLFVKAVNQLVRMKKEIIQNHQEMMEVIFDTSTLKIEQERLEIQLNEIAVIVNECINENAKLVQNQDEYEAKYTQLVNRFNTTQNELDKVKKEMIEKESRKDDILDFINQLQERELLTEFDEQVWRSMVKDMIVYEGGRIEFQFLDGKVIRL

SEQ ID NO: 13436 - protein, 434 aa, synthetic construct
MKKIIGYVRESTQWQVTNGYNLGEQKRKIEEFCKYKYETGCYELEIKEERGVSARNLKRPQIQSIIELIKAKSIDILVIHNLDRLTRSVKDLAYLIELLEEYSIELVSITESIDTTTPSGRTFILMIGVISQWEEDSISWRTKRGMAEALERGYYCKPRVPIGYVRDPQDKRHLIIDEEKAEYIRYIFETVARGTKTANEIYLDFKREKVLGKKWGNDDIYRILKNQAYTGDVELFGKVYEGVIPAIVTKELQKEALERVKLRSRKKKYQYPFRGILLCSECGSTLKCDSTHKKIRGKVYRVYQYYFCECCNNRISQKYIQEQVEHKLSRLLDKEHTKEIRKSFLKHLKQVEKDINAVIDLILNQGRNEILIKKYEALVNEREELFKEAEKQNEGNTPLIDTENLKDLIYKYIRYIKVDLIKKSIDVEYKKRYK

SEQ ID NO: 13437 - protein, 505 aa, synthetic construct
MNTTDLQTGVIYARYSSDKQRDESIEGQIRECTEYAQREGILITKIYTDRALSARTDNRPEFLQMIRDSANQTFNYVIVYQLDRFSRSREDSAKYKGILRRNGVRVLSAKEHITNEPAGIILESMLEGMAEYYSVELSQKVKRGMTENALKGKMNGSAVPLGYDLTESHHLAVNAHEAKAVRLIYDLYLKQYSLTKIANILHSKGYTTKRGGKISYSVVRSILSNEKYIGVYQWGDIRIEDSIPPIISREIFDEVQRVLPTRIKNKGRRSEMYNLCGRLICGECGGHYMGSTATSRNGEKHHYYVCTNRRKYHTCNAPNIRRDELEDLVINRTLEILKQPQIIARIVDLVMSGYNNTTQEAKTAIQGIQGKIKAIDTELDNCMTAIKQGFINERLKNEIESLEKERQDLLEQKANHESVISPIKFTAEHIEYFLERMANENPTTKAGRSRILDTFIKNVTIHSDRVEIVFNYKNEMPEFSVQSASGSHFSVLVGPPGIEPGTDRL

SEQ ID NO: 13438 - protein, 536 aa, synthetic construct
MNAVIYARYSSNNQREESIEGQIRECKEFAEKNNLQIVDEYIDRAISGKTDNRPAFQRLIKDSSKGKFDVVIMYTLDRFARNRYDSAIYKAKLKKNGVRLFYAKQPMPDTPEGIILESVLEGYAEYYVENLRRGVKRGMRENALKGYVNGKTPLGYRRGKDKKYEIDPYEAKAVREIFERYARNESIIDIVRWLNNNGYKTTTGGQFNKNSLRRILTNDKYIGVYRYDDIVIEDIVPPIVDRELFERVQSTFAFNKHFRAKQKSPDLYLLTGKLFCGHCGSLMVGESGTSRHGSTYRYYKCATRKREHTCDKKVERKEWLERTVVEHTKNYVLTDENIDRIAEKVVELIDREYSDKSMLAELTARLDDVNSRFLNLLQALEQGVISESVTKRVSELEEEKRILEKKIASEKRLKPTITKDKVVYWLLSFKKGDIEDESYQRRIIDTLVSSVFVYDDNDGNARLVLNFNTSSNSNVTIKVSDTTHLAIPSNKSLENAVFISVSRLFLCFVYRLILSENRSQSFPKVCYPMRYPFIVS

SEQ ID NO: 13439 - protein, 529 aa, synthetic construct
MKLHSEYNDNQMVVAYYRYSSSSQNEASIEQQREMVQRWAKSQGFVVVNEYEDAAKTGTNADRPGYQLMLRELPKIKPAYVAVWKNDRLARDRAELLLVKQAIRSVGARVHYIEGISPTDSPDSVLVEGLADAFAEYYSLQLSANIRRGQRYNAERALSNGHKIFGFTVDQDKRYIPDPETAPIVTQIFHDYASGVSMQKICDQLNAQGIRTTRGYRFTPKNLNKMLKNRAYIGEYAYGGYIHENGMPRLVDDLTFDEVQRRFAINKRRGAKTKAELAAQGENAPDYWLTGRAYCLTCGGSMEGVSGTSKTGRTHRYYYCLNQRKKKCSAKTVRKDEIEVRIEEIVASFLAAPEMLASLAVDLADHYQKTHGRGDDVLKALEARRADVEKKLANFVRAISQGIFNDTTAEAMCSLEEQKRELDAAIQAEHVKATLYEDKASIGAFYKRFAEATIDTPETRDQLFEYFVDKVFIGREQIVIASYFHDSAAPIEFEELEEALTSGHRAGEVRTYARKREFDTSPSGGDGGN

SEQ ID NO: 13440 - protein, 407 aa, synthetic construct
MKPGKIRVCAYARVSTMTEKQQDSLTNQQAYFIHFYQNQKDVDFIGVYYDQGISGKLAKRPGFQQMLEDCRAGKIDVIHTKSISRFARNTELLLAVSRELKTIQVDIFFEEQNLHTSSNEGEVMLTVLASYAEEELRNMSENQRWAFQKKFQRGELVINTKRFLGYDKDENGELIINPEETKIVKRIYNLYLSGMGVHVIAKLFNEEEVPTVDGGRWYSSTITNILKNEKYKGDAILQKYYFAEIKAKQRLNQGQVQQYLITDNHEAIVSREDWEAVQKRLKQNRKANLSIDYNRRYPLSGLLKCEHCGSTLKRQKYYKGKVVWVCSKYIREGKVACIGMRVPDGAVQDWNIHEPTVVKEENIGGKKYYSYSCQENYTSRAESTHSENPDGGLLPSVHRPRRTAIKL

SEQ ID NO: 13441 - protein, 429 aa, synthetic construct
MSTDQDEQLSSYENQVRYYQDYIRQNPLYELVDIYADEGISGTNTKKRTEFNRLIGDCRKGKVDRIIVKSISRFSRNTLDCLKYVRELKELGIGVTFEKENIDSLDAKGEVLLTILSSLAQDESRSISENATWGIRKKFERGEVRVNTTKFVGYDKGENGNLIINEEQAKIVRRIFRDFLQGETPESIARTLKEERVPGWNGKVNWYPTTIQRMLKNEKYMGDALLQKTYTVDFLTKKRSENQGQVNQYYIEGNHEAIINKEEWELVQLEVERRNQFRQDNHINFYIIQCEQNPFTCKVFCKECGGLFGRKNWTTSRGKRPVWQCNNRYKVKGIQGCTNRHIDEETLQQAFLRALEILRENKEKLQEKWDNFRQEQKLERYHATQLEELLGGDQEEFNGRKMCQVLEKISLGEDGNITVKFLEGTEVNL

SEQ ID NO: 13442 - protein, 521 aa, synthetic construct
MARITKIEATKDFVKERKIRVAAYTRVSTKSEEQLLSLEIQKEHYESYINANTSWEYAGLYYDEGISGTKIEKREGLLALLKDCEDGKIDRVITKSISRFSRNTTDCLEMVRKLTSLKVFLFFEKENIDTEHMSSELMLSILSSIAESESKSISQNSKWSIKNRFKAGTFIISYPPYGYENKDGKMNIVPKEADIVKEIFTMAINGMGTHLIARELNNRSIPSKKVAKWHGSTVRGILQNEKYTGDAIFQKTYTDDNYNRHINYGEENMYLYKNHHEPIISHEIFDKVAEVIKQRGREKSIEKGTGKYQSRYVFSGKIYCGECGATFKRRQHYKPSGDYVAWCCNKHIKDKNACSMMYIRDEDIKTAFLRMIRKLQTAHDQVLKPFVMGLKGTNNKQRLKQVLTLEEQIEKNAEQTTVLINLMSSGYIEPEVFHAENNHLTLEADRLARKKQLIVKSINGDLNHLDEAQKLLRFASKKEVITEFNDALFLEYVDTIKVNNRNEITFALKCGLNLTERLVKI

SEQ ID NO: 13443 - protein, 435 aa, synthetic construct
MAAYCRVSTDQDEQLSSYENQVRYYREYINQNPLYELVGIYADEGISGTNTKKRTEFNRLISDCRQGKLDRIIVKSISRFSRNTLDCLKYVRELKELGIGVTFEKENIDSLDAKGEVLLTILSSLAQDESRSISENATWGIRKKFERGEVRVNTKKFVGYDKGEDGNLVINPQQAKIVRRIFHDFLEGDSPESIAKTLREERVPGWNGKPNWYPSSIQKMLQNEKYKGDALLQKTYTVDFLTKKRSANQGQVNQYYIEGNHEAIIAPKEWELVQLEMERRKNYREKYGVKNYIIQCAQNPFTSKVYCKECGGQFGRKNWTTSRGKRPVWQCNNRYKIKGIQGCVNRHIDEETLQQAFIRALEILRENKNPLLKKWANFSEEQKLEKYHSEQLKKLVESDQTVFDGQRMCQVLEKIALGEDGTISIRFLEGTEVDL

SEQ ID NO: 13444 - protein, 407 aa, synthetic construct
MKPEKIRVCAYARVSTMTEKQQDSLTNQQSYYNHFYQNKKDVDFIGVYYDQGISGKLAKRPGFQQMLEDCRAGKIDVIHTKSISRFARNTELLLTVSRELKTIQVDIFFEEQNLHTLSNEGEVMLTVLASYAEEELRNMSENQRWAFQNKFQRGELVINTKRFLGYDKDENGELIINPEEAKIVKRIYNLYLSGMGVHVIAKLFNEEKVYTVDGGKWYSSTITNILKNEKYKGDAILQKYYFAEIKAKQRLNQGQVQQYLITDNHEAIVSREDWEAVQKRLKQNRKANLSIDYNRRYLLSGLLKCEHCGSTLKRQKYYKGKVVWVCSKYIREGKDSCIGMRVPDSVVQDWQVTKPTIVKEEIISGKKHYCYSSKENNSNGNSEAGSKNQNGGLLSSVYRPRRTAIKL

SEQ ID NO: 13445 - protein, 482 aa, synthetic construct
MKRITKIDASVTAEVKKTRAAAYCRVSTASDEQLISLEAQKTHYESYIRSNDDWEYAGLYYDEGITGTKAEVRDGLQALLRDCEDGKIDLIITKSINRFSRNTTDCLEMVRKLVEMENSKWSIRRRYQNGTFIISYPPYGYANIEGEMRIVPEEAEVVKRIFAECLAGTGTYTIAKRLNENHIPTKKNGKWHGGTVNGILTNEKYTGDVLFQKTYTDDGFNRHTNYGEVDQFFCENHHEAIISHEDFERVQEVLAQRAAEKGNGINTSRYQNRYTFSGKIICGECGTTFKRRTHYKPSGDYIAWTCGQHIENRHACTMLYVEESAIKSAFTTMINKLVFGHQRMLKPMLSSLKGTDDRDRLIQIQRIEQAIEDSALRKQTLVSLASQGILEPAVYTEECTALALQEERLLAEKKTLVSDIGGDREKLHELEKLMKFTGKGQMMEQFDDETFNSFAEKIVIADRETAVIHLKCGLKLKERLVR

SEQ ID NO: 13446 - protein, 514 aa, synthetic construct
MAQTRTVTMIPARRRVGNMVREEERPKHRVAAYCRVSTDSDEQATSYETQVEHYTSYIKKNPEWEFAGIFSDDGISGTYTKKREGFNKMIDECMDGKIDMIITKSISRFARNTLDCLKFIRQLKEKNIPVFFEKENINTMDAKGEVLLTIMASLAQQESQSLSQNVRLSINHNRFLGFTKDEDGHLIVKPDEAKVVKRIYREYLEGASLQQIAKGLETDGILTGAGKKKWRLETLHKILRNEKYIGDALLQKTYTVDFLNKKRVQNKGIVPQYYVENSHEAIIPRDIFMRVQEEMVRRANLHSGEKRKKRVYSSKYALSSIVCCSKCGDIYRRIAWNNRGKHSTVWRCCTRVDFGPGKCDAPTISEAELQDAAVKAINKALGGREDMMKGLQENIEKILSEGSDTAVQEIDSRLLELQKELLKKANARQNYDALADEIEALREQKHTVMVESAEREGIKKRVAEMQQFLAEQKTEITEYDESLVRQLIEKITVYEDQFEVMFKSHTTVEIKRIF

SEQ ID NO: 13447 - protein, 478 aa, synthetic construct
MNKVAVYIRVSTLSQLEEGYSIEEQKAKLESYCDIKDWHVYKVYTDGGFSGSTTERPALEQLIKDAQSKLFDTVLVYKLDRLSRSQKDTLYLIEDIFLKNNIEFVSLLENFDTSTPFGRAVIGLLSVFAQLEREQIKERMQLGKLGRAKSGKSMMWAKTSYGYNYDKETGSMTVNEYEALAVKEIYSSYLAGMSITKLRDKINEEYPKDPAWSYRTIRGILANPVYCGLNQYKGQTFQGTHKAIISLDDFEQTQRELAKRQQTAKELSNPRPFQAKYMLSGLAQCGYCHAPLKVILGQKRKDGTRFKRYECYQRHPRKTKGVTVYNDNKKCDSGYYEMEPLENFVLEQVAKLQNDPEKIQELFSDSVSSVIDKQAIQKQIDSLTLKLSKLNNLYLDDRITLDELRTKSADFIKQRATLENEIKKASNDKQTGKKEKIEKLLDASSVLDMSYDNQKVIVRELIDKVQVTSDKVVIRWKI

SEQ ID NO: 13448 - protein, 521 aa, synthetic construct
MARITKIEATKGFVKERKIRVAAYTRVSTKSEEQLLSLEIQKEHYESYINANTSWEYAGLYYDEGISGTKIEKREGLLALLKDCEDGKIDRVITKSISRFSRNTTDCLEMVRKLTSLKVFLFFEKENIDTEHMSSELMLSILSSIAESESKSISQNSKWSIKNRFKAGTFIISYPPYGYENKDGKMNIVQKEADIVKEIFTMTINGMGTHLIARELNNRSIPSKKGAKWHGSTVRGILQNEKYTGDAIFQKTYTDDNYNRHINYGEENMYLYKNHHEPIISHEIFDKVAEVIKQRGREKSIEKGTRKYQSRYVFSGKIYCGECGATFKRRQHYKPSGDYVAWCCNGHITDKNACSMMYIRDEDIKTAFLRMICKLQTVHDQVLKPFVMSLKGTNNKQRLKQVLTLEEQIEKNAEQTTVLINLMSSGYIEPEVFHAENNQLTLEADRLARNKQLIVKSINGDLSHLDEAQKLLRFASKKEVITEFNDTLFLEYIDTIKVNNRNEITFALKCGLNLTERLVKI

SEQ ID NO: 13449 - protein, 452 aa, synthetic construct
MFTKDNPHYKAALYIRVSTEEQARHGYSVDEQKHDLAEYAKAKGYDIFGIYADEGLSARKAISRRKALQQLLNDVRAGLIDVIVIKCLDRWFRSVRDFYRVQDLLDKHNVTWECTQEQYNTATTTGRLMLNLKLTIAQNESDQTSDRVKYINEGKRRRREVIAARIPLGYRAENKHLVRDDATAAIVVDVFEYFVNHPSLYAVMHYLADQHKIIRAYSSVRKLLANKVYVGEQYGDPEYNEAIVPRELFDTVQNLLQRHERRKRTDRVYLFSGLLRCPSCGCFLGVQCHSCKQNTIHYIYYRCNLSFRHTICQNRFYIAESALEQKLLSVFNQELSAFIAEHKAGQAEIISINRTKFIREKMRKLKNLYLDELIERSEYERDYRALSRQLDNAETSTATLHRPIRAALLTLSTQDMPDMYKGLSRLERKNFWRNYVDRIEFDKNGKPHIFFR

SEQ ID NO: 13450 - protein, 413 aa, synthetic construct
MNIRKIEAKNNNRKKRICAYVRVSTTNGSQLDSLENQKVYFEKLYAERDDVEFLGVFCDKGISGSKYDRPDFQTMLDACRKGQIDVIHTKSISRFARDLINVLEISRELKTLGIDIFFEEQNIHTLSNEGEVVLTVLASLAEEELQSMSGNQRWSFRRKFQKGELLINAKRFLGYDLNEKGELVINKAEAQIVRTIFYSYLEGMGTHRIAKKLNEGKVPTVTGKKWYDSTIRNILKNEKYKGSLLLQKYFHDGVNGPKKLNQGQVEQYYIEDNHEGIVSKEIWEKVQVKMKSRSRIQGTNKTYKFSRMLKCQYCGSTLKRQVSYKKKIVWCCSKYMKEGKNSCKGMRVPERDIEDWKLSLPVIVLERIEDGEKHYGYTGQKTSANGHISNSEKDQSSRLLSSVYRPRRTAIKL

SEQ ID NO: 13451 - protein, 484 aa, synthetic construct
MCTKNVGIYIRVSTQEQANEGYSIDAQRDRLTAYCSSRAWNIYNIYIDGGFSGSNMSRPALSQLLDDIKGKRVNCVLVYKLDRLSRSQKDTLYIIEDVFLNNGIDFVSLNENFDTSSPFGRAMIGILSVFAQLEREQIKERSMMGRVERAKNGLWHGGGHEPFGYNYIDGQLIINDYESAIVKDIFELFNDKIPIYQIQQIISNKYGKDFHESVIRSTLSMVLYTGKISYGGGIYDGQHDAIISTDTFKRAQDLLEIRKKKYHNRPFKSKTLLGGLLYCAHCGARYLAKGNYSGRGANRSYRPYYTCYSRAKSNKKYIIDPNCKNPSYAVPVLDDIILNEIRKLFTCHGYFENIVQSSTPPPASNNDLEIEVLSKQIIYIKGQISRLLDLYQLDGIAIDDIHDRINSLQDEKVKLQETITKLSKTNLPKTEKKLSPNDVLSLKDSFEAIISSNDMSAKQNLVHTLIQKILVNEEENSFEIIWNF

SEQ ID NO: 13452 - protein, 523 aa, synthetic construct
MAKTVRVIPASPKIFRSEVTAEPRRRRTAGYARVSTDHEEQASSYEMQMAHYKNYIESRADWDFVGMYSDEGISGTNTKKRDGFNQMIEDALAGKIDLIITKSVSRFARNTVDSLQNVRKLKENGVEIYFEKENIWTFDTRGELLITIMSSLAQEESRSISENTTWGKRKQFAEGKTSVGYSAFLGYDKDFEINEEQAKIVRLIYKLFLGGRSFYAITKELEKRCIKSPSGKDKWYISTVRSILTNEKYRGDALIQKEYTADFLDKTRRKNAGEIPQYYVEEHHEAIIPPDLFDFVQTEIKEREKRGKHSGVSIFANKIRCGCCGGWYGAKVWHSTDKYRRVIYRCNKKYAHKGKPCSTRHLTEEEIKRIFVKALNSLVEVKEKVIVELQSLIDDVCQTVELTEERDKVEQELGVLAERLEKLIRENARVAQDQNAYLNQENEIRARYLEKQGSLEKLDEQIAERESKRNTLEGMIQAVCGIDGEQVAFDEELWAGLLDHVVVKEDGLVVVVFKGGIEIGVGG

SEQ ID NO: 13453 - protein, 499 aa, synthetic construct
MKIRRVQQTQTLQKKLRVAAYARVSVDALHHSLAAQVSYYSSLIQKNPAWEYAGVYADEGITGTSTTHRTEFKRLIADCNAGKIDLVLVKSISRFARDTVDCLHTVRRLKEKGIAVRFERENIDSTSEDGELLLTLLASFAQEESRSIGDNIRWGVRRRFAQGIPNGHKAPYGYRWDGEMFRIIQAEGEIVKEIYRRYLAGESAYAISKILAGRGITGRQGRPIEQTTVKDILSNISYTGTMALQKNYISEGHIRKRNKGELPLYLVDGVFEPLVSKEDFDKVQEIRKRRAEGAANRNPVLLPFSGMVKCGCCGSGFSRRTAGKYRRWGCNTRERKGRESCDSRPIREEELVAAVRDVMEKEDFDATKLRRKVSKIVIHGDRIDFHLVNGRIKKTARIYNGQRGSNPFTNKVYCTSCGSKCERDTWTKGTKVWSCSQPRTKCQLRRLPESELREAAASFFCNGYEGKIVQNVERIIISDDEVIFQLKEGGAYRWQRQCG

SEQ ID NO: 13454 - protein, 550 aa, synthetic construct
MKQSDKITALYCRLSRDDESQGDSNSIVNQKAYLSRYAKEHSFRNTEFFVDDGYTGANFQRPDWQRMMALVEEGKIGTIITKDMSRIGRNYLEVGMYTEITFPQNNVRFIAVNSGVDSANQQDNEFVPFVNIINEYYVRDGSKKVRTSLRLKGESGEHLTTIPPYGYGKDPDNSEHWLVDPEAAQVVKRIFSLCMDGNGPTQIARMLKEDHVLTPTVYQDRQKRKVRCALPENPYNWNGSTVAAILERMEYCGHTVNFKTHRQSYKIKKTIENPPEQWKIFRNTHEAIVDEETFQRVQELRRNKRRPARTGKSNLFSGVAYCADCGEKMYYCTSRNFEERQDHFVCSTSRKKGKDVCGTHFIRAVVLEKGVLKFLQILLWYISDCEDLFRDKLGAKRKEDFKKELAAKRRQLTQAQRRMEELDRLFKRLYEDNISGKINDSRFEKLSADYENEQTELTEKMQLLEQEIAQQEEEADSIEQFILRAKKYPNLQELTPAVLHDLVNRVYVSAPDKSSGQRVQDVHISLACIGFLPESIIAEMLTHASKSRTA

SEQ ID NO: 13455 - protein, 527 aa, synthetic construct
MKKENEIRAVVYARYSSHSQTEQSIEGQISAAQVYAKAKGYTIVKEYVDRAKTGKNDNREAFQQMLSDTAKHEFSVIIVWKVDRFGRNREEITFNKYRCKKNDVRVEYIAEAVPDSPEGVILESVLEGMAEYYSLQLAQNIRRGIRASAEKCQAIGGHCSLGYAIDPKTKKYVIDPDTAPTVQLIFEKYAEGYTGMDIVRLLNEKGLRTVRGKPFTKNSLWTILKNERYAGVYLFKDEVRVEGGIPALVSRETFDKVQEMLEINHRSPVNTWNRATYLLTDKLFCGHCGSKMVGECGTSRTGATYNYYICAGKKRERNCSKKAVRQDWIEKVVLQQIRRVLFDQEFLEFIAHKAYTYYLEEKKKLDQSASIKAQLSSVESSIDNLIRAMEAGIFSASTKSRLDDLENQKAALTRTLAEIKLSEESFDLTEDRILFFLESMRGLDMDDVDSRKRLVKTFVNAVYLYDDKITLAFNFTDSCEKPEIIELADIADGVVEKFVHRASCSTRTKAPHGNVWCFFVAAKRVRV

SEQ ID NO: 13456 - protein, 480 aa, synthetic construct
MTMHKVAIYVRVSTTSQVDEGYSIDEQKAKLTSYCDIKDWNIYDIYTDGGFSGSNTERPALEQLIRDAKRKLFDTVLVYKLDRLSRSQKDTLYLIEDVFLENDIEFVSLLENFDTSTPFGKAMIGLLSVFAQLEREQIKERMQLGKLGRAKSGKSMQWAKTSFGYDYIKETGTLSVNPYQALIVRKMFEWYLSGMSITKLRDALNEQYGQDKEWNYRTVRVILSNPVYCGYNQFKGQIFPGTHEPIISEEDFNKTQEEIKTRQRTAAQRFNPRPFQAKYMLSGIAQCGYCSAPLAIKLGMKRKDGTRLVKYECKQRHPRKTKGVTVYNNNEKCDSGFYFKDDIEHFVLTEISKLQTDSDYIDKLFSNTDKETIDRDSYQKQIDKLTAKISRLNDLYIDDRISLEELQKRSSDFMAERTALEKELEADSSVKTVERKKDIRRVLDTKDIFSLDYEQQKAIARALISKVRVTSETIVILWKL

SEQ ID NO: 13457 - protein, 573 aa, synthetic construct
MAKVKLPDKPRVAIYTRVSTLHQIDKDSLPMQRQDLINYTRLILNTEDYVVYEDAGYSGKNTDRPKFQEMMQQVRLGMFTHILVWKIDRISRNLLDFATMYSELKQLGVVFVSKNEQFDTSSAMGEAMLKIILIFAELERNMTSERVTAAMLSRAANGQWNGGRVPLGYDYDPETKTFTINESEAAVVKIIHDKYEQERSLVSLARYLNGHGYRTRTGCTYSPSTLLIILRNIFYCGDYRYNVLKDGDRQKRKKESEWITVKDHHPAIISREQKEEIARILKENRRLECERRGIYSKKKNVHVFGGLVICGNCGHAMTSTIRPADQDGIRWSVYVCPTKRRSEYLCKGRATSEVVLGEFVFNYILNMLNVQKNFDSINSVEDMEKMLLSGSTFRDVDGIERAGLDDLYNMLASGLTEKAPFDSSVEVRKKPVVSDIELENLNTEKTKIERAAERLQNLYLYSDDSISQKDYIIQREKLMSQLAEVNEQIGMVMSNADEKDVSDEEFVHAASKFILTQKLEGRTYIYYKRLATTVSREVLRSFVMSIIENITIYDGRVQTIVFKNGLSHTFILK

SEQ ID NO: 13458 - protein, 534 aa, synthetic construct
MKTAIIYARVSTTRQSDEGISIESQIELGMKKASDLGANVLNVFHDDGKSGRSDRRRAFQRAIQYCTFEQVDYFITWNTARFARNRIDAASYKRLLEGVGTRVIYVSMDIDNRTDEGWFSESLHEIMDEHYSRQVSRDTKRSMMKNARDGYWNGGFIPLGFKTEEVGKRKKLTVDEQSAPIVREIFRRYLAGEGTKSIAIELNRRGLSLRNKPFSKDNIRLILGNFVYIGMSIFNRTTGRRPNPESEWVMYETHNGIIDKEVFMAARARLEEGKETTGKGSPLSQHVFTGLLKCGKCGLAMRIETATGRSRTYSYYNCSGYQKGHSCGSRRINAEKFDRYLLEVVLDKVLQADIVADFITEAQQMFLDKRSEKQPRIDLIQSELRDIRHRRQALYDILEKMGTAAPNMDEMLLRAKSYTDREKLLTNELESINNEPEYEPISDTDLKDAVNVLKGVIMKSKSPEKIRAMLQHFIERIDVNDDEIMIHYRPELIIKEKCPEPNVVQSMDSWLPVLAQLRTKILTIQLAEPFRKAA

SEQ ID NO: 13459 - protein, 522 aa, synthetic construct
MAKTVRAIPATISRFTAAPINSRKKRKVAGYARVSTDHDDQISSYEAQVDYYTNYIRGRDDWEFVGIYTDEGISATNTRHRDGFKRMVRDAMDGKIDLIVTKSVSRFARNTVDSLTTVRKLKDKGIEIYFEKENIWTLDAKGELLITIMSSLAQEESRSISENVTWGHRKRFADGKVSVPYRHFLGYDKGPDGNLVVNKEQAKTVKLIYRLFLDGYTFHSIAGELTSQGLKTPAGKSKWYPKTVESILTNEKYKGDALLQKRFTVNFLTKETKDNEGEVPQYYVEHNHEAIISPQVFDWVQEEIKRRREGKKRYSGVSIFSSKIKCGDCGGWYGAKVWHSKDKYRRTIYRCNDKFRNHCKTPHLTENEIKDAFVQAVNQLIGNKEEILSNIVVLKQRLTDTGSLEKERDALELDLNMLADQVQQLIAENARVAQNQEEYSRKYNELVSRYEETKKKYDQACAAMKRRIASSRQLESFIKDLQEQELIKTFDERLWCSLVDFITVYSKEDIRVTFKDGTEIKA

SEQ ID NO: 13460 - protein, 590 aa, synthetic construct
MRTIRKIEQSIPIIKKRKKVAAYARVSMESERMQHSLSAQVSYYSNLIQKNPDWEYAGVYADYGISGTGIKKRQDFQRMLEDAEAGKIDIILTKSIQRFARNTVDLLQTVRRLKEQGVEVWFEKENIHTMSGDGELMMTILASFAQEESRSISENVRWRVKKRFEKGIPNGHFRIYGYRWKGDQLVIIPSEAAIVKRIFQNFLDGKSRLETEREFAAEGIKTRNGCQWLDSNIKKILTNITYTGNLLLQKEYITDPITKHRKKNRGELMMYYVENTHEAIIDKATFDYVQQEIARRRELGPLANKALNTSCFTGKIKCGICGKSFVHSIRHDRSRAEVWVCQSHKVRNCKCSMKGAIPAKVLHEECAAVLGLKEFDEQVFLDRVEKILVPEHHTMIFYLKDGRTVTRHWVSTAKKDCWTDEYKDRQRDWMRNYMANGKGTRFSPFTTRVRCAVCGHAFRRCKQRKKHGITVHWRCGQGGKCSSLSVREEDLMKIAADAMGLEAFDGDRFRKEIDFMEAGAKDRITIHFKDGRIQIAPWMKPKKQGTRHTEAYKKYMSQLGKKRWTPERKQRMSEQMKALRKERGGNWQKQ

SEQ ID NO: 13461 - protein, 549 aa, synthetic construct
MKDKKRITRKKFFYCEYLRKSTEEEDSRSIGNQKSVLDGLIEKIITEDPYNDYIEVGIFKDEDYTGTDSNRPDFKKVLQLMGQGKINMILVTDLSRLSRNIAESIHYIQSYFVMMDIRFVSYQLPELDSYLNPDKIYSLEIPMQSMMNENHCAETSMKVRRTQNRLREEGKFIGAFAAYGWKKDPNDRHKLLLDDEPYKVMHLMKDLLFHYNSGRAIARFLNEKGILSPAGYKKKNGYKHNSIDKNITGDFLWSGAMVRKLLARPENIGTLIQGRQRVKSYKVHTRIKVPEEEWFVTPNGIPAIFTVEEQKKINQLLAMNFRKLDKNDRKGNPYLFSGFLRCPKCGRAMNRKCLKKEEYAYYICSSYKNYGTCSKHSIREDELIKIVSTVIQQQIDIAVNINELIQAIQNTPAIKKKTFNFQEQKEKQEKKLSKIIHYKKDLYQDFKDEFISKNEYLSLKKEYSKQEEHIQNSIKNLEKEISHTKQDINQKNIYLEKFIKHKGFDQLSREILVDFIKQIYVYENKNIKIEFLFEDEYKKLIALIKQEKQ

SEQ ID NO: 13462 - protein, 580 aa, synthetic construct
MYNMSPYSLSRSFRDKPCRAVIYGRASTEHEAQVKALQNQMQWYDDVARFHPQWNVINRYIDQGITGTQVYKRDAFMRMMEDAKQQKFDLIVTREVCRFARNTVDALVCVRQLAAIGIEVYFVNDNIWTLDGDGELRLTIMATMAQEESRKISERSLAGQRVSREKGVLYGNGNIFGYTRNKLTKQFEIDPDQAETVKMIFDLYDSGMGETLVAKELTRLGRKNGVGKVKWDAGKVSKIIKRKNYLGYTVYCQSYSNNYLEQKRIKRDESEFVYVKGGFPQIISEEQYERCNAIRRSRTKRLTDEKGRTRSFGIQQAQNVWGRKMRCRCGSPMLRHRWRTNNAGKPIYGYECKRHHDTPRIRLQNEQGNPTPICEIKPVGQSKLELMASKIFERVWGDQREIVLQTCKMLDACYKPDADRRADLMKAKDDSIQLLQQQLDDLVVVRARGEIEQDKFLQRTIEIQQQMEALRQSKAQIASEDYNPGRLDMEAIEAALCEAVEMHDGLVSEDFIDLFVSQVTPLSDSRFAWCLDFSPQPTVAFLNLAGQRKYTTCSMDSKLHFGPFADEEGHTIPFPGSLRR

SEQ ID NO: 13463 - protein, 538 aa, synthetic construct
MLRQATQNLITALYPRLSHEDELQGESNSISNQKRILETYAKQNGFTNLRWYTDDGFSGANFQRPGFQAMLADIEAGKVGTVIVKDMSRLGRNYLQVGFYTEMLFPQKGVRFIAVNDNVDSASEGMDNDFTPLRNLFNEWLVRDTSKKIKAVKKSKGMSGKPVTSKPVYGYVMDEDENFIIDEEAAPVVQQIYQLCLAGNGPTKIARMLTEQQIPTPGTLEYQRTGSTRRYHPGYECKWATNTVVHILENREYTGCLVNFKTEKPSYKVKHSIENPVEKQAIFENHHEPIIDKETWERVQELRKQRKRPNRYDEVGLFSGILFCADCGHVLYQQRYQNKDRKQDCYICGSYKKRTRNCTAHFIRTDLLTAGVLANLRQVTEYAAKHESRFVKLLVQQNEIGGKRKTAAAIKQLEQAQERISEISRIIKRLYEDNVNGKISDERFMELSADYEAEQAELKKRAAALQAELDKSQAATVNAEKFMGIVRKHLAFEELTPTLLREMIEKIVVHECSYDENGTRRQDIEIYYSFVGKIDLPE

SEQ ID NO: 13464 - protein, 544 aa, synthetic construct
MNKQQNKQTAIYCRLSRDDEGIGDSMSIQNQKTFLSQYAANNGFTDYTFYVDDGFSGTSFERPDFKRMIKDIESGKIGTVIVKDLSRLGREYLQTGYYTEIFFPQNDVRFIAVNDGVDSVNGDNEFAPFKNIINEWYAKDCSRKIISALHTKAKNGGIIMGQAPYGYDKAKDNVHRLVPNENAWVVKLMFQLALEGKSAYLIAKELEQRKVMIPKAEQMIRRGLQDSPDFPKHKYVWGKRSIHKILTNPVYTGDMVCLRRLRKNFKTKQSVEVPKEEQVVIPNTHEAYVSHEDFETVQKRLETKQRAYDVNPDNIFRGLVVCSDCGLRMAYSRTKSKNIKGYYRCPSHIRYKRSENLVCKNSHHITIEQITEVVLHDIQRHVRLASKDIEAYAERLKELSECEKNSESALCKQKSDKAKKRLAEIDTILQKMYEDKVFGVISDERYITMSKKLEDEQAELKRLISESAVLIEENEKKSKDIGDFIELIGKYTDITELDYDIVHMLIDKIVVFGREKSDSETTQRIEIYYRFVGNISDNTLNCNR

SEQ ID NO: 13465 - protein, 525 aa, synthetic construct
MWMLPQMSVDDIIMYLRKSRTDDPALTVQEVLSKHEQMLDDWVARNIPDDGRRIPESNRYREVVSGETIESRPCVQEVLRRVESPRVKAVLVVEPQRLSRGDLEDIGRLVKLLRYSNTIVITLQYTYDLRDERDRDMFERELKRGNEFLEYQKRIMGNGRLLSVQNGNFIGQKPPYGYNKVVIKEGKRKCHTLEPDPERAPIVKMVFEMYAGGTSASQIAKTLRTMGVTTADGGKWVTSSVKQMLTNDHYIGMVHWNKRKTVKVVEDGEVVATRPRNSDFLVYPGKHQPIIEKELWDAVQAIKGNIPPIKNRAKYANPFAGLAVCQCGGKMVRQQYVRDGVERCAPRLVCPNQSECHTASCSLPEFTEAVIEALEKGIKNFELMMADAPEDDATQQERLIAQLEKRLAELDRLELAQWDKYTQEAMPKHVFDALNKKVVQEKEETLQALKTAMETVPIRVDYEKKRETFAAAVRTLQDPNARVKEKNLLLKQCIERINYNRKPKESDNRRFGNPEPLELEFQFKV

SEQ ID NO: 13466 - protein, 497 aa, synthetic construct
MKIHVITPTSETPEKLRVCAYCRVSTESEDQENSLDNQRKHYEVLIQSNPDYEFVNVYYDFGISGFKEMRPGFQQMMSDARKGKIDLIIVKSVSRFARNTVTILKAARELKELGIGIFFELQNINTLTEAGELMLTVLAAFAQAESETYSQLSKMGIQRKYEKGEPIQRLQYSFGYAKDDNGEYVLNPVEAPWVKKIYKMIADGYSSADVKRYLNDRGVKTVKGAEFTESSVFRIVESEIYKGDFIMHKYFVNADRKIVKNESQVDSWYIENDHPAIVSRRLWQKAQDALAAKRAYLAEGSVVGENTEELYPYKNHIFCSKCGFPLYRRVYSNGNRVNWGCSGQKRYKNEFCTGINIPDSYFRKLGDFEDNLYFRESKDSLGKSSFKYCTETAWSRKHRKKEPIAVPELNEKNYPYFKKLYCKECGSRLVRYIESRQHVKWICNGNKRKGTVFCKGVRVPDSIVRGWEIDTDVLVEGKVGKDGEKSYSYTCKTGQSK

SEQ ID NO: 13467 - protein, 457 aa, synthetic construct
MAKKVTVIPAKQVRANSTKAAPDVRKTRVAAYCRVSTDAEEQLNSFDNQVEYYTRYINENPAYEMVGIYADEGISGTNTKKRKEFQRMIADCEARKIDLVIVKSISRFARNTQDCLTYSRKLKNLGIGIFFEKEHINTLDATGELLFTILSSLAQDESRNISENCKWGIRSKFQEGKPHINTYKFMGFDKNEEGRLVINEEEAKVVRRIFREFLEGYNPADIARRLNEDGVPGVSGKPKWITPTILGMLQQEKYMGDSILQKWVTTDFLMHSLRRNTGQVAQYYVENSHPAIIDKDTWNAVQEELERREMYCQNYHLSMYAYRTDKNPLNGKIVCGHCGHTFARKSWANRGIAYWTCKSDTCKGNIKEEVLHKAFITAWNHTVKNKDRFMERWQQALDGEDSLVRLRAKQMIDLTNEGTINTLVPELMLMVLEKIMVHDLEHFTVSFLDGTEKEILV

SEQ ID NO: 13468 - protein, 447 aa, synthetic construct
MDRNIIKIDAEKQLKSRIRVCAYARVSRDKDAMFQSLSAQVSHYNKMINSNPEWQFKGVYADYAFSGTKEDRPEFQKMLEACKAGEIDLIITKSISRFARNTETVLKVVRELKARDVDVYFEEQKIHTISSDGEFMLSVLAAYYQEEARSVSENMKWRIKKDFSQGIMWGGKDNYGYKYDIDKKTFIVVPEEAAVVKRIFELYIAGAGFQKISSILNLEGIKPMTANEWSKNNVTAVISNSNYTGDLILQKTYRKDYLSKKKCKNNGELQKYLVEENHEPIITKEMFEKAQKIRNERIMKYDIKTRKAKNNYPFTGILRCGCCGGAYHHKTTRYNLIWICRTYNTKGKGFCSRSKQIDERKLYDAINQYFGWDKFKQDKFLEKVEKIIANPGNELEIHLKDGTVDKIYWNDRSRSEAWTDDMKSKARAKAFKQNELRGGNNRWQKSK

SEQ ID NO: 13469 - protein, 609 aa, synthetic construct
MRQNEDVIALYSRKSKFTGKGESIGNQVELGKEYVRVHFGDAAVDKIVVYEDEGFSGGNLNRPAFKRMMDAAKKRQFKAIIVYRLDRISRNVSDFSGLIEELARLDISFISIKEQFDTSTPMGRAMMYIASVFSQLERETIAERIRDNMHELAKTGRWLGGTTPTGFESEAIKSITVDGKAKKACKLKLVPEEADIVKTIFDLYVETDSLTLTEAALIKQGFKTKNGKYFTRFSVKAILQNPVYMVADQEAYDFFIKNDTDLFSEHDAFDGVHGMMAYNRTDQEKGRASISLPPSEWIVSVGKHPGLIPGKVWVQVQESLERNKSKSFRKPRSNEALLTGLLFCSCGERMYPKMSKRKTADGKVIYTYVCKMKERSQRTVCNSKNANGNTLDMAIIEQVKMLADDKETFVSQLEQSRKFYTGNRMDYEQRISDMRKEKAETEKKINSLVDSLVEMGDSPAKAHVTKRIEQLNEEYQSLEKRIQELEGLTTQHALSDVEFDLMRQLLTVFKDGIDEMTIEQKRAAIRTIVRKVIWDGVNAHVVLFGVQDDEIEYPEIASAASDNTDDEDDNDELVAFSDVDYEDDDTEDDRLGKTNPLSASKTHWGEDSK

SEQ ID NO: 13470 - protein, 542 aa, synthetic construct
MMQMQPAPKLVRIIPPKPEFSGENRIDIRPKRVAAYCRVSTDKEQQEHSFETQKEMYTDMIMMKPNWQMAGIYADEGITGTIAKKRPDFMRMIEDCRKGKIDLIITKSVSRFSRNNLDCLLYVRELKKMGISIIFEKEGINTLQVSSELLITLFSGLSQAESESISMNVKIGKRQSLKNGNVPFSYKSFLGYRKGADGKPEIDEEQAVVIRRIFSEYLAGKSLLDIAQGLTADQIPTARGKTNWSSARVQSILTNEKYKGDALLQKTYIVDCISKKSKKNNGELPMYYVENNHPAIIERTVFDRVQEEISRRNSKKKVKQVGTKTELGKYSSKYALSEILYCGNCGTPYRRCTWSKSGKKKIVWRCISRLDYGKKYCKDSPSIEESVLHNAIAEAITKKAQMEKADVARIRRHIEIYQNSQDTSSILAKQERLKTIQEHINQLTNMDSEAAQNGDFDAQFESLYAEMYAIKDELDEIGKSKSKIETTDDSIEEMTAVMNGLKNHPVEYNDLVVRQLIECIKVMSKDTLHIYFKDGIKLETQM

SEQ ID NO: 13471 - protein, 521 aa, synthetic construct
MENTVVTIAPSIIPKSTLRVAAYCRVSSDSSDQLHSFAAQVQHYTKFISDNERMELADIYADEGITGTKAAKRDDFNRLIADCKKGKIDRVLTKSVSRFARNTADSLMYARLLKEYGVSILFEKENIDTAYMSSELLLALSGAQAQEESISISKNMRWSIENRMKAGTFIASHTAYGYKLVNGEYVIDESEAKIVKLIFESFLSGMGKKAIADMLNNMDIPKRIDGVPWQISTVEYILTNERYIGDAVFQKTYTTETLPFVNKANNGEKAKYYVENTNPPLISKSDFEMVQKLIKNNSLENQRKKAVTYPLTQKIRCKCGSTYKPLTVNGKKYWECTKHNLGRSKCDSRRIPEKDIYEAFVTMINKLRICRADILPAAIIQTELLQMKAGGLAAKIKEIDRQIAEFNNKSLVLTRLNTKGIIRPAEYAEQSGSINGCVNNLRSKRRQLLKEQDENSILSGLRTLNDLLSDIESPITEFDENIFKSTVLEITVPTDTSVCFKLIGDLMITETIPDRRRCNRK

SEQ ID NO: 13472 - protein, 543 aa, synthetic construct
MERNIVAAAYARVSTEHDDQINSLESQKRYFTNFIRSQPGMKLSKVYYDEGISGTQTNKRAGFNQMIEDALQGKIDLILTKEVSRFARNTVDTLYYTRKLKEAGVGVIFTIDNIDTRDTDGELRLTIMASLAQEESRKTSERVKWGQKRRMELGVVFGRDLLGYTVKNGVLSINEEEVPVVKAIFHKYTNEGKGTHVIARELLEEGLRPKRIQQWSNTVILRALRNEKYVGDLCQKKTYTPDYLTHKKKYNRGQEEKVYIKDHHEGIIDRDLWDRTQEELRRRSPSEEQKSRHSNRYWCSGKIRCGECGYRFVSRTRKLQSGKYRAWWCFQKSRHGGRKILDGQKVGCSNRSINERALFTCMKYCIDLLCNNKGKIRKEVLTDIQNVCNAPEETMDLAKVKQKMDAIEEKKRKSFDAMLEGMLSKEDLQKQTEWYDKELAHLQHMIAQSRKNDAFYNMGQKKMEQFEKSLDEILSFGDQNDMLYREILEKIVVYREEERGCNRLVVWLKSLPFGIQLRIRSTGSGENFRTEILETEFVAQDCT

SEQ ID NO: 13473 - protein, 516 aa, synthetic construct
MNGVIYARYSSENQREESIDGQLRECTAFAQHNDIQIVGEYIDRAFSAKTDNRPSFQKMIKDSAKGEFDVILVWKLDRFARNRYDSAHYKNILKKNGVKVVSATEAISSGAEGIILESVLEGMAEYYSAELAEKVSRGMKENALKCKYNGGSVPLGYYIDESKHFQIDPSVAPFVVECFEHYADGMTMKQLRDELNMKGVKNSRGGKISIDVISRMLTNRKYLGEYTFQDITIKDGIPAIISTSLFEKVQDRLAKTKKAPSSHKADDDYILTTKLFCGKCKSFMVGESGTNAQGKKYRYYKCVNHKKHQGCDMKSIRKDLIENMTIKYIQEFLNDEDLINTLIDLAYDAQHKENEQLPLLRKQLAQTEKGIKNIVDAIEQGISTKSTRERLLDLEQRKNDIEMSISKESIENPMLTKKQFKFWFDQLKKLDISKSEQRQKLVDLFVNSIIIYDDKIKFFFNYKKSTKTITFDELNNCSDLPDSPRPKIKDIREGVFYFLYNQTRLELAARQKKIRV

SEQ ID NO: 13474 - protein, 496 aa, synthetic construct
MSKKRVAAYARVSTNSRAQEHSFEFQSRYWNQTLGNNDEYEYIGLFADKGISGKYANRRPQFLALMELCNRGEVDIIFTKSVQRFARNAEELLKYVRELREKGIEVYFEKENIHTLNPDTELYLTIAAAIAEEDLTRYSNNVAWSIKDRFERGEMILGPRIYGYRKTAENRLVVYSDEARIVKLIFEEYIKGNVSTLQIAKRLNSMGIPSPNGGEWLCSQISYIIKNEKYYGDMILQKTFVEGGVKYANRGERVRYYVENSHEPIVSREIWDKAQEILAQRANPHLVGAKQKSFPFTGLIVCGECGANYTHKVNNSGTISQANFWKCHIAIQKGVKYCHNPGIKEKVLYDLFIDCYNEFVTEGYYKRTVDNTEALDRLARLNDSETELTMLMTRGVINQNQYLNEQQHIRAEMQCIQKKLQEERSYLVQGNDFHPIKEFDEEKLYKFIKRVVVKDWTVMFEFFNGVCITRSYTNGQPGNIKDWKLKQKQRREEQNG

SEQ ID NO: 13475 - protein, 535 aa, synthetic construct
MDSNQRIVRTIPASFTRTTAQFVRLLNVGAYARVSTKKEEQEDSYERQVSHYTKYIKSHDGWRFVDVYADEGITGTRAEKRKDFQRMMDDCRLGKLDKILVKSIARFARNTVDALNAIRELKELGVSVYFENENIDTLSPGGEVLLTILAAMAEQESRTISTNIKWAYQKKFQNGDIQLNYKRFLGYTRDESHNLIIVPEEASVVQRIFREYLYGYSYSNIAAGLTKDGIPTPSNKTKWYASVIMSILQNEKYYGGLICGKTYKPDVLSKKRYKNEGQTERYYIENSHPAIISKEEFDLVQAEMRRRQTIRGFSETNQGRYSSKYAFSKRLICGECGAYYRRHAQYHKGEYIHTWVCPTHKLKGGAACSQAYLREEEIEGAFLEMLKALVGDFEEISDTLKENIVSSLDDSIEEDINETLAQIEMRQTEMLELLREKRAGRVSDQEYNERGALIEKAIQELTERRVKLESKSNTAKLAMRRVDQIAKALNDVGSLDEYNGEIFRAIVENVVVRNTYTLDFHLKVGIVESITITRK

SEQ ID NO: 13476 - protein, 459 aa, synthetic construct
MYNNTPNKIIRVATYLRVSSDKQAKSGDSLRDQAETLTEYINKNENMILFDTYMDDGVSGQKIDRDDFSRLLDDIRADKIDLIIFTRLDRWFRSVKHYLNTQTILDKHNVSWTAVSQPFFDTSTAHGRAFVQQSMVWAELEANMDSERINAVFQNKVANGEVITGNPPVGYMVENKHLVFDPVKAPMVIKMFDTFIKTSNLSAVYRMLLDDYGIMRNPSTIRKMFKKRIYTGEYRGNKNYCPALIDKNKFDHVQNLLSKNIKCSQKHEYIFSAMVKCECCGNAMSAHQISTRGRTRKDGTFARYQHSGYRCKRRYDLKDCCNKKIIYESVLERWMLEHLHENIETYITEYDIASRPAMDNTAKIKSIEKKLSKLKELFLNDLISLDEYKLDKSNLENQLSLLPSCIAPVKDLKHINNVLNTDIDSIYTTFTIDEKQRFWRSFIDCIYVDDKRNFRVKFL

SEQ ID NO: 13477 - protein, 498 aa, synthetic construct
MQIEVRKAEMGKEKKRLKVCAYARVSTEASEQENSLENQVSHYTEMIQANPAYEFAGVYADFGISGFKESRPQFLKMMQDAKNGKIDLIITKSVSRFARNTAIVLKASRELKERNVGIFFELQNINTLTEAGELLLTILAAFAQAESESASESSKMAYLHRIENGEVVAYLERSYGYEKDENGEYREKEPEASIIREIYDLVIQGVNCTNIARVLNARNIQTVQGAEWTASTVFRIVENEIYKGDVLMQKTFIDGKRHQVQNRGEKAMYYAKDNHPPIVSEKTWEKAQRKLEDMRAERAKHSVIQEFTEENYPYMNHIFCAKCGWPLKPRVYSHGHRLSWDCSGQKRGTKKFCTGIHVLDNDLRKMKIEGNRYFSETVDKYGEVHLKHVGERTWKNKHKKKKFNHKDLYPELNEENYPYYKRLYCARCGSRLGRYISHGTVRWICSSYKTKGQAKCPGVRIPDEIIKGWNLPDGKIYIMGKEDKNGEKHYSYTSESAL

SEQ ID NO: 13478 - protein, 566 aa, synthetic construct
MKLLVSYVRWSTKAQDSGDSLRRQNDMIDAFYHKHSDQYFMSPTHRYIDKGKSGFHQKHKADGGEFKRMLDNVLSENIPAGSLIVMENFDRASRADIDSAIDDIRQILRKDVEILTLSDNERYDKSSLSDPIRLIKHILIAERAHQESVVKQERTIAVWKAKTAQAIETGLPMGRQTPGWIELSPDRQSFIVIESKAEIVRLIFRMRLAGHSMFAICKHLNENGIETINDRKARISKTFKPGGGGWSAVSVKCLLTSRSVLGYLPAKISTEDRKTILRDEIADYYPRIIEDQTFNAVQTLLEQGGKGRLAKGDHWLYVNIFRTMLRCKCGLTMQPSGIRKPVYQGTYRCNGMHEGRCEFGSVSRKKLDTELCTRLFSKLSQLYDSNIDQSKIIELQRKLLTVDKELQTLTETLLQLPAITQIRDALAEKQKEKESLQAELRRETMRIQSVSDLDLSKLDLETSHGRTEAHVIIKKMVREIVIDGRAKLVDIRLHNGNVIRGFSLEGERDLTLTFEQATDDTPDHDFIAVMGQDLPKVLPAEEFKNRIQTDCSDWPKVEPDYPNTQD

SEQ ID NO: 13479 - protein, 468 aa, synthetic construct
MARTIQHIPARDELNNRAAVQTHQIRVAAYCRVSTDQEEQLNSFANQVSYYKNYIQSQPRYILAGIYADEGISGTNTKRREQFKQMIRDCEAGKIDMIITKSISRFARNTQDCLYYSRHLKSMGIGIYFEKENINTLDAAGELLFTILSSLAQDESRSISENCKWGIRKKFRDGILHLNTNRFMGYDKDENGRLVINEEQAAIVRRIFYEFMNGLNPDVIARRLREEGVPGCMGEVKWQTSTILGMLRNEKYMGDALLQKTYTVDYLTKKTVKNNGELEQVRVKGDHEPIIDPGLWEAVQLELDRRQKYMQQYGLRTMGRYTDEQPFSCKVICGTCGKLFWRRTWYRSNESMKVWQCGQRYREKGVVGCTSANLTEKDLHRAFVMAWNGILENRNSLMDYWKQQIENGDVLERYRAKQFIELTKDTTPLHELDLALVGKTLEHVTVEKMGILNFYFLDGTELSIGIEE

SEQ ID NO: 13480 - protein, 467 aa, synthetic construct
MKKIVKNITETIIRVVLYIRVSSEEQVKHGYSLQSQREGLIEYCKQKGYQVVEIYVDEGKSARSKLKNRTELLRLIEDAKLKKFDRIVFWRLDRWFRNIADYYKVQEILDENKIDWECSDEEYSTTTSNGRLHLNIKLSIAQNESDQTSDRIKFNFDNMVKNGRAITGNQGVPLGYMVAGEEKNKKVVKNPETEPIAIDMLEYVKKSGSVRKTVIYINEKYNLKICYDSMRHYLMNEKYYGYYRGIENYCEPYITKQEFDEIQSLIKRNVKCNKKYDYIFSGLLKCPICGCKLAGYQQIHNKVKYNKIYKYPSYRCRHTHYDKLCNYHKYPHENVIENYLINNIQDEIKKIIQKNENAEDNKNIKVNKIDKEKIKAKLSRLTDLYIDGMILREKYDQEFEKLNLLLQESEKQIIEEKRDLSQYKEFLNSDALSLYSKLNNSSKRMFWAKYIEYIIYNEDGTYEIKFK

SEQ ID NO: 13481 - protein, 537 aa, synthetic construct
MRGVIYARYSSDNQREESIEGQIRENTAFARKNGIDIVATYIDRAYSAKTDNRPEFQRMIKDSGKKSFDVVIVWKLDRFSRNRYDSAKYKAMLKKNDVRVLSATEAISEGAEGIILESVLEGMAEYYSADLAEKVTRGMTENALKCRFNGGTVPFGYMIDEEQHYQINPAQAPLVIEMFRRYAGGESITEIIEDLNARGIRTSRGNRFNKNSLARIFSNRRYIGEYAYKDIAVPDAIPAIVSKDIFDRVAIRMGQNKHATGKAKAPEKYLLTTKLFCGTCHSMFVGDSANKPNGAIYRYYKCASAKRHECDRKALRKDWTENIILEKITSWLSDDKTIDRMADDVMALLSEENEMIPALEAQLKQVRSSIDNIMKAIEQGIVTRTTRSRLEELEHEEESLTANIKAEEDKKPKISKEFILFTLDKFRKLDLRIEKNKERLIDGLVKAIIVYDDHFKVFLTFDDTPITIPTSEEIESMKNSSDIASVTSPKKIKAPVGCFYFFGSEGIEEAEVNDSLRWLSEPRRPSIIVLRESIPVG

SEQ ID NO: 13482 - protein, 490 aa, synthetic construct
MTDKNLLVITPHRKEPGKQRIAAYCRVSSRSDEQLNSLTNQINFYRSLFENDDTVVFVGIYAEEGLSGTQAESRPQFMKMIEDCRSGLIDCIRTKSVSRFGRNTVDTLIYTRELRSLGIDVFFKKENIHSTESSGELMLTLMAAFAESESETMSENIKWGKRRRYEQGITGSITLNGMYGFRQNKGIVTIVENEAELVRQIYKDFIDGYSYGEIADRLIAEGVPTRMPGASWAKTTVQHIIQNEKYCGDCLFQKAFIANPITHQQVRNNGELPKYLVEDCLPAIVDKETWKLAQAVAARHTSHRQAPNERYPFTGKLFCGVCGKPYYYYHYTTTNKKPLAAYRCMSHKTQSAVEVAGQTYTPPHKATFNCNASTKLIAYRERYCKPPKERPMLCTDVRIPIDLPQKAFCRAWNLIVAKKLRYQATLRSTVDNAEDILVRYRAEEMCLLIDEIGKITEFSYPLMLKTLDRVVVNTNGKLSFIFQSGIKITV

SEQ ID NO: 13483 - protein, 548 aa, synthetic construct
MANKTVKKIEATKPTLSAQYSTFTRKRKVAAYARVSTAKEEQENSFEAQVSYYTQKIRANPEWVFVEVYSDEGITGTNTKKRDGFNRMIEDALAGKIDLILTKSVSRFARNTVDSLVTIRQLKEKGVEVFFEKENIYTLDAKGELLLTIMSSLAQEEARSISENTSWGRRKSFADGKVSLGYSNFLGYDKGPDGELVINEEQAEIVRRIYAEFLAGKTPGGIAKGLTADSIETPGHKKVWQASTVLNILKNEKYYGAAILQKEITVSYLTKEKRPNTGELPMYYIEKDHEPIVSPETFQMVQEEMRRRREAGSNMQCVSIFSSRIICGDCGGYYGRKIWHSSTKYTAWHWHCNAKFQKRKYCETPTLKEESLEETFVEVFNSLIADKDEIVENYRLCIDAVTDDSEYRRQLEDLNNGCGEVQTLIRSLLMPYSRQDTADDIHEKLQEYEERLDTMARLKQELDLKIAACAAKRVQITGFLNELMKHDALLAKFDPLVWQAVINYATVNRDCTITFTFRDGTEKTVPIKNGVRPYTKRNKPQEVDGNDG

SEQ ID NO: 13484 - protein, 434 aa, synthetic construct
MKKTIVNIAPAVAETPRTKRVAAYARVSCGKDTMLHSLAAQIDYYRDYIMMNPEWRFAGVYADESKTGTKDNREQFQLLLTECRSGNIDMVITKSISRFARNTVTLLETVRELKSLGIDVFFEEQNIYTMSAEGEVMLTLLASFAQAESLSCSDNCKWRIRKGFEEGRASTCTMLGYRLVDGEITLVEEEAETAKRIFDLYLAGYGLQKIANTLNEEGLYSIFGNEWHPTTVRKVLTNEKYCGDLLLQKVYRENHLTKRKCYNTGELPQYFVEDDHPAVVTRQIFMAVQDELKRRAKEKTQPVGSKSSFTGKIRCSCCGKNYRRKTTPYNIVWCCSTYNSKGKKYCPDSKVIPEETLKRAAVEILKTDGFLDEAFETQICTIEAHPGNLLRFIFTDDSTTDYVWKDRSRSESWTDEMKAAAGRKTKERNTSHGK

SEQ ID NO: 13485 - protein, 485 aa, synthetic construct
MLNVVIYARFSSSAQREESIEDQLRECQEFADKEGLQVINTYCDYAISGKTDHRDQFQKMIKDAEKQLFQAVIIYKTDRFARNRLDSAIYKKRLKDCGVKVIPAKEVIPDGPGGIILESIYEGWAEMYSVNLAENVRRGQHGNALKCKANCKAPFGYKINPQTRLYELDDTTAPIAEKVFAMAAEGKPTKDLQKFLLSNGIKKSASYIHYMLRNERYKGIYIFDGVRVDGGMPKLVSEDTFTKIAKTLKQRSIRPQANAAKYFLSLKLYCGYCGKLMSGEYGRSRNGDQYRYYTCPSSRRKKTCELKALPADKTENTIAEKLQTTLLSDEIIDTMADYIIDYQRQVYENDSMEKALSKQLSDVEKRINNLLAAIEAGAMTDSTVNRLHDLETKQKELLTSLSIEKLKAPIITKEKIVYYIKKYRDNDITVNEIRQEFLNTFVSKAYVFSDHLFVIYDAINGINTEVTPEILSNPNEFGYIPIWWN

SEQ ID NO: 13486 - protein, 491 aa, synthetic construct
MYLRKSRAEEGQSTEEVLAKHWAALEELADRLGLPVDGVYEEVASGEKLYARPEMLKLLERIRAGEVEAVLCMDIDRLGRGGMADQGTILDAFRESGTLIITPEKTYDLTNDVDIEMTEFKAFFARAEWRAIRKRMRRGLMQTIEAGGYTANAPYGYRRCRIGKLPSLEVIPEEARFVRYIYERYLAGIGAQTIAQELNVMGSTPRRGAEWNRNTVRHVLRNPTFAGKVAWNRVKHYRPGAHGKDKHHVVYTPEGEWLMVDGVHEAIIPWDTWLEAQERRKQRYIPPSNTGQRANPFAGIIRCSKCGNNMQRMGSSSGEPYLLCTTKGCTAGAKFEYVEERMVELLYDELARLRLLIDSGAAPNVDALEAALAAAQREQERVQARIPRLYEFLEDGTYDRSTFRSRLDAAEKELAELASKRADLERQIDERRRSDPRKAAAALENLVQLYPTMSPADKNSALKALGVEVTYTKEKKTKPRDFTLELQLRDF

SEQ ID NO: 13487 - protein, 453 aa, synthetic construct
MTDIGSGSSDIYLDLYLHDGATERTVMRIALYARVSTEEQAIHGLSIEAQSEALEEWAKQEHANVVGTYIDAGISARKPASKRPSMQRLLADIERGKIDMVVFTKLDRWFRNIAEYYKVQEILERHGVNWRTIHEDYDTSTASGRFKVNIMLAVAQDEADRTSERIKAVFDSKRKRGEVVSGSVPPGIKICNKKFIVDEDKAPIMRDVFNFFIANHSVYATQRYAANTHGFLRDTSTLKRLLANPLYRGRVVDEATFDLAKELLSVRSQRNSGSPRGRIYLFKGMLHCDVCGGMMSGIVCKDFYYYRCNKHTFTGNCPNSKYIRESHVEQWLLERVVSECDAYNSRITQERTERPRIDDAGIRRKMSKLKDLYLSDLIDRDEYERDYTELRQTLEKVQEAEPPARPIDVEYVRSAVAMYDDLERPEKKEFWMRIVKEIIAYPDGTFSFVLRNI

SEQ ID NO: 13488 - protein, 594 aa, synthetic construct
MEVSGTNKLILPKDIILADRERERTIVYYGRVSTEHEAQLSALENQLQWYDDQSKYHPNWKVLRKYIDEGITGTQAKKRPAFLKMLEDAKNGQFDLIVTREVCRFARNTVDTLVTTRELKKIGVEVYFVEDNIWTMDGDGELRLTIMATLAQEESRKTSERVRAGQKISRDNGVLYGNGNILGYDRVGDTYVINEEQAETVRLIYNLYSQGLGFKKIINELVSQHRKDSYGLVRWECTKISRILHNATYKGYMGYLKSFRNNYLEQKSIINRDESTHLYIKGNFEPIVSEELWEKCRQIRESKAMKIKSYGGKERVVGFKPSNDIWVKKMKCRCGSSFRRCKWHKNKSGELIYGYQCYNQLNNGSKKIRESAGISTEGYCDMGTIGDWKIDMMAQKIFQGLCGEQRECINRSYSIYENNFRAKGNNSNNQKEVLLSKIEKSKVKLNNLTNMRMEGEISKEEYQECRQKVTDEIATFQKKLKALVEEKKEPDPAVIKMSLDEFAAILIEKIDFNAPIIDRGIIEQFVEKIVPRNTLEFDWYLNLIPHIFEEHSSTGYNEVWTFVINFDEAEKYRKLRGGFLRKNQWRDLTVHVFV

SEQ ID NO: 13489 - protein, 511 aa, synthetic construct
MKAVIYARYSSDNQREESIEGQLRDCMQYAEYNDIQVVGSYIDRAMSAKTDNRPNFQQMIKDSAKRLFDVIIVWKLDRFARNRFDSAYYKNILKKNGVRVISAKESISEGAEGIILESVLEGYAEYYSVELAEKVNRGMTDNALKAMSNGGITPLGYYLDDEQHLQIDERKAPFVREIFQRYADGEMIKTIIDDMNDRGVGITVRMKKKAGKKAYDKPLGYNNVRRMLSNRKYIGEYRFKDIVIEDAIPAIIDKDLFEKVQKRIAVNTRAPAIHKAEDEYLLTTHLFCGKCKAMMIGDSGKGKKGTVYHYYKCVNTKKRHTCDKKAIGKEKIENAVIKAVMDKIMDDKLMEQLSYKLYDLQMQGSSILPALQAQLSDVESGIDNMLNAIQQGIVLESTKKRLSDLENRKKELEIEIAQEQIKHPLLTREQIEFGLTRFRKLDLSTQKGRRALIDGFVNTIYLFDDYAIITCNYKDGEEKITFEDIEDSELGDYIKNKPEQECSDLFAFGEP

SEQ ID NO: 13490 - protein, 555 aa, synthetic construct
MSEIKRAVIYARFSSDMQREESIDAQVRACTEYCRKKHYIVSNIYVDEAKSARDIVKRDAYNQMMVDAMSHKFDVIIFHKIDRNARNEFNYYTFKNTLDQLGVRYEYAVQNIDSSPEGQMMESVLVGMAAYYSRNLAKEVRKGLNENAYKALFNGGRPPFGYKIVDQQYVIEPREAEGVKMIFSMFLEGKGYAEITRALTEKGFVSREGKPFSKNSMHDILRNEKYKGTYIFNKSVTMKNGKRNTHPEDSPDLIRIENAIPAIISPEQFAMVAEICKNNRHRNGRYSAKESYLLSGKIFCGECGQAMNGHRMLGKMRKDGSRNIYTYYLCGNKKRTAEQGCSMKMINRDVIEDKVMEAIAEHIFSEESMERIGRNMSKAYEELIKSTGYRLTELTDARNAAERKLNNLYSLIEEGVADAFDIQRLSQVKKELIAIKKELEAIGKNSSLPKMSKSEIVDTLQALRNDIFIQKDELAKRQLINLFVYKVSVYKENIVIELTTDTISAGVVEMRGVEPLSENIAIQLSPSADDIFYFASQMPIDGRPSCYPKVFPKKL

SEQ ID NO: 13491 - protein, 578 aa, synthetic construct
MAYPMKNTAADNRIIAIYVRVSTGYQVDKDSLPFQKKELKAYCKHILHVDLSQVEIFEDAGRSGKNTKRPAYERMMEKVRAGLVSHVLVYKIDRISRNLVDFSLMYDDFKYNRVTFISLNEQFDTSSAIGEAVLKIILVFAELERKLTSERVKDIMIGRATEGKWNGARVPYGWDWDPDAEQPVHSKIEAPYARGMYEMYLKVRSTGKIRDYNNAHGIPTKRGGEWTSKTVSDFLRNPMNKGDYRYNYRESARGRKKPEDEVIYQEGVFEPLVDPEMWERVNRIMDDNASKRNTGGLHPIMKNCNVFAGLIQCAECSSGFQVVKKDRRRKNGFAPSMYGCTSRFRKIHCPAPNVSEVQIGPFVINYISAMVHATKERFKIHSPAALEFMLLSDPIFANIAGIESQGLNETFALLTGVSVSGSALWRTDPVKQSDTAATSSEIENLKKQIQKYNRAKERLEDAYYFSDDAMSEKEYLEKKNKFDAARVAAENKLKELTEVQIASHVDDSGFMKSASAFLLAHQLHAGVHIEYRDFAVTVEEESLKEFMNLVLDHISVKDRRVVEIVFSNGLSHRFIYRE

SEQ ID NO: 13492 - protein, 503 aa, synthetic construct
MKNQIVQKKIRCAIYTRKSVAEGLEKEFNTLDAQREAGESYIQSQKHEGWIVVDKHYDDGGFSGGNMERPALRELFDDIENGKIDIVVVYKVDRLSRSLMDFAKIIELFEKHNVSFISVTQHFNTKDSMGRLTLNILLSFAQFERELISERTRDKMSAARRKGKWVGGIPLLGYDIVPEGGAIEVNHSEAQTVRKIFSYYMENRSLLQTLSYLNENDIRTKQWKTRKGVIRGGNKFSLTTLNHLLKNMAYIGKINYGGKIYDAEFEAILSEEVFAEVQKIMAYNAVEKGPQVRNKYNALLAGKVYCANCKTAMVHTYTKKTGTKVYRYYICSNATKRGWKNCPHPSLSAPELESYIVSELERISGDAKLRDEVIDSFYEKANAELAETVKNENSVKRTLTEIRKKISSGTDSLELRKKESDISGTLSEIGIERQKLENRIRCGNDRLGQIFADFGLLWRNLNFKEQYDLVDSLIERIVYDGTKGSIFIKFYDDGLNCFKEDLK

SEQ ID NO: 13493 - protein, 528 aa, synthetic construct
MKMMQNDNRTAITYYRYSSHRQGEQSIEGQRAEAERWAKANGYTIVKEYADRAMTGTNDDREQFQLMLRELERLRPAVLILWKVDRMGRNKEEIAFNKYRCKKNGVKVIYTAESIPDTPEGVILESVLEGMAEYYSLQLSQNVRRGHRVSASKCQSTGGACPLGYRVGPDKRLEIDPEKAAIVRQVFERYANGETQPEIIQSLNEQGLRTLRGKPFSRNSLRTLLKNEKYIGVYTYNHGEVRVEGGVPAIIDVEMFQKAQKMLKFNKRSSSHKWTKANYLLTGKLFCGCCGEQMCGVSGYSSTKVKYHYYACSGHHNYKKARSTCRKKNVKKEWIEGLVLREAKLLLLNEDLLDFIAENTYQYYVEANTDTAYTDALQANLREIERSLENIMRAVEAGIFNDTTKARMEELEAQKQQIQHALDLTKLDRGLQLTKDHILYFLKRFRDLDFENAACQRQIIDTFINSVFVYDDHITLTFNYSGDDRTITLAETDAAAGGESFVFAPSCGTKKFRSRFGFGTFFVTCFVL

SEQ ID NO: 13494 - protein, 522 aa, synthetic construct
MALLPRKPAKHPAKPKRGKKLEIEEPGVLYGRYSSHNQKDISVEQQFEKGYELAAEYGIRIIDTYADRAVSGRTDKRRDFQRMMTDAAKGKFRYVIAWKSNRMGRNMLEALINEARLQDLGVRVLYVEEDFDDTAAGRFAARSMMNVNQFYSENMAEDIKRGLYDNAANCMVANGHLPYGYKADETLHYAIDEPKAAVIREIFTRVSCGEAFVDIMASLNVRGIKTSYGRPWGRSSFQKILSNERYRGIYIYGDVRKEGGIPRIISDELYFKVQEVITTKKNPQGRHRVNGDYLLTGKLFCGHCKSPMTGVSGTGRSGNLHYYYVCQKRRTEKTCDKKNVRRDEIELQVAQAIKDYALKDDVIEWIADSTVAYNERKEAESKVGILEDQLAGTEHGKKNIMSAIEQGIITETTKSRLVELESERATIKANIAAARADIVTVSRDDIISGLEMFRDGDVHDKKYQARLFDTFLVAVYAYDDDLRLVFSFSGNKNTIQIPIESAVNAVENNEAECSFKLCSAPP

SEQ ID NO: 13495 - protein, 594 aa, synthetic construct
MENAVIYPRYSSHGQNDMTIEGQIRICTEFAHSRGLNVIKIYPEKAKSASKDTHKRKAFQQMLHDAESGAFQYIIVYKFDRFARNRFESMMIKHQLKEKCGVKVLSALEPVTDDEGGELYEMFVEWNDEKYSQRLSVRIRDGLTTSVENGTFTGSKLIFGYKLIDTDKTGKKGTIHKVAIDEKQAEIVRFVYTEYAKGTDKKDIAAALNARGERFNGKPFKGRTFDRWLTNAKYTGEYYFGGRLCANTYPPIIDKLLFAEVQKRLAKNKILAGANSAIEPYLLTGKAFCGHCGTAIVADGGTSCNGKKHYYYACKQKKKGLCHKSRENKDNLEMQVAQAVKDFLSDKKNADRAAADTIAYYEQRTGDSGLRSIETRITQAQQEVENLTNAFIEAKSALLRAGIEKKMQDYETLLADLQAQKSQIELERGRQVTKQQILAFVAELIKGEPTDKEYQRKIIDNLVFMVYVYDNEIVTYLNFGVDKAIERVRLDETNAAIEGLKNVQTLSATPPKCARGKLAVCLGRILFWRSIAVKRNASFARGGLPPLLCGGLPLAGNHRIRELYFIYGIDSAMPFCIAEHSGRLKRRSGAIDIR

SEQ ID NO: 13496 - protein, 509 aa, synthetic construct
MKIAIYSRKSKETDTGESIKNQIRMCKEYFTRQYDDCTFEIFEDEGFSGGNTNRPAFKRMMQLAKHKQFDIIAAYRIDRIGRNTLDFLMMFEELKQYDIKLISVTEGFDPDTPAGKMMMSMLSSMAEMERMNIAQRIKDNMTELAKMGRWSGGTPPTGYKSITNVNSYGKKETYLDLIPEMEEKIKYIFKRAAEGYTTFQIGKETNLSSKTVYNIITNPVYVKSTEESAKYLESLGYLVYGELNGLGFMPYNRRPKKSGKKLFNATGMFVSVSKHNAIIDAPTWIKANSNISNRGQESRPRISPNSFLSHLIKCSCGNNMFVHQGRANSSGEKVYYFRCSAQKNKQNDCTAKWLKVSSVEESVLKILEGFALDKKTLEKFITSKKDIDYDSLIKDVKKDIGRKNKDIENLTEKLILIEGPAVKIVTSKINELSKEIDNLNSELLSLERKKIFQEQDKININTLHSSIIKLVNHFPTLPIEDKQTSIRGIIKEIRFNGNDEIEVVLVGGI

SEQ ID NO: 13497 - protein, 498 aa, synthetic construct
MQIEVRKADMGKEKKRLKVCAYARVSTEAFEQENSLENQVSHYTEMIQSNPAYEFAGVYADFGISGFKESRPQFQKMMQDAKNGKIDLIITKSVSRFARNTAIVLKASRELKERNVGIFFELQNINTLTEAGELLLTILAAFAQAESESASESSKMAYLHRIENGEVVAYLERSYGYEKDENGEYRAKEPEASVIREIYDLVIQGVNCTNIARVLNARNIQTVQGAEWTASTVFRIVENEIYKGDVLMQKTFIDGKRHQVQNRGEKAMYYAKDNHPPIVSEKTWEKAQRKLEDMRAERAEHSVIQEFTEENYPYMNHIFCAKCGWPLKPRVYSHGHRLSWDCSGQKRGTKKFCTGIHVLDNDLRKMEIEGNRYFSETVDKYGEVHLKHVGERTWKNKHKKKKFNHKDLYPELNEENYPYYKRLYCARCGSRLGRYISHGTVRWICSSYKRKGQAKCPGVRIPDEIIKEWNLPDGKIYIMGKEDKNGEKHYSYTSESAL

SEQ ID NO: 13498 - protein, 505 aa, synthetic construct
MCPIDALYARQSLDKKDSISIENQLEFCKYETRGAEYETYIDKGFSGKNTNRPAFARMMEDIRAGKIKRVIVYKLDRISRSILDFSNMMEIFQQYHVEFVSSTEKFDTSTPIGNAMLNISIVFAQLERETIQKRIADAYATKSQKGYYMGGRVPYGFQLEKTIINGIHTSVFVPEPNEMKQIRLIYQLYSEPDMTLGAVMRELLRQGFTEKRGAPWSTARISEILRNPVYAKADIDIYNFFESQGTNMINPASDYVGTNGIFLYKGINGDKTKKKQYDLVDRDVVIAPHLGVIESDVWLKCRLKIMKNRQSARTNKGKRTWLAGKVKCKKCGYAYTVTRSNTKAGRYFQCSGSRYSIKCKGAGHTIYADVFEDYVLEEMKKQLAKFQYLSDELEAVTQPSSQAEKVRIAEIEQEIGNLLAKVPEANKTVMEYINRRIEELDKEKQSLQQKLVEQSTNQTSGKMEKITNYVAKWDELDNDDKQRVADILIDRIDIDEDVIEITWNI

SEQ ID NO: 13499 - protein, 499 aa, synthetic construct
MKKAFAYARFSTDMQREESIDAQFRAIKEYCSRNKISLINFFKDEGISGTTDNRPAFQEMIKKAEEVDYIIVHKLDRFSRNKYDSAIYKRALHQKGVRVISVLENLDNSPESIILESVLEGMSEYYSKNLSREVKKGLYENAYKAKFNGGVPLFGYSIDENKNYIINEYQAIAVRLIFEMFSKGHSYSEIITELNKRGYKTSKGNNFKKTTLHDLLSNERYIGTYVFSREDYDMENRKRNSHKYKNRNDMIIVENGNPAIIDKKTWELVKERQSLNKKISNKAKWTYVLSPFLYCNQCGKKMSGFTRKNKIGKYYQHYRCINTSCEQKSVRTDILESEFYDAFNKLIFNDSNKKLLVEKINNFIKMKNSNNDNSKIENELKEIEQQLNNAVTFILNGSSSQTIKNKIEELEQKKYNLQNELIQKSQKHNNINSKEIINFLNRYDKLEKFSIPEQQTILKFFIDQLRYEKGKLIIKLKLAEKPPPTLKNNENGTELPAPF

SEQ ID NO: 13500 - protein, 515 aa, synthetic construct
MRTAIYLRKSRADLEAEARGEGETLAKHRTTLLKIAKEKSLNVLAVREEIVSGESLVKRPEMLALLEEIEDNKYDVVLCMDMDRLGRGGMKEQGIILETFKRSNTKIMTPRKTYDLNDEWDEEYSEFEAFMARKELKIITRRMQRGRIASVEAGNYLGTHAPYGYDIHRLNKRERTLTINLEEASVVRMIFEWYANEDMGASMITNKLNQLGYKSKLGNDWNPYSVLDMLKNNIYIGKVTWQKRKEVKRPDATKRSCTRQDKSEWIIADGKHDSIISESLFEKAQEKLNTRYHVPYNTNGLKNPLAGIIRCGKCGYSMVQRYPKNRKKTMDCKHRGCENKSSYTELIERRLLEALKEWYINYKADFAKNIQDSLSKEKQVIKINQATLRKLEKELLDVQKQKNNLHDLLERGVYTVDMFLERSNVVSDRMNEITDMMENLQKEINTEITKERVKKDKIPQVEHVLDLYFKTDDPMKKNSLLKSVLKKAIYTKEKWQRLDDFKLVIYPKLPKDGDK

SEQ ID NO: 13501 - protein, 446 aa, synthetic construct
MKAALYIRVSTKEQIENYSIPTQKERLEAYCKSKGWDIHDFYIDGGYSGSNMDRPELQRMLREIRNFDVVIVYKLDRLSRSQRDTMELIEDNFLKNEVEFVSITETLDTSSPFGRAMIGILSVFAQLERENIAERMRNGHIKRAQEGYAAMGGDYDPAGYKREEGKLIIKSDEKDHIQKTFALYEQYHSITKVQNELKLLGYPVWRFRRYRDILSNKLYIGYVSFAGENYKGVHEPIITEEQFNRVQTLLERHKGHNAHKAKESLLSGLITCSCCGEPYMTYTTNSKKHGKYRYYICRARRFPSEYPEKCMNKTWNGKKLEKIIIEELQFLTVGKVNEEDAKPKINYKAQLNKINEKIERILGLYASGKFEIETLDKQVDILNAEKESLIQRQKEETAEKGISAEEIHDLVINLKDADFNTKQAAVQKLINQIMINGEDIEIVWAF

SEQ ID NO: 13502 - protein, 441 aa, synthetic construct
MAAYCRVSTDQEEQLLSYENQVRFYTESINSNPEYECAGIYADEGISGTNTKKRDEFNRMILDCRAGKIDRIITKSISRFARNTLDCLNYVRELKGLGIGVTFEKEAIDTLDAKGEVLLTILSSLAQDESRNISENSTWGIRKRFEIGQHKMSTKRFLGYDADENGKLVVNKQQAKIVKRIFMEFLWGKTTDYIKRIFEREGVINWDGGTKWQSTTIGSMLENEKYKGDTLLQKSYTVDFLTKKRVQNEGEVQQYYIEDDHEAIIEPWLWECVQLEMKRRERYLEEHNITRFSQNTEANPFSSKIICGECNKAFARKGWRTPSGDKKVWQCSERYKVKGVLGCGNRHIYEETLIEIYLMAWNRLLECREMLVPEWERKMQGDDLLAKFRAMDFMEITKVEKPIGELGIDLMLRTVDCIKVYENGVVVTAFLDGTEIEYIAV

SEQ ID NO: 13503 - protein, 426 aa, synthetic construct
MRIRMLEPVQNKIPKKKRVCAYARVSTDSRKQGESLENQISSYERSLKTNPEYEFIGVFADHGISGFSRNRPEFQRMVQMAKDGQIDLIITKSISRFARNTAVLLETVRELRLIGVAVYFEEQNINTLSGDGEVMFTVLASFAEEESRNVSENRKWSIRKKFERGEYMINTERFMGYDKDEFGELVIDPKEAMAVRFFADMYLLGVGSSRLGQLADFLGVPSVTGGKWTGGSFMGMFKNEKYKGDFHLQKYYTPEDKRNQTVRNHGGVQSYYMEDSHPAILSTEVWDALQERIEENKRGRNIAQSDTQKYQNRYPLTGMMYCPHCGKTLRRRIGYKKKVEWLCSTYIEEGKQACPGVRIPDESAARQDIIEPMVAEEVYSNGKKHYRYTSKAEFDSRGRECRAEEETAGGGILPGEYRPRRTAIKL

SEQ ID NO: 13504 - protein, 528 aa, synthetic construct
MLDNSNVAPGKNKTLRCAIYTRKSHEEGLEQEFNSLDAQRESAEHYIEAQRMRGWTALPDRYDDGGFSGGNMERPGLRRLLADIDAGKIDVIVVYKVDRLSRSLLDFMKMIDLFNEKGVSFVSVTQHFSTTDPTGRMFLGILITFAQYEREVIAERIRDKVAAAKRRGKYCGGVPILGYDVDRDNKKLLVNPDEARTVQYIFRRFIQIGSAKKLGQELNEQGYRTKAWTTKKGKVREGSEWNTAHIYRLLNNRIYIGEIAHKDRSYPGEHEGIIDRATWDKVQAILEDNKPVKVSMARTKMVAPLKGVIRCGHCGCSMGPTYARKNGRHYTYYICQKDSKRTVSRCPLKRIPAGGIEQAVVEQLSAVFRTPTLVAKTYFAARDIEQAERERLFKQKAQLEIELSQAREQALELMKPGSDQPGKAEMLTTVNRQAVELSKQLTHVSERCRAYRGNSITEQDVSEAFQNVEGVWEDLFPVERNRLIRLLVDKVEIRETGIDMELRTNGLTTLIAELAGLACEVTERRASR

SEQ ID NO: 13505 - protein, 471 aa, synthetic construct
MTRPAALYIRVSSHLQARDDRYGLARQEAETRAYAARTGLSIPDGALYTDVITGRSETRDGLEQLKADRQRYSAIITSEADRLGRTPLAGHKILNELLGLGLDVHNATDGLYDPDDDASVLTFDMRMVIAHQELRSIKRRMLGGKLAAAEKGEIIPHGWRCYGYRQVYELEGGRPVRRIEVDEVEAAVVREIFERLVRGDTTGQIADDLNARGVPTAMNSVWHPQRPWYMARNTAYKGEARMTLRHAKREFTFPVPPIVDGDTWQLAHDSLRRKPIKHTETFWLNGLLRCAECGGAMSGTNSHSSRTSYRHYRCSRAFKHRHYGDVPVCTQRTYYRMNDLHEHADRIVREIAEHPERYAGQAASTPPDHSRALKEIDRLEGQLKRYLTDYQRELLTGDEYAGLRDTARRRLEELRAEVVPPTVIPLPNTAAALEAIGRLVQEGVSTREVLLRSGTRLSIAPGGVLEVVLRV

SEQ ID NO: 13506 - protein, 505 aa, synthetic construct
MCPIDALYARQSLDKKDSISIENQLEFCKYETRGAEYETYIDKGFSGKNTNRPAFAKMMEDIRAGKIKRVIVYKLDRISRSILDFSNMMEIFQQYHVEFVSSTEKFDTSTPIGNAMLNISIVFAQLERETIQKRIADAYATKSQKGYYMGGRVPYGFQLEKTIINGIHTSVFVPEPNEMKQIRLIYQLYSEPDMTLGAVMRELLRQGFTEKRGAPWSTARISEILRNPVYAKADIDIYNFFESQGANMINPASDYVGTNGIFLYKGINGDKTKKKQYDLVDRDVVIAPHLGVIESDVWLKCRLKIMKNRQSARTNKGKRTWLAGKVKCKKCGYAYTVTRSNTKAGRYFQCSGSRYSIKCKGAGHTIYADVFEDYVLHEMKKQLAKFQYLSDELEAVTQPSSQAEKVRIAEIEQEIGNLLAKVPEANKTVMEYINRRIEELDKEKQSLQQKLVEQSTNQTSGKMDKITNYVAKWDELDNDDKQRVADILIDRIDIDEDVIEITWNI

SEQ ID NO: 13507 - protein, 510 aa, synthetic construct
MSYFIYARKSRKDAELEALGIDVLERHITTLLELAKTLSLPIGAIYREVVSGDSIDARPVMTQVLSEVEACMWDGALVMDVDRLARGDTIDQGRVQRAFFYSNTRIVTPNKTYDPANEYDNEYFEFSLFMSRREYATIKRRMQRGRERSSSDGYYVGNVAPYGWERVIAPDGKHYSLAPHQTEAPVLDLMYDLCGNKQYGYQKACTYMSNMGILARSGKPFTPSTLKGIISNPANIGKVRWGHRKTVRAVKDGRVVKSRPKATDYILSDAAWAPRISPDLFKRANQPKGCFSAPVRNDRPIQNLFAGLVRCSQCDRLMVRKKAQTKTPYDMLICQYTECSTVGIRIDELEEALLGWLKDYIAKYEFADTHEEDTAAIAAKELIVTNFETEHQTLLKQRESLFDFLEQGIYTKEIFIERSNALEQRIRDCMNNITAAREGLHTTIARQANRKNFVPKCKNLLSEWDSLTVSEKNSALRQLIDRIVLTKTKRNKKNQKNSEFTIDVYPKVPK

SEQ ID NO: 13508 - protein, 463 aa, synthetic construct
MARSVTVIPARNRQASGHRAVPQKKIRVAAYCRVSTDQEDQLHSFEAQVDYYTKYINDHENYEMAGIYADEGISGTNTKKREQFKRMIADCEKGKIELVITKSISRFARNTQDCLMYSRKLKNLGIGIIFEKENINTLDSTGELLFTILSSLAQDESRNISENCKWGIRTKFKNGEMHLNTFKFLGYDKDENGKLIINREQAKTVRRIYRDFLWGLNPAQIAKELEEEQVPGCLGQTKWYASTVIGILKQEKHMGDALLQKTYTADFLTKRQVKNNGEVAQVYVKDSHKGIIDKETWNAVQEEFDRRKKFMQRHGTDRYSYGSECYPFCEKIFCGECGSLFTRHSWKSRGIVQWQCKNHRKDGKVACTNAYVDNANLENGFVKAFNRLVSEREKHMERWNAMKADGTPLEKIRAVQMMEATENGQLQKYVPEAAQLVLEEITIFGAKKYEFAFLEGSRVKVSV

SEQ ID NO: 13509 - protein, 522 aa, synthetic construct
MGNVMLIPARRQVGSNARKQEEEKPKLRVAAYCRVSTDSDEQATSYEAQVEHYTEYIQKNPDWEFAGIYADDGISGTNTKKREEFNRMIDDCKAGNIDMIITKSISRFARNTLDCLKYIRQLKDMNIPVLFEKESINTMDAKGEVLITIMASLAQQESQSLSQNVKMGLQYRYQQGKVQINHNRFLGYTKDADGNLVIDPEQAETVKRIYREYLEGLSMDKIAAGLERDGILTGAGGKKWHTSTINKILQNEKYIGDALLQKTYTTDFLNKTRVKNNGLVPQYYVEGDHEAIIPKDIYLQVQEELVRRRVGKTSANGKKRNYSCNHCFSQIVICGECGEMFRRLHWNNRGVKSIVWRCISRLESTGLECHARTINELVLQDAVVKAINQMLGDKSNYQAQLQLNIAAVIRASQATAIDSIDEKLMALQQELIQKANSKEDYDEIADEIFRLRELRQKTTVDTAARDEQIKRINDLQDYISQQTSYLTEFDEALVRRWIKQITIWDDRITVELKSGVSIDVDA

SEQ ID NO: 13510 - protein, 512 aa, synthetic construct
MERAVIYARYSSDHQREESIDAQVRACREYCQRKGYLVTKIYADEAKSGKSIAKREQYKKMLADSQKNLFDVVVFHKIDRNSRNELDYYLTKNQLISSGIKYEYAAQNIDTSPAGQMVEGILVAVAANYSRNLAEETKKGLKENALKALFNGGRPPLGFEINQDNKYIINDYEAGAVRIIFDLYLKGKGYHYIISQLNSSGYKTREGRKFGKNSLYDILRNPKYCGTYTFNKVNKDPSGKRNSHKISENTIIVEDAIPAIISKEDFRKVQEKMNKNRSRSAAYKSKETYLLTGKVYCGICGAAMTGHRASSRGKKYVYYTCSARDRLGVSACDNKVVPRDGLEETVLSAIEQELFSDSSLEKLKRYIAEEYQEVLNESATEANVLSDQKAIAERKLNNLYTIIEQGTADEYDLERLAAVKKELTLIKEKLSKCAGAYSLSSIDPAAIERFLTICRDMFRKQTSPENLTLLFDGLVEKIVVGAKKITLQFKLECFDTYGAEGRTRTGTWGNHA

SEQ ID NO: 13511 - protein, 474 aa, synthetic construct
MLNAVIYARFSSDMQREESIDAQVRACKAYAKSKGYTVVKEYIDEAKSGRSTLTRDAYNQMMADAMENKFDVIIFHKIDRNSRNELNYFIFKDKLEKLGIRYEYAAQPIDAATAEGQMMETVMVGMAAYYSRNLAKETKKGMNENAYKAIFNGGYAPLGYKIVDKRYVIDEKEAEAVRLIFNLYLDGKGYGEICLALAARGYTTRSGKNFPKNSLHDILRNERYMGTYTFNRVPKTKRRNSHSYARPNDFISIPDAIPAIVSKETFLTAQEKMLLNKKRKGGAYTAKRDYLLSGKFFCGYCGSAMQGYSCCTRGNMYYYYSCARKDRVPADRCKQKMIRAEVIEHWIMSTLEREIFSDAGIQRVADSMSTAFGNANKEVKNATTVLLQRKAAAERKLNNLYQVIEDGDADEFDMQRLKKAKEELRNINNEICETTVKSAPDIDTSKIISLLKNMREEIFAKKIATTQNKRLNCL

SEQ ID NO: 13512 - protein, 484 aa, synthetic construct
MNAVIYARYSCDRQTEQSIEGQLRECKAFAASEGITIIGEYIDRAISGTTANRPEFQRMIADSRYKTFQAVIVYKLDRFARNRYDSAMYKSKLKANGVRVLSAKEHITDSPEGIILEGLLEAMNEYYSAELSQKIKRGMRENAIKGKTTGGNVALGYRIGADKQMEIDPAGASLVRRIFTGYDSGMTFTEICDDLNHAGYTTSRGKQFRIDTISRILANQRYTGAFQCAGEDAHCPPIIEPELFRSVQERLTESRHKHRHTQSPHEYVLTGKAICGTCGRRLTGRAGTSKTDKRYYYYCCPNKCCGWLPAAELEHAVLDAIAQYTTPEACEQIANATYALYQQSTHENADLTAAQRRLQETEKKLENAVNAVLNGITSAALQATMQQLEQQKAALETEVRLLQTDAPELKLEHFQYFAHRLLEVQAEGTEKILQLLVNQVIVYKEQITVLVNLTDKTKTPPLEQVTAALRESSCSIACGGGDEN

SEQ ID NO: 13513 - protein, 539 aa, synthetic construct
MKIETSRAIIYARFSTDRQNEKSVDDQIALCAARCAREGWEVVDSFSDRAVSGSTPVAKRVGGAKMLAALMAREADVLVLESLDRLSRDQVDQETIVRQLEFIGVRIVGLSDGYDSATGSSRKVLRAVRGLVNELYLDDLREKVKRGMRGVFERGCCPGGKVYGYRTEECEAGKRFVIYEPEARIVREIFTRFAAGWSAGRIVDDLNRRRILSPRGGKWMVSALVGVDSLGTGLLNNRLYIGLHLFGRFEWRKDPTTGKRTKRVRPESEWLRAEHPELRIVDEETWEGVRDRKRPTGHRTGGAPAKTLLSGILRCGLCGAPMIKSGRSSYCCSVSHNQGRSVCPGLSVSAEDAESAIIRVIQAQLLSPDAVERVLKSVRAQLETLTACSDEEEKDIQARMTALRAEIDNLVEAVAMGSLPAAVVGKKISERQAELDRLEDDLKRLKRADTLNVPDEELRELIRAQATAMREAINSDVQVAREMLKKVIGAVTVLAGDDTVTLKMKNPALGRVFKLPELSEPRDLIMVAGEGFEPPTFGL

SEQ ID NO: 13514 - protein, 519 aa, synthetic construct
MKKVTKIDKIQPAKNAENKLRVAAYCRVSTATDAQLESLEAQKNHYENYINSRDDWCFAGVYYDGGITGTKASKRPELMRLLADCKAKKIDFVITKSISRFSRNTMDCLKIVRTLLNLNIPVYFEKENINTGSMESELFLSVLSTMAEGESASISSNNRWSIKKRFGNGTYRLSSAPYGYKLESGGLQVVSEQADIVKRIFRELLSGKGMYSIAKELNAEQVPTQKGGRWTSTSVHNILTNEKYTGDCIFQKTYADSNFNRHTNNGELNRYLIQNHHEAIISHEDFNATAALIEQRAAEKGIESGNDKYQQRYAFSEKLICGECGNTFRRRIHKGKYNSYVAWVCNTHLSDTNRCSMLFVRDDALKLAFATMLNKLIFSYRLLLKPYLAAMQSNTADEALLRIQYLENQLDQNAEQRSTLHKLMAQGYIDQIIYTQESNELLLQARDFRSEIEALNNTVAGDTTKVYETERLINYCKRGEMLTDFNESLFELFVDHILIYSRQKIGFVLRCGLTFEEMI

SEQ ID NO: 13515 - protein, 536 aa, synthetic construct
MLKNTKIAVYCRVSSDEQAERGTIDNQVTFAQQYADLHRLDIYDIYKDDGVTGTIPLQDRPEGHRLLQDAADERFTLVIFYKMDRLGRSTRVILNAVEALSQYGVGVQSMSEPFDTATPSGRFMLTMFAGVAELDRANILDRMYQGTLRHARLGKWCGGPAPFGYRLQDGYLVISEEPMPGQQLSEADVIRMLYNKTIEGWSALRLAQHLNALSIPNKYTLRGNVAAGSGKWHQSKILYILHNTLYYGERNFGKLSNNNNKNIIPQQVPAIVSRETWDAAQAAVEQHSIMPKFIKRRSYLLRGLIRCGICGHTYVGTCYKRKAGYSIYYVCNAKNTRGVTPEPCKGQTLRGEWIEDLVWQDCLKYIQQPDVIAVDADCHPQQSADDIKKEIAAITAQLKQLDQERQTVIGLCRQGIITAADLDGQLSDITAKQNTLQQTLEGLNSQNIVTKEDAEKRVKEIADILDGFRQQLQSGGELSFDAKQGIIRTLVKQITVHTELQAGTERDIPSVRVQIDYNFTLLPSKAGMLDPYRHGF

SEQ ID NO: 13516 - protein, 464 aa, synthetic construct
MARSVTVIPARNRQRETGRRAVQEKKIRVAAYCRVSTDQEDQLHSFEAQVDYYTKYINDHENYEMAGIYADEGISGTNTKKREQFKRMIADCEGGKIDLVITKSISRFARNTQDCLAYSRKLKNLGIGIIFEKENINTLDSTGELLFTILSSLAQDESRNISENCKWGIRTKFKNGEMHLNTFKFLGYDKDENGKLVINKEQAKTVRRIYRDFLIGINPAQIAKELTEEKIPGCNGQTKWYPSTVTGILKQEKHMGDALLQKTYTADFLTKRQVKNNGEIAQVYVKDSHKGIIDKQTWNAVQEEFDRREKFMESHGTDRYSYGADCMPFCEKVFCGECKSLFTRHSWRSRGIVQWQCKNHRKDGKVACTNAYVDNADLEKGFVKAFNRLVTDRDKHMERWQQMKSDGSPLEKIRAGQMMEAVENEPLTRFVPEIAQLVLCEVTVLGAKKYEFFFQEGSRVKVSV

SEQ ID NO: 13517 - protein, 578 aa, synthetic construct
MAKKKKPAGGIAVIYARYSSHNQRDVSIEQQIEACRKHAAELGLTIIATYEDRAISGRTDNRPAFQRLMHDAEKGKFSYVLAWKSNRMGRNMMQAMVNESRLMDCGIKVYYAEEDFDDSAAGRFALRSMMNVNQFYSDNLAEDVRRGLMDNANKCMVNGRQPLGYKRGKDGKVVVDEPAAAIVREVYARVASGELFTDIARDLNRRGIKTADKGEWNKNSFHRLCSNEKYRGIYIYGDVRIEGGIPTIIDDTLWYKVQEALRVKKLKRNGRHRPGDEDYLLTGKLRCGKCGGYMIGMSGRSKTGDIHYYYACQNRRVGRTCDKKNIRRDVIEPAVAQAIKEYCLTDDAIEWIADKTVEYWEKADRNLQLDSIEGDLAAVQSSISNVMKAIEMGVVTETTRDRLIELEKQRTDLKSKLSLAKEEVVHVDRKKLISSLLLFRNGDIHDRQYQEDLFKTFLISVYVYDDDDNGHLKIVFNAFGDNNTVDLPIDFGETDNQSAFSDGAEKFDYSLHRSTRKPSDSFRWLFCFISRCVFGPVRHKALIFSRLPGLYCFLMQQGNTEDRSQANEHLGRIRQRTI

SEQ ID NO: 13518 - protein, 463 aa, synthetic construct
MTTKIERCAIYIRVSTTEQMMHGKSLEAQKEYLTNYAREHNMAVVGVYADEGKTARKELKKRKAIHSLLQDVESGKIDVIIFWRIDRWFRNLSDFYKVQDILDNHNVRWISTSEPGINMETRDGRLQLNVVLSIGQNEVDTTSERIKFVNEASIRNGKLIFGDVNMGYGYKSGIVDGQKRMVKDPDREHVVDAFYKYFFKHQNKCATLRYIQETYDPDFSFGIMRTLLSSEFYKGTYRGFPYCPAYLTEDEWNKLQKIQKRNVKATPSGRIYLFAGLIRCPVCGQKLCGTGCSSIINRKTGAKRTYCYYRCNRAMIDHICSYRHRLSQNLVENYLLDNLENEYKNYKVKCEKIEKEKEKQKKKQSPEKLRKELDRLNFLFQKGRIDWDYYNEEYGRVESELNDLQNALPEPVTNYGYLEELLDTDFRTMYDQLSQENRRAFWRSIIQEIHVNEDHAITSVDFL

SEQ ID NO: 13519 - protein, 577 aa, synthetic construct
MSINRNNTSETPKKAALYVRVSTNYQIDRDSLPMQRQELITYAQLMFGINDYVVFEDAGYSGKNTDRPEFQNMMRRIRAGEFTHLLCWKIDRISRNLLDFASMYQELKDLGITFVSKNEQFDTSTAIGEAMLKIILVFAELERNMTSERVTATMLSRAQNGLWNGGRVPYGYDYDKDSKTFSINQEEAFLVRKMYDLYSEHRSLVMVSRTLNEDGYASRAGNDWSPVSIFIILTNPFYTGIYRYNHYKIPGLKIEKDPSEWIEVPDHHPRIISDEQFDNVNRILQSNSRSKRLPGQQHTSKGTHIFGGLLYCGTCGSQYVSTPSRLLASGYRPSKYACPNLRKKKTCNTKSISDPVIGEFVLNYVLNMMHARAAFSSIHDTSELQDALLSGGTFQNVDHIGKDGLDSCFHMFSSTPLDGKRFRKPKKATTIDPELKRLRAEKRKTERALDRLMNLYLYADNPISEKDFVIRKQALDDYLKEINENLGMIDRGRGIETISDENFIKRASYFIMSKELAGKDYIYFKKLAMDMDAEILRDFFQEIIDSIVMEGSNVKEIVFRNGLAHTFFYKDTEKPEA

SEQ ID NO: 13520 - protein, 575 aa, synthetic construct
MAYNKLSLPGHIRVAIYVRVSTMHQIDRDSLPMQKQDLLAYAKIMLGTDDCIIFEDAGYSGKNTDRPKFQEMMSQIRAGGFTHLLVWKIDRISRNLLDFATMYNELKELGVVFVSKNEQFDTSTAMGEAMLKIVLIFAELERNMTSERVTATMISRASNGLWNGGRVPYGYEWDSKSKEFSYNTDEYNIARLIHDLYEEERSLIREARILNAKGYRTRSGNEWNPVSLHIILRNVFYCGDYRYNVLKEGDRQKVKAESEWITIENHHPAIVSREQKMRIISILDSNSRINKKKNNYKSGKYTHIFSGLIFCGSCGNPMGAAPVSLRADGWRYSKYSCPTRRKSSMACIGKSTSDPIVGEFVFNYILNMLNTQRDFSKITSIDEMQDKLLTGNTFNYIDHIQEEGVLDLYDVLAKGNVQGAIYGKGVSIPSKQEKSSEIASLRVEKQKTERALDRLRNLYLYSEDAMSEKEYILERTRLTEKLEEINEEIGMMQSDEWQQSVSDEMFIARASEFIIAQKLTDRNYVNYKRLAKSVDAEVLHSFVTSIIDSIIIQDGKVQRITFKNGLSHTFIFKKS

SEQ ID NO: 13521 - protein, 582 aa, synthetic construct
MEILIVRHPGKEDILKLSDNHKFGTAALYCRLSRDDNMDAESNSIQNQKKLLQKVAREKGYTDTLFFVDDGITGTTMKRPGFQKMLTAIEAGYISAVFVKDLSRLGRNYIEVGKLTEEFFPQYDVRLVAVSDGVDSDEGDNEFTPFRNIMNEWYAKDISKKRKIVNKMKGNAGIPLSQPPYGYIKNPDDPRFWVIDPEAADVVRRIYDMALEGYGLAEIATALGKDGIVNPTYYWRSKGVNRSGSKSTLEPTKWGHTTVKKILTLQEYCGDVINFKSYSKSYKMKRRIENPEENRAIFLNVHEPIIDRATWEKVQAMQKGTRRKKPTVTQEPSVFSGRLKCPECGGNLNFHFNQKNHDIKFFSCQNHNSGLRKCSATHYIRLDFLEQVVLYEVNRLATFANEYERDFVKAMMGRSAKVAENDRARKQRELNTLLTRDKELDMLFERLYEDNVAGKIDDTRFARMSKRYEQEQGEIGAKVKTLRLELKKAEGQQMDMEDFLETVRRYTHVTKITRRMVSELIDHIEVYHAEKQDGVTNQRVVIYYNCIGAFDVPDRRKIPEADIIMETRKGVALSYAPERLAV

SEQ ID NO: 13522 - protein, 467 aa, synthetic construct
MLKAALYARVSSEEQAKRENSIPAQLRALREYCRKNNIEIFKEYKDEGITGQISKRPAFQQMLSAAFSGKINVILVHKFDRFARKVELSRSVKNSLQAAKVNVVSITEPIEDSPMGFFMEGLYELMAEYYVRNLSAEAFKGMNERALKGKHMGQMPYGYYCKDGNVYVNETQAEVIHKIYRFYDDGWGHMKIAKWLNESKIPTYKGIIGGWQTFQVKQILKNSKYIGENLWNGTVYPADFPAILEPALFHRVQEKSNLMTRTHTYRGNNYTKHHLLGLLYCGECGSIMRVKPNQDWQRRKFDTYTCRDASQYRGDCRFTKIFDAAKLESEVDAYLRSVLAGAPISLIVSKDAEKVKPADASKSQIEKINAELKRAKDAYLSGVFDLDEYREIRQGLEKNKKILEAKTEDAPAPLQANEKEDILRKKIKSAWDLYENVQTAEEKRTILKTFIHKILIYRDKWEVVFYI

SEQ ID NO: 13523 - protein, 468 aa, synthetic construct
MLYGKPQNYSWYRARVVLYIRVSTDEQARHGYSLGAQREALREFCDTFQCQIVAEYSDDGVSARKEIQRRPGLLRVLEAVKAGGVDYVLFIKLDRWFRSVREYYRVQDVLDAAGTNWKAILEDYDTSTTNGRLNLNIRLSVAQDESDRTADRIKFVFSERVKNGGAIFGSKSLPYGLEVRDHRVQIVEDQAVIVRAFFDHYEAAQSARSTQVWLRDQYGVDLPRNTIGRMLRNGLYCGQYRDNKNYCPAIISPDQFRRVQEILARQASGHTRQSKYSYVFTGLLRCPVCGCTLKAFPQFDYKWNRLYLRYRCTQHWIENRCSWKTTPWEPRLEGWLLDHIQPQLDAYIAQFDVQEAQRRRAVVDVGAIQRKLSRLQDLYVDGMIDRAAYDEKYQALIRQQEAAQAAQQSQSAGRDLEPLRQLLAGDFRSIYATLSPQERHTLWASVIDHIVVKDGRYGHFDLDVIFLP

SEQ ID NO: 13524 - protein, 675 aa, synthetic construct
MARKKNIAAGLDAVIYARYSSHNQREVSIEQQIAECTKHAAALGLRVVGTYEDRAISGKTDNRPRFQQMMRDAEKGKFQAVVAWKSNRIGRNMLQAMVNEAKLDDYGVKVFYAEEDFDDTAAGRFALRNMMNVNQFYSENMAEDITRGLYDNANKCMANGRQPLGYKRGADGKVMLDEPAAAVVREIFTRVATGDLFVDIARDLNAKGIKTSKGAAWNKGSFQSICQNERYKGIYIYGNVRIVDGIPRIVSDELWYRVQEAMRMKKNPVGTRHRVGAEDYLLTGKLRCGHCGSYMTGVSGTSRNGELHYYYTCQKRRTEHACNKKNVRRDVIEPAIAQAIKMYCLTDDVIEWVADRTVEYWEKHDNDLHIEALEQQLEENKKATSNMLKAIEMGIITDATRSRMIELETEQSKLAVQLNAAKADVVKIDRDDLIDELQIFRDMDVNNRSVQAELFKDFLVAAYLYDDNRLKLVFSFMGKEKNVEIPLETGEDPPDGGDSPDTKMFVFAPDCSTKKALYFVGSMVLFFFVPAKRSGVHRSPCRRASDTPDLHNSRHLPRRFNRGFRGQHGSRPDSARTSVAGFGRSASSKATWAAKKKEVSAPQSLRGSGGFSGQNDETIHKFLGKVDLKDTQQVEALKDSFCNKYASSKVENMMVITRNGEVHYMTDNNPRGVDC

SEQ ID NO: 13525 - protein, 516 aa, synthetic construct
MARKKKVSPGNRLVAYYRYSGGSQQTEQSIEGQRRDCEAYARQHGLTIVHEYIDRHISGRGVESRLAFQQMIADSSKHLFDLVICWKTDRFARNRYDSAVYKKKLRDNGVRILYAAESSVEGPEGIILEGLMESLAEYYSAELAQKMRRGMRESALKGKAINPNRPLGLTTDEHKRFIIDEKNAPTIRFIFEHYAAGESSASIVDQLNAAGLRTSKGNSFNKCSIPRIIQNEAYHGVYICKAYDVRIDGAIPAIIDDDLWKRAQKMLTLNKQHRAPHSSHADYLLSGKLFCGCCHSLMRGISGHNCRNDVYYYYACGNKADGGTCKKKNIPKDVAENLVVNAICENILRPDTLEDLADAIAAAQQADVNQPDPERAMLEQNLADVRRKINNIIESIENDTASSRLSARLADLEQQESTLNYQLESLKEVHPPVLDRERILFLLEQFLISPNERTEDYNRRIIDTFVNRIEITDTEMLIYFNLSEASASEKQKNSQSNNCSTGNHLVRVARIELTAS

SEQ ID NO: 13526 - protein, 464 aa, synthetic construct
MARSVTVIPARNRQRETGRRAVQEKKIRVAAYCRVSTDQEDQLHSFEAQVDYYTKYINDHENYEMAGIYADEGISGTNTKKREQFKRMIADCEKEKIDLVITKSISRFARNTQDCLMYSRKLKNLGIGIIFEKENINTLDSTGELLFTILSSLAQDESRNISENCKWGIRTKFKNGEMHLNTFKFLGYDKDENGKLIINKEQAKTVRRIYRDFLIGINPAQIAKELTEEKVPGCLGQTKWYPSTIVGILKQEKHMGDALLQKTYTADFLTKRQVKNNGEIAQVYVKDSHKGIIDKETWNAVQEEFERRERFMKDHGTDRYSYGADCMPFCEKVFCGECKSLFTRHAWKSRGIVQWQCKNHRTDGKVTCSNAYVDNSDLEKGFVKAFNKLVTDREKFMERWNQMKTDGSPLEKIRAEQMMEATGNEPLGRFVPEIAQLVLAEVTVLGAKKYEFFFLEGSRIKVSV

SEQ ID NO: 13527 - protein, 498 aa, synthetic construct
MEIQIREGNSIQKRKLKVCAYCRVSTDADEQENSLENQIRHYKEVITSNPDYEYAGVYSDFAISGFKEKRPGLQKMLADARKGKIDLILTKSVSRFARNTSIVLEATRKLKELNVGVFFELQNINTLSGEGELMLTILAAFAQAESESGSVGAKMVYQRKYEAGIPVQYLERSFGFKKDERGVYIADEEEAIWVRKIYEMAADGYTPAAIKRYLNENGVKTVGGAEWIDSTVFRLIENEIYKGDYIMHKHFVNEERKLVRNRGEVDAWYIEDDHEAIVSPELWQKAQDAIEAKRDYLAEGSVIEEFTEDNYPYMNRIFCAKCGHPLYKRIYSNGNRLNWGCSGTKRYGKSFCEGINIPDGVLRKAWHFDGNMYIDEKPSVKGTKEFTYLKESSWKRRHKKKVPKAIPKNTEEAYPYRKNIFCGLCGSRLVRHVNPKSHKVIWICNGAKRKGVAFCRGTRIPDSVIRGWGKIKKDIYIQRKDDKNGKKRYSYTSKKPTA

SEQ ID NO: 13528 - protein, 522 aa, synthetic construct
MAKTVRAIPATISRYTAAPINSRKKRRVAGYARVSTDHDDQISSYEAQVDYYTNYIRERDDWEFVGIYTDEGISATNTRHRDGFKRMVRDAMDGKIDLIVTKSVSRFARNTVDSLTTVRKLKDKGIEIYFEKENIWTLDAKGELLITIMSSLAQEESRSISENVTWGHRKRFADGKVCVPFGHFLGYDRGPDGNLVVNREQAKTVKLIYRLFLDGYTFHSIARELTSRGLETPARKKRWYPGTVESILTNEKYKGDALLQKRFTVNFLTKETKANEGEVPQYYVENNHEAIISPQVFDWVQEEIKRRREGRGRYSGVSIFSSKIKCGQCGGWYGAKVWHSTDKYRRTIYRCNDKFKSHCKTPHLTEDDIKEAFVRAVNQLIENKADVLDSITLLKERLTDTEDLEEERDRISTDLNLLADKIQQLIAENARVAQNQDDYDRNYNELVSRYEAAKTQYDKTCEAIQYRKARSRQMDSFIKELRNQDLIKEFDARLWGSLVDFITVYSKDYIRVTFKDGTEIRA

SEQ ID NO: 13529 - protein, 498 aa, synthetic construct
MQIEVRKADMGKEKKRLKVCAYARVSTEASEQENSLENQVSHYTEMIQSNPAYEFAGVYADFGISGFKESRPQFQKMMRDAKNGKIDLIITKSVSRFARNTAIVLKASRELKERNVGIFFELQNINTLTEAGELLLTILAAFAQAESESASESSKMAYLHRIENGEVVAYLERSYGYGKDENGEYRAKEPEASVIREIYDLVIQGVNCTNIARVLNARNIQTVQGAEWTASTVFRIVENEIYKGDVLMQKTFIDGKRHQVQNRGEKAMYYAKDNHPPIVSEKTWEKAQRKLEAMRAERAEHSVIQEFTEENYPYMNHIFCAKCGWPLKPRVYSHGHRLSWDCSGQKRGTKKFCTGIHVLDNDLRKMEIEGNRYFSETVDKYGEVHLKHVGERTWKNKHKKKKFNHKELYPELNEENYPYYKRLYCARCGSRLGRYISHGTVRWICSSYKRKGQAKCPGVRIPDEIIKGWNLPDGKIYIMGKEDKNGEKHYSYTSESAL

SEQ ID NO: 13530 - protein, 465 aa, synthetic construct
MARSITVIPASQPYRVGGRTQQKTRNLRVAAYCRVSTDQEEQLNSFENQVEYYTKYIQDNPLYQMAGIYADEGISGTNTKKREEFKRMIRDCEEGKIDLVITKSISRFARNTQDCLEYSRRLKNLGIGIFFEKEHINTLDASGELLFTILSSLAQDESRNISENCKWGIRSKFKKGIPQVDCTKFLGYDKGDDGKLIVNQEQAKIVKRIYREFLNGYNPAAIAKMLMEDHIKTGTGREEWRSASVRAILKNEKYMGDALLQKTYTADFLTKKVKKNHGEVEQFYVKESHEAIIPKEQWEAAQLELERRDSYMQELGLTFYGYGSEVNPFSCRVVCGKCGAVCGKKSWKSRGVEFWQCNNRSKNHGVKGCASENLPHENLLKGFITAWNQIVAEREQYLPKWEKKKKEGNPLERLRAEQMIELTLQPPLAKMLPELGQMVLERVIVYGKEIMVIRFLDGTEIKVRI

SEQ ID NO: 13531 - protein, 539 aa, synthetic construct
MYLEISNPMDYHAGLYIRLSKEDESEGPSQSVQNQESLLREFVQQHRLSVYDTYIDDGWSGTNFDRPAFQRMIADIEAKKVNMVITKDLSRLGRDYILTGHYMERYFPEHRVRYISLLDGIDTGVDSTANDITPFRAIMNDMYAKDISKKIKSVKRDKQRKGQFIGGKPVYGYKMHPTEKNKIVIDEEVAPIVRRIFALALSGMSCRNIATLLNQEGVPTPATYAGLPVARPGPYTGLWSSERISDMLQNETYIGNMVQGRSVKISYKSKKCLKQNPANWVVVEGTHEPLVDRETFQKVRMLVNSRRHTRSRTYDFLLKGLIFCHECGYPLTVLNRKNSKGEDVLYFVCRTYQRFTKAGVCTCHSIKEKTVTDVVIAKVREVCQAYLNPDELLPVAQEAVENARKQSSLETELQALQSKIDSLTANLDRMYTDRLSGLLPEADFQRIFGRIKLEREQMEEKRQELELRQKSPVRSEDRARELVQRFIETAGESRELLVSLIERVELTEDKEIIIKFRFAQLDETAESQIPQGIAPSHTA

SEQ ID NO: 13532 - protein, 522 aa, synthetic construct
MSNAVIYARYSSGHQREESIEGQIRECTNFAKRNGLTIVEHYIDRAISAKTDDRPSFQQMVADSSKKTFDTIIVYTLDRFARNRYDSAVYKAKLKRNGVRVLSAKENITSDPSGIILESVLEGMAEYYSVELAQKVKRGMTENALACRWASGRIPFGYTIDADKHLHPDPALVPIVQEAFEMYAAGAKIVDIARKINSYHVVTGMGNKFGRSSFDRMIRSETYIGVFKWNDIRKENAIPPIITPELFYKCQARYNARNRKNVARPSAIYLLSGKLRCGCCGGSMCGMSGKSRNGTMHYYYSCYSTRRRTSHCDIGNIRRDEIEHIIAAHAASILKKPINLDIIANQALKTNNSVKNYRLESLIQQEKDLTQKLENCMKAIDQGLVSITLMDRIKQYEADLQSVKNDISLEKIKSNPIQVTKEHIIFFLEKFALLEGEKFKDRIISTMVRDIVIKKEKDGNYLVTVQYNYANSKELPNEESYSVPESIGSQDVELVDHMGVVTNRLRFYPYYFEETFIFTQAS

SEQ ID NO: 13533 - protein, 536 aa, synthetic construct
MPRKKKLQEVGGLRLVAYYRYSNGGQQTEQSIEGQRRDCEAYAKAHGYKIVHEYIDRHISGKSDSRPAFQQMISDSDSHLFDAVICWKTDRLARSRYDSIIYKTRLRRNGVKILYAAETVVDGPEGIIIEGLMESLAEYYSAELAQKLRRGQRESALKCIALGGNRSFGYDIGPDKHYCINEKQAPAVRYIFEQYAAGATAADIVRELTARGYRTSRGNPFNKNSICRIITNEMYLGVYKYADIRIEGGVPAMIDRELFNRCQTQLAFNRAHGGGNGAPRADYVLVGKLDCGLCGHAMKGASATGHTGSKHYYYTCTQHVEKKCPKTSIEKNYLEQVIVDGVAKYVLTPEKISQIVDCMMELQAKEQEPKGNPERDALEAELAECRRKQNNILEAIEEGGSARLAARLRALEEQEAQLTFALGEINNAPAPPQFSREALTFMFEQFRREEDEVDEEYRRRILDTFVSSILLYEDRAEVKFNITDQKTGDFERVILPISTNKKPPEDDDITSNSEGSTALRLVEAMGVEPMSEKSSA

SEQ ID NO: 13534 - protein, 521 aa, synthetic construct
MPKKPTKHPAKPKRGKKLETEEPGVLYGRYSSHNQKDISVEQQFEKGYELAAEYGIKIIDTYADRAVSGRTDKRKDFQRMMSDAAKGKFRYVIAWKSNRMGRNMLEALINEARLQELGVRVLYVEEDFDDTAAGRFAARSMMNVNQFYSENMAEDIRRGLYDNASNCMVANGHLPYGYKRDDTLHYVIDEPKAAVIREIFTRVAAGEPFVDIMSSLNARGIKTSYNRPWGRSSFQKILSNERYRGIYIYGDVRKEDGIPRIISDELFFKVQEVITTKKNPQGRHRVNGDYLLTGKLFCGKCKSPMVGISGTGRSGKLHYYYVCQKHRTEKTCDKKNVRRDEIEMQVAQAIKDYALKDDVIEWIADSTVTYNERKEAESKVGILEDQLAGTERGIKNIMSAIEQGIITETTKSRLVELESERATIKAKIAAARADIVTVSRDDIISGLEMFRDGDVHDKKYQARLFDTFLVAVYVYDNDLRLVFSFSGNKNTVQIPIESAVNAVENNEAECSFKLCSAPPKK

SEQ ID NO: 13535 - protein, 464 aa, synthetic construct
MARSVTVIPARSQKVRTGHKAVQEKKIRVAAYCRVSTDQEDQLHSFEAQVEYYTKYINEHENYEMAGIYADEGISGTNTKKREQFKKMIADCEDGKIDLVITKSISRFARNTQDCLAYSRKLKNLGIGIIFEKENINTLDSTGELLFTILSSLAQDESRNISENCKWGIRTKFKNGEMHLNTFKFLGYDKDENGKLVINKEQAKTVRRIYRDFLIGINPAQIAKELSEEKVPGCLGQTKWYPSTVTGILKQEKHMGDALLQKTYTADFLTKRQVRNNGEIAQVYVKDSHKGIIDKQTWNAVQEEFDRREKFMESHGTDRYSYGADCMPFCEKVFCGECKSLFTRHSWRSRGIVQWQCKNHRKDGKVACTNAYVDNADLEKGFVKAFNRLVTDRDKHMERWQQMKSDGTPLEKIRAGQMMEAVGNEPLTRFVPEIAQLVLCEVTVLGAKKYEFFFLEGSRVKVSV

SEQ ID NO: 13536 - protein, 547 aa, synthetic construct
MAKKKKPAGGNAIIYARYSSHNQRDVSIEQQIEACRKHAAELGLTITDTYEDRAISGRTDNRPAFQRMMRDAEDGKFQYVLAWKSNRMGRNMMQAMVNESRLMDCGVKVFYAEEDFDDSAAGRFALRSMMNVNQFYSDNLAEDVRRGLMDNASKCMANGRQPLGYKRGEDGKVVVDEPAAAIVREIYTRIASGEMFMDIARDLNRRGIKTQSGSEWNKSSFKVLCRNERYRGIYIYGDTRIEGGIPPIVDDVLWYKVQEVLKVKKSKNRHHCPSDEDYLLTGKLRCGKCGGYMIGMSGRSKTGDVHHYYACQNRRVGHTCDKKNIRRDVVEPAVAQAIKQYCLTDDAIEWITDQTIAYWEDEDRKLQIDSIENDLSAVQSSISNVMKAIEMGVITETTRDRLIELERQQTDLKSKLALAKEEIVHVDRKDLISSLLAFRHGNVHDRAYQEKLFNAFLIAVYVYDDDHLKLVFNSFGKDDTVNIALDLGENDDNSGLSDVSKSSPILSNGQPKDIRTVRMSFLFFVHRESKRAIQQTLYRSFYVNGNQ

SEQ ID NO: 13537 - protein, 516 aa, synthetic construct
MPKTEEKQAAKAVIYARYSSDRQREESIEGQLRVCEDYARRNNITILHTYADRAMTGRSDQRPEFQMMIRDAATMAFNVILVYKLNRFARNRYDSAKYKHKLKKYGIKVVSAMENIADDPSGILLESVIEGMAEYYSAELSENVLRGMTQNALEGKWPGGVIPLGYKLDKGGRLIINEEKAPIVRMIYQMFLDGMSVARIERKLNDKKYTTDAGKVFSRSRVYYILHNERYIGTFQWKDIKKEGIIPPIISKEAFHAVQERINAMKSSSYRTNNNYLLAGKAFCASCGAKVSGTSGKSQNGNKYCYYGCSHHHRSARYEYCETKNIRADVLEKLVCDKTHEILSSKKAIKEIARQAVKLRPRDESELEIRAIKNHISSCQKKIDNCIKAIENGVMSNALVESLNENERTLDVLKEKLAKASLMQGSGLLTEEKIQFFFETIREKAKETEKYNDILLTSLVRAVYICNEYVEIQYNYAEQLPILTNPVRIESCSYKCTNGGTIWIRTKDLFDVNEAL

SEQ ID NO: 13538 - protein, 576 aa, synthetic construct
MKKNFKMPGSGSETPIRVAIYVRVSTVYQIDKDSLPMMKQDLTSYCKYILNTDDFVIFEDAGYSGKNTDRPAYQKMMSQIRQGLFTHLLVWKIDRISRNLLDFANMYAELKDLGVTFVSKNEQFDTSTAIGEAMLKIILVFAELERNMTSERVTATMINRASNGVWNGGRIPYGYSYDKPTQVFSIDPEENKVYNFLVETYEDTQSIVHTSRKLNEAGYCSRNGNMWSPVAVWTILRNPWYKGVYRYNYYKIPGRKAIKDESEWVIVENHHPASIDTDRFDRIQATLDKNARYRNTPGRKTTQKNVHVFSGLVWCAECGSAFTASPGKLHVSGYRPSKYGCPNVRKTKTCHAKYTSDVVLGEFLLNYILNILNAQKQFAYIHSTDDLQKRLLHGSTFSNVDHVDPDGLASLLNMLEKCSGSDPVLLKRPRSKPKMDPELKRMMADQKKQQRALDRLNDLYLYSDDSISEREYLVRKQQITDRLQEINEAIGMMSQEPWMRTMNDEEFIRQTSSFILTQKLADKQYIYYENLAESLDPEILKNFFVSILDSIILRDGRPETVVFRNGLSHTFTYKDS

SEQ ID NO: 13539 - protein, 668 aa, synthetic construct
MAYVRNKKKILKFWSKKKAALYVRVSTRYQVDKDSLPFQRKKLKEYCKFLGIEDFVIFEDDGYSAKNTDRPHFQEMMSRVRDGEFSHLIVWKVDRVSRNLLDFAAMYQELKDHKVTFISMNEQFDTSTAIGEAMLKIILIFAELERNMTSERVTGIMLDRAEQGLWNGARMPVGYRWNQEIKFPEPDPEETKIVQFIFDEYERVRSTTKIARYLNHNQIASKRGGQWTSKLIRDIIRNPFYIGTYRYNLRESGRGPLKPESEWIVRENNHPAIIAKEQFDRCNAIMDENGTSRDTSELRARKYVHTFSGRLVCGKCGANMIASKDRARANGWRPSMYRCAQRSRMMDCDNSKTVNESYIGPFIFNYVANLARIQKNFKNIKTLEQLEKELLKGPEFENMKVSKESLRRTFDALAFQEVGKGAYLPDIDLSDGDDDYTAAEQLSILKRELDKCKTAIDRLTDLYLYDPDSMTKEEFAKKKRDLVNKIAGYEKQIEASQATGDKDDLADLEFIRKASAFLVAQRIVSKKHVDYIQMALDLDNEILKDFVDQVIDRIEILEGRVRSIRFVNGLVHEFTYSTPADLPVCQKCGGRIGSTCGCRTRTFDFAGKPYRRIKVGDPGDKFHGVTGAVCPECSAQAGRWHHWKCGIERCPICGEQLIACEHGPNGKD

SEQ ID NO: 13540 - protein, 519 aa, synthetic construct
MADFEHVIIYLRKSRSDDPATTVEEVLSRHENILQEYAVREWGARIPEDRIYREVVSGETIKDRPVMQHVMKILETGLVSGVLVVEPQRLSRGDLQDCGHIINSLRYTNTAVITPPKTYDLSDEYDRKFFEMELTRGNDYLEYTKKILNRGRIASVKAGNFIGNSAPYGYRKICVGTGKEKYYTLEIVPKEAEAIRLMFDLYVNKDYGFRSIAHALDMAGYKPRRSAEWSPAAISCMIANETYIGRVVWNRRKTIKKWENDTIVRTRPRQSEYISVPGKHPAIISDELFYAAKAKRNRTPRIKRYVQLLNPLAGLLYCGTCGHAMSRKRTVDKKYGSMSVSFLCNNQSNCHTKSVMYDAVIDRVKETLRQSIEDFEVKVNNKDETDIAYHRAMIANLKSELRKLKEKDMRQKDAYEDGIYTKEEFVVRNAKLAEQISIAQMKLDEAESSTTQLVDYQERLVRFRECLEALDDDTISAADKNTLLKSCIDKIMYYNDSPSLPGIGRYVDNPFRLEIFLKL

SEQ ID NO: 13541 - protein, 668 aa, synthetic construct
MAYAKAKKHLKIWTKKKAALYVRVSTRYQVDKDSLPFQRKKLKEYCKFLGLEDHVIFEDDGYSAKNTERPHFQEMMSRVRSGEFSHLIVWKVDRVSRNLLDFAAMYQELKDHKVTFISMNEQFDTSTAIGEAMLKIILIFAELERNMTSERVTGIMLDRAEQGLWNGARMPVGYRWNDETKFPEPDPEEVKIVQLIFDKYEEWKSSIKIARYLNNNNFKSKRGGQWTSKLIHDIIRNPFYIGTYRYNLRESGRGPLKPESEWIVRENNHPAIIDKAQFDRCNKIMDQNGSSRDTSDLRARKYVHTFSGHLVCGKCGANMIASKDRARANGWRPSMYRCAQRSRMLDCDNSRTINESYIGPFIFNYIANLARVQKNFKNIATPEKLERELLKGETFDGVAGILPEGLNLTFQALSFRQVGNGTYIPDIDFLGDSDGASDRDQIELLKSEIEKSKNAVTRLTDVYLFDPDSMTKEEFATKKKELAKKIEGMERQLVDLLDDSGNDDLADMSFIKKASAFLVAQRIVSKSFVDYVGMAQELDNEILKDFIDQIVDQIVVLDGRVQSITFINGLKHEFRYTAPAELPVCKKCGGRIGSTCGCRTRTFDFSGKRYQRIKVGDPRDMLRGKKNPVCPECFAQEGRWHHWNCKIETCPVCGGRLAECEHGPNGKK

SEQ ID NO: 13542 - protein, 514 aa, synthetic construct
MPKKNPSGGKRLVAYYRYSGGSHQTEQSIEGQRRDCETYARIHGMVILHEYIDRHISGKTDDRPEFQQMIADAGKGMFDYVICWKTDRIARSRYDSIVYKKKLRDNGVELLYAAEANVEGSGGIIVEGLMEALAEYYSAELAEKVRRGMRESALKGKAIGSSRPLGLTVDKDKKYIIDPAGAAAVRYIFEQYAAGAASSAIVAHLNEQGLCTSRGNPFNKSSVVRIIQNEVYRGVYVSPKFDVRIEGAVPAIIDDDLWERAQNMFIRNRQSRSPRNDRADYILSGKLFCGECGTAMKGVSGHSSNGEVYFYYNCPCKDCHRRNIPKDELEGLVIRTVCNDVLQPDVMNRIADSVIEAQTAELNQPNPEKEALQHELADVQRKAKNLLAALENGTAGAMLTNRLAELEQQADTLSYQLSSLESEPKFPVFSKEEVLYLLEQFLIAPSEKTKAYRRRLIDTFVSKIEVSNTELTIYFNIAEEDCGKMKKAPQSNQPEGCSTEKQMVRVARIELTAS

SEQ ID NO: 13543 - protein, 505 aa, synthetic construct
MSNAVIYARYSSGHQREESIEGQIRECTNFAKRNGLTIVEHYIDRAISAKTDDRPSFQQMVADSSKKTFDTIIVYTLDRFARNRYDSAVYKAKLKRNGVRVLSAKENITSDPSGIILESVLEGMAEYYSVELAQKVKRGMTENALACRWASGRIPFGYTIDADKHLHPDPALVPIVQEAFEMYAAGAKIVDIARKINSYHVVTGMGNKFGRSSFDRMIRSETYIGVFKWNDIRKENAIPPIITPELFYKCQARYNARNRKNVARPSAIYLLSGKLRCGCCGGSMCGMSGQSRNGTMHYYYSCYSTRRRTSHCDIGNIRRDEIEHIIAAHAASILKKPINLDIIANQALKTNNSVKNYRLESLIQQEKDLTQKLENCMKAIDQGLVSITLMDRIKQYEADLQSVKNDISLEKIKSNPIQVTKEHIIFFLEKFALLEGEKFKDRIISTMVRDIVIKKEKDGNYLVTVQYNYANSKELPNEESYSVPESIGSQDVELVETSGIEPLTS

SEQ ID NO: 13544 - protein, 493 aa, synthetic construct
MTAVIYARYSSDNQREESIEGQIRECTDYAEKNGITVIKHYIDRAFSAKTDNRPEFQQMIKDSGKKLFDVVLVWKCDRFARNRFDSANYKMILKKNGVHLISVMEPIAEGSQGILVETLLEGMAEYYSAELSEKVIRGQTENALKGKCTGGTGTIGYKIDDDKFYHLDPLTAPLVLEAFQRYDNGDKMVEIVNFLNDKGVRNMLGGKMTHSSVNTMLKNRRYIGELSFRDIVVPEAIPVIVPKDLFDRVQKRLDKNKRAPACGKADEEYLLTTKLFCGKCGALMFGESGTSATGRTYYYYKCANVKRRKGCNKKTVQKDWLEDMVVRETMKLIQDDAVIDKIVQLVMDVQNQENTTIPLLEKQLREVNKKLDNLMKAIEDGLYTRTTKERLEALESQKDELTVKIADEKLKKPSFNEDFIRFWLMKFRKFDISQKKQRKALIEIFVNAIFLYDDRMLLTFNYKDGTQTVRLEDTLTADSAEEKSSDLSSSAGP

SEQ ID NO: 13545 - protein, 512 aa, synthetic construct
MSEIKRAVIYARFSSDMQREESIEAQVRACKEYCRKKLYVVTNIYVDEAKSARDVLKRDAYNQMLADAIAHKFDVIIFHKIDRNARNEFNYYTFKHTLSTLGIGYEYAAQNIDFSPEGQMMESMLVGFAAYYSRNLAKETKKGLNENAYKAQFNGGKPPLGYKIVDKRYVIEPTEAEAVKLIFSMYLAGHGYGTIAHALSAKGFRTREGRNFGKNSLYDILGNEKYTGTYTFNKTNRKENRPRNMHVDSPADDFIRIEDAIPAIISKSDFAAAQQKRALNKRRTASYAAKAVYLLSGKVFCGCCGSAMNGHKTMSRNHEYVYYDCSKKERVAAEHCPQARLNRDSLEKWVLEVIKKEIFSPVARKNISELLTKEYEKYVQTIPKENTSLASDKAMLERRLNNLYTLVENGDADEFVLARINKLKADIRAVTEKISQLQNMKNIPQITEKEISDTLAALYEHITIKKDVESRKALINLFVDKVIVENKKISLQITTERVLGLSGAEGRTRTGT

SEQ ID NO: 13546 - protein, 542 aa, synthetic construct
MKITAPARSARAVSLEAFVDNLNLANVVIYARYSSAGQNDQSIDGQLAKCREYAQQRGYRVVGEYCDRALSGRYAETRPEFQRLIADSAKRAFDFVLVWKLDRFSRDRYDSAIYKKKLRANGVRVLSVTEGVGDSSESVLLEAILEAMAEEYSRQLAQNVRRGMRQNAEKGLSLGGLAPLGYRVVNKQYEINEDEARIVRFIHEQYADGAGQKQIVADCARLGYRNQRGNPLTLASVKRILANERYVGRYDYLGEIVIEDAFPAIVSKDLKKRVRDRLKANAKAPGHAKAKVEYLLHGKLFCGECGAPMIGECGRGRHGATYYYYTCAARKKQHTCKKRNERKDELEASIVDYIGSCVLTDSWIDGAAERVVAEYQKSYDASGIKPLEKQIRDADKEIDQLVDALISATAEAARRRINERIETAEARKQALEADLASLRIASRVQIKKEDIVVWLNQFRTGDRSDLEYRKKVIDLFVNAIYLYDDSFKLFLNVADSAQVTYADALALAPPSVSDFGASGVPDMHLSEHIIFVNGVIGMIVQR

SEQ ID NO: 13547 - protein, 456 aa, synthetic construct
MRNKEIAPALVRVALYIRVSGEEQKIKGLSLEAQQERLEAYARERGWVIVGIYIDAAKTARKNIHKRTEFQRMMEAVKRDEVDILLFARLDRWFRSVADYYKVMEILQAHNCDWKTTDEEYDTTTANGRLYINVKLSIAQNEADIDGERIDVVFDSKIAHGTVVSGSAPFGFRVNEEKRLEVVPEDAAIVQDAFNYFENTVSQRATVRYVRETYGVNWCDATFRRMLKEKLYTGVYDRGGRYNDQFCPAIINRQQFDRVQALLTRNVRSAPSGKVYIFTSILACAECGHKLVGYKSSDYFYYRCNQHFQRGRCSHNHSAREDVVEAWLFDHLGEELERCQLEWDVEAAKKKASVARTDKAALKRKLTKLKELYVNDLIDIEDYKKDYQIYVSALNQIPEPAQEAPPDFAAVRRLLDNSFRTIYDTLTREEKRTLWRSVIKEIRIDNDQNITGVVFG

SEQ ID NO: 13548 - protein, 513 aa, synthetic construct
MKKQPTGGNRLVAYYRYSGGSHQTEQSIEGQRRDCETYARIHGMVILHEYIDRHISGKTDDRPEFQQMIADAGKGMFDYVICWKTDRIARSRYDSIVYKKKLRDNGVELLYAAEANVEGSGGIIVEGLMEALAEYYSAELAEKVRRGMRESALKGKAIGSSRPLGLTVDKDKKYIIDPAGAAAVRYIFEQYAAGAASSAIVAHLNEQGLCTSRGNPFNKSSVVRIIQNEVYRGVYVSPKFDVRIEGAVPAIIDDDLWERAQKMFIRNRQSRSPRNDRADYILSGKLFCGECGTAMKGVSGHSSNGEVYFYYNCPCKDCHRRNIPKDELEGLVIRTVCNDVLQPDVMDRIADSVIAAQTAELNQPNPEKEALQHELADVQRKAKNLLSALENGTAGAMLTNRLAELEQQADTLSYQLSSLESEPKYPVFSKEEVLYLLEQFLIAPSEKTKAYRRRLIDTFASKIEVSNTELTIYFNIAEEDCGKMKKAPQSNQPEGCSTEKQMVRVARIELTAS

SEQ ID NO: 13549 - protein, 464 aa, synthetic construct
MARSVTVIPARNRQRETGRRAVQEKKIRVAAYCRVSTDQEDQLHSFEAQVEYYTKYINDHENYEMAGIYADEGISGTNTKKREQFKRMIADCESSKIDLVITKSISRFARNTQDCLAYSRKLKNLGIGIIFEKENINTLDSTGELLFTILSSLAQDESRNISENCKWGIRTKFKNGEMHLNTFKFLGYDKDETGKLVINKEQAKTVRRIYRDFLIGINPAQIAKELTEEKVPGCLGQTKWYPSTVIGILKQEKHMGDALLQKTYTADFLTKRQVKNNGEIAQVYVKDSHKGIIDKQTWNAVQEEFERRERFMEAHGTDRYSYGADCMPFCEKVFCGECGSLFTRHSWRSRGIVQWQCKNHRKDGKVACTNAYVDNADLEKGFVKAFNRLVADRDKHMERWQQMKSDGTPLEKIRAGQMMEAVGNEPLTRFVPEIAQLVLAEVTVLGAKKYEFFFQEGSKVKVSV

SEQ ID NO: 13550 - protein, 495 aa, synthetic construct
MTAVIYARYSSDSQREASIEGQLRDCKDYAEKNGITVVGTYIDRAYSAKTDDRPDFQRMIKDSGKKIFDVVLVWKLDRFARNRFDAVNYKYQLEKNGVHLVSAMEPISQGPEGIMVESMLIGMAEYYSAELALKVARGERENALQCKYNGGVVPLGFTIGKEDRLYHIDPETAPIVQEIFTRYADGEPAEKIAASLNERGLRTRTGKPFVKNSFFQIFRNRRYIGEYRYKDIVTPGGIPAIVDQDLFDRVQQRFEQNRIAHGRPAKEDVSYLLTTKLFCGKCGTLMGGESGTSHMGNTYYYYKCGNAKRHGKAHCDLKAIRKEPLERFVVDTAIKVIFSDEIIERLIDLVMEAQQQENTRLPVLKEQLRDTEKRLANLLEAIEQGILTSTTKQRLDELEARKEALNTSILEEELKKPVLTREWIRFWLEKFRKGDVGSTEHQRQIIDTFVNSVYVFDDRVVLNFNFTDDAKTISREEVLGSSAVDNAPPNVRPFT

SEQ ID NO: 13551 - protein, 509 aa, synthetic construct
MARKTDKPLSNIAVIYARFSSHNQREESIEQQVAECKLFAAQQGLEVTEIYSDSAQSGRTENRSQFLRLQRDAKKGKFTNIVAYKSNRIARNMVNALTFENDMEKLGVKLYYAKEEFGNNAAGRFALRMMMNVNQFYSENMAEDIRRGMEDNAMKCKVNGPAPYGYKSGKSGTYEIDEPAAAVVREIFTRVACGDSFVDIYTDLNNRGLKTRKGNKWGRSSFQSILKCEKYTGVYIYDNIRVEGGMPEIISKEMFLKVQRILGTKGNPQGRHRINGDYLLTGKLFCGECGHHMMGLSGTGKNGLLHYYYGCSGKKEKPRCSKKNVRRDELEYEVARLVQTYILQDDVITWLADTLTKYQEEHSSDGDMAILNTQLSETEKSIKNLMAAIEQGIITPSTKERLMELESEKSKIENNITLLKADTITVSKEQIGGWLDSFRDGNIKDKRFQKRLFDSFLSAVYVYDDNRVRIVFNLCGLNKGDIDTKLMLGDTEAIEKISDCSYKRCYGSP

SEQ ID NO: 13552 - protein, 582 aa, synthetic construct
MRVSVNLNAQKPDTTTNAVIYARYSSHGQTEQSIEGQLAKGHEYAAAQGYTVVHEYIDRAMTGRNDNREAFQKMLSDTGKHQFQVVIVWKVDRFGRNREEIAFNKHTCKKNGVRVEYVAESLPNSPEAVILESVLEGMAEYYSIQLSQNIRRGQLESAKKCQCVGGSVPLGYTLDSDKHFVIDPQTAPVVKKIFDLYAEGATISEITGQLNEQGIRTIRKQLFTKNSLTKLLKNEKYIGVYTYKDIVRVEGGVPAIVDKSTFDRVQELLKINRRAPSHTWTKVEYLLTDKLFCGHCGSPMVGESGFSHTGAKYSYYGCIKRRREKACDKKPVRQDWIEALVLDETVKLLHDDELMEYIIDRTWEYYQITDKVQEEKAVLEAQLAEVDKAINNLVRAIEAGIFNAATKSRMDELDAQKAALTASLADLELTSGIRITRDHIEYFLLRLRDLDVKDRECQKRLVQTFVNAVFVYDDGRVKITYNYSGQSSTITLNQIASAEKGKGFVCCLPCSTFSPRFRVGNRGIFCFWGKQDANILPISAVLCYNGSENGGGGTENEKAACCVPNGARLLGLRGVRGRNAGR

SEQ ID NO: 13553 - protein, 570 aa, synthetic construct
MKAAIYSRVSTEGQDYSKQTNELKDYAKRNGIEVAYIFEEKESGFNNDRPEFEKLRKLTKQDIDIILVWEISRLSRRSVYLQQQVEDFTNKGICIYALSNSLRTINTDGTINEMARVVLAVTATIAEQEAATLKARTLSGKRHKVLKEGHSYTQIAPYGYDYDKETKLLSINEKEATVVRRIFQLSIDGYSLIRIATALNVEGIKNKNGNKWYFATIRDMLINPVYMGKARYALKKAPAKEGKKYRKPLEFVEVDSPAIVSEETYQLSLERMQGRKSISKSSYSVEYPLLRGLIVCPVCGRRYVYKRASKLYTCNNRDNDCKAKGASAHKLESIVWDIIKVYFKENMTNNKVEEQIEPLQAEIDSYKQKILLLDGQLSELTEEASRIYDAAIEAQKRFPNMPKLYEDKMKELDSIDKEASRYKKEKELTDKKIRSISKKINHIKEARDINLDDITDELEKYNIFHQFIDNLVICGTKHTSFIVLTLTTGQILYIGHYSKRCSNYYILFYPSSDIYFDIQTNKGYINHLKEKATINSDGSIYLGDLTGEVKEYSIIDFVNYLDIEENRRYY

SEQ ID NO: 13554 - protein, 612 aa, synthetic construct
MRAAFLIRCSTKKQDYERQVNDLTRLAKKFGYTSSDNMIFGEHITGKDDASKRDRQSIQRLKDAAINKEFDVVLVSEVSRMSRDPMSGRLYVRQLINMDIPVYFRDIDTWTIDPVTGKKVRDAETIIGAAFDAAWKYIKSMKTQIASGRRDELDNNQMSIGQPFFGYKRYGGRDKGKKNSWVINDDAAKVVVDVFEEYVKDGATLKSTALAITAKYGEQFNKKFSIGTIEHILTFEPYCTGIKVVSLTDPDTEDVDEFEVEIPTIITRAMFDKATTKRATNRTARTPYPKQATYILSKLLKCPICEHSLTPQKRGGDKGDKYRLMNGKVAIRWSCMSGINNATDCSSRITISNEKLEAIIWGLIKQELIGFANLNDEDRVAKVEELTDKITNLEMNIANFTSHISNMDRLIERAYSAYMDAPDSVMDIAKDKYYKTLTKCENERAECKDKIEALSAEKLRLENMRTFFNQPTLPKDAIEKAESDPIKMRNLVMELIDKIYPYRITTYVSPATNRIMRNGIVLLEVYTINGIYNVLYDGNQRNNKVAYYISSVYATFQNGRNKFDAYDTGEYFVISHATLVTETEDVDMLVTFNELIKICMQNGWEIDYTYKM

SEQ ID NO: 13555 - protein, 525 aa, synthetic construct
MQTAENRDKYHQLRVAAYCRVSTEQEEQQNSYQVQIAYYTDLINRKKEWTLAGIFADEGISGTQTKKRTEFNRMIRMCKNKKIDLVITKSISRFARNTVDCLEYVRQLKDLGIGVIFEKENINTLTMTSEFMIALYGSFAQAESESISKNVSWGKEKAYREGKVQFQYKYLLGYKKGTDGKPEIVPEEAEIVRLIYTLFLDGYSMTRIKKILENKGYLTAQGKKVWNESLIRSILKNEKYVGDALLQKTFTSDCITHKVVKNHGERPMYLVTDHHVPIVDRDTYNRVQQELARRSSKRKVSDKTTTEQGKYSSKYALTELLICGHCGTPYRRTTWAARGKKQIVWRCISRLEHGKKYCPDSPTIKEENLHQGIIKAINNYYSCRNDIARILKANIGTVLECQGQEEITAIEKRLKEIDKARNDLISLIATGGCDEDKLDSEFEKLYEEEQSLSERLVMLKSKNQTSAETQAKLDKIIDMIEHEKFELETFNNVLIRKLIECVKVLSKTEILVIFKGGYEVRTEIE

SEQ ID NO: 13556 - protein, 560 aa, synthetic construct
MPRKKKLQEVGGLRLVAYYRYSNGGQQTEQSIEGQRRDCEAYAKAHGYKIVHEYIDRHISGKSDSRPAFQQMISDSDSHLFDAVICWKTDRLARSRYDSIIYKTRLRRNGVKILYAAETVVDGPEGIIIEGLMESLAEYYSAELAQKLRRGQRESALKCIALGGNRSFGYDIGPDKHYCINEKQAPAVRYIFEQYAAGATAADIVRELTARGYRTSRGNPFNKNSICRIITNEMYLGVYKYADIRIEGGVPAMIDRELFNRCQTQLAFNRAHGGGKGAPRADYVLVGKLDCGLCGHAMKGASATGHTGSKHYYYTCTQHVEKKCPKTSIEKNYLEQIIVDGVAKYVLTPEKISQIVDCMMELQAKEQEPKGNPERDALEAELAECRRKQNNILEAIEEGGSARLAARLRALEEQEAQLTFALGEINNAPAPPQFSREALTFMFEQFRREEDEVDEEYRRRILDTFVSSILLYEDRAEVKFNITDQKTGDFERVILPISANKKPPEDDDTTSNSEGSTALRLVEAMGVEPMSEKSSVQVSPGAGDLQHSRRATPIVRLALW

SEQ ID NO: 13557 - protein, 568 aa, synthetic construct
MKKKFSSVPDPDIQDAVIYARYSSHSQRDCSIEQQVADCELFAQQNGLRVVKIYADRHLSGTTDNRPEFQQMLKDASHGHWPFVICWKIDRFARNRYDSATYKYKLKKAGVRVLYAKESIPDGPEGILLESVLEGSAEYYSASLAQNIRRGMRFNAENCKVNSGSIPFGYCKGPDGRFAIHETNAEIVREIFRKAAAGVPFVDIATELNNKGLKTSRGGRWNKNSFVLLKNESYIGVYHFSDIRIEGGMPAIIDPGTFLAANERMNANRRVRGRHHDGGDYLLTGKLKCAHCGSYMIGFSGTAKNGESHYYYGCQKRRRERACKKANVPREWIEKVVVKAALDYVLQPDVMEWITDAVMEYQEREAASSQLAALTAELEENQKATDNLMKAIEAGIITATTKQRLLDLETKAKDLKRAIELEKLSHVRLEREQILYWLEQFQGGSLQSQEFRRKVIDTFVSVVYLSDDHLRIAFNYSGQNRSEADFNLIMDAETASADYPINSFSLPLSPPHKKNPNLFPLGKGSDFSFAAFLTASFSFPVSAARLFYRCRLHIRSGCRLFRQRGGRE

SEQ ID NO: 13558 - protein, 546 aa, synthetic construct
MEETIKAVGYARFSSSMQREESITAQKRYMMMYAKRNNMEVIDWYCDEAKSAKTVNRPAFQKMINDAKNNPEFKAVLVHKTDRFSRNLSDSIQYKKLLEEYGVQVIFVNERFENNPESHLLYHIMGSVNQFYNENLAREVMKGLKENAYQCKFTGGRPPLGYDVDKDLKLVINEKEAEAVRLIFEMSAEGYGYGETIDKLNILGYKTKKGLPFVKNSLYEILKNEKYKGTYIFNRSCSANSLNKRNNHRRKPEEEIIRIENGCPAIVSSGLWHRANAVKKATRSSFTNAKNTYLLTGLIHCGECGGKFHGNIRYNKNNTNLVYRCSSKKNKRKCESKEIRCEYLDSFVIDKFVEFFFNDDNIKVITKQLNEQYNKSCISDLEYNEAKSTLKILEKSRNNLVQAIAKTGINDIMSDKIKEYEEQIKKTAEFIQKYEKQKIDRVITEDEIREQINHLKDYFYNPKNLIRTKYVLSQYIDRIDISNENVKVQFKVSMSPSDNTDGDCFCVHTEMIKRKYLFDYVCENVDFEQWNIEKLNKSESEHRKGA

SEQ ID NO: 13559 - protein, 603 aa, synthetic construct
MKKENEIRAVVYARYSSHSQTEQSIEGQISAAQVYAKAKGYTIIKEYVDRAKTGKNDNREAFQQMLSDTAKHEFSVIIVWKVDRFGRNREEITFNKYRCKKNDVRVEYIAEAVPDSPEGVILESVLEGMAEYYSLQLAQNIRRGIRASAEKCQAIGGHCSLGYAIDPKTKKYVIDPDTAPTVQLIFEKYAEGYTGMDIVRLLNEKGLRTVRGKPFTKNSLWTILKNERYAGVYLFKDEVRVEGGIPALVSRETFDKVQEMLEINHRSPVNTWNRATYLLTDKLFCGHCGSKMVGECGTSRTGATYNYYICAGKKRERNCSKKAVRQDWIEKVVLQQIRRVLFDQEFLEFIAHKAYTYYLEEKKKLDQSAAIKAQLSSVESSIDNLIRAMEAGIFSASTKSRLDDLENQKTALTRTLAEIKLSEESFDLTEDRILFFLESMRGLDMDDVDSRKRLVKTFVNAVYLYDDKITLAFNFTDSCEKPEIIELADIADGVVEKFVHRASCSTRKKSTAQECAVLFCCVCPAMQLLNSCWTFAESYGIILSAIAGIVHRLVYQPSKLRRWVRFPLPAPKDLNLERSGSFLFVLHWAVILQTGGGNATIEP

SEQ ID NO: 13560 - protein, 514 aa, synthetic construct
MARAVTVIPPTIQPITHLARNAVVRRRVAAYARVSTSSEEQLTSYEAQVDYYTRFIQSKPEWEFVRVYTDEGISAVNTKKREGFNQMVRDALDGKIDLIVTKSVSRFARNTVDSLVTVRKLKEKGVEVYFEKENIYTLDSKGELLITIMSSLAQEESRSISENVTWGQRKRFADGKVSLPYSHFLGYRKGADGLPEIVPEEAETVRWIYSLFLSGKTTSSIASFLTREGIPTPAGKKRWAASTVESILKNEKYKGDALLQKAFTVDFLTKKQKKNEGEVPQYYVENSHPAIIDPAEWKLVQRELERRKAIGRSYSGNSIFSSRLVCGDCGGYFGSKVWHSTDKYRRTIWRCNSKFTGEEKCQTPHLTEEEIKARFLDAFNALVADKDRLLDECRTMQAALTDTGSLDSEIAALLSEMEVVAELTKRCIEENSTTAQDQTTYLERYNGLAERYETAKAKLEKLQAAKAQREAKAEDIGGFMFELAEYGESLTEFDDRLWLTVIDTVTVYRDGRLP

SEQ ID NO: 13561 - protein, 506 aa, synthetic construct
MTKIITAGIYVRVSTSEQAEQGYSIQTQIKACKDKAYELGAIDILEYADEGFSGAKLDRPAMTRLRDDIRNHKLDIIICYDPDRLARNLAHQLLITDEIEKYCREGLIFVSVSFENSPEGRLFYSMRGAFSAYEREKILERIIRGKKGKLQAGRLGNNHLYGYDFDKNTQMYVINENEAKIIRQIFEWYISGISSEQITDKLNANNIPKIWQGKRYKWSGSTVRTIIKNEKYTGIFHGWQYLQVINKCGGYSIKKKDKSQWIDIEIPAIISNEIFEKAQKQIIKNRTYNTRKEKEVHLLTGLAYCGSCGNKIYNHHNVRRKYYVCSILYDKRITDKKICKPKFLHIPEVDELVWNALTKICSSPKLIKEYMTDINNHENTFLNYKEKLCMLDKKLTKLKNSQNDILEWFSDGLIDKETAQKKLENNKQKIEQLNSNKKELLINISNLKEKHTPEDIYNIFKKSAKISIDDKRNILRSILDKIYLTKLDKSKECKSKLSLKIVFVFK

SEQ ID NO: 13562 - protein, 514 aa, synthetic construct
MRKKKVKGGNRLVAYYRYSGGSGQTEQSIEGQRRDCENYAKLHGLTIVHEYIDRHISGKTDDRAAFQQMMNDGDKGAFDMVICWKTDRFARNRYDSAVYKKRLRDNGIEILYAAESNVEGAEGIIIEGLMEALAEYYSAELAEKMRRGMRESALKGQAINRCRSLGLTTDENKKYVIDEKTAPTVRFIFEHYAAGESSTSIVEQLNAKGLRTSQGNPFNKCSIPRIIQNEMYRGVYTSKAYNVRIEGAIPAIIDDDLWKRAQAMMKTNRQLKAKYEPKAEYLLSGKLFCAKCGCTMKGVSGHSGGNGEVYRYYACSNPQCRKRNIPKDDLEGKVIRSICDHLLQPETMELLAETMVEVQKADMEKPNAERDVLEQELRDVRRRSKNIMDAIETGSANPQLVARLDDLTQQENTLTYQLSTMEAEKPLLFTKEQYLFLLQQFYAQPTEQDDAYKRRLINTFVTNIEVSDSELLIYFNISEETESKNKNAPQLNFDKSSSTEKRLVRVARIELTAS

SEQ ID NO: 13563 - protein, 520 aa, synthetic construct
MAKVTKIFAEKDEENSKLKVAAYCRVSTDSDEQLESLEAQKKHYQTYIKSNPAWQYAGLYYDEGISGTKMEKRKQLLAMLDACERKEIDLVITKSISRFSRNTVDCLEMVRFLIEHGVFVYFEKENLNTMTMESELILSILSSMAEEESHSISKNNKWSIQKRFEQGTYVISCPPYGYINDGGEMRIVLKEAEVVRRIFNDTINGKGSSQIASELTAEGIKSKKGKKWHSTTIRGMLRNEKYTGDAIFQKTFTDDRFTRHTNNGEEQQYYCRNHHEPIISHEIFELAEQETQRRANEKNIKKSTQKYNKRYAFSGIMKCGECGGIMKRRTHYTGRKEYIAWSCGTHIEDKSKCTLLYVRDDAIKAAFTTMMNKLVFGYKEVLTPLLEGLDENTNYMNTEKQKEFDKQQQAIKERETLLREHFHKNLLSQEIFSKGMADIEQELRTLAQMKEDYLHNQNRGITYLAAARDLYAYCCKSKMHSVYDEEVFKRFVNWIIIFSRDEVGFRLNCGITLRERMVVR

SEQ ID NO: 13564 - protein, 535 aa, synthetic construct
MIPADPQMTERDIRNKHLRIAPYCRVSTDKKEQLSSYEAQIEYYTEKINANPDWTLVRLYADEGITGTSAKKRKAFLQMIRDCERGKIDLVITKSVSRFCRNTLDGLNYVRRLKRHGVGVYFEKENVNTLFMDNEMILTFMMSQAQAESESLSGNVRWGHRKNFKDGKVYYHCKNFLGYRWGADGQPEIDPEQAAIVRRIFSRFLLGHSVRQITTDLMADGIKTATGKTVWHDSVVQKMLCNEKYIGDALLQKTYIADLFTREKRVNNGELPKYYVHDCHPAIIDRETFQKVQEEIARRSSLKKTSSKAKTQLGKYCGKYVLSELLVCGECGSPYRRVIWTQKGAKRVVWRCQNRLEHGRKICKQSPTLDEGDIHDAVISAMNELFRMQAAKDAVKAGIAAVLAGEEQTLSLPAVEHQIRNLQERQLELFQLIVSAGADCTDYDEELQQVYMAKTKLMAQKAELEKEHRGAAAFDSRLAELDMALEQASGALTDFDELTVRQLVSNIKVLDKDSLLICFKDGTEITQTIQRRRSA

SEQ ID NO: 13565 - protein, 579 aa, synthetic construct
MRNKSLAGRANNRAERPRKVAIYIRVSTTHQIDKDSLPMQRKDLIAYCELILGIEDYEIFEDAGYSGKNTDRPAFQEMMQKIRAGSFSHLLVWKIDRISRNLLDFAEMYEELQSLRVTFVSKNEQFDTSNAMGEAMLKIILVFAELERNMTSERVTATMISRANQGLWNGGRIPYGYSYDAETSAFSIIQDEADVCQLMKTDYFEHKSIIHTARLLNDKKIPTRSGALWSPTAVWKILSSPFYAGVYRYNHYKGTENRTLNPEEEWVLVPDHHPAIFTLEEHEKLCDILDANKRTANLPGQKHRAKNVYVFSGILYCGKCGNKLVSTPGRLQADNFRTTTYSCPKKRKTHECDNPSVNDLIVGEFVINYILNMLNAKSSFSSINSPAELEERLLYGGSFKDVQHISEDGLNEFYNLLSRYGSYSSYVFAVKHPRKKKAAVNPEVEALRKDKEKQERALKRLQDLYLYSERAMTEKDFIIQKNEISSRIQDINTRLGMVTHDANSTLSDEDFVRQASHLLITKKLIGRDYIYYKALAQTVSPDVLKIYMETILDSVYVIDGRVSSIVFRNGLTHTFIYQK

SEQ ID NO: 13566 - protein, 508 aa, synthetic construct
MKKAIAYMRFSSPGQMSGDSLNRQRRLIAEWLKVNSDYYLDTITYEDLGLSALKGKHAQSGAFSEFLDAIEHGYILPGTTLLVESLDRLSREKVGEAIERLKLILNHGIDVITLCDNTVYNIDSLNEPYSLIKAILIAQRANEESEIKSSRVKLSWKKKRQDALESGTIMTASCPRWLSLDDKRTAFVPDPDRVKTIELIFKLRMERRSLNAIAKYLNDHAVKNFSGKESAWGPSVIEKLLANKALIGICVPSYRARGKGISEIAGYYPRVISDDLFYAVQEIRLAPFGISNSSKNPMLINLLRTVMKCEACGNTMIVHAVSGSLHGYYVCPMRRLHRCDRPSIKRDLVDYNIINELLFNCSKIQPVENKKDANETLELKIIELQMKINNLIVALSVAPEVTAIAEKIRLLDKELRRASVSLKTLKSKGVNSFSDFYTIDLTSKNGRELCRTLAYKTFEKIIINTDNKTCDIYFMNGIVFKHYPLMKVISAQQAISALKYMVDGEIYF

SEQ ID NO: 13567 - protein, 524 aa, synthetic construct
MANINVGKNVTVIPARKRVGNTVSTENIPKLRVAAYCRVSTDTDEQATSYEAQMEHYTDFIRKNTEWEFAGIFADDGISGTNTKKRDEFNRMIDECMAGNIDMIITKSISRFARNTLDCLKYIRDLKAKNIPVYFEKENINTMDAKGEVLLTIMASLAQQESQSLSQNVKLGLQYRYQQGKVQVNHNRFIGYTKDEDGNLIIEPKGAEVVKRIFREYLEGESLAGICKGLMKDGIYTAAGNPKWRPETVQKILQNEKYMGDALLQKTYTVDFLTKKRVKNEGIVPQYYVENNHEAIIPRELYLQVQEEMKRRSLLFKGKDGKRRIYSSKYALSSITFCSYCGDIYRRTYWNNRGKKSTVWRCVTRLEEGPKGCTSRTISEEDLHSAVAKAFNQVLGGGESMIAILRENIESVVCESNEQAIANIDKQMEEKQMELISYANSGKDYESLADEIQALSERKQTILTEEAESQGEKDRITEMMEFIENHADKILGYDEELVRLLVEKATIFENNVVVRFKSGIEIEV

SEQ ID NO: 13568 - protein, 534 aa, synthetic construct
MNRAAFAIHHNKIKTAPAPTETVYISEDMLLKSTNIVSSSEQSRKRNICFALAVIFVPILNIFYKRRVMQMPEKILRCAIYIRVSTFEQSVHGKSLQAQKECLEQYATDNNMSIVGVYADEGKTARKELKKRKAIHALVEDVKRDKIDVIIFWRLDRWFRNLSDFYKVQDVLDDHGVRWISVSEPGINMETRDGRLQLNVVLSIGQNEVDTTSERIKFVNEASIRQKKLIFGDANMPFGYKTGVVDGKKCMVKDSETEHMVEDFFEYFRNHNSKKGAIRYMQETYGIDFSYGMLRTMLSSEFYKGTYRGYPYCPAYLSEKEWDEMQTISKRNIKNTPSGRIYLFTGLMRCPVCGQKLVGTGCSSIINRKTGEKRTYCYYRCNRALIDHICTYRHRVSQNLIEKYLLENLEREYEKYKVRTNQISEELKKQKKAKDPKKLRKEMERLNILFQKGRISYDYYDKEYQRLEREYSASAAFCEEEETRNLHYVEELLKTDFRQMYDSLSLENRRSFWRSTIQEIYLNEDNTIKGVDFI

SEQ ID NO: 13569 - protein, 514 aa, synthetic construct
MPTVTVIQPTITEETAVKICCAAYCRVSSDSEDQLNSFMAQTRYCSQVFEDSETEALIDIYADEGITGTREDKRDEFQRMMKDCRRGKIDRVYTKSISRFARNTRDCLKNVRELKSLGITIYFEKENIDTANMTDEMMITIMGSLAQEESTSISQNMQWSIRKRMANGTFIVSHVPYGYMKSEGKMIVNPREAEIVKRIYEDFLNGKGLLRISNDLNAEGIPKNSKGELWNKNVVRYILTNEKYIGDCLWQKKFTENVFPFRKSKNQGQVDSYYVTDAHEPIISREDFTKVQTLLKQRGEYFGNTEFNQYPLSMKVFCDNCGKIYRRKNINGKIYWVCRTHDNRAKDCPNKEIAQDLIYTAFIMLYNKLWYNYKQILVPLQTTLQDLKLRKFSGRTQVMDIHKEIAKLREQTHVLARLKTKGFLDEAKYIEQTTELTAKINKLQSELKKLTRSDDEDETLNQIEMLIDFFERRDKPKTEFEESVFESIIEKIVVMDQNKLEFYLIGGLKFKEFI

SEQ ID NO: 13570 - protein, 436 aa, synthetic construct
MARIVERVNFNTPKIKKLKRVAAYARVSSGKDAMLHSLSAQIDYYRNLIFSNPEWRFCGVYADEAMTGTKDNRENFQKMLTECRAGNLNLIITKSISRFARNTVTLLETVRELKDLGVDVLFEEQNIHSLSSDGELMLSILASYAQEESLSASENQKWRIRKDFEQGKVSSLQMLGYKRNHDGVLEIIPDEAEIVRLIFNSYLSGMGKLAIANMLNEMHISTKFDNEWTAEAVRRILTNEKYCGELMLQKFYSENHLTKRKMVNNGEIKKFYVKEAHPPIIEKTIFLAVQNLMKKHQEQFSSKKSTTVVYPFTGKIQCNCCGKNYRRKTTTTGVVWICATYNIKGKKHCPTAKQIPENTLISVCCEVLGISEFNEDTFEKQIEKILVPKPNELTFIFTDGHEVSANWKDRSRSESWTDEMKKATAERSRKWHEQSR

SEQ ID NO: 13571 - protein, 525 aa, synthetic construct
MARTVTMIPQTINPLTHLPNDTIVKRKVAGYARVSTEQEEQQTSYAAQVDYYTKYIKKHGEWEFVKVYTDEGISATNTKHRDGFNQMIKDALDGKIDLIITKSVSRFARNTVDSLSTIRKLKEHNVECYFEKEQIWTFDDKGELLITIMSSLAQEESRSISENVTWGHRKRMADGKVSLPYSSFLGYKKGEDGLPEIVPEEAEIIRFIYRSFLEGMTTYSIAKALMNRGVLSPSGKEKWYASTVESILTNEKYKGSALLQKSFTTDFLTKKKKINEGEVPQYYIDESHEAIIDPQDFEQVQLEMARRKKLGKQYSGNSLFAAKIVCADCGCFFGSKVWHSTSKYRHIIWQCNNKFKGAQLCSTPHLYEDEIKQRFVNAFSIYFHRKDLIIDTCQELIDTISDTSAIDKKIEKLSQELSVIENTNREMVLKFAQSAKRPEYYDERHDTMTKEYDEKFRKFQKLEQKRTDQLNRAEALQNMIQQLSETKSVIDTFDDSLWRMMIEKVTVFHDNRMIFQFLDGTEIEA

SEQ ID NO: 13572 - protein, 476 aa, synthetic construct
MHNAVIYARFSSDNQREESIDAQIRACKDYAAHKQYNVIAVYADEAVSGKTANRSQYQKLLRDCNKGTFDTILIHKYDRIGRNLGEHVNLTAKLDKLGIQLIAVSQDFGNSAEAKIMRSLMWSLSEYYVDNLANETRKGLKENALKGLHNGGVAPFGYDVIDRKYVINDLEAGYVRKIFDAALNRKGFKDIIQELSECGIKGKRGKPIKYTQIYEILRNEKYTGVYAYSVEEEKNRADRRTKPNAIRIENALPIIISKAQFEEVQKIMNERKQTGKKAGYLCSGLVYCECGAKMHGMKSERKGHTYHYFYCSKKCGAPTVRMEEIDNAAIKYLHELLSDENQTKISDALRTYKGGERERLEDFNSILKKKIDEKQNRYNNLLANLSTGALPAPVLTDIGKEMETLKAEIECLQHTEPPKDYSVETIHNWLESLKNAPDEAAIHLLIERINIKNKTVFNIKSTLNTVLGDICCNGWI

SEQ ID NO: 13573 - protein, 618 aa, synthetic construct
MGNATIKKAAFLVRCSTNKQDYDRQVRDLQLVADRFRYSLYEIYGEHITGKDDTTKRDRLSIIRVRKDAELHKFDVLLVAEVSRMSRDSVSGRVYVRQFCNLGIPVYFRDKMKWTIDPQTMKEDESFVKELGLYFDGAAEYLKSMKTQIASGRRNSLMNNQLVVGHPPIGYKKRGGTDKYTKNELVIDEALAPMVKDVFAMYLEPEGTLKSVSLAISAKYSKELKGKRKTVSGVQQILCRKEYYTGEYTVYMSDPDNKDLEPEPFTITFEPLIDQETFDAATEKRDLKKSTDSPYPKQAIHPLSRLIKCPHCEHSFSPRVRSGDKPGEKHRIINGKKAYSWICMTRINNAGECNSHVNLNNEKTETIIWDLIKKELLTFADLNKDDRETRIYDLQQKIADAQNQIPVYEEEITRQDRKIKRAYNAYIDAPEVALEKAKEDYHKTLLDATKVKDDYAKEIKQLKKQIKGWEKSIDYYNNSNITTEYIDSIEDKEDEKRKIFLQLIQKIVPIGIRPGVVILQTHTINGIYWVLFDGNQVGQKRIAHYIHESFAVWHSTVKGEIQSSEAESYFSLKNTDVLVGTEDVDPAHVKFREMQMVCEANENVIPYNYIYERAYEGE

SEQ ID NO: 13574 - protein, 578 aa, synthetic construct
MGYVVKKAAQRFEEKKAAIYVRVSTQYQVDRASLPVQREELINYAKYALGISDYVIFEDAGYSAKNTDRPDYQQMMARMRTGEFSHLLVWKIDRISRNLLDFSVMYAELKELGVVFVSKNEQFDTSSAMGEAMLKIILIFAELERKTTSERVSAVFVSRANDGIWNGGKVPYGYSYDKESKTFSIAEDEAKIVRLIYSLYESEKSIVRVARIMNERGLKSRAGSDWSPTTVHTILSSPFYSGTYRYNYRDESNTKRFREKGKDEWVLVENHHPAIVSPERLAAVGVILESKRYNKNATYQRKNVHVFAGLLTCGCCGSTMAATTDKVRADGWRPSMYICSRRRKSEDCTNKYVSDVSLGPFVLNFFANLIKASNSFGRTTSIETLEKKLLRGEALSRVDHIERPGLEELYNHLRSGFDEKRFESPTIAATESSADLSERDLLLSEKRRLERALNRLKTIYLYGDDEMASKDFNIERERITKALSEVDSRIDELNIANAFDLSLSDEAFMQKASQFILTQQLLDKRSVNYERFIRKIDPKIVKDFLNETVSNFCIKDGLTTSILLKNGIELRFSYKTAE

SEQ ID NO: 13575 - protein, 563 aa, synthetic construct
MESERMQHSLSAQVSYYSALIQKNPEWEYAGVFADYGISGTGTKKRDEFNHMLAECEAGNIDIILTKSIQRFARNTVDLLNTVRHLKELGIEVRFEKEKINSLSGDGELMLSILASFAQEESRSISENVKWGTIKRFKQGIPNGKFSIFGYEWQDDKLVIIPEEAEIIRWMYAEYMKGASRIEIGRALMDRGIYTRQGKPWVDSNVKVILTNITYTGNMLFQKEYCEDPITKHRRKNYGEMPQYFVEDTHEAIIPMDEWQAVQVEFKRRRDLGPFGNKSLKLSAFSTKITCGCCRKHYRHSGKRNTAGEVYYIWICQTKSQKGVSACPSKNIPEKMLQNTAAEVLGLDEFDEDVFSQQIEEVIVIGDDTLTFRFYDGHEVTTKWQSTAKTDWWTDERRKLWGERHKRKDTNPNRNTFYEFTGFIKCGCCGANYRCQSGKRKDGTPTRSWYCTGPRSECRNPAIRDDTMKRLVADVLGLDEFDEAAMDARIENATILDHTVTFHFRDGHTESRAFLDKRHGTPWTEERREKARESMKAAWTDERREAMSERIKKIRSEKKWPNP

SEQ ID NO: 13576 - protein, 503 aa, synthetic construct
MAEAIKALLYLRKSRADDPDEDVGETLFRHDEMLRDFAKKQNIVIVETYREVVSGDSLYARTEMLRMLGDIEQGQYDAVLCMDIDRLGRGSMSDQGIILDTLKANDVRIITPRKVYDLNDEMDEDYTEFETFMARRELKSIKRRLQRGLRKTIEDGGYTANAPYGYTKTTVNKMPTLAINEDEAKYVRIIYDMYVNQGMGCQSIADAVNGMGAKPHRSDAFGRTSIMHILKNPVFCGKVTWDRRHHIRKGTRGNEKHITVYNDPADWVVVDGIHPPIISVELWEQAQEIIQNRYHPPYNRGEPRSPLAGVLRCRVCGRTMIRMPFDTKRPNGVDNLICPTRGCCAATRLDRVETAVLDALRDELESYQAQIVDGAGGKAKDYTAAADAVRKELATVEKQMDRLQDLLERGVYDVDTYLSRSATLKKRTAELKASLSAAEDMAHRTSADHIVAQVHKLTSGLEAYAGMDVQGKNRLLRSIIQSGTYYKEKGWSPTHFELEITLK

SEQ ID NO: 13577 - protein, 674 aa, synthetic construct
MAYAKNKVVKLWTQKKAALYVRVSTRYQVDKDSLPFQRKKLKEYCKFLEIDKYVIFEDDGYSAKNTDRPHFQEMMSRIRTGEFSHVIVWKVDRVSRNLLDFAAMYQELKDHKVTFISMNEQFDTSTAIGEAMLKIILIFAELERNMTSERVTGIMLDRAEQGLWNGARMPVGYRWNEQTKFPEPDPEEVKIVQLIFDRYEEWRSSIKIARFLNNKNFKSKRGGEWTSRLIYDIIRNPFYIGTYRYNMRESGRGPLKPESEWIVRENNHPGIISKDQFDRCNKIMDENASRRDTSEMRVRKFVHTFSGHLVCSNCGSNMIACKDHARTNGWRPSIYRCAKRSRMMTCDNSKTVNETYLGTFVFNYIANLARVQKNFSKITSIEKLESELLKGEAFEAVSGIIPDSLNSTFQALLYSNLGNGTYVPDIALLSKFDEIQDHNQIDLLNTEIEKSKNAITRLTDVYLYDPASMTKEEFAAKKKELIKKIEEMEHQLAELLDNSEDNDLTDLSFIKKASAFLVTQRIVSKSFIDYVQMAQELDNEILKNFVDQIVDRIVIKDGRIQSITFVNGLTHEFFYSRPAELPVCKKCGGRIGSTCGCRTRTFSFNGKRYQRIKVGDPRDALYGQKNPVCPECYAKEGRWHHWLCGIELCPICGKPLQTCEHGPNGKSNFTFNQL

SEQ ID NO: 13578 - protein, 427 aa, synthetic construct
MDRIIKRVDFPKIMQPQALKVCAYTRVSSGKDAMLHSLSAQVSHYSEMIQSHIGWVYCGVYSDEALTGTKSDREGFQQMLTDCRAGKIDMVITKSISRFARNTVTLLETVRELKNLGIDVFFEEQNIRTMSADGELMLTILASYAQEESRSVSENQKWRVKRNFEAGIPWNGRMLGYRMQEGKYCIIPEEAELVRRIYREFLGGMGRNRIAARLNDEGIQPTRYGEEWHPQTIAKILRNYAYTGNLLLQRFFCESYITKKMVPNTGQKAMYHAEGTHEAIIPLDEWKAAQEEIIRRTEKHRSKPPAQPTFFYTGRIQCAKCGKTFRRKTTAARVVWICGTFNTKGKKYCASKQIPEVTLDELVQQVTDDPSSIEKIIADDGNTLHFHFSDGTIVTRTWADRSRAESWTPEMKEKARQQSLARRRQKS

SEQ ID NO: 13579 - protein, 578 aa, synthetic construct
MNTLSSLNITPSPPRMCRVAIYIRVSTLQQVDKDSLPMQRKDLIAYSKLILNTDDYVIFEDAGYSGKNTIRPRYQDMMDQIRTGAFTHLLVWKIDRISRNLLDFAQMYQELKELNVTFVSKNEQFNTSTAMGEAMLKIILVFAELERNMTSERVTATMISRANTGKWNGGRVPYGYKYDPEEEDFLIVANESNTVKLIHDKYEELQSLVYLARYMNEHGYRTRSGNEWSPPSLAIILKSWWYCGCYEYNKRKAGNRQKLKNESEWIMIEDHHIAIISYDQKERVLAILKGNKRFATEHNLYVKGIHVHVFGGLCWCKNCGKKMTSTSSNKNRSWQYSKYLCSTRRRSLTKCRGRSTSDPVLGEFIFNYILNMLNAQKGFDSIHSPADLQDALLTGDAFSDIKSIDQEELNDLYNILSSSVVGNIYGRSFNVNKAKKNDEVQSSLTILKAEKKKLDRALDRLTNLYLYDDMAISEKDYMTKKTEIETKIAEIDEKIGIVNKNSVDNSITDEEFVDKASTFIITQKLTNRNYISYKRLATSVDPKILYMFTHDVIDYIDIYNGKVQRIVFRNGLSQTFIR

SEQ ID NO: 13580 - protein, 561 aa, synthetic construct
MPPFPRSNFGSQPSSQKHCERTMRKESPRAIIYARFSTDRQNEKSVDDQIALCAARCAREGWEVVDSFSDRAVSGSTPVAKRVGGAKMLAALMAREADVLVLESLDRLSRDQVDQETIVRQLEFIGVRIVGISDGYDSATGSSRKVLRAVRGLVNELYLDDLREKVKRGMRGVFERGCCPGGKVYGYRTEECEAGKRFVIYEPEARIVREIFTRFAAGWSAGRIVDDLNRRRILSPRGGKWMVSALVGVDSLGTGLLNNRLYVGLHIFGRFEWRKDPTTGKRTKRVRPESEWLRAEHPELRIVDEETWEGVRDRKRPTGHRTGGAPAKTLLSGILRCGLCGAPMIKSGRSSYCCSVSHNQGRSVCPGLSVSAEDAESAIIRVIQAQLLSPDAVERVLKSVRAQLETLTACSDEEEKEIQARMAALRAEIDNLVEAVAMGSLPAAVVGKKISERQAELDRLEDDLKGLKRADTLRVPDEELRELIRTQAAAMREAINSDVQVAREMLKKVIGAVTVLAGDDTVTLKMKNPALGRVFKLPELSEPRDLIMVAGEGFEPPTFGL

SEQ ID NO: 13581 - protein, 440 aa, synthetic construct
MSVVLRAALYPRVSTEEQAKFGLSIHDQRNDLEEYAKANNMKVVGVFPDAGFSARKKIEKRPAMLQLLEAVKRNEVDIILVTKLDRWFRNIGEYYKVQEILEAHNVSWKTIYEDYDTSTAAGRLKINIMLAVAQDEADRASERIKKVLDAKKDRNEVCTGHLHKGYKKEGKFAVIDKEAEPIMRRFFSTFLETGAITKTMDAVPELNLNYKTASAILNNTAYMGKWNGLTLPPYLTQQEFQRVQELRRRVTRKSPYNRIYLFSGLTVCGECGRRMTGHPTTLKDGTCVYKYLCQGAKQRRGCDNGLVVREQDIENYFMSSIDEQIQIKLKAKAQHAPKINTDAQIKAIQKKLAKLSELYIDDMISKPDYSKKYAELTEQVEALKQTQVQSRAPEEVADLFAPGWQDIYKNLTRENKRAFWKLKIKEIRLYKDSRIEFDFL

SEQ ID NO: 13582 - protein, 514 aa, synthetic construct
MAKELTKTASVAAYLRKSREDADQEDTLARHRKQLIDLVKQRGFENVDWYEEIGSADSIKNRPVFSDLLKKIENDEYDAVCVVAYDRLSRGNQIESGIISKAFKDTETLLITPTRTYDWSIEGDEMLSEFESMIARSEYRVIKKRLKQGKINAVRNGRLHSGNVPYGYKWDKNDKTAKIDKEKHEIYRLMVKWFLDEEYSATEIADKLNELGIPSPSGGSTWYSEVVADILTNDFHRGLVWYGKYRARKNGIGIEKNPDSSSIIMHKGNHEPMKSDEEHGAIIRRISKLRTFKPGRKLNKNTFKLSGLVRCPHCGKVQVVHTPKNRNPHVRKCLKKSKTRTTECNNTTGIPEEALYKAIVMKIREYNEVLFSKDSSEKKDEEARTYMNQILSLHEKAISKSNKRIEKIKEMYMDEIIDKDEFKSRIDKEKKSILEAENEIRTLKESADYHDEIEHEQRKIKWNHEKVQEFIESDQGFTPSEINLILKLIISHVSYTMVKNEYGEFDVDLRVNFN

SEQ ID NO: 13583 - protein, 691 aa, synthetic construct
MLILKGEERLNTEQIMGLIGRINAIIYVRVSTADQAKKGYSLESQIDRCKERAITKFGYKDSELIALIEPGKMGDDPNRPALNHALYLMEKGLGKKFIVLHPDRLTRDNTLQGIVSRKIWSMGVDIEFIEFEVDPTNPESMLMYNIQGSIAQYNKAKISANSKRGRFAKAKKGEFPSFKRLYGYTFNKETDIPEYNEEERAILLEMKNMLLIQGMSSNEIAKELSRRGLPAPDGDIWYQATVSRILQNEDYTGDFYYGKSKVVQINGEKKQVPTPEEEWVLIKIPPMWDHETRDQIIKHLKANRKGGRRSPRDYLLKNKAKCGRCGSSCGSGSVSRSKSGVYKYYACRRKNAKGYQNGKKVLQCQGKNWRVDIVDDVFWKWFKKLLKNPTEFLERLLAETSNEKKIEELKNKANKLEKQIEGIDSEIANYVILFGKGKISEDMFDKLTQPLEQNKKYVENELSVIKSQLKTNKEVEDKNQKIMQYVESFSEMVDKDLSMDEKRKLIDFFIEKVTLFDDDHMEIVWKGNDDQKTQGVLFNEEMGAILDNSHRNLNHIQEHGLSFCVSFEIDIPKAERSYKYAWEEYERSFEEIKRMHFKELMTAGQISEKLNIPDWIILDLFKAKKVDKLSYPELCRRRRARDFDMLYDLHFNQRLSLNEIHRQFGYSPLYTKRVFKDKGLSHLGFINQLDK

SEQ ID NO: 13584 - protein, 555 aa, synthetic construct
MIKNRKLRYIAYLRKSTEANERQALSIDAQRNEILKCFPNLNIIDWVQESKSAFEAENRPAFSAMMERIKRGEADGIVAWQPTRLSRNSMDAGQITHYFSHGIIKDLQFATASFENTPEGVKSLQYALADSQYYSANLSRDVKRGNREKRLKGWLPTANLLGYLNQKNPNPTEEDPTESITAVDPERFPLLQKAWKLFLTGEYSVPAILDVLNNQWGFRTRKTRRKGGCPLSRAGFYKLLKNERYAGIIIEPLTGEKLRGSYPAMISIDEYNRTQELLGRHGKPRLTQKKDFTYKGIARCGECGCSITAEHKRGGKYTYYHCTHKRKDIDCKQGCIEEKDLTRQLEELFDGLTIMKQFEVWGLETIRNMNDEECGDRRHLLDSQSKALKRANEKADRLLDMCAGGLITQEQYKNKLEEVNAEIKQLQKDLNETLENGADWRKMMRKTLEVLFSGREKFENGDAYAKREVLQSLGSNIVIRDKKLSIDTYKWLEPIQKNYKKLEEQFKAGSNSDLQIKNASNESVCQQWRRVGDSNSRCRFPHTSDLANRPLQPLG

SEQ ID NO: 13585 - protein, 460 aa, synthetic construct
MAKNITVIPARSQQGIRQQDRIVKKIRVAAYCRVSTDQEDQLHSFDAQVEYYTKYINDRENYEMAGIYADEGISGTNVRKREQFKKMIEDCKEGKVDLVITKSISRFARNTQDCLQYSRMLKNLGIGIIFEKENINTLDSTGELLFTILSSLAQDESRNISENCKWGIRTKFKKGELHLNTCKFLGYDKDEDGKLVINREQAKTVARIYEEFLWGMNPQQIARELEEEGVPGCCGQTKWYTTTVIGILKNEKHMGDALLQKTYTVDFLTKKQVKNNGEITQVYVKDSHEGIIDKETWSAVQEEFERREKFMEQHGLKKYVYGAECNPFTSRIFCGECGHSYTKHSWKSRGVEQWQCKNHRTGGKLTCKNDFVDNRDLEQGFIKAFNKVLADKESKIRWERMRTEGALLQKIRSEQMIGIAAEGKIKTFVPELAQLVVIKVTIFSARRFEFEFMDGSRITV

SEQ ID NO: 13586 - protein, 478 aa, synthetic construct
MKPWAGYIRVSHVGGRTGDRFRSPTDQAQAIKDWARRRGEPVILLPPELDESGGRADRPILTDAVRRIEAGEYRGLVVAYLSRAGRSVRHMLELWDRIERAGGEIHAVAENIDTTTPAGRLTRTMLAAIAEHELDLHRERFEALRAEATKAGIWQRRQTPRGYRRDPRTRRLVPDRDAPLVRRAYAARLAGASWSELARMLGMTAAGAQRLIANRVYLGELRVGRHINPRAHPPLVDAEIWHAAQRTTVARPPRSGRLALLAGLVRCAGCGHMMSRSDQKRAVVYACHGWHSAGRCPAPASITMRRLDEHVEPIALAALARLQASSTHDDRALKQARAALREAEAELAAYLEAVSAADIGPEAFAAGAKLRRQRVDTARARLARLIAAAPAGAVSGDIIERWPTLTVEQRNHLLRHLIEAVLVRKAGRGVLLPPAQRVRIVAHGVGLVRPYKGGGGPMPIQPIWIDDPDDPRTLRMQG

SEQ ID NO: 13587 - protein, 506 aa, synthetic construct
MAQVQVIQPYDYNQGKLSVAAYCRVSSNSEDQLNSYRTQVSYYSRLISNNPDWQLADIYADEGITGTSMKKREEFNRMIADCWEGKIDLILVKSVSRFARNTTELLEVTRELKELGVIVIFEEQEIDTSQMHSEMQLTLHAMAAQEESRSISQNMRWSYQKRMEAGTFVGTVPLIGFDLKNGNLDPNQDGWIHGYIFDLYNSGVAMEPIADRLNEQNIGNRVWTRTSVASILKNEKCMGDVLCQKKFTTDTMPFQKRYNHGEKPQYYIRDNHPGTVSRESFYNAKSLMEIRKQKCQRRNSHLFTHRIHCPQCNRHFRAIESSNKIYWMCSSVSSHITNCFPYHFSEDSIKKAFLNLAGKLYIHQEEVLGQTVKLLQEVQYSSRNEDKKLLELNEQLAGLADKSATLQRLNRKGFIDAEEYRQQSDKLAIQRQKLTLERNRKLQGSKILTMVDAIEHLQAQINGWPEIPAEFSIELFDSIVEKIIPTDKGVLKFRLHCGLEFVEVVA

SEQ ID NO: 13588 - protein, 528 aa, synthetic construct
MTEQRPNPKVTVIPATAQQERIRLQGRKLRVAAYCRVSSKKDEQEHSFEIQKQYYTEKITNNPAWKMAGIYADEGITGTSMKKRDDFKRLLRACREARVDLILVKSVSRFGRNTVDVMKTVRSLQERGIGVIFEKEGLDTRNMNSELMLAFHSAFSQSESESISENITWSYRKSFENGKVNIGGNMFGFCRKGKGEFGIDYEQAEAIRLMGTLILGGHSLLDVKAELERRNIKSPSGKDTWNVATILRILQNEKYKGDALLQKTYRPSLFSKRMKNNGALPKYYVSNCLPQIFSPETFDRIQEELDRRRIRRPLSANDKDMYRGKHSGKYALSNLLFCSNCGAPYRRVTWNNHGKKKIVWRCSNRLAHGKEICKDSPTLEETALHAAIMKAIQDTFIDVNQAIETAEQSLARVFTPECAGDEFDIRSRLRKLKERRAQLVQKCLDEGDDGTYDLQFINISNEMESLKQRLTGIEEAARNKKLSDSRMEEIRELLERFKETDMEFDNDLVYRFVREIRVQVDGTLEIVW

SEQ ID NO: 13589 - protein, 533 aa, synthetic construct
MSETKNKIYAAYAVLYCRYSCDRQNEQSIDGQIRVCTEFAERNNIKIVGTYIDKAMSGTNDNRDDFQRMLRDSDRKQWQYVIVYKLDRFSRNKYEMAIHRKHLKDNGVKILSAMENIPDSPEGILLESLLEGMNQYYSEELSQKTKRGLNESRLKGNFCGGVINYGYSLLPVYSDENNRKLPIAHKVIINEDEAPIVKEIFTEYANGKSVCQIVRELNARGVKNRGNPFITSTLYTMLKREKYTGIYRVGGNAFDKLYPPIVPVEIYEIVKKRLYENNVGKHIPDVSYILRGKLDCGYCGKRLTSAGGQDRYGKQRRYYKCYGTKGCSCKPIKKELIEDMVMDALNKAVSSDENIEKLISAALAAIDKKNGDNLTLHLLEKELEQTEKAIANIMTAIKMGIITETTKESLEECENTKREITAKLFDARAKEKPKPSRDEIRKYIRTALKKPSKQMIDLLVNKVVVFNDHIEISFKYVKGSPTEERPKKLNKHLTKNMSLDASRGSLFMSYDYPYTETKHYVTYDKICTIEMYV

SEQ ID NO: 13590 - protein, 543 aa, synthetic construct
MELTEKRTVIYARYSCEKQTEQSIEGQLRVCHEFAERNGYVVVHEYIDRAVSGKTDKREQFQRMLQDSAKKEFDYVLVYKLDRFARNRYDSAINKATLKKNGVKVLSACEQITDSPEGIILESMIEGMAEYYSAELSQKVKRGMRESCLKGNAAGIQPIFGYYIVDKKYQIVPHEAEIIRKMFDDYVNGTTIKEIKTWFEESGIRTHKGNRFSFGRISDMLRNQKYIGKCEYAGEVYDNIIMPIVDEMTFYRAQELLVVNSHKSGRVRAGEKFILSGKVVCSHCGALYNGESGTCRNGDIHYFYKCRRKKEGKDKCCSHAVPKQAFEDSVYKTIMTALKDETFLRRVAEQAVEIHNRQITEKPELKILRRQLAETEEMLNNITMAICKGIFNDYTQNKMSELTLLKTQLVAKIADEEANNIKPLQVEMLMEFFHKSVLAIECAEDPTNLDKRKKLIDSLIKQIIFDGEKYLIVLKTSNMPDYQSTYEQKEKSRAECDELRTRFETLRFGERRGRRFESARISEAHSRDKRRKDRSIRVGVRQL

SEQ ID NO: 13591 - protein, 582 aa, synthetic construct
MKEINNVVAYCRYSSENQRDGYSIEAQKKAISDYCNRMNYTLLRFYVDEAKTGMNDNREEFQAMIADSSSKEFSAVIVHKLDRFSRDRYNSVFYRKKLKDNDVKLISVLENIDDDNPEDLILLSVLEGMADYYSKNLSREVKKGMNAAASKGLSTGGIPPFGYKINQETKKLEIIPERAEIVKSMFNMYAKGYNLVDIELELNSLGYKTIHGNLWDKKQIRKILQKEAYTGVKVYNRYAYKSASSNVKSPLIRVEDAFPRIISNDVWNAVQNRFLKDKRTTTPRKNMIDYLFTGLLQCKNCGGNLTGCSSFKNQNGKRIYHHYYVCSGKQKTKIGKCSTPRFPKDLLEDHIITTITDFIFTDESIGLWADAILKSYNTSGEIKDIDTLKLQLSKVKKQEERLLDLYLSGDIEKDKYNTKIYELKLQASKLETDILYTSSSHSFTKEELCLAIRLMMEDLKSDANIKTKKGIVKTFVKKISIDNKSIDIELTLPNLEGAYKGLNGGADGIRTHAPVTRSTSLAGKPLEPLEYYSNYQALFHYNVKCSACQLFFSLYAAAITCSSISFKSSGLFFKNSFVFSLP

SEQ ID NO: 13592 - protein, 496 aa, synthetic construct
MDKKKAAAYARVSTNGKMQAHSYEFQSRYWNERLSNDETYEYVGLFADKGISGKFANRRPQFMALMDACKKGEVDVVFTKSVQRFARNTEEMLTIVRELREIGIAVIFEKENINTLNPDSEIFLTIAAAVAEDDLVRYSDNVSWSIQDRFQRGECIIGPRLYGYEVAKATITTINPEEAKVVKEIFERYATGKSSSREIAAWLNERGIPAALGGKWADNQIRAMLRNEKYKGDMLLQKTFLENGMKKTNRGEKDCYYVENSHEPIVDRELWEKVQTIMDARTNKKLQGQVTKLYPFTGMIICGECGHKYTHKVNNSGLIWQANFWKCHNSITHGVKVCGNSGIKESVINDLFVECYNEFIKGGYKTNEGEEGRLQATLDNLYKEENELTMLSIRGLINQRQYENERQALLSEIRATQQKLQDIRYCHLQATDFKAIETFDEEKLHRFVRKVIIHRWVVTFEFYNGVQISRTYTNGQPGNIKDWKLKQKARRELANG

SEQ ID NO: 13593 - protein, 538 aa, synthetic construct
MAETQKQRVVRMIPASFIRTTAANLLLLIKVAAYARVSTKKDEQEDSYERQVAHYTKYIKNHEGWQFVDVYADEGITGTRADKRADFQRMMEDCRKGLINKILVKSIARFARNTVDALNSIRELKELGISVYFENENIDTLSPGGEVLITILAAMAEQESRTISTNIKWAYQKKFQNGDIQVNYKRFLGYTRDKEHNFVIVPEQAVTVQRIYREYLYGYSSATIAKHLTEEGIPSPSNKPKWYPSVILSILRNEKYYGGLICGKTFKPDVLSKKRYKNEGQVERYYIENSHPAIVSKEEFDMVQAEMQRRGDIRGHSESNQGRYSSKYPFSKKIVCGVCGTFYRRHAQYIRGEYTPTWVCATHKLEGSEKCSQTYLKESEIEGAFLEMIKTLVGDFQAVKTVLRENIITSLDDSVAEELDATLGAIEQCQEEMLAVVRAKRAGELTDAEYNKRGGEIEIRINELTRIREGLEQKSHAAKMTRKRVDEIIELIESMDIANKFDGEIFKNIVDTVVVRNNYTLDFHLKVGVTESVTIVRH

SEQ ID NO: 13594 - protein, 554 aa, synthetic construct
MNTQVSMQHNNYFNGGDKIDALYCRLSRDDELQGDSNSIKNQKAILSKYAQEHGFTNPRFYVDDGYSGTNFNRPDFQRLMDDVNEGKVRTIIVKDMSRLGRDYLKVGFYTEITFPEANVRFIAINDQVDSESSVDNDFTPFRNIINEWYAKDTSKKIRAVFKAKGMSGKHLCTIPPYGYKKDDHDKQQWRVDEDAAKVVKEIFSLCMQGFGPTQIARILTERGRETPIIYKRRVGLPITSQETEFPEIWATQSINKILANPTYLGHTINFRTKKKSYKSKKKIDLPKKEWAIFENTHEAIIDQDTFDTVQRIRQAKRRPTSMGEMSIFSGLVYCADCGQKMYLCRCTTMKQKEYFNCSSYRKKKKATCTSHQITVEAVEHFVLTNLQRVLAFAKEHEQEFLEIVRNENEKEMRKKLLSQTRELEEAEKRIQALDRIIQNLYEDKVCGNLTYERFVKMSQSYEQEQWELKERAYHLRQELSKAKEQSDNVTRFMRSVRKYTEITELTPELVREFVQKVVVYQAEKINGRRTQRIDLYFNGIGQIPLSVHNKRETA

SEQ ID NO: 13595 - protein, 562 aa, synthetic construct
MAGEVEVIKAVEGNGIRRRNMVGNGLSIERKRVAAYVRVSTDGEEQLQSFQSQKTYYQEKISKEKEWVMVGIYADEAITGTKTVKRDGFLKMINDCMAGMIDVILTKSISRFSRNLVDTLQYVRMLKEKGIAVIFEKENINTLSMESEMALALLSTLAQNEVESLSANVKMGIKMKMKRGEMMGFNGCLGYDYHPEDKSITVNPGEAEIVREIFDMYLRGYGAPTIAKELTRLGRKNKKGEVKWTESGIRTIINNEKYKGDLRLGKTFTVDPISKRRLENMGEEEQYYIKEHHEPIVSPEIWDAAQEIKKSRYRKNAMSIVGTRKKYSRKFAFSSMCECGFCGKYLTRRAHNQTTTQTKPVWKCRTATNFGIENCPHSKSIDEAIIENAFIEMFHLLADNFDDVLDLVIHSVEETLSNDESAIKLQKVNKTLDLLESKRKKLTDMLLDDKITKEAYDAKYNELTRKINQTKGERSLYSSNVEAQKHVSQRMKEIRACITEADMLDKFDRAVFESIVEKVIVGDMNEDGIVDPYKLTFVLKGMDDRTIPDAKNRYKNLNKKVG

SEQ ID NO: 13596 - protein, 537 aa, synthetic construct
MNIAAYCRVSTDKEDQLNSLEAQKEFFAEYTKRTGDTLVKLYADEGISGTKIKNRKEFLRMMSDAEHGIFDMVVVKDISRFARNTVDLLQNIRKLKALGIETQFLTANMTSMGNSEFVLTIFGALAQEESANTSKRVKFGKKMNAEKGRVPNIVYGYDKTIGDYFNLEINRQEADVVKQIYQWYLQERCGAAKIANMLNERGIKTKRNCSWSQNAVCRILTNELYTGKIINGKEEVADFLTGQRKEKDETEWMVVERPELKIIEQEDYEKAQEILHGRHAAFNMKKERQSNKHLFSTLIRCKECGWSFRRTVRTYKNTYIRWVCSGHNGKGADSCPNAVSVDEDELINVLQEYFNQMLRQKKKVIRHVVDEFQRVYKAKDENIEYEKELKSQLNKLTRAREKYMNMYEDDLISREELNEKIGGSRKEIERLENELKMVSYHLTKGEQLERVLNNTFKQIEDITDVRQMTNAQLKKVIQKIEVDKEGNVEIYLRLFGELGLDETVLIDSGIDDNFEESDGSGNGLEDENTVRVCNVHT

SEQ ID NO: 13597 - protein, 456 aa, synthetic construct
MRKKESAASLVRVALYIRVSGEEQKMHGLSLEAQQERLEKYARERGWLIVGIYIDAAKTARKHLHKRTEFQKMIDSVKRNEIDILLFCRLDRWFRSVADYYKIMEILHDHNCEWLTTDEEYDTTTANGRLYINVKLSIAQNEADIDGERIDVVFDSKIAHGTVVSGNCPFGFRVNDEKRLEIVPEDADIVRDAFCRYEATVSQRGTIKYIREKYGVNWCDATFRRMLREKLYTGIYDRGGRINENFCPAIITHDQFEHVQKLTSKNARSSPSGKVYIFTSILTCNECSHKLVGYSTRQYCYYRCNQHFQRGRCSNNHSVREDFIESWLFDHLEEEINRCQLEWEVQAASRKRSITSSDKAALKRKLSKLKELYVNELIDLEEYKKDYEIYTTALRQLPDPAQEAPPDFAAVRNILTTDFKSIYNTLTREEKRTLWRSVIEEIRIDNDGNITGIVFG

SEQ ID NO: 13598 - protein, 571 aa, synthetic construct
MSRPAAASCPIVALYVRVSTGYQVDKDSLPHQKKELKNYCKYVLKVPEDSVVIFEDAGKSAKNTKRPAYERMMQKVRAGQVSHVIVYKIDRISRNLVDFSLMYDDFKNNHVAFISLNEQFDTSSAIGEAILKIILVFAELERKMTSERVMDIMIGRAKNKQWNGARMAFGYSWDPVREFPVLHETESVIVKMMFDMYEKGGSSCSIRNYLNENDIPTKRGGEWTSKTVSDIIRNPMYKGTYRYNYRESARGKIKPKDEWIVIDDVFIPIVTAEQWDHCNTIMDANAAARNNMCSQSRKKYHHVFGGLLRCGVCGSNMICDKDRVRENGFFPSIYRCGNRWRKNTCKAKGITDVILGPFVFNYIKNIVQATKQAESISTLDALEAVLLTGPEFKGIAGIDHVGLSAVFDALKGGTGQNIQYKPIPLDTAAPVIDKAAILASEKERNLKALERLKKLYLFDDAAMSEKEYLETKQGLEVRNAQIENEIAEMRADDEAPGTAAGFLASASSFLVAHKLNQAEHIDYKEFAPLLEDAVLKEFVSTVIEKIIVIGGKVDSIMFKNGMEHKFIRKDG

SEQ ID NO: 13599 - protein, 560 aa, synthetic construct
MHRGRIKVYTYTRVSTAMQTDGYSLDAQKARMKAFADFNDYEIVGTYEDAGKSSKSIEGRLEFDCMMEDIKSGKDGVSFVLVFKLSRFGRNAADVLSTLQVMQDFGVNLICVEDGIDSSEDTGKLMISVLSAVAEIERENIRVQMMEGRIQKAREGKWNGGFAPYDYQLIDCKLQINEEETEAIRVIFDQYVHTDIGANGVAKYLENHGIHKIQRQNGKNPLFDAHLVRLILKNPVYCGKSAYGRRRTEKVHGTRNEYHLVEQDNYILVDGLHEAIIAEDVWQAAQVKLISQAKKYEHVNRGKDTKTHLLSGIVRCPICGAGMYGNKSIKRKKDGTKYKDFYYYGCKHRTMTRGHKCDYKKQIREELLDDAVAEVIVKLVGNPKFAEMMQEKINSKLDTAAIDTELASYEKQLRQYYAVKLKLAEEIDSLDPDDRHYIKRKADLDDRLYRMYDKIENVETQLIETRAKKQAVEAEKLTGDNIYKVLIYFEKLYAVMNEIERRQLMEALISEIQIYEERKPNGQWLKSIKFSFPIIEEDMNLSLEDNKYVETIIKLQLVEK

SEQ ID NO: 13600 - protein, 590 aa, synthetic construct
MESRKGKKCILYSRVSTEMQIDGYSLEAQSNGLKRYADREEMLVIDTYEDAGKSGKSIEGRPAFKRMLNDISQGLEIDYILVYKLSRFGRNAADILSSLEYVQSYGVNLICIEEGIDSSMTAGRLLISVLSAVAEIERENIIEQTMNGRREKARQGGWNGGFAPYGYKLENNKLLIAEDEADVIRIIFDKFVNTDMGYNGVAKYLNLQGIKKKVRQNGTLTAWSSKTVKELIDNPVYCGKLAYGRRIREKVKGTKNEYKQVRTDNYILVDGEHEAIVSVEDWNKAKVKREATGIKAPSKVGRDRAHLLTGILKCPICGSPMYTNKNAWTNKDGTYNERFYYVCSRRRQQRGVSCSYSAQLMKESIEPDVVLAIKQLVTNEEFAKEIKSRIGTEIDTTEIDREIKNYESNLRQVENNKRRLESDIDSLPEDSKYRDRKLQDMNRRLDNLYDTIYELEDKIEEAYAKRKSIEMSAITIDNVYKVLLNFDRVYDRLNDEEKKTMIQGFIKEIQIYPKEEQAKYEHPIRNITFNFPIIINGEEVDKISWENGNTVETVCLLSNTQSKKKESYITLDVEMADYYRIKSEGKNSTI

SEQ ID NO: 13601 - protein, 692 aa, synthetic construct
MKENNVDIIIRKVALYLRLSKEDIEKPTKESISESIKNQELMLREEVKKHPDWKIVGIFCDEDFSGAGTYRPDFEKMINMCKNDEVDVVLCKSQSRFSRDMEVIEKYLHNKFIEWGVRFVSIIDNADTSNEGNKKARQINALVNEWFLEDLSDNIKATFRTKWENGECTSSFAKYGFMKDPKNKNHLLIDPIAAQVKHQIKNLIMLGYGQDKIANILEEKNIPSPYEYKAMNGCKLQLPISKKQDPFNITKAGNYIIKVSLYNKYKLYLNNIISVFVLGTKNEKTFNSKFLVRVRSVADDLKLYYTTTELPNIDAIKVESLSFTDGIWKQVKVNDKIPNKVTYIACYNSELDRLLETGFELEVTLKENRQQNSYKLFSKTISSPAVLLNFEYEIRKKYKWSGRSVIEVVRDPLNNGILEQGKTRRISYKNHKCMPAPKEQYVICKNAVEKTFNDEEWLDLLNTLNKRSRAGASNGIKHIFSGKVYCALCGNILIKNTSKHNKESKKIEYLICKDKSSNWANCNNNKSIRLDELENCVINSINEVLKKYYDLRRLKENKTDIIASTLFSNQLDSFNKEKCDIQKLIKKKKSIFQQLYEDRTNGIIDNYDFSTLRLKYKEDVSKLNDRLAIIEDELKIIEAKQNKFKNKDNLFAKYKQITNLTPVLINQFIDKIEIGKVNKVTNKREINIFWNF

SEQ ID NO: 13602 - protein, 574 aa, synthetic construct
MQKESKLNKKAALYVRVSTNMQIDKDSLPLQKSDLANYAKYALDIPEYEIFEDAGYSAKNTDRPRYQQMMARLRTGEFSHLIVWKIDRISRNLLDFAAMYEELKRLGVVFVSKNEQFDTSTAIGEAMLKIILIFAELERKMTSERVTAVMVSRANNGQWNGGRIPFGYAYDKVTKIFSINEKEAATVRAIYDKYEETHSLLQTCKFLNENGLSTRSGIAWNPTTARTMLSNPFYIGNYLYNKHDLSKTNYRLKTNRRPESEWILVEDHHVPIVDRERWESVNNQLKANRRSNKDGPRTYTRVNTHIFAGILICGKCGSQMCATIDRERDNGYRPSIYLCSRHRRFNDCPNKYISDIVVGPFILNYVANIIKAQNNFGATTSLETFEKKLLRGDVFSDVKGIDKAGLQEMYDMLRAGKFGTDIYEPKNVTIDDTAINERDLLLTEKRKKERALARLKTLYLYSESDMPETEYFIERKTITDELEQIDARLEEIEKNASASFSISDEDFIAKASYFIMSQQLLTKRYVNFDTMIRKIDTKIIKDFVNSVIKKIVILDGKILSIRFKNGIEHKFLYE

SEQ ID NO: 13603 - protein, 427 aa, synthetic construct
MGRTIQRVNFTAIQQASKQKRVAAYARVSNGKETMLHSLSAQVSYYSSLIQKTPGWDYAGVYADEAISGTKNTRGEFQRMLADCRAGKIDMIFTKSISRFARNTVTTLQAIRELRLIGVDVYFEEQNIHTLGEEGEFILTLLAAYAEEEARSASENQRWRIQKQFQQGRPTSIDMFGFRFENGRLEIIPEEAALLRRAAEMYLDGASQDDLAAMFREAGAVGRHGAAISGYGILALLCNEKIVGNLLLQKTHCIDPISKIHKTNHGEWPQYFVEGSHEGILDKETYERVLAERARRVKTLNMEDRDCSRKHRPFSSRIICGKCGKHFFQRTWETKKRGTRAVWVCKTHHRKSSVCEIEAIPEPLLEKLAAEAMGRRSFEAEYFRQKIREIQVPENGKVIFIFTDGHTVEKCHSFEWPKEGRSGVCRQ

SEQ ID NO: 13604 - protein, 536 aa, synthetic construct
MQAVAAKVTVIPAKKNHLPLDIVNNEVRKLRVAAYARVSTNLEEQLTSYEAQVDYYTRYIQAKEEWDFVEVYTDEGISATNTKKRDGFNRMVADALAGKIDLIITKSISRFARNTVDTLTTVRKLKEKGIEVFFEKENIRTLDGKGELLITIMSSLAQEESRSISENVTWGQRKRFADGKVSLPYGHFLGYQKGPDNLPEIVEEEAVIVRLIYRMFLYGKSPSAIASHLTDEGIPTPGGKAVWRAKVIENILTNEKYKGDALLQKRYTVDFLTKKQKVNEGEVPQYYVANSHPAIIEPEIFDLVQYELKRRKKDGRWTSSTYPFSGKIICGECGGIYGSKVWHSNTPNRTMVWQCNEKHRGQHCKTPHLTDADIQNAFLAAFNKILGNREEIMEAYREIMEALTDTHDLDTEQEQLESESEVTMELIRKVIEDNAQKAMDQGEYERKYTGYCERYEAARKRLAEIGEFRLERNAKHTKIAMFLERLAESTELVTEFDEELWYATVDFVTVYEDMRMVFTFRDGNTVEIKKREWRAA

SEQ ID NO: 13605 - protein, 578 aa, synthetic construct
MKTEKGGKSPDGRITALYVRVSTGYQIDKDSLPFQKKELKNYCVHVLHISPDEIEIFEDAGKSGKNTDRPAFQRMMKKVKAGKVARVIVYKIDRISRNLVDFSLMYDDFKHNRTTFISLNEQFDTSSAIGEAVLKIILVFAELERKLTSERVTGVMIGRAQDGKWNGARMPFGWKWNAETEMPEHDPDEAENARMLYRVYEETRSTAKVRDFCYDNNIQTKRGGKWTTTTILNFLHNPMNKGDYRYNYRESARGTKKPEDEVVYIPAVFPPLVDPELWERVNAIIKDNGAKSQTTLNPHKKKHTHVFAGVLRCAECGAGFQVSRLDKVRLNGFQPSFYVCTSRRTYRACEALGASDVVIGAFVFNFVANLVAVSAARREYVKLGIDETEKRLLQGDAFSDVLQMDAVSLRQIFDALRGVSRGGSSFIPAPLEKKKSDDVATIEKKRNEAAKIGRALERLKKAYLFDDNVMNEREYITTRARLEEDLTRLNNEIADREESAFETVSELSFVTSASEFLLSYQIQSGDPVVYSDFAPIVGNETLKNFVQKIIDRIEIKRARVSAIVFKNGLDARFILKDE

SEQ ID NO: 13606 - protein, 450 aa, synthetic construct
MRYDALTTMPKQKKPPGRKAQGESAKRGVIYARYSSHAQKDASIEQQVEECLKFAKDEGITIVETYADRAVSGKTDRRPNFQKMMKDAEKGGFRYVVAWKSNRMGRNMLQAMINEERLNELGIRVLYTEEDFDDTAAGRFALRSMMNVNQFYSENMAEDIRRGLRDNAENCKVTNGTLPFGYKRTPELKYALDEPKDAIVREIFSRVACGEAFADIAADLNSRCITTSRGKPWGKNSFHALVTNERYTGTYIYGDIRVPGGIPRIVSDELFYKVQEVLKTKKNPQGRHRVNGDYTLTGKLFCGKCKSPMVGMSGTSHTSEKHYYYACQKKRTEKACDKKNVQRDAIEEAVARAIKNYALQDDIIQWIADSTVEYFRKKEEESHISILEDELAEAKRAAKNIMTAIEQGIITPTTKSRLLELEKRQAHQPSTIRTPRQESGWRCIVTCSPL

SEQ ID NO: 13607 - protein, 539 aa, synthetic construct
MRDFSIFDSFAKGEKRADKSHGTNCVIYTRVSTKEQADNNLSLETQRKGCYNYAERQGYSVLANFGGTYESAQTDERKEFTAMLDYVKKARKKISYILVYSLERFSRNDNSIWLSNQLRKLGIEIISVTQPIDTSNPSGQMQQKMLFLFGEFDNHLRKQKCMAGIRDMLHRGDWPTSPPIGYDTVRSNGKRTIEINEKGKLIRQAFNWKANEGVTNEEIRIRLASRGMNVGHQKISDIFRNPFYCGLLAHKMLDGEVVKGNHQPLISKEIFLKVNGFLDKNARGYSIVEENEKIPLKRFMHCDTCEKPMRGYLVKNRNIHYYKCNSKGCNNNKNAEALHNNFREILNYFSLADASDNLKALIRKQAAATFNQLTQVEKDDYKLLAGQQKEIEKKLQRLEERFIEEEINKDLYDRYSEKYMLEKKEIEKNLKNSSKGVSNIEDYIDLATEFAVKMASGWDSSDYITKQAIQNLVFPEGIYYNKKTDRCRTNRVNLLFSYIAHYKGVISEKERGISKLPLDYASFAGLVARAGIEPTTFGL

SEQ ID NO: 13608 - protein, 521 aa, synthetic construct
MAEKEITSVNYARVSDRKQSEQDVSIPTQIEVGERRAAELGARVLRVFTDDAKSAWREKNRPAFDAAIDMACAMEATYFICWDSARFARNKYEAMVNKRLLDDAGVQLVYISSPIDRATDMGWAMDGVMEIFNELQSRRISADTRRSMMRNARLGYWVGGRAPFGYISLPAPDNPKRRKLVPVPAEVDLVREIFAMRAHGQGAFQIAAWLNSRGILRRGAKWSKQTVINELRNEVMIGNIVFGRRGRNSRGVRDRNNWIVVPSHEAIIERPLWDQVQALMDEAADITKADGSPKSTHAFTGILRCGKCGSSMQIETSRGRGGKLYFYYRCRRSMQNRECDPRRIRADLVDDWLSNVILKRVLSRRNVASIVELMEAEAGNWAAEHRKRRAAVLATIGRLQEANDKLYSVLELYGKDAPNLGDMTTRLRQNNAKQKDAEAALAAIDAERPPASSMTSVEIDELTGFLHNLVKDDQNAARTRSFYNSFVDSITLDGEELLVSYNPNRLLAPPKEVVRSKRKWR

SEQ ID NO: 13609 - protein, 585 aa, synthetic construct
MITTARAVIGARVSVMRDGKVSPEVQRESGERYAAAHGWTPVGYFEDLDVSATVGPWDRPDLGPWLGARSGEWDAMIFAKVDRAFRSASDCADVVKWAEKNRKIIVFADDGIVCDYTKDTDSIEAMMSKFFLFLASLFGEMELRRIRSRTKGSHKKLKTTDRWAGGQPPYGYKVVPKPGGGKRLAVDPVSSLVVQEAGRMVLAGMSMWEVADALTAAGHPTPAAYVAAAQEGTDRKEKSKRRKAASTNWEQSSLGKILRSPATMGLKVTGRTVKDRTVARGADGMPVRMADPLFSDDDWGGIQARLTERSRTKERNHGAAPLLGIVYCAGCQSRLYRVVNTATLKNGETRTYEYYRCIKDASKPRCAGHTFKADELHRWIDSYVETDLAEVPEVTRRFVPGEDHTKELERVITNLKEVREEKDLGLYDYDGGDAEYRERLVALTGQRRALEALPHRADEWIEEPTGRSYAEVYGGMTDPAQRRALLLTDGVRLYCGPNYRHVQADDLQGRMHRHGSANAVPLAVHGPAGPLPWEAGYVEPFDPESELAPIDPEDPPIEPKSLTDLNRGDPTGDAVTARQNAGRSK

SEQ ID NO: 13610 - protein, 400 aa, synthetic construct
MKKVTKIAQNNDNYTEHSKLRVAAYCRVSTDSDDQLVSLETQIKHYESYINANPDWEFAGLYYDEGITGTKKEKRPELLRMIADCENKQIDFIITKSISRFARNTTDCLELVRKLLDLGIFIYFEKENINTGSMESELMLSILSGLAENESVSISENSKWSIKRRFQNGTFKISYPPYGFDTLDGKMVVNKTQADIVRFIFAEILSGKGTHKIADELNRRNIPSKKGGRWTATTIRGMVGNEKYTGDAIFQKTYTDEYFSRHYNYGEQEQYLMKNHHDAIISHEDFEAAQTIINQRGKEKGVVKHHDKYQNRYPFSSKIICGHCGDKFKRRIHSIGRHNIAWCCTNHIADIGKCSMKYIPEQDFEYAFVTMMNKLIFGHQTVLRPLLIALREINSDDSLA

SEQ ID NO: 13611 - protein, 655 aa, synthetic construct
MTAASAYTDDFFDEVEAELAAEPVRASPGAEPGTRAVIYLRVSSTGQVNTDYDPEGNSIPAQRVACLRKAEQLGLTVIDEYVEPGKSATEMTKRVAFQQMLARVRQAKDVDYVIVYKLSRMARNRYDDAVVMADLRKRGTTLISATESVDDTPVGQLMHGILATFNEYQSRESGADIAFKMGQKAKNGGTLGRAPLGYLNVFDRSDFREIRTIAIDPERAELVKLAFELYATGDYTLADLSDELYDRGLRTRATKRHPSKQVSINKLSQMLRDRYYLGVVTYQGEEFEGRHEALIDEDLFGRVQDLLESRSNAKERRITHHHYLKGTLFCGRCAEAGITQQLIVQHTVNSRGSAYTYFFCRNKQNGTCPTPHVNVIRIEDAVEDHYATVRFSPEFIDDVRRHITEALADQEAGARLLKRQLTTQLHGLDAKESNLLDLAADATLPVLKIKQKLREIQTERKHLTERLKTTNDDLSDAARLIEACLTLLAEPQDLYGRCSDEQRRLLNQAIFTKLYVDHDTITGHELAEPIATLQAVHDAHRAASADKPDPGPDETVTSPENSRRATSQSGGGPSLVLLEGLLPGITDAGCSSKPPRVELTGLEPVTPTLPVWCATSCATAPRRDLHRNHTSLARPAVRVLIAALTHRKCPRGACR

SEQ ID NO: 13612 - protein, 559 aa, synthetic construct
MNTAVTTAKQPASRAALYLRVSTGRQAESDLSIPDQRRQGAAFCKARGWEVAAEFVDAGLSGTDDKRPELQRLLDMATSGGAPFDVVVVHSFSRFARDHFALEYHVRRLRKAGVRLVSMTQDLGDDPMSVMVRQVFALFDEYQSKENAKHVLRAMQENARQGFWNGSAAPFGYQVVAAEQRGAKTKKKLAIDPVEAETVRLIFRLVREGDGATGPMGVKAVVVWLNGHGYRTRRAARWGIGPLHKLLTNPVYKGEAHFNRTDSKTRKSKPAAEHVIVPVDPIIDPAIFDAVQAQLKARNPKVAPPRVVTGPILLTGLATCATCGGGMTIRTGKSGRYRYYVCAATAQKGKDACPGRSLPMDRLDEAVTERVGTQLLTPERVADLLRGLMNRQAKRDDDLAGRLTALRGKLTEAEGRLGRLYQAIENGIADPNDVTLKDRVAAVKTERDIAQGAFDRAVTEMRPEARITEDKIASFVATMRDNVLSGDTAFRRAWLRSVIDKVEVDDTEIRIHGRRTVLERLVMGGGAAPAGVPSFVREWRARHDSNVWPPPSEGGALSS

SEQ ID NO: 13613 - protein, 552 aa, synthetic construct
MARPAPATPPDSPNAAPQRAALYMRVSTGRQAESDLSIPDQRRQMTAFCAARGWEVAAEFVDAGLSGTDDNRPQLQRLLDIATAGGAPFDAVVVHSFSRFARDHFALEYHVRSLRKHAVRLVSITQDLGDDPMSVMVRQVFALFDEYQSKENAKHVLRAMQENARQGFWNGAAAPYGYAIVAAEQRGAKTKKKLAIDPVEAEMVRLIFRLIREGDGTSGPMGVKAAASWLNERGHRTRKGARWGIGPLHKLITSTTYKGEHRFNRKVWKTKEEKPESEQVVVPVDPIIDPATFDAVQAQLKSRNPKSTPPRVVTGPILLTGIATCASCGGGMTLRTGKSGRYRYYACATCAQKGKSACKGRSIPMDRLDNAVTERLADQLLTPDHVENLLAGLMDRQTARDADHGQRLTMLRGKLTDAEDRLKRLYQAIENGIADPADPTLKDRVAAIRTERDIAQVAFDRAVAELQPGARITTEKIAACVDVMRANVLDGPIPFRRAYLRALIDNVEVDDTEIRIHGRRTVLERLVMGGGAAPAGVPSFVRKWRTRHDSNV

SEQ ID NO: 13614 - protein, 553 aa, synthetic construct
MAEKEITSVNYARVSDRKQSEQDVSIPTQIEVGERRAAELGARVLRVFTDDAKSAWREKNRPAFDAAIDMACAMEATYFICWDSARFARNKYEAMVNKRLLDDAGVQLVYISSPIDRATDMGWAMDGVMEIFNELQSRRISADTRRSMMRNARLGYWVGGRAPFGYISLPAPDNPKRRKLVPVPAEVDLVREIFAMRAHGQGAFQIAAWLNSRGILRRGAKWSKQTVINELRNEVMIGNIVFGRRGRNSRGVRDRNNWIVVPSHEAIIERPLWDQVQALMDEAADITKADGSPKSTHAFTGILRCGKCGSSMQIETSRGRGGKLYFYYRCRRSMQNRECDPRRIRADLVDDWLSNVILKRVLSRRNVASIVELMEAEAGNWAAEHRKRRAAVLATIGRLQEANDKLYSVLELYGKDAPNLGDMTTRLRQNNAKQKDAEAALAAIDAERPPASSMTSVEIDELTGFLHNLVKDDQNAARTRSFYNSFVDSITLDGEELLVSYNPNRLLAPPKEVVRSKRKWRPELGLLRTMAIRVPLPSELALVRGCPREVRAH

SEQ ID NO: 13615 - protein, 529 aa, synthetic construct
MKIADIYVRVSTDEQADKGYSQRDQEERLRKYCEINNIRVRKVILEDHSAKTFKRPAWTGLLGDLRKHKGHTDLILFTKWDRFSRNAGDAYQMISTLRRLGVEPQAVEQPLDLSIPENKMMLAFYLAAPEVENDRRALNVFHGMRRAKKEGRWMGTAPIGYANKVTENGKKYIAAKDIQGDIMKWAFEELSHSQLNTEQVWKKAKEKGLKCSKNNFWVAIRNPIYCGLIFIPKYKEEESMLVKGQHEPLISETLYYDVQDVLDGRKRILGTKVTADDNIPLRGFLICPKCGRMLTGSASKGRTQYYHYYHCSSACGVRYKAKEANDKMVEEIRKYVWPLSRLETCKDVITSTYKSKERGERDEQKDLKLQLQEVNSRIVKARELLLCGDIEGDDYRAIKSECEEKINRLEAKLKAAVSFQTTVEPLWDKAFSNIAQLDILYKEGTVELKRKIVGSMFPENIVFDGCQHRTKRLNEIINIISLIDRELKPKKNGTSRFNFDLSHMVNPLVRFSNTIIFQFRKIAALKRVA

SEQ ID NO: 13616 - protein, 519 aa, synthetic construct
MKIADLYIRVSTDEQADKGYSQRDQEERLRRYCNINNIQIRKVIFEDHSAKTFRRPAWQNLLVDLRKQRGHSDLILFTKWDRFSRNAGDAYQMISLLRHLGVEPQAVEQPLDLSIPENKMMLAFYLAAPEVENDRRALNVFNGMRRAKKEGRWMGTAPIGYLNRITEDGKKYIAPKDQDAKIMKWAFEEIFRNKLNTEQVWKQAREKGLKCSKNNFWVAIRNPIYCGLIFVPQHKDEQSQLVPGQHEPIITTTLFFDVQDVLDGRKRKAVSKKVVSQDDIPLRGYLICPNCGRFLTGSGSKGRKKYYHYYHCSSECGVRYKADDANNLMIDAIGEEVRNVPQLKLFREIIAATYMDVNRVEKTDQKRMMSQLDQIKHRLSKARELLLREEIEGEDYRTIKTEASERIADIEAKLKASNSFSDSMELLWDLPISKVSHLDILFQNGTVIQKRKIVSTMFPDNLIYDGVKLHRTRVSAAISLLTTRRKCPQEAVANSNQTYRAESVHLNRKHAVTALRNRM

SEQ ID NO: 13617 - protein, 522 aa, synthetic construct
MKVADLYIRVSTDEQADKGYSQRDQEERLKRYCEVNSIQVRHIIFEDYSAKTFNRPAWKKFLLDLKSRKTHPHFVLFTKWDRFSRNTGDAYQMINTLRKFGVDPQAIEQPLDMTIPESKMMLAVYLAAPEVENDRRALNVFHGMRRAKKEGRWMATAPKGYVNKTTEDGKKYITPKEPEATILKWVFEEISQAQLAIDQIRQEANRKGLKIGRAQFWDLIHNPIYCGKIYIPPYRNEEGSFAQGLHDPIISERLFFEVQNLINGRKRKSGFTKIKARDSFPLRGYLLCPDCHRSLTASTSSGRSKKYSYYHCLTPCKCRFHADTTNEKFHQHLTSFVPCGDFTDLLELAIAQSYQLQHAQRFASRKATLTQLDAVNLRLRHARELLADQKIEPDDFRELKADCQQKIELLEAQLESNPVTHNNSSTLLKKAIKTLTQIDSLYQNGTVEEKRQIIGSIFPEKLVFDGNSFRTARLNEVVRLIFKLGTGFSETKNRTTLKNFELSGEEVPSRFELLYELLQSSA

SEQ ID NO: 13618 - protein, 454 aa, synthetic construct
MEEKKRVGIWVRVSTEFQVKEDSPEHHEQRARYYAEAKGWEVIEVYRLEAISGKTVMELPETQKMLRDIQTGRITALVFSKLARLARNTKELLEFSELFRKSNADMISLAENIDTSSPSGRLFFTIIAAMAEWERAEIADRVAASVPIRAKMGKPLGGQASFGYTWNGKELVINDKEAPIRKLLYELFAEHKRKKTVAAKLNGMGYRTRNGSNFTNTTIGRLLRDSTAKGIRIANYTKSLGDGKKWVIKPESEWITITCPAIVTEDLWDECNRILDQQETKKKPTKKTVHLFTGILLCECGHKMLVPSDGKKYICNGCRKNRIAKEDIEEIYYENLKSFLLKDSDIEKFLSKADSAIAEKESHIKTLNQEKKRLEIEMEKTMQLYLAGQIPKDSFGKYYNPLDEQLKQIVATIPTIQAEVDFMKIEYLNSDTIISEAQSLYDRWKIGRASCRER

SEQ ID NO: 13619 - protein, 558 aa, synthetic construct
MSTLIARAESTEPALRAALYLRVSTGRQAENDLSIPDQRRQARAYCEARGWSIAAEFVEPGASGMDDRRPELQRLLDIGTAGGAPFDVVIVHSFSRFARDHFALEYHIRRLKKHGIRLVSVTQDLGEDPMSVMVRQVFALFDEYQSKENAKHTLRAMQENARQGFWNGSKAPYGYAVIAAEQRGAKTKKRLTVDVVEAEVVRTIFRLFREGDGTTGPLGVKGVVNWLNEHGYRTRKGARWGIGPLYLILTRSTYRGMHRFNRKYWKTKTAKPEDEIVDVPVEPIIDEAEFDQVQRMLKARNPKNVAPRVVTGPILLTGLAACGHCGGAMTIRTGKSGRYRYYTCGTCARQGKTACPGRSVPMDRLDELVTHQIATQLLTTERVTSIMSGLARRQSAREGEQRGRIDSLRKTHNDAENRLGRLYAAIENGVADPADETLKARIATVRAERDSAKAALDRALAELTPELRITDEKIAAFLNVMRKNVANGDIAFRRAYLRSVIDRVEVGEDEVRIIGRNATMERLVLESGPEPSSVPSLVREWRTRRDSNSRPLPSEGSA

SEQ ID NO: 13620 - protein, 536 aa, synthetic construct
MKRAAIYARYSSDLQTDRSIEDQIALCSDYAAKQGLRVVAVFDDKARSGASIMGRDGILSLMDAARDKAFDVVVVEALDRISRDQEDLAGIYKRLTHVGVEIRAVHEGRADIVQIGIRGLVGALFLQDLAHKVRRGMSGVVREGRSAGGRAYGYAPVPGRPGELVIVPDEAAIVLRIFEEYAAGRTPRDIAGDLNAENLAPPRGGYWQASTINGSRQRANGILQNPIYDGRIIWNRIRMMKDPDTGKRISRVNPSSEWQEQAVPDLRIVPGELFAAAAARRTRSSFQKPLVRQHRVLSGLLRCGACGSGMSIKDKMGRVTRIMCTRAKESKACSNSRPYVLDEIEATVISGLRDNLKNRELIEYYVAVYNEEHRRLYSGQGAEREKAAQRLGAAQREYDRVLNLVIKGVISEDEAAAKLPELRAERAKLEGILSTIHEAPKVVSLRPALVNRYLCSLEMLEAAVASADDLADEIKQHVRDLVTTVTVQPTASGQKPVIKVDGLLSKMVGFEDAPHTAIRGGRVVAGEGLEPPTPGL

SEQ ID NO: 13621 - protein, 551 aa, synthetic construct
MKLLNRTTSDAKNTDSMRAALYLRVSTGRQAENDLSIPDQRRQAQEFCRARGWQVVIEFVDAGLSGTDDRRPELQRLLDLAAGGDSPFDVVVVHSFSRFARDHFALEYHVRRLRKNGVKLVSITQDLGDDPMSVMVRQVFALFDEYQSKENAKHVLRAMQENARQGFWNGAAAPYGYAIVAAEQRGAKTKKRLAIDAVEAEVVRLMFRLVHEGNGTSGPLGVKALACYLNERGYRTRRGARWGIGPLHALLTSPTYKGEYRFNRKVWKTKEDKPEGDQIMVAVDPIINAALFDAVQARLKSRNPKQTPPRVVTGPILLTGLATCASCGGGMTLRTGKSGRYRYYTCATCAQQGKSACPGRSIPMDKLDQIVTDQLNASLFTPERVRAILGGLMARQASRSEDHTHRLTALQNKVADCESRLSRLYQAIENGIADASDPTLKDRLAALKAERDQAKAAKYRAFAELQPETRITEEKISAFAALMRENVANGAIPFRRAFLRSVIDQVEVDDTEIRIHGRRDVLERLVMGNGATPAGVPSFVRKWRARKDSNL

SEQ ID NO: 13622 - protein, 497 aa, synthetic construct
MARVLGRLRISRSTEESTSIDRQREHVQNWARLHEHDVVGWAVDENVSGSVDPFKTPGLGPWLTPDRLHEWDVLVAWKLDRVARRVVPLNTLFGFLQDNGKSLACTDEKIDLSHWVGRLIANVIAGFAEGELETIKERSADSRTKLRRVGRWHGGTVPLGYQKVRLDSGGFGLALDPQTAPIVQEIAARAERRESIRSIADRLNERGVSAPRGGLWTAQTVTRMLRSRWIIGEIEYNGRPVLGDDGLPVRRSLSEPLISPERWEAIQAVLDDRKRPKQRRNEPGLLLNVGVCGDCGDALYHTVMTKRDKGTEKERTYRYWRCSAKSKKKIRDGQPVCTTRYAISAGMLEQAVEEMFLAEIGDVERTEEVYVPAEGHGDEIAVIDRAISMARREYDSGAYEGDDDGYLDRLTTLRANRERLAAVPSLPARWVRQPTGETYREAWSRMDVRERRDLMIDAEIVVRARMVSPSVPEIGFHVDHARLRAAVPGFEPPTLVS

SEQ ID NO: 13623 - protein, 534 aa, synthetic construct
MRTLIYARYSTSLQNSRSIEQQIGVCRDRASREGWPVIEVFTDYAIGGGAGTSEAQRPGLAAMLARVEQGDIDQVLIDTTSRLARNQGDAHHLRERLNFHGARLFTLGDGEIDSFKGAIKGLLDEQQRVELRHNIKRGQAGTVRQGRSPAGLAYGYRLANRIDEGGRAVRGLREVDEDQAAIVRRIFTEYAAGRSPVAIARQLNAEGVPGPRGNSWRASTIRPDRTRGNGMLSNRLYIGELVHNRTSKVIEPVTRTTRIRPNPESAWIIESVPQLRIIDEALWEAVQGELERNRIAKPVYARRPRHILSGLGQCGTCGGAWNISTGRFWSCGARRDGGTCTNNRTISTESYERHALAALQEQLLDPEVVSAYVREYHGEFARRARQGRQRKAALERQLQAATAKVERLVAAVADGGGEFAEIRDALRTARLERDRLAAQLAEIDAFRVIALHPAIAEEYRRQVQDLRTALAQPFAREAAIPVLRDLIERIILSPKPIGRGVDVEVRVRLAAVVELATGEQPHQHEAKAATPNRG

SEQ ID NO: 13624 - protein, 447 aa, synthetic construct
MQRKIRKIAPLMAKAPVKKRVAAYARVSSGKDAMIHSLSSQISYYSEYIQKHAGWEYIGVYADEAVTGTKDGREEFQRLLADCRNGRIDMVITKSISRFARNTVTMLEVVRELKSLEIDVFFEKENIHSMSGDGELMLTILASFAQEESRSVSENCKWRIRNKFKEGLPFSFSIIGYDLKNGKLEIIPNEAEIVKMIFNDYLSGMGKNVIMKKLNAMGVKTKKGNQWEEKAVDRILRNEKYTGDLLLQKVFRSNHIEKQKRTNEGQLPMYYVRDNHEAIIDRKTFELVQQKLKENAKRFYNTNQVFGVYPFTSRIICGICKQHYRRKVNNAGTKYAKPVWICPTYNRMGKAVCPSRQIPENILCTLSAEVMGVEEFDEVTFESVIKEIRVIEASSVDFVFQDGQIVKKEWQNKSRSESWDEEKRNKAREHHLKLMERRNEQCQQQER

SEQ ID NO: 13625 - protein, 529 aa, synthetic construct
MSTARAVTIIPATAERFAPMQTGVIARKRVAAYARVSTENEEQLNSYEAQVDYYTRHIKSNPEWEYVEVYSDEGISATSTKKREGFNRMVSDALEGKIDLIITKSVSRFARNTVDTLTIVRQLKEKGVEVYFEKENIYTLDSKGELLITIMSSLAQEESRSISENVTWGHRKRFADGKLMIPYGRFLGYEKGEDGFPKIVEKEAVVVRLIYKLFLEGKTIPGIARYLTNNKIPTPSGKEVWQASTILSILQNEKYKGDAMLQKSFTVDFLTKKKKANEGEVPQYYVENSHPAIVSPEVFDLVQHELGKCKGVKGYKTGGNCFSGRIVCGECGSFYGSKVWHSTSKYRRIIWQCNYKFKNEEKCKTPHLYEDDLKAAFVKAFNGLIENKDEILKDYEAIIKTLTDTSKLDKESAKLQNECEVVAELIRKCIEENASKVMNQKEYQKRYTGLVKRYEEIKKAISEIDYKRQERNAKKENIKAFIKMLEKNEALLAEFDEELWNAMIEKVKVYQEQKLVFIFKDGLELEWNM

SEQ ID NO: 13626 - protein, 529 aa, synthetic construct
MSTARAVTVIPATAGRYAPIQTGAVARKRVAAYARVSTDNDEQLTSYEAQVDHYTRHIKSNPAWEFINVYSDEGISATSTKKRDGFNRMIADALEGRIDLIITKSVSRFARNTVDTLTIVRQLKEKGVEVYFEKENIFTLDSKGELLITIMSSLAQEESRSISENVTWGHRKRFADGKLMLPYGRFLGYEKGEDGLPKIVEKEAFIVRLIYKRFLEGKTIPGIARELTDRGIPTPSNKEVWQPSTVLSILQNEKYKGHAMLQKSFTVDFLTKKKKANEGEVPQYYVENSHPAIISPEVFDLVQHELKKRKGVKGYKTGGGCFSGRIVCDECGSFYGSKVWHSTSKYRRTIWQCNNKFKNKERCQTPHLYEDKIKEAFLEAFNSLIENRDELLQGYREIINALTDTVGLDREYEKFQSESEVVVEMLRKCVDENANSALDQQEYTQRYNALVQRYESAKHGLENINNKRLERSAKSESIEMFMQRLEQNDKLLVGFDEDTWNAVIEKVVVKSEHEMTFIFKDGLEVEGSM

SEQ ID NO: 13627 - protein, 508 aa, synthetic construct
MKKAIAYMRFSSPGQMSGDSLNRQRRLIAEWLKVNSDYYLDTITYEDLGLSAFKGKHAQSGAFSEFLDAIEHGYILPGTTLLVESLDRLSREKVGEAIERLKLILNHGIDVITLCDNTVYNIDSLNEPYSLIKAILIAQRANEESEIKSSRVKLSWKKKRQDALESGTIMTASCPRWLSLDDKRTAFVPDPDRVKTIELIFKLRMERRSLNAIAKYLNDHAVKNFSGKESAWGPSVIEKLLANKALIGICVPSYRARGKGISEIAGYYPRVISDDLFYAVQEIRLAPFGISNSSKNPMLINLLRTVMKCEACGNTMIVHAVSGSLHGYYVCPMRRLHRCDRPSIKRDLVDYNIINELLFNCSKIQPVENKKDANETLELKIIELQMKINNLIVALSVAPEVTVIAEKIRLLDKELRRASVSLKTLKSKGVNSFSDFYAIDLTSKNGRELCRTLAYKTFEKIIINTDNKTCDIYFMNGIVFKHYPLMKVISAQQAISALKYMVDGEVYF

SEQ ID NO: 13628 - protein, 578 aa, synthetic construct
MAYAKIKAAADAGKIVALYVRVSTGYQIDKDSLPFQKKELKAYCKHVLHIDESRIEVFEDAGKSAKNTDRPAFQRMINKVKAGQVSHVIVYKLDRISRDLVDFSIMWKEFKAARVTFISLNEQFDTSSAIGEAVLKIILVFAELERKLTSERVKDIMIGRAHEGKWNGARMPYGWKWNSETQFPEHNPEEIQAARLIYSMYEKTKSSSKVRDYLNGNDIPTKRGGEWTTKTISDYIRNPMNKGDYRYNYRESPHGKKKPEEEVVYLEGVFPPLVDPDQWNRCNAIMDHNAERLRNAGAAHNQKHIHPFAGLIVCGACGYYFQSMKPDRPRANGFRPSLYRCSGRVTKRSCTAPGASEVKIGPVVFNFISHIVAATKKRQDIKTPEELESLLLSGPEFAPIAYIEESSLREIFDALQGRTRSKDGLYLPEPLSRQTTPDPGSMEAKRAEAAKIGRALERLKKLFLFDDSAMNEKEYLSTRAELTEQLTRLNNEIRDAEEASFGRVEELNFVSSASSFLLSYSIQSGEHIQYNEFAAAVDDQVLKDFLNLIIDHIVVSEAHVTEIHFKSGLHAKFIYKSA

SEQ ID NO: 13629 - protein, 454 aa, synthetic construct
MVTKTAAIYIRVSTDFQAEEGYSIEAQKEQLSAYCISKGIKKYEYYIDGGWSGSNIDRPEIQRLIKNIKDDKVSHVIVYKLDRLSRSQKDTLYLIEDVFNPHGVDFVSLNESMDTSTPMGRLMLGILSAFAQLERENIRLRTRMGMKERVKTGLWMGGGRVPFGYDYNKEKGILEPNKDAEKVRQIYKLYIEGKSAQDIANLLGLKYDRLVYQILTRKSNYGIIEYNGEEYKGQHEPIISKEIYDIAMRCMLDRKIVKANTSEHLLTGLVYCAKCGAKMRYQKWGNKGDKLVCYSQQKSKPYLVKDPDCDQEKIWADEVEDLVIKSIFEFANNYKPSETESLSPNDTTSLLYEQQDTLNKKLKRLYNIYAEDGDEVLLDTINELKKQINIVNKQIELDTQNSIIIARRKERTEILSTVSELWNSMNVSKKKVIIRKLVNKIEINNNNVHIDFTL

SEQ ID NO: 13630 - protein, 521 aa, synthetic construct
MGNVMVIPAKRQIGNTGRKQDAKPKLRVAAYCRVSTDSDEQATSYEAQVEHYTEYIKKNPEWEFAGIYADDGISGTNTKNREEFNRMINDCEAGTIDMIITKSISRFARNTLDCLKYIRQLKEKNIPVFFEKESINTMDAKGEVLLTIMASLAQQESQSLSQNVKLGLQFRYQNGQVQINHNRFLGYTKDENGNLVIDPEQAEIVKRIYREYLEGYSMDKIAAGLEADGILTGAGKTKWHTSTINKILRNEKYIGDALLQKTYTTDFLNKTRVKNTGIVPQYYVEGNHEAIIPKDIYMRVQEELVRRRAVKTSANGKKRSYSCNHCFSQIIICGDCGEMFRRIHWNNHGCKSVVWRCISRLESTGLECHARTINELDLQEIVVAALNELLGDKSKYQQQLQQNIATVIRTSAASSVDGIDEKLMELQQELVKKANSKEAYDEIAEQIFELREQRQQAAMDTVQRDEQISRITDLQDFIKAQTSDLTEFDEALVKRWLKQITVWPDHCTVELKSGVSVDIDR

SEQ ID NO: 13631 - protein, 585 aa, synthetic construct
MAYAKLQKSGLLPDPAANMQIVALYVRVSTGYQVERDSLPFQKKELLNYCKHVLHIPPDRIEIFEDAGRSGKNTKRPAYERMMKKVREGLVSHVIVYKIDRITRNLVDFSLMYDDFKYTRVAFISLCEQFDTSSAIGEAVLKIILVFAELERKMTSERVKDIMINRAHEGKWNGARVPYGWEWDTENQFPKHHEVEAVFGRLMYDMYKDTHSTCKVRDYNNAHDVPTKRGGEWTSKTVADFIRNPMNRGDLRYNYRESARGRKKPENEVVYLEGVFPPLVDPVLWDECNEIMDANNRRKFSNSFFTIRSNCNIFSGLLICGECGANFQVTKKDRRRKNGFQPSLYACGAKHQKRSCAAAGCSDVTLGPFVLNYIAAMVQSTNERSNIHTPEELESLLLSRPEFAHIAGIASEGLNNTFAMLSGRPAAAGGSYSPSLFSSSAPSASAADIEELKQKLARITRAQERLKNVYLFDDNAMSEKEYLETKTTLDLSRIETENLIQDLLSGTCCSEDDDTEFLKSASSFLLAHEIQSGQHIKYSNFAACVEEEVLKGFVNLVIDHIVIAGGRPIELVFKNGLSHKFLYRD

SEQ ID NO: 13632 - protein, 530 aa, synthetic construct
MNTTHNTEQTRAVIYARYSSHGQQEQSIDGQLRDCYAFAERQGYMIIGEYIDRALTGRNDDRPDFQRMLADARKKQFQHIIVWKLDRFARNRYDSAVHKAELKKCGVRVVSATENITDEPEGIMLEGLLESLAEYYSANLSKHVKRGMRECVLAGHYTGGIPPYGFKVEDKKLVADENTAPVIRYVFEQYAKGVPKKEIFVELNEKGITNAQGKPFTLSSLQNNLRNPKYIGKFVYAGETVEGCCEALVSEEVFNAVQKRLDSAKHAPAAGKAHQDYLLQGKAFCGNCGAPLVGESGKNRHGNYYHYYACANKKKLHTCPKKNERKGFLEWYVVEQTVEYVLTPERIDYIAARIVAKYDEEFSGKRIKELERQARKLESEINAAVDASLVALEKVRPRYYEKIETLETQKADIEMNLATLKIANGYKYSKEQIVAWLKMFCNGDKLNVDFQKRIIDVLVNSVYVYDDKVVIYYNVEGGKQVSYIEMCDSIEDSEPFDAQGKEKGGVRISNAPPRQHMYNRRWDISSVSRQ

SEQ ID NO: 13633 - protein, 516 aa, synthetic construct
MKYAMYLRKSRADLDAEAHGEGETLARHKKMLYDLAGKMGLVVDDVYEEVVSGDSIEGRPQIQNLLRAIEGRAYTGVFCMDIDRLARGDTIDQGIIARAFRISETKIITPKKVYDPNSEFDEEYFEFELFMARREFKIIGRRIQRGRIESAKEGRFIGSAAPYGYDKVKIKGDKGYTLEPNLAEAKVVQLIYEMYLKGDGKMVIAKKLDLMGIKPRSGKPWSSSTVVNILKNPVYIGKVRWGYRKYTKELTDGSVIKHREKNENCVYVDGLHPPIVSEDDFNRVQQTLKQRTNAPVKSDLSLKNPLSGLIYCGKCGAAMTRLGENSRCRSATIKCSNRYCDTVASKLHIVEGAVIDFLDGWIEEYKVNVERNSPLLPESTIEVYKNNLSDLREELDTIKKQIDKTYDLLEQGIYTVDIFKERSANLTAKRGEVEQKITEAECEIERYRTNLEIRENFIPYFENVLAIYRVSSDVTEKNRLLKTIVSRITYTKDVRNTRRDPDAASFNLRILPSVTE

SEQ ID NO: 13634 - protein, 523 aa, synthetic construct
MAKVTTIPATISRFTATPINEKKKRRTAAYARVSTDSEEQLTSYSAQVDYYTNYIKSRDDWEFVSVYTDEGITGTNTKHREGFKRMVADALAGKIDLIVTKSVSRFARNTVDSLTTVRQLKEKGVEIYFEKENIWTLDSKGELLITIMSSLAQEESRSISENCTWGQRKRFADGKVTLPFKRFLGYDRGPDGNLVLNKDEAVIIRRIYSMFLQGMTPHGIAARLTADGIKSPGGKDKWNAGAVRSILTNEKYKGDALLQKSYTVDFLTKKKKVNEGEIPQYYVEGNHEAIIQPEVFELVQQELERRKSSRGRHSGVHLFSGKIRCGQCGEWYGSKVWHSNSKYRRVIWQCNHKYDGEEKCSTPHLTEDEIKAMFVSAANKLIGKKASIISPLRASLDVAFDISALEAETAELQDEIMVVSDLIEKCIYENAHVALDQTEYQKRYDSLTARFDTAKARLEEIEAAIADKKSRRAAIEAFLDTLAQADLMEKFDPALWCGLVDFVTVYDRNDVRFTFKDGREVKA

SEQ ID NO: 13635 - protein, 588 aa, synthetic construct
MRIVNKIEAKTPQMPRRKRVAAYARVSMESERLQHSLSAQVSFYSSLIQSNPAWEYVGVYADNGITGTKAEAREEFNRMIANCEAGKIDIVLTKSISRFARNTVDLLNTVRRLKELSVSVQFEKERIDSLTEDGELMLTLLASFAQEEIRSLSDNVKWGTRKRFEKGIPNGRFQIYGYRWEDDHLVIHEEEAKIVRLIYDNYLNGLSAETTEKQLAEMGVKSYKGQHFGNSSIRQILGNITYTGNLLFQKEYVADPISKKSKINRGELPQYFVENTHEAIIPMEVYQAVQAEKARRRELGALANWSINTSCFTSKIKCGRCGKSYQRSNRKGRKDPDANYTIWICGTRRKTGNAQCQNKDIPEQMLKEACAEVMGLDKFDEIIFSEQVDRIEIPAPNEMVFYFKDGRIVPRHWESTMRKDCWTDERRAAKGRYVQEHQLGPNSSCFTSRIRCDSCGENYRRQRSRHKDGSFDSVWRCASSGKCQSPSIKEEVLKKLCAEAMGLESFDEMAFREQIACIHIMAPFQLSIRFFDGHVFEAGWENKRKMPGHTEQRKQHMREVMIQRWREKRGESNDDTGNDKPIHGNADQ

SEQ ID NO: 13636 - protein, 604 aa, synthetic construct
MVRLLRNRGSNTESNGEERLRNRAFLYGGGTMAYAKLKQTNLRVAIYVRVSTLHQVDKDSLPMQKQDLLAYAKLMLGTEDCVIFEDAGYSGKNTDRPKFQEMMSQIRAGGFTHLLVWKIDRISRNLLDFATMYNELKDLGVIFVSKNEQFDTSTAMGEAMLKIILVFAELERNMTSERVTATMISRANNGQWNGGRIPYGYDYDYDTHDFTPSETEAPIVQLIHDLYEKERSLVRESRILNSKGYRTRAGNEWNPVSLHIILHNIFYCGDYRYNVLKEGDRQKVKDESEWITIEEHHPPIITREQKQRVITMLDANSRINKKKNNYKSGKYTHIFSGLCFCGNCGCPMGAAPASLRADGWRYSKYSCPTRRKNAYTCTGKSTSDPIVGEFAMNYILNMLNAQRSFENISSPDDLQAILLTGNTFSYIDSIEPDGVLDLYDILTSGKVQGAVFGKGANIKPKDGEDSEIASLRAEKQKTERALDRLRNLYLYSEDAMSEKEYIIQRTTLTEKLDEINDEIGMMQSDEWQQSVSDEMFIAKASEFIISQKLTDRNYINYKRLAQSVDAEVLRNFLTSIIDSIIVTDGMVQRITFKNGLSHSFIFKQ

SEQ ID NO: 13637 - protein, 534 aa, synthetic construct
MDEKRIRVIPATNSRRLLVDDDSPVITRKKRVAAYARVSTGREEQQTSFKSQLEYYTRLILSNPDWEMVGVYADEGISGRSMKKRAKFREMIKDALDGNIDMILVKSVSRFARNVLDSLTIIEQLREKRIPVVFEKEKLNSLQDDKRTNFMLTMYASIAQEESDSLSDSVNWGIQRRNEQGFVRKAKTYGYDVLNHEYVVNKEQAEVVRLIFELYISGLSYRLISDELQRRNIKSPLGLDRWDESTIEGMLQNEKYIGDALLQKTIVRPWVQKKRSASADSQQYYVEDDHEAIVSDEMFERVKREMEYRRSLRSCTKSGRGGYSSKYPLSSKVYCYQCGCIFRRHGYFSGEKYVKTWTCSNHKLNGNTACTQLAVKEDELFASFVRVANMLIEDKEGMVKKITESIQETLSERLSDQASDELAKKIAAKEKLLVKAVKNAQTADDLISGERERELLINEIESLKQEQKKRSLQVVDLEHTNERFQALWGMVEDKGNLTGFDGDMFRKIVNRVTVDGKELTYDFGCGITITDSIE

SEQ ID NO: 13638 - protein, 510 aa, synthetic construct
MNEVKLRTVAYCRVSKNYGQEVSLESQVRYFNEVMDKDPLMVNCGCYIDNGISGRFIGARKDFKRMMQDAELHKIDYILCKSIKRFGRCTLDTIRAVTRLTELNIPVFFEQENLNTIKDRNNILLVTMAQIAQEEYEEKSEAIKWTFKKRFEQGQLIVNPNTPLGYKFNEDGHLVVVPEEAKIVKRIYESYAKGIGSTEIARRLNKDGYRTAHGRQYLPSTILYIIKNEKYKGDAMLQKYVVADGKKIKNMGEAQQYYVENDHEAIVSRELWDTCQRLIERHKTSEYVRAENREFDPFKGKIVCGKCGHNYKRIKRSDKKTRYGCYLKSSKGMNACRSESIKLETLERVFVETFNLIHGKRKSLMEMQVTDEVRELNNEITRMLNQERTYLQLQARDLLHGEIEEEYRKLLNRIVRAEEQKKVMLETNGQNVKAQNDLRVYNSAVMRTAKLTEFDEKVFEQIVRQIVVVDREHFAFHLTSGEVANVSIIYWATSEDEIQSIDIKAVTEVC

SEQ ID NO: 13639 - protein, 519 aa, synthetic construct
MKKVTKIDKIQPSKVAKKKLRVAAYCRVSTDSDAQLESLETQKTHYENYINSRDDWEFAGLYFDEGITGTKADKRPKLMRLIDDCKAKKVDFVITKSISRFSRNTTDCLDIVRTLLNLNIPVYFEKENINTGSMESELFLSILSGVAEGESTSISENNKWGIKKRFENGTYKLGYVPYGYRWENGEIIVDPEQAVIVKRIFSELLAGKGTDAIAKSLNTENVPTKKGGRWTSSSIRGILANEKYTGDCIFQKTYTDSNFNRHKNDGQLDQYYVADHHEAIISHEDFDAAAALIEQRANEKGIKRGSNKYQQRYAFSGKIICSECGDTFRRRIHTSIYVKYPAWVCNTHLTDTSKCSMLYLKDDDIKLAFATMINKLIYCHKLVLKPYLESLQANTSDKALLRIQQLETLLEQNAEQRETLHKLMAQGYIDQILFTQENNALLTQANDFRSDIEALNRSVTGDTSKVYETERLIHFCERGEMLLEYSEDLFELFVDHIEVYSRQSIGFVLHCGLTFKERI

SEQ ID NO: 13640 - protein, 519 aa, synthetic construct
MTVTLLPARKKACSVKNDEENPKLRVAAYCRVSTDSDEQETSYDAQITHYTAYINGHPDWELAGIYADDGISGTNTKKREEFNRMIEDCMAGKIDKVITKSISRFARNTVDCLNYIRQLKDKNIPVYFEKENIDSMDSKGEIMLTIMASLAQQESQSLSQNVKLGLQYRYQQGEIQINCARFLGYTKNENKKLIIVPEEAEVVKRIYREYLEGASMLKIARGLEADGILNGAGRKKWHTSNINQILRNEKYIGDALLQKTYTTDFLTKKRVKNHGIVPQYYVENSHEAIIPREIFMQVQEELIRRRIVHTSPNGKKRTFSSTHCFSNMIICGGCGEFFRRIHWNNRGKKSIVWRCISRLENTGQFCNARTVPEGTIEQVLVNAINQTLCDKDSFLSVLKNNIETVISHENDTKLAGIDKRLEELQTELVKLANSKADYDKVGEEIYRLRDEKQKVQLEVIGRDELKKHIDDMSEFLKGQPTAITEYDESLVRRLVEKITVYEDKFTVEFKSGVTADVRE

SEQ ID NO: 13641 - protein, 519 aa, synthetic construct
MQLKAAIYGRVSTDRQSELSIEAQIEACERYCEQQGWDIYDHYCDFGLSATSADKRPALQRMIRDAKAQCFNVVVAHKVDRAFRNMRDYENVKYELQKHDVFMAFTDSGPVEGVQGEFFTGLMALMAQQYSMNLSREVKKTMRKNVEQGNFLGGLPPLGYKIVDRKYTVDPETAPIVQEIFRQYAKGQSMREVADYLNSKGYRTSRGGPYQVTTLHGILKNEKYIGIYVHNRNQYNRFGKRKGKKSNDDTEVIRVEGMIPAIIDIKTWKEVQARMEKNRTLGRGKSRNKRMYLLSGLISCGECGSAYAGQPTKNSRGYETVYYTCGGRKRKNGCTNKPIKRDWIEEKVIDSVALMCQALDAEKLKEDANKIIREMKRNQDQERERHEALLAQKRREETNIVGSIARMGGNKALEERLLETQKEIENLEDYLERLAPRTIPEYKADAIAEAMQHVLNDLRTGPPEARKKALQSVVEGVEVFKDRVVVKIKAGLDETSFFRSGVADHLVAEAGFEPATSGL

SEQ ID NO: 13642 - protein, 628 aa, synthetic construct
MKAAFLIRCSTKNQDLNRQTRDLTRLAKSMGYEYDLENLVYGEKITGKDDVTKKNRDSIDRLLRAAKEQRFDVVLVSEVSRMSRDPASGRIYVRLLINMNIPVYFKDIDLWTINPETGKKVRDAELVIGAAFDAAWKYLKSMKTQIASARRNELDNNRISIGQPYFGYKRYEGTDKSKKNQIVVNEEEAEVVQAVYNEYLKEGATLKSTALAITDKYGEKLNRKFSLGTIEHILTYESYATGIKKVNLKDPDTDEVEVFDVNTPIIIDKELYEAAANKRKNNRVKDEPYPNQQVYLLSKLIKCPDCGYTLTPRRKAGEFGQTYRLVNGKPAVSWLCMSGINNITDCTNRTSIANEKLEPIIWELVKKELIGYANMNDEKREEQIRECEEKIEYQNYSIQNFTKEIDKLKKRLSTAYQFSINAAEMAGDDEDMRTMAMEEFNRTAKGVRQEMKNFEKSIEQAKGELEKLRDLKTFYSQPTLPKDYLEQIEGNFTEKRNLVKQLITKIVPYRITTFKKKERESGVKTCNKMITVKNGAVLLEVYTIGGVYNVFYNANSKFQVKTAYYVHGEYATFQNGIRKFPAYDEGEYFVISNANMVMETDDIDEVVTVNEFVDIAIANNWVIEYQYI

SEQ ID NO: 13643 - protein, 576 aa, synthetic construct
MKKNFKMPGSGSETPIRVAIYVRVSTVYQIDKDSLPMMKQDLTSYCKYILNTDDFVIFEDAGYSGKNTDRPAYQKMMSQIRQGLFTHLLVWKIDRISRNLLDFANMYAELKDLGVTFVSKNEQFDTSTAIGEAMLKIILVFAELERNMTSERVTATMINRASNGVWNGGRIPFGYSYDKPTQVFSIDPEENKIYNFMVETYEDTQSIVHTSRRLNEAGYRSRNGNMWSPVAVWTILRNPWYKGVYRYNYYKIPGRKAIKDESEWVIVENHHPASIDPDRFDRIQATLDKNARYRNTPGRKTAQKNVHVFSGLVWCAECGSAFTASPGKLHVSGYRPSKYGCPNVRKMKTCHAKYTSDVVLGEFLLNYILNILNAQKQFAYIHSTDDLQKRLLHGSTFSNVDHVDPDGLASLLNMLEKCSGSDPVLLKRPRSKPKMDPELKRMMADQKKQQRALDRLNDLYLYSDDSISEREYLVRKQQITDRLQEINEAIGMMSQEPWMRTMNDEEFIRQASSFILTQKLADKQYIYYESLAESLDPEILKNFFVSILDSIILRDGRPETVVFRNGLSHTFTYKDS

SEQ ID NO: 13644 - protein, 543 aa, synthetic construct
MENTFMDFTEMIRVDCLYRVSTDKQVDYNDKSQADIPMQRRECHRFCEKMGWTIVHEEQEDGVSGHKVRAENRDKLQIIKERAKQGKFDILLVFMFDRIGRIADETPFVVEWFVKNGIRVWSTQEGEQRFDNHTDKLTNYIRFWQADGESEKTSIRTKTALGQLVEDGGFKGGFAPYGYDLVKSGRFNKRKHEVFELAVNADEASVVRIIYDKYVQEGFGAQRIATYLNNLGYRARTGKMWHHATVRGILCNLTYTGVLRSGESRSEILPHLQIIEPELFDVAQRIRTARVNAIEQENHVPLNTRGQYLLAGNVFCGHCGSRLSLTTNGKAYPCKDDPSRVVKRVRYICYGKTRKQTECDGQTGYTAHILNDIIDKVVRQIFERMKAVPKSEVVGVRYREKMEERKALLRSVKADYTKAAAELEALKSEVVKAIKGESSFSKELLASLISDTERKCQELQAALEQAQSEYDAGEATLQSLNSQYDDMISWAEMYDSASVESKKMIVSCLIRRVDVYRGYRVHIDFNIDFKQFSLGLDIAEIAA

SEQ ID NO: 13645 - protein, 581 aa, synthetic construct
MSRTTNKRPGKAKSGLSRKQKVAIYIRVSTLYQVDRDSLPMQRKDLIAYASLILGIEEYEIFEDAGYSGKNTDRPAFQEMMQRIRKGEFTHVLVWKIDRISRNLLDFAEMYEELQDLRVTFVSKNEQFDTSTAIGEAMLKIILVFAELERNMTSERVTATMISRANSGLWNGGRIPFGYDYDPDKTAFSIREDEEKVCQMIKNDYMEHKSLVHTSRMLNASGYKTRAGAEWSPTAVWIIISSPFYAGIYRYNRYKGTERRVENPEDEWIMIQNHHPAIFSLEEHEKMLAILDENSRNRRSVGQRHQTERVHIFGGIAYCGKCGSKMVSTPGRLHVNGYRPTNYSCPKHRKTKECDNPTVSDTQVGEFVINYILNMLGAKKKFSAIENPEDLERCLLYGNTFSEVEHIDSNGLNEYFNLLSRYSSDDSYTFSVKKSRKKKAEVDPEVAALRKEKEKQERAMKRLQDLYLYSDTSMSEKDFIIRKTEISKRLEEINAMLGMVAKNSEPSLSDEEFVRQASHLLISRELQNRQYIYFKNLAQNVSPEILKAYMETVLDSVLLVDGRVSSIVFRNGLTHKFKYKS

SEQ ID NO: 13646 - protein, 492 aa, synthetic construct
MNIQEIPTTRKEKPRVCAYVRVSTDSEAQEDSFAFQSNYWQRRFESDESVEYIGLFSDEGIGGAFMKKRDGLKRMFQKVRNGEIDRIYTKSVSRFARNKVELMEVVREFRDLGVEIIFESENIHTLDPKCGLILTVMASLAEEELLSMSQNQKWAARKRFANGSVELARILGYDMVDGKLVINEKEAVIVRRIFELYLQGNSFRTICHILENEGYTPMHGGRWSKSTITGMLRNEKYCGDSIMQKSYSTMKVQKYNYGELPKYYVQDNHEPIVSREDYQKAQEMMVARGNKYRPRGSPTALYPLSGKLICGECGTSFKRKTSAHGTPYMCIKWTCRKKDVYGVKECASHDIKDEVVTRLLIEAYNESLDANNDVNGITEQEEVLRKLIANEQELRQLRAKGYISESKCREETDKILIKIKEQETLIKNLQTRDMVKGKYKKSDKLTEQMAEFLVKAIVKEWTITFEFQNGYKATKEYTNGRAGNVNGKLCKH

SEQ ID NO: 13647 - protein, 544 aa, synthetic construct
MSMENCANTKPKITIIPAKTRVERLDPMSVAMGQKPKIRVAAYARVSTDHEEQESSYEAQVDHFTKLIASHDDWTMVDIYADPGLSGKNTKRVQFKRMIKDCEDGKIDLIITKSVSRFARNTLDCVQTARKLKADGIGIIFEKENLDTLQERSEFVLTIMASLAEEESRSISNNIRWSVKKKFQEGKVILNTKHFLGYTRDKKGTVLKIVPEEAITVRRIYAEFLDGKSLKEIAEGLERDGIASPSGRETWHPSTVKSILQNEKYKGDCHLQKTYLPDFLSPRRIKNEGFAQSWYVEDSHAAIISKETFDMVQQEFQNRQSLRSTGETGCGKFSGKYPFSGMIVCGECGETYRRHQQYNKYKKYYIWVCKRHENNGAEYCKSRPIKEEALEKAFVRALNELIGDKERILEKLQSATVSEITDSCATAINEVNAEIEKLQEQMMELLMKRNNGEITDKEYEQQSQQVGMQIDQLLMRKEEILSEQGKVQLASYRIEEVTKLLQTGKILEEFDRVMFKSLVRKITVLSNKEIEIEFECGITVRETL

SEQ ID NO: 13648 - protein, 456 aa, synthetic construct
MYKKELAPDLVRVALYIRVSGEEQKIKGLSLEAQQERLEAYARERGWVIVGIYIDAAKTARKNIHKRTEFQRMMDSVKRDEVDILLFARLDRWFRSVADYYKVMEILQAHNCDWKTTDEEYDTTTANGRLYINVKLSIAQNEADIDGERIDVVFDSKIAHGTVVSGSAPFGFRVNEEKRLEVVPEDAAIVQDAFNYFENTVSQRATVRYVRETYGVNWCDATFRRMLKEKLYTGVYDRGGRYNDQFCPAIIDRQQFDRVQALLTRNVRSAPSGKVYIFTSILTCAECGHKLVGYKSSDYYYYRCNQHFQRGRCSHNHSAREDVVEAWLFDHLGEELERCQLEWDVEAAKKKASVARTDKAALKRKLTKLKELYVNDLIDIEDYKKDYQIYVSALNQIPEPAQEAPPDFAAVRRLLDNSFRTIYDTLTREEKRTLWRSVIKEIRIDNDQNITGVVFG

SEQ ID NO: 13649 - protein, 503 aa, synthetic construct
MLRAALYARFSSENQREESILAQFRDSTEYCKKHNYAIVAKYADEAKSGTTTIGREQYKLMLKDAQKGKFDVVVFHKIDRNARNELDYYITKHKLEEAGVKYAYSRQDIDSTSPEGQMMESMLVGMAAYYSRNLSNEIKKGLRENAIQGKCTGGRLPYGFSVDADKKLIINENEAPAIRMIFDWYSAGVHYGVIRKRLFNAGYRNRAGKEFTIASIYEILRNRKYVGDLYLGKTLFRKGKRNTHQVSDNVQYFENVIPAIVSREIFEEVQVKLDQNKRRSGAGKAKAIYALSGLIYCGKCGSAMVAHSTKNSRGIKNYYYRCPKGRLVGDEKCPQKFINRDDIESTVYQLIRKLFTAPDAHEQIKRIIAKNNMGVKVPDYTDQVKRLKKQESDASKRLDKLYDLYMTDREDEFTSAKMAQIKEEILRLRTQIKEAEGRQAIAQSTTVDIDKIIDTFQKQLKQKQSPEFIKTLFELAVKNVTVYPDKIKVVLLVTQERFELPTP

SEQ ID NO: 13650 - protein, 520 aa, synthetic construct
MKRVYCLYRVSTKGQVDKDDIPMQKTSCREFAERNGWTILKEFQEKGVSGFKVSASDRDAIQDLKAAAEKKEFDVLLVFMFDRIGRIDDETPFVVEWFIKHGIEVWSVNEGEQRMDNHVDKLMNYIRFWQANGESQKTSARVKTRLNQMTLDGKFTGGVAPFGYKLIKSGEINKKGKELMDIAIDDDEAPIVKKIFEMTVKEGYGSYRMADYLNSHGIKTHNNSKFQCNTVNRILKNKLYCGYMISGGVESPYIERLQIIDENVFEQAQYILNQRSNKNEEKKQIARTTKGSTLLSGNIYCAHCGQKIVSTSYIDSYDRADGSQYRVRRQRYICTNKAMKRGACDGQSAYVAHRIDGAVLATLRDYLAKIKSTPKDIALEKRYKSEISEYKRKQTKIEKEIDKLKRQVIELSAEIGRSLLGESRFTPDILSASIDNTNDLLHKKEFELSDIKFKLVNQQNAMGKLDFYYSQFRTWADEFDNSTMEQKKMIACQLIREVKVSRGYELEIIFDLNYEQFLSL

SEQ ID NO: 13651 - protein, 490 aa, synthetic construct
MKAALYTRVSTDEQAEHGFSLEAQKKRLIEYCNKNNIEIYKLYSDEGISGHSIIKRKALQEMLQDAKEHKFNYVIAYKTDRISRNLLDLLTIKNQLDEADVELLLSDEAIDTKDDAGMTMFSIMGAFAELERKKITERMMAGKRQKLMNEHIKLKNGRVPYGYLYDDENKKYIIDESRRSIVELIYKLASQGWSYNKITRHIAEETAANSSDSKKKWYISDIRAILTNPIYKGYSGISYYYNFNDRAKKPKNSAILYKATNVEPYFTEEYWDTLYSQLEKKTQYFKRKHPIDSYIFSDVLFCATCGLKIGTRQHHANYLYYVCNSKHKMYDNDHICDYAININKFNNWFIEFIRGIDENNIKVSVSKPKDLDRELQAVRSQISLKEKNREVLLDKLMNGVIDDTEYRLASNMVIASLNSLKSQEKELSDKMDSLKEKEQTKRYNRLKIKALKVLVNDWDNLTDQAKKTLINSSINKIMITKDGIQEIEFN

SEQ ID NO: 13652 - protein, 438 aa, synthetic construct
MIEDALAGKIDLIVTKSVSRFARNTVDSLVTIRKLKEKGVQVYFEKENIYTFDGKGELLLTIMSSLAQEESRSISENVTWGQRKRFADGKVNLPYKNFLGYRKGADGFPEVVPEEAVIVRRIYSRFMEGLTSGAIAKELIADGIPTPSGKLRWQSSTVESILKNEKYKGAALLQKCFTVDFLTKKKKINEGEVPQYYVEHSHEPIITPEEFDKVQTELARRKQISRQYSGKGIFSSRIVCGGCGSYFGSKVWNSTSKYRRVIWQCNGKFKGEHKCETPHLDEETIKARFVTALNAIIESKDNILEDCRLMQATLTDCAGIDTEIESLLEEIDVVTELTMRCIAENSQTAQNQEEYAARYNGFVERYEKAKARLEQLRTTKAAREAQAEAIGAFMFEVQELDALTEFDEKLWLTIIDTVTVHTDGRMAFKFQGGTEIEA

SEQ ID NO: 13653 - protein, 526 aa, synthetic construct
MDYTNLNLANVVIYARYSSDRQNEQSIDGQLDKCHEYAQQRGFRVVGEYCDRALSGRYAETRPEFQRMIADSAKHAFEYVLVWKLDRFSRDRYDSAIYKKKLRANGVRVLSVTEGIDESSESVLLEAILEAMAEEYSRQLAQNVKRGMRQNAEKGLSLGGIAPLGYRVVNKRYEINEDAAKIVRFIHEQYADGVGQKQIVADCERLGYRNQRGNPIDLHAVKRILSNERYVGTYDYLGEVVIEDAFPAIVSKALKKKVRDRLKANAKAPGHAKAKVEYLLHGKLFCGVCGSPMVGECGRSSTGVVHYYYACAAKKKQHTCKKRSERKDKLEQYITDYIGAHILTDKWIDAAADRVVAEYQKSYDASGIKPLEKQIREADKEIDKLVDTLISATADTARRRINERIEAAEVKKKALEEQLASLRIASRVILKKEDIVAWLNQFRTGNSADLEYRKKVIELFVNAIYIYDNKIKMFFNVTDSAQITYPEMLALEEPESSDLGSSGVPDVALSERTVFVNGVIGIIVHR

SEQ ID NO: 13654 - protein, 433 aa, synthetic construct
MPRAITIVPKPPKLEQKKRVAAYARVSSGKDAMLHSLSAQVSYYSDLIQNHDDWLYVGVYADEAKTGTKESRADFQRLIADCRAGKIDMVITKSISRFARNTVTLLQTVRNFKAWEVDIFFEEQNIHTMSGDGELMMTILASYAQEESRSASENQKWRIKRNFEEGMPWNGAMLGYRLKNGRYEIIPEEADLVRRIYDEYLSGDGYLTIAKRLNEDGIPSRFGKQWGRSVISKILSNYTYTGNLILQKTFRENHITKKTVINNGELPKYHAEDAHDAIIDMETFQAVQAEKARRAARFIKKPTPKKTYPFTSLLVCDGCGKNYRRKVTKTGPVWVCGTFNSMGKAACASKQIPEETLQAVTAEVLGQVDFPEELLRRLIKSILVCNENVLIFRFYNGSEVTRKWQDRSRSQSWTDEMKATARQKALERRNQNA

SEQ ID NO: 13655 - protein, 526 aa, synthetic construct
MPKVTMIPATINPLTHLPSVAARKRRVAGYARVSTDSDEQFTSYEAQVDYYTKFIQSKPEWEFVKVYTDEGISGTNTKRREGFKEMITDALDGKIDLIVTKSVSRFARNTVDSLVTIRKLKENGVECYFEKEGIYTFDGKGELLITIMSSLAQEESRSISENITWGQRKSFSDGKVHLPYKRFLGYEKGEDGRPAVVESEARVVKLIYGLFLEGKTQAGICKYLEELGIPSPGGKQTWSKTTITSILQNEKYKGDALLQKKFTVDFLEKKMKPNEGEVPQYYVTGSHPAIIEPDEWEQVQAEFARRKTLGKAYSGKSVLSAKLVCEDCGAFFGPKVWHSTDQYRRTIWQCNGKFANEERCHTPVVDTETIQRLFIKAYNLMMQDRVQIIKQCEAWRARLMDFGTPDADIERQLEETQVVAELVKAAVKENASTAQSQEAYLKKYEALTERYEKAAAELERLQSLRTARSQQDKKMALYIRTLKKQPEVMHDWNDTIWTVMIEKAIVHKNGQITFVFQNGTEIKVGA

SEQ ID NO: 13656 - protein, 516 aa, synthetic construct
MARAAKQDNNSEIIDGVIYARYSEGPNQTEASIEGQVRECKEYAKRNGIRIINVYSDSKHTGTNDNRAEFQKMLRDSRRGGFSVVVVWKIDRFGRNRAEMAQNKALLKLQGVKVVSAKEYIPDSPEGIILESVLEGMAEYYSANLSQNIKRGMKENALHCKSNGSGKSLGYIVDKDGYFEIEPNEATIVKTIFQKYDEGMKIADIWREIVASGAKTKRGKDFTQYGISRVLSNRAYIGEYRYGDIVTPGGMPRIIDDDLFNRVQERRALSKKAPASRRSNSDVDFLLTGKVFCGHCKGTMRGMSGTSKTGRKFYYYACHDKIFKHNKCTKKNVKKEWLETEVTRITRDDILNKETIEFIADRVVEIQRQEQEDKSMLRYYEQQLRDTQSAINNIMKAIEAGIITSSTKSRLFELEEQKSIIEGEIEREKIITPVIEKEQVIFSLERFFGGDINNKEYQRNIIDMFVNKVILYDNKIIITYNISSQNEISVDVVEQAAFAALDECSSKLSLPPPATR

SEQ ID NO: 13657 - protein, 509 aa, synthetic construct
MNTVIYARYSAGPRQTDQSIEGQLRVCTDFCKQRGLTVIDTYCDRHISGRTDERPEFQKLIADAKRKKFEAVVVYKTDRFARNKYDSAVYKRELKRNGIQIFYAAEAIPDGPEGIILESLMEGLAEYYSAELAQKIKRGMHESALKCQSTGSGRPLGYRVDEQKHFQIDPESAQTVQTIFEQYIKGESNAAICELLNSRGLRTAQGKPFNKNSINRIIKNRKYIGEYRYHDIVVEGGMPAIISKDTFNLAQAEMERRRTRKAPKSPKAEYLLAGRLFCGHCKGPMQGVSGTGKSGNKWYYYYCGNTRGKNKTCDKKQVSRDRLERAVVDFTVRYILQEEVLEELARKVHAAQERQNDTASEIAFYEKKLADNKKSIANVLRAIESGTATQTLPARLQELENEQAVILGEISFLKGKRLAFTEDQIFFALMKHLEPYPGESEQDYRRRIISDFVSEVYLYDGRLLIYFNISSEDGKLKSADLSNIEGGEFDEGLVGSTIRNADEPSKENE

SEQ ID NO: 13658 - protein, 502 aa, synthetic construct
MEIQIREGNREQKRKLRVCAYCRVSTDADEQENSLENQIRHYETVIKANPSYEYAGVYSDFAISGFKEKRPGLQKMLADAQKGKIDLILTKSVSRFARNTSIVLEATRKLKELNVGVFFELQNINTLSGEGELMLTILAAFAQAESESGSVGAKMVYQRKYEAGIPVQYLERSFGFKKDERGVYIADEEEAVWVRKIYDMAAQGYTLAAIKRYLNENNVKTVGGAKWLDSTVLRILENEIYKGDYIMHKYFVNEERKLVRNRGEVDAWYIEDDHEAIVSPELWQKAQDALEAKRDYLAEGSVIEEFTEENYPYMNKIFCARCGHPLYKRIYSNGNRLNWGCSGTKRYGKSFCEGINIPDGVLHGAWHFDENMYIGEKQTDKGKKEFTYLKEASWKRRHKKKEPEPIPENTETEYPYREKIFCGLCGSRLVRHVNTKNHKVIWVCNGRKRKGKDFCDGTRVPDTIIKGWGEIKKDIYIQRKDDKNGKKRYSYTSKKPKGADRA

SEQ ID NO: 13659 - protein, 508 aa, synthetic construct
MIQVAAYCRVSTDKEDQANSFDSQQNYFKEYISKNPDWNLYEIYADEGISGTSTRKRRQFNRMIRDAHEGRFQLILTKEVSRFSRNIVDTLSYTRELKRIGVAVEFVTDNINTMDGDGELRLSIMATLAQDESRKTSNRVVWGQTRQMERGVVFGRSMLGYKVTDGKLTLEPNSAEVVRLIFQKYAVEQVGTSEIARFLTREGYRTYRGSTKWKASAVLKILKNEKYVGDLVQKKTYTPDYLTHEKRTNRGEVPLICLENHHEPIISREIWNLAQERMQKNNKHTEGDGGHSNRYVFSGKIKCAVCGASFVGRMRVLKDGSKVRRWSCGTATTEGRAGCTIGKLVRDDDAMHMLKTAVQSLSVDTSEIIHNVTTLVLEAIRATQAIVDDKPEQLQFELERIQQKIEAVLDSYFSGDISKDDMLAMKTRYESQSRSLKKRIEDAEKQKALGNVVDSLRETIQSEVAALLCFDKESEVLCKTLLQDLTVFPDRHMELRLNDLPQVFYFTE

SEQ ID NO: 13660 - protein, 602 aa, synthetic construct
MYITVTLDPNGIYDAYLRKSRADMELEKLKKFDTLKQHEKFLKDRANQLGIKIRKIYREVVSGESIQERPEMQEVLKNVEAGTIDGILVVEVERLTRGDAKDQGTVTQAFKYSNTKIITLNKIYDPNSDEDEEYFEFGLFMSRREYKTINRRMQRARIANVLDGKYCASEPPFGYKKVRVKYGKGYTLEPVSEEAEIVKEMYQKRADGMGYDIICNWLNTLDFKPKKSDVWTPATIKGMLSNPIYIGKIRWNSNKQKKILINGQIIKKRKKGNNEDLILVEGLHPAIISNELFDIVQGIKPNKASTKHNTELQNPLATLVKCADCGRSMQRRPYYDNKKQEPKLRRKYDIDKEKLRLCLREHKGEYSLRDIATALKVRKHCVDHWFASNQSKFTMPYADKWEELKKLLNINTTEFDKAITTYESNLIEPHEDTLICPKAHCTNIGSNLALVEQETIKALQEYISSQKELLATYNPAEEDDNVMFVSLSKELDKYNKQLDKAYELVEQGIYTPQEFTKRTKTIKDKITNTEKELNKYQIKLNKDRIEKLLPKIEKVIDSYYKVTSAEKKNKLLKSVISYIEYKKEKGGRGYESNFSIIIHPKF

SEQ ID NO: 13661 - protein, 463 aa, synthetic construct
MRRKTTAPVEKILLRVAIYIRVSTDKQVKDGDSMRDQLATGQKYIDSHENMILVDTYIDDGISGQKLKRDDFQRLIDDVRAGRIDLIIFTRLDRWFRNLRHYLNTQDILDKHGVSWTAIEQPYFDTSTPHGRAFVNNSMIWAELEAQNDSDRILGVFDDKVDNGEVLSGSTPLGYTIVNKHLVPDDDAPTAVAIFQYYRKTGNLSMTLRYMESEFGLVRSAASLKNMLTNTKYIGEFRDNKNYCPAIIDRDLFFDVQRLLKINIKSGKKHDYIFSGLVVCDDCDHIMSGCQQRARGRVRSDGTRIIYKYSVYRCRQGVNLHRCPNRKLVFETTLEKMLLERIRPELENYIAEYEVANLPALRTDAKRRSVEGKMQKLKDLYLNDLITMDEFKLDREKLLMQLEKINAEDSRPVKDLSYLKNFLKMDFESVYDSLSIPEKRELWRSIVKEIRVDHDKNIHIIFL

SEQ ID NO: 13662 - protein, 465 aa, synthetic construct
MKGNAGDTIVKKIDLSPELVRVALYIRVSGEEQKIKGLSLEAQQERLEAYARERGWVIVGIYIDAAKTARKNIHKRTDFQRMMDSVKRDEVDILLFCRLDRWFRSVADYYKIMEVLEAHNCDWKTTDEEYDTTTANGRLYINVKLSIAQNEADIDGERIDVVFDSKIAHGTVVSGSAPFGFRVNEGKRLEVVPEDAAIVQDAFNYFETSISQRATVRYIRETYGVNWCDATFRRMLKEKLYTGVYDRGGRFNDHFCPAIISKQQFDRVQALLERNARSVPSGKVYIFTSILTCAECGHKLVGYKSSDYYYYRCNQHFQRGRCSHNHSAREDVVEKWLFEHLADELERCQLEWEVAAAKKKASVARTDKAALKRKLTKLKELYVNDLIDIEDYKRDYQIYTAALKHIPEPSIEPPPDFAAVRRLLDNDFKTIYENLTREEKRTLWRSVIKEIRIDNDQNITGVVFG

SEQ ID NO: 13663 - protein, 538 aa, synthetic construct
MSTAPNVMIIPAKVQTAESRRKYHQLRVAAYCRVSTAQEEQQNSYQVQIAYYTDLINRKKEWTLAGIFADEGISGTQTKKRTEFNHMIRMCRNKKIDLVITKSISRFARNTVDCLEYVRQLKDLGIGVIFEKENINTLTMTSEFMIALYGSFAQAESESISKNVSWGKEKAYREGKVQFQHKYLLGYKKGEDGKPEIVPEEAETVRLIYTLFLDGYSMSRIKKLLENKGILTSQGNKVWNESLIRSILKNEKYAGDALLQKTFTSDCITHKIVKNHGERPMYLVTDHHEPIIDRDTYNRVQQELARRSSKRKVSDKTITEQGKYSSKYALTELLICGKCGTPYRRTTWVSRGKKLIVWRCISRLEHGRRYCPDSPTIKEENLHRGIIRAINNYYSCRDDIKRILKANISSVLECQGQKEILATEKRLKEIDQARTDLVGLIASGGCDEDTLDGDFAKLYAEEQDLNERLKMLKLQNQTSDETQQKLDKVTKMIEHEKFELETFDNVLVRKLIECIKILSKNEILVIFKGGYEVRSEIE

SEQ ID NO: 13664 - protein, 529 aa, synthetic construct
MSEVLRLIKEAAAQKAAQEKPKGLRVAAYCRVSTDSDEQKTSYRTQKAFYTDMIQRHPGWTFAGIYADEGITGTSRLHRDEFNQMLEDARNGKIDLIVTKSISRFARNTVDTLDCARQLKQLTPPVGIFFEKENINTATMNSEMILTVLSAFAQAESESISQNVARGKRMGYKHGKFAFPYGRIIGYRKGADGKPEIIPEQAEIIRLIFNSYLQGDSLQSIKAKLETAGALTARGNTEWSAQSIQRILQNEKYCGDVLLQKTFTEDVLTGVHKKNTGQLPQYYIENYHEGIVSKQMFREVQTEIARRNSKSAANQRKRRRGRYNSKYALSERLVCGNCGSPYKRVTWNIHGRKQIVWRCVNRIEYGTKFCGSSPSVPEEELHRAILKAVQDLAANFTDEVAAQINGILHDIQTGESAKPNLQEQLEQTQQEFDRLLEMSLDFDEDTPFLDDRLKKLNSKIKRLRKAIGDTAAQQEKASQPEMLLSAKDLQIQEYDDALTARIIEKITVRSRNEIEIQFTGDYKKSVTLR

SEQ ID NO: 13665 - protein, 536 aa, synthetic construct
MLKNTKIAVYCRVSSDEQAERGTIDNQVTFAQQYADLHHLDIYDVYKDDGVTGTIPLQDRPEGHRLLQDAADERFGLVIFYKMDRLGRSTRVILNAVEALSQHGVGVQSMSEPFDTATPSGRFMLTMFAGVAELDRANILDRMYQGTLRHARLGKWCGGPAPFGYRLQDGYLVISEEPMPGQQLSEADVIRMLYSKTIEGWSALRLAQHLNALGIPNKYTLRGNVAAGSGKWHQSKILYILHNTLYYGERSFGRLSKNSNKNIIPQQVPAIVSKETWDAAQAAIEQHSIMPKFIKRRSYLLRGLIRCGICGHTYVGTYYKRKAGNSIYYVCNAKNTRGVTPEPCKGQTLRGEWIESLVWEDCLRYIKQPDVIAVDEDCRYLQSAGDIKKEIDAATAQLKQLDQERQTVIGLCRQGIITAADLDAQLSEITEKQNTLQQTLEGLNSKNIVTKEDAEKRVKEIADILDGFRQQLQSGGELSFDAKQGIIRTLVKQITVHTELQPGAERDIPTVRVCIDYNFTLLSAKTAMLDPYRQGF

SEQ ID NO: 13666 - protein, 516 aa, synthetic construct
MQKTDKLPVKAVIYARYSSDRQREESIEGQLRVCEDYARRNNITIVHTYADRAMTGRSDQRPEFQMMIRDAATMSFDIVLVYKLNRFARNRYDSARYKHKLKQYGVRVVSAMENIADDPSGILLESLIEGMAEYYSAELAENVTRGMTENALEGKWAGGIVPLGYKLDEKHHLVIDEPKAAIVRQIYQLALEGHNQKYIIDELNKHHYTNSAGRPFSYNTLRVILKNERYTGTFIWRDIRKENAIPVIIDKMTFEAVQKHMQFRKKNHIRSCSKDFHLTGKLFCDRCSSKMVGVSGTSKQGVLYYYYACTSHLKKKCPSKNIRQDALENLICKITTQILSKPEAIKAIAKQAMKMQKDKKESLEIQSLQNQIADINKKLKNCIQAVENGLISETMTNHIKNYENRLQGLKDEVSRQKLLEGSIHLTEQHIEFFFYSISQKLKTADKYKSILLSSLVRCVIVHENYIEIQFNYKNELPILQNPVKVESSYLNQMVTQGGFEPTTYRLEGGCSIQLSY

SEQ ID NO: 13667 - protein, 456 aa, synthetic construct
MRNKEIAPALVRVALYIRVSGEEQKIKGLSLEAQQERLEAYARERGWVIVGIYIDAAKTARKNIHKRTEFQRMMDSVKRDEVDILLFARLDRWFRSVADYYKVMEILQAHNCDWKTTDEEYDTTTANGRLYINVKLSIAQNEADIDGERIDVVFDSKIAHGTVVSGSAPFGFRVNEEKRLEVVPEDAVIVQDAFNYFENTVSQRATVRYVRETYGVNWCDATFRRMLKEKLYTGVYDRGGRYNDQFCPAIINRQQFDRVQALLTRNVRSAPSGKVYIFTSILTCAECGHKLVGYKSSDYYYYRCNQHFQRGRCSHNHSAREDVVEQWLFEHLGEELERCQLEWDVEAAKKKASVARTDKAALKRKLTKLKELYVNDLIDIEDYKKDYQIYVSALNQIPEPAQEAPPDFAAVRRLLDNSFRTIYDTLTREEKRTLWRSVIKEIRIDNDQNITGVVFG

SEQ ID NO: 13668 - protein, 488 aa, synthetic construct
MEKTRAVAYIRVSTERDAQLHSYEFQEHYWQSAFEDDPNTDLIGIYADKGISGHSVQKRPKFLVMMQEAREHKFDKIYTKSVSRFARNTTQLLEAVRELRDLGIEVVFENENIHTFQPTSEIFLTIAATIAENDLEVDSARQRWSIQHRCENGWISVGSGLFGLKLTADNELEIVPEEAAVIRYIYESYVDGGIGSKKIADALNAAGVQSRNGYPWDAKHIIGLLRNEKYKGDVIMGKSVRHFGEYHKNPNAEYAPRYYMEGTHEAIVDRDMWEAAQRILEERSRNHCRTRIAHSFTGMIECGCCGKNYLHKVNNSQCKWQTDIWACRTYLRDGKKACGNSRIKDTVLKEKFISAYNEFIERRPQGDSMVALQEVLEDLRQQEQELAELMMQRLIPKAAYEEERKSVKMQITDISDKISERRAKRVPESEYVSITEFSEEKAKRFLSKVVVTMFTVTFVFYNGAKITRTYDNGQPGNKVGWNKKKEES

SEQ ID NO: 13669 - protein, 579 aa, synthetic construct
MTKETSLQACDIITTSNPVLADCPPIKEEQDMNRQSDKITAIYCRLSRDDELAGESNSIVNQKAILKKYAQEQGFRNIQFFVDDGYSGANFNRPDWKRMIELVENDKVGVIIAKDMSRIGRNYLEVGLYTEMLFPEHDVRFIAVNSGVDSTNQQDNDFTPFLNIINEFYVKDSSKKVKAVMKQKGESGEYLTTNPPYGYMKDPDNPKRHWIVDDEAAAIVRQIFAWCMEGYGPSQIAKKLKEAKVDCPTVHWMKMGRNAPAKTPDNPYDWAPRTITGILEKQEYLGHMVNFKTRKQSYRSKKKLENPPDQWKIFENTHEAIIDEETFARVQELRKNKRRPARTGKTNMFSGLVRCADCGEKLYYCTSASFETRQDHFVCSTSRKKGKEVCDTHFIRAVVLEEGTLQHMRLVIQCVADYEDAFRKALGAKRSEEAKKELSAKKRTLQKSENRLAELDRLFKRIYEDMVNGKLSEARFQMLSDDYEQEQADLRAEIEMLENEIQNQEDQAENVDRFIRQAKKYLYLEKLTPTILNDMVNAVYVHAPDKSSGHRVQDVTISYNYIGILPANLLYDVMNGKAA

SEQ ID NO: 13670 - protein, 532 aa, synthetic construct
MAKAKQKAATNDISKLAVIYARYSSHNQTEQSIEGQLAAGHRYADLKGYTVVHEYIDRAMTGRNDNRDDFQKMLSDTSKKQFGAIIVWKVDRFGRNREEITFNKYRCKKNGVRVEYVAENLPDSPEGVILESVLEGMAEYYSLQLSQNVQRGLLESAKKHQVIGGNVPLGLMMDAHKKYVPDPKTAPTVKLIFDMYAEGSTTSEIINHLNSIGMRTKAGKPFTKSSLTTVLKNEKYIGVYKYKDIIRDEGVIPPIVDKEIFYKVQELLKVNRRMPSHKWSYSDYILTDKLFCGKCGTAMVGESGFGKMGVKYSYYICAKRRKDKTCDKKPVRQEWIEEIVLQRVQGILQNEELLEFIAENTWQYYLAQDESMEKLKGLQTELDKVEKSAANLMKAIEAGIFNDMTKARMDELDDQRAVIKKAMAEIEIEKGFKLTKDHILYFLEQFKKLDYKDRDCQRRLIDVFVNSIFVYDDKLRIAFNFGGSDSTITLNEVDKADRGEGFVCCASCPAKYLKPVHSWKHDVPAFSLYIFI

SEQ ID NO: 13671 - protein, 499 aa, synthetic construct
MIAIYARQSLDKKDSISIETQIELCKKEIEDEPYKEYVDRGYSGKNTNRPQFKAMMQDVENGVISKIIVYKLDRLSRSTLDFGELMDALSKHSVEFSSTREKFDTSTPIGKAMLNIIMVFAQLERETIQVRVQDNFRMRSARGAYDAKAPYGYAKTKVMVHGKAVSTLKPDKAYSLMVKKIFEQYAYTSTSLGYLARTLNQQGIKSANGAAWDSCKLSKLLCNPIYVKADAEVYKYYRAKGMEITNDIDDFRGQYGCVTYGQWDRAKNKFAQLSGLTLSIGLHEGIIDAKTFLACQYKLADNTQINNTGRGKHSWLTGLLKCGCCGKAMKVMTYKETATFRCSGAMNTGLCNDSPSVGVREIEEAVEREIFAHVARHQELVVQKRKEEDNKAHNYKIAIAKLDDQIANLITALADGTELTMKYINGRISELQKQRDILAAELQQHKNATKQQDDIKQFHDIINLWPGMTIPQKHEIAMMLIKRVEIQEDTTRIYWKYDL

SEQ ID NO: 13672 - protein, 498 aa, synthetic construct
MKTAVIYARYSSDKQTEQSIEGQLYDCYNYAKANNITVIGEYIDRAMTGRNDDRPDFQRMIADSAKHTFELVLVWKLDRFARSTEDAAYNRGKLKRNGVRLLSVKEDFGDSSAGDLMMHVMESFNEFYSADLREKTVRGMHQSALKCQSTGGQIPIGYKIEGKKYVIDESARFIPETVFRMYAEGKRLAEIARYLNEKGYRTRMGRKFTTGSFYTMLSNEKYIGVYKYGDVRIEGGYEAMIDPVLFDAVQKKLVENKKRAPKISERENFYLTGKLFCGHCGEPMNGMSGNSTKGKHLYYRCNGVRKHTGCDKRTERKEELENEIIGAIQRAFANADPEELTRKVIENYEKNSRPADQVKVMKAELQKITNKVDNVVNAIAEMGGNETLYTQLRQLTEQKEQKETEIRIAEHKADDMPTVELVKKILDLIQNADTMTDEGRQLLIDGAVSRIYVYDDSLDIYFKGGKNTEIPLNPANKDDVSDNSFACCKEWGAKLVLT

SEQ ID NO: 13673 - protein, 558 aa, synthetic construct
MNREGKKCVLYPRVSTEMQVDGYSLEGQKNSLKRFADREEMEIVGIYEDAGKSGKSIEGRPAFKKMLSDIKNGLEIDYILVYKLSRFGRNAADILNSLEFVQSYGINLICIEEGIDSSQTSGKLLISVLSAVAEIERENIIEQTMNGRREKARQGGWNGGFAPYGYYLKDNQLLIEETEAEAIRIIFDKFANSDIGLGGVAKYLNLQGIKKIPRQNGTLETWSSHFIRLILDNPVYCGKIAYGRRTREKVKGTKNEYKQVHAEDYILEDGQHEGIISEELWQKVHAKRMATGIKQPSKIGKDRSHLLTGILKCPLCGSSMYTNKHAWTNKDGTYKEVYYYICGRNKQERGHHCDYKASLRKTDIEPLVIEAVKELVSDKYFAKEIEKRIGVQTDTTAIDKELANYESKLKEVDLNKARLEREIDNLPIDARFRERKIHDMTLRLDALYDTIVELEERIEDAKLRKSSIEMETITLDNIYKLMLNFGKLYDIISDEEKKSLITYLIKEIQIYPNGESEQPLKSIEFNFPIYRDGQEVRRLLWEKGNTVETVVLMSRKDK

SEQ ID NO: 13674 - protein, 527 aa, synthetic construct
MYELTQSMESLSVDEIIVYLRKSRSDSPEMSVEDVLKKHEEMIQDYANTHFGSPIPEKNIYREVVSGETIDSRPQVKIVLQKIESPQIKAVLIVEPQRLSRGDLEDCGRLINILRYTNTMVLTLTHSFNLQEEYERKFFEMEITRGNDYLEYTKRILRRGRESSAAKGHYIGSVDPYGYRKIVIKKDGVNCHTLEIVPEEANVVKLIHELYAYTPGGIGFTNIAHKLDSMNLKPKKAAHWTPAIISSILCNPLYLGLIRWDTRKVVKYINDGRLEKSRPRSSDAKYYKGLHEPIISQELYDACMARRGTNPRLRRNKELCNPFAGLLYCGTCDHAMSLKIYKNHNSVSQIMLCNHQSYCHTKSVLYSAFLERFISSMENTIHDFELALLADNGNAQAVNQSIVANLETRLKKLQEKDMRQKDAYEDGIYSKEEFLERNIKTQQEIASTITALTAAKETKENYVDYGEKIRRFRDCINALNDPELSATEKNQFLKSCVSKIIYYNNMESKAGVGRYVENVFSLEIQYI

SEQ ID NO: 13675 - protein, 578 aa, synthetic construct
MRKVSKIEPISPSLPTRKKVAAYARVSMETERLNHSLSAQVSYYSNLIQSNPEWEYAGVYADNAVTGTKSSSREEFQRMLEDCEAGKIDIILTKSISRFARNTVDLLEAVRHLKELGIEVRFEKEHINSLSGDGEVMLTLLASFAQEEVRSLSENVKWGTRKRFEQGIPNGRFLIYGYRWEGDHLVVEPEEAKIVRLIYDNFLKGLSAEATEKQLEEMGVKSMKGMHFPNSSIRAILKNITYTGNLLFQKEYTLDPISKKTRKNHGELPQYFVENTHEAIIPMETYQAVQAEIARRRELGALANWSINTSCFTSKIKCGLCGASFVRNTRKNRAKTSQLGERYTFYGCGTNKRKGEHCSSGTIREDVLKEECAKALGLPEFDEETFSERVEKITIPTTGTMLFEFTDGSSLEHHWSRNAKKESWTAERRKAVSEYRRSRETGWKCYHTFTHFIKCGRCGANYRCQTHKRVDGTVVRSWYCSSPTAVGCSKVGIREDTLKALIADVMGLPEFDEELFNQQLAYATVPADNQIVFHFRDGHEASRTFVQKRQMPRQTEERKKHMSEVMKAKWRERHAEND

SEQ ID NO: 13676 - protein, 528 aa, synthetic construct
MPKTTKKITTIPATLTRFTATPITEQKKRRVAGYARVSTDHDDQFTSYEAQIDYYTNYIKSRDDWEFVDVYTDAGITGTSTKHREGFKRMVADALAGKIDLIVTKSVSRFARNTVDSLTTIRQLKEAGVEVYFEKENIWTFDGKGELLLTIMSSLAQEESRSISENCTWGQRKRFADGKVSVPFQRFLGYDRGPDGNLVVNREQAVIVKRIYSLFLQGMTYHGIADTLTKDGIPTPGGKKKWSISTVKSILSNEKYKGDALLQKSYTVDFLTKKTKVNEGEIPQYYVEDNHEAIIDPEVFEMVQREMAKRGKGKKYHSGVHAFSTKIKCGECGSWYGSKVWHSNSKYRKTIWQCNHKFDGDCRCQTPHLTDEEIQLHFLSAANKLLATKAAVIANGREMQALLFDTTELEAEQAQLLEETQVVSDMVQQVIQENARTALNQTEYQKRYDSLVQRFDRAKTRLEEVTAEIQEKQTASANMGAFLSTFEQMPDALTEFTLESWHSMVDFATVYSIDDIRFTFKNGQEIQA

SEQ ID NO: 13677 - protein, 485 aa, synthetic construct
MPTSDLKIAAAYIRVSTDDQEEYSPDSQVRLIREYARKNGYLLPEEYVFQDDGISAATARKRPAFNRMIALAKEKERPFDAILVLMFSRFARNREESVLYKGLLRKQGISVISVKEPAVDGPFGTLIESIIEWFDEYYLINLSAEVKRGMSEKFLRGEAMGTAPFGYRIDSANKTFTVDPERAEIVCDVFRSYADGAGLRDIAVQLGDAGITTRRGNRPDSRFVEYMLRNPVYIGKIRWTPGHKTRYSRVHIADGVEVVDGKHPPIVSMDLWEAVQRRMDQRKAAYGRYQRQAPAAWMMRGLVRCSACGATLIMAGRSSSCPFLQCHSYAKGACHTSHSLSLRRANAAVLAGLRRSVGTLTFHMVPHLTSAPSRTADYGRLLEQERRRLARCKDAYQAGVDTLEEYRDNKARLEERIRRIEEQAASAAAAPESFDKAAYGKKAADILRFLETSADEGAKNEVLRSVVDHITYEKASRHLAIYFYT

SEQ ID NO: 13678 - protein, 522 aa, synthetic construct
MGNVMVISARRQVGNTVKQSAQKKFRVAAYCRVSTDSEEQETSYEAQVTHYTEYIQKNPEWELAGIFADDGISGTNTKKRNEFNRMIDECMAGNIDMVITKSISRFARNTLDCLQYIRQLKEKNIPVYFEKEAINTMDSKGEVLITIMASLAQQESQSMSQNIKLGLQYRYQQGKVQINHNRFLGYTKDDNGHLIIDPEQAEIVKRIYREYLEGFSMNKIADGLMADGILTGAGKTKWHTSTINKILRNEKYMGDALLQKTYTTDFLTKKRIKNNGTVPQYYVEDDHEAIIPKELFMQVQAELVRRRTVHVSPTGKKRSFSCNHCFAQMVLCGDCGELYRRVHWNNHGCKSIVWRCISRLEPISAEKSCTNRTVNDLLLQEITIKAINQILTERDFFLKTLQQNIAKAVVGADTLSPDGIQARLEELQKELIKKANNKQDYDAIADEIFRLRDQKEKSELDSHHREEAMNRIKELQDFIAGQETDITEFDETLVKKLIEKITVFADHFTVEFKSGITIDIRA

SEQ ID NO: 13679 - protein, 520 aa, synthetic construct
MKRITKIAENASLGKKKIRVAAYCRVSTASEEQLVSLAAQKAHYENYIKSNDEWEFAGLYYDEGISGTKKEKRDGLLSMVAACERGTIDMIITKSISRFARNTTDCLELVRKLLDLNIYIYFEKENLNTGSMESELMLSILSGLAESESVSISENEKWGIKRRFQNGTFIISYPPYGYANVDGEMVIVPEQAEIVRQIFADTLAGKSTHAIADELNKRGVATKRGGHWTPGTVNGIIGNEKYTGDVLFQKTYTDSSFNRHQNRGEADQYLMQDHHEAIITREEYELANAVLKQRGREKGNGHDTGRYQNRYGFSGRIYCGECGSKYKRRLHYKPSGQYAAWSCVTHLADKEGCSQKYITDDALKLAFVTMMNKLVFGQQTVLRPLLQSLRGLNDQSRLLKIEELETAIEKNREQKQVMTNLMASGYLEPALFNKESNELAAEAEALQQEKERLMRSVNGDMVKVEELQRLLRFTSKGTMMTEFDDEIFLSFVERITVLSRKEVAFELKCGLSLRERLVES

SEQ ID NO: 13680 - protein, 504 aa, synthetic construct
MQTAVIYARYSSDKQTEQSIEGQLYDCYNYAKQHGITVVQEYIDRAMTGKNDDRPAFQQMLHDSAQHKWDSVLVWKLDRFARNTIDSAVNRQILAKNGVKLLSVMESFGDDASGQMMTHIIEAINEYYSADLREKTIRGMRQSAMKAQTTGHIPLGYKVVDKKLVIDDETRIIPETVFRMYAEGERLTDIAEYLNAHGYRNRRGRPFTTNSFYNMLANEKYIGIYKYDDIVIEGGIPQMIPNEVFEAVREKLITNRKRAAKNTAKADYYLSGKLYCGHCGEPMSGLSGTGRNGVKHYYYRCNGVQKKSGCHKKLENKYLIEDEVCRAARSAFEQMDKAETAETIYQMYLQTVRNEYAPAELEKELTECTKQAENVVNAIAQTGGNQLLYDKVRELEERKEQLSSALRLSQAMTDNVPSVEQITVFIDDILATDINTTEGKKAIADIMISKVYVYDDKLTVIFKDKDGKSVDIPLSAVSDSSSADCAPSALGSQAILSTNHREKV

SEQ ID NO: 13681 - protein, 519 aa, synthetic construct
MNTVIYARYSAGPRQTDQSIEGQLRVCTDFCKQRGLTVIDTYCDRHISGRTDERPEFQRLIADAKRKKFEAVVVYKTDRFARNKYDSAVYKRELKRNGIQIFYAAEAIPDGPEGIILESLMEGLAEYYSAELAQKIKRGMHESALKCQSTGSGRPLGYRVDEQKRFQIDSESAQTVQTIFEQYIKGESNAAICELLNSRGLRTAQGKPFNKNSINRIIKNRKYIGEYRYHDIVVEDGMPAIISKDTFNLAQAEMERRRTRKAPKSPKAEYLLAGRLFCGHCKGPMQGVSGTGKSGNKWYYYYCGNTRGKNKTCDKKQVSRDRLERAVVDFTVRYILQEDVLEELARKVHAAQERQNDTASEIAFYEKKLADNKKSIANVLRAIESGAATQTLPARLQELENEQAVILGELSFLKGKHLAFTEDQILFALMKHLEPYPGESEQDYRRRIISDFVSEVYLYDDRLLIYFNISSEDGKLKSADLSNIEGSEFDEGLVSSTKQVLDEHLFLQRRLRREVFALI

SEQ ID NO: 13682 - protein, 502 aa, synthetic construct
MEIQIREGNSRQKRKLKVCAYCRVSTDADEQENSLENQIRHYKEVITSNPDYEYAGVYSDFAISGFKEKRPGLQKMLADARKGKIDLILTKSVSRFARNTSIVLEATRKLKELNVGVFFELQNINTLSGEGELMLTILAAFAQAESESGSVGAKMVYQRKYEAGIPVQYLERSFGFKKDERGVYIADEEEAVWVRKIYEMAADGYTPASIKRYLNENGVKTIGGAEWIDSTVLRLIENEIYKGDYIMHKHFVNEERKLVRNRGEVDAWYIEDDHEAIVSPELWQRAQDALEAKRDYLAEGSVIEEFTEENYPYMNRIYCARCGHPLYKRIYSNGNRLNWGCSGTKRYGKSFCEGINIPDGVLRGAWHFDENMYIGEKPTDKGKKEFTYLKEASWKRRHKKKEPEPIPENTETEYPYREKIFCGLCGSRLVRHVNTKSHKVIWVCNGRKRKGKDFCDGTRVPDTIIKGWGEIKKDIYIQRKDDKNGKKRYSYTSKKPKGADRA

SEQ ID NO: 13683 - protein, 464 aa, synthetic construct
MARSVTVIPARSQKVQTGHKAIQEKKIRVAAYCRVSTDQEDQLHSFEAQVEYYTKYINEHENYEMAGIYADEGISGTNTKKREQFKKMIADCEGGKIDLVITKSISRFARNTQDCLAYSRKLKNLGIGIIFEKENINTLDSTGELLFTILSSLAQDESRNISENCKWGIRTKFKNGEMHLNTFKFLGYDKDENGKLVINKEQAKTVRRIYRDFLIGINPAQIAKELTEEKVPGCLGQTKWYPSTVTGILKQEKHMGDALLQKTYTADFLTKRQVRNNGEIAQVYVKDSHKGIIDKQTWNAVQEEFDRRERFMELHGTDRYSYGADCMPFCEKVFCGECKSLFTRHSWRSRGIVQWQCKNHRKDGKVACTNAYVDNADLEKGFVKAFNRLVTDRDKHMERWQQMKSDGTPLEKIRAGQMMEAVGNEPLTRFVSEIAQLVLCEVTVLGAKKYEFFFLEGSRVKVSV

SEQ ID NO: 13684 - protein, 536 aa, synthetic construct
MKGAVIYARYSCERQTEQSIEGQLHECYKYAEKNGLSILDEYIDRATTGTNDNRPAFQKMLTDSERETSWDIVLVYAIDRFGRNSIEIAINKQKLINNGKTLISATQRTSTNIDGSKNLDGILLENMYIGLAEYYSAELSQKIRRGLMESREKGLFCGGGLTYGYNVVNKHIVINDEQAEIIRYIFQEYNNGKIIPDIINELNAKGYTYKGGDFVKNSLYRILRNEKYIGITKYMGVGYKNIYPPIISENLFYSIQKRLALYKTGRICKDTELWLKAKVFCGNCGRPMHCDSSTSQSGKRFHYYKCSGRKEHICDMKVIRQDKLDKFIFETTLKVFATDENIKLLVDKIIDVHSKRQKDESLLTGLKARLCDTKKSIDNLLIALQEGIITTSTKDRLKQLESEKEKLEKEIANEENKLALSLSRDDVEKYLRKSLKASPKILLNNLIDKIIVYDDKIEIYFKYSHHVPDDPNDQQGLFYSKCEIPVNRGSRTKQVLDITIDNHNIHFFIRYSTKRNKDLCLPINYKCQKMKNHPLM

SEQ ID NO: 13685 - protein, 517 aa, synthetic construct
MKAAIYARFSSHNQREESIEGQVRACKRFAKEHGMTIVEIYADRGLSGLHADNRPEFQRMIQDSDHHRFEALIMWNLDRFSRDKYDTAVYKTRLKKNGVSLYYSDQSIPDTPEGIILESLLEGFAQYYSANLARNAKRGLQENARKCLWNGGCVPLGYLIDEHQRFVLEPIGAACVRMIFELYASGQSIKSIVCTLNEKGYKTVKGNRFRLGSIQGILRNRKYIGEYHASGITVPNGIPAIVDVQLFNDVQARLGVVASAKAHNKADIPYLLTTKVFCGHCGSPMIGESGTGKGGATYRYYKCSCRKNRKGTCDKKTEPKDWLEENVVRQTVKNVLRPEVIKEISENCAAALKADASDESLVQALKAQLAETDKALRNLLKAIEAGIISSTTRERMAELESQKSELEAQIAREQLRKPEITAEQISFWLESFLAGDIHDPKYQERIINALVRRVDVYDDGPEKQKLTIFYNITKNNRSFSKISISKCSDIECIALGKMDHAVRVHPRAVIRRQSETA

SEQ ID NO: 13686 - protein, 488 aa, synthetic construct
MPEALNAVIYARYSSDRQTEQSIEGQLRECYAFAKANDIAVIDTYIDRAISGKTDNRPAFQKMIEDSAKRQFQAVIVYRLDRFTRNRYDSAIYKARLKKNGVKVLSAMENLNGSPESIIMESLLEGMAEYYSVELSQKITRGMRENALKGKALGGQRVLGYKVNSDCYFEIDETTAPVVVDIFKLYSSGKTVKEICDILNARGVKTARGGAFNKNSLHTILTNKKYIGIYKTKYGEIVGGIPAIIDKELFEMVALRMEQNKKAPARAKAEINYLLSTKLFCGKCRSAMVGESGTSKTGKKYYYYACVKKKREKACDKSNVKKDWIEDLVIQRTVTDILKDDVIEKIADRLVELQKAEAAESGTMLYLQNSLAEIQVSIKNIMTAIEKGIITESTKTRLTELEDEKRNVEIEIAKESIARRIISREQIIYWISSFKDGDITSEKYRQQLIDTFVHAVFVYDDKIVITYNYSGENNTATISDLDLSSPPI

SEQ ID NO: 13687 - protein, 621 aa, synthetic construct
MGKKLSNETTIRAFIYARRSSDRQNEESCPQQITVCKEMAERLGYTVIRVFADEAISGKTDKRPEFQKMVRAIEAGKCDAVIAYKSNRISRNMLQALTYENRFEQHGVKLVYAKEEFGDNAAGRFALRNMMNLNQFYSENMSEDIKRCLYAYAEECKVLGGKLPLGYVKGDDGRYALAHDGTVEIVQEIFSLYCSGVKSSAIVQALNARGVKTSKGKRFTIGTIESILKNEKYKGVYNYGSVRIPNGVPRIVDDNTFKKAQDMLKRAHRAPAKSWAQTDYLLTGKLFCGHCGTTMIGDSGRGMNGTIYNYYCCHNKKKNGADACTKKRIRQEVIEDIVIDYTVKHVLKDELIDKIAEQAVKLQNDDKQMQIHQQHIKQLAETRQKIQNIVDAITDGFRTPAMKVQLEELTEEEEALAKMVAEESYEKPTLTKEQIVKWLNGFKGGDTKDPEFRRQVIDIFVNSIYLFDDHLVIAFHTGKRKETLPFDAALEADALSDSSTLATYAPPKSASTFVLADFTYSLFTIHSPVYSIITFLHSLQLYAYTDDELSAAPFSRLTAPLPRNDRAGRNCFFGVHVTPSRHWMKPASISFPQYGQSIFVTPFLFACQYDTTQICLCTANI

SEQ ID NO: 13688 - protein, 545 aa, synthetic construct
MTNAVIYARYSPGPNQTDQSIEGQIHECTRFCEDNDLRIVGTYIDRKQTGRNDNRADFQKMLRDSSRHGFSTVVVWKIDRFGRNREEIAKNKAVLRMNGVRVLSAKEHIPDGPEGIILESVLEGLAEYYSANLSQNIKRGMRESALKCQFNGSGLSTGYTVDADHKYRIDPDGAAVVRTIFEMYDSGKKIADIQRYLQQSNIKTMRGKEYTHYGISRILRNRVYIGEYHWHDIVVPGGVPPIIDNDLFDRVQKRLEANKHAPAARRGDVDFLLTSKLICGNCKSTMIGDCGTGKNGARWYYYTCRAKKTKSSKCRKKSVPKEALEREVTALTAAYVLRDDVIDYIADRVVEIQKSEHDNKSMLRYFESQLKDTNKAIANIMRAIEAGIITETTRSRLEELEDTKRDLETEIIKEKVARPTIEREQVIFFLEKFRGGNVDDKEYQRKIIDTFVHKVILYDDKITITYNYSTDSTKNAENTVESIESAASAAECKCSNKSSSSPPRKNLVHKNEVFSVIFACGELYCFAVIFGIRRVIFALQASGRI

SEQ ID NO: 13689 - protein, 451 aa, synthetic construct
MEITVEKVDTGVQKLGFQALSTLKTVRVAVYARVSTDQEIQLHSLEEQMKAFRAKIAQHSGWMLVDVYADEGISGTSVKKRKEFLRMMEDCEAGKVDYIMAKSISRFARNTVECLSYVRHLQSIGVQLYFEKEGLDTATSVSELILTVMAAFAQEESRSISENLKWGIRKRFESGESRWTKTYGYRKTKDGEIVIEPDEAAIVRMIFKMYQYGIPMTDILDELTFIQAPSARGKQTWNKTALKYLLENEKYIGDMRLQKWVSVDHISHRSVRNDSTVIPVYNVRNHHVPIIDRHTYQQVQRIMELKSPHGEYSRYPYFDTNIVCPLCGKKMIPRVMKVNSHKRILGCFDVDGCRGYAVKGYLVDAALLEAYNTLEIKEKKRTVAMQRMLEIKAESPKLDTVQYYWLDDLVGHIEFKQDTMRVFWKCGLESCLAMTGTKMVTLSSMRTKLKL

SEQ ID NO: 13690 - protein, 606 aa, synthetic construct
MYRPVKGADFMAKIRKIEPVMPTLPTRKKVAAYARVSMETERLHHSLSAQVSYYSDLIQRNPEWEYAGVYADDGITGTKANSREEFQRMLEDCEAGKIDIILTKSISRFARNTVDLLETVRHLKELGVSVRFEKENIDSLSGDGEVMLTLLASFAQEEITSLSNNVKWGIRKRFEKGIPNFRNKILGYEWEDDHLVVVPEEAVIVKRIFQNFLDGKSRLETERELNGEGITTKAGCKWCDSNIKVVLSNITYTGNLLLQKEYIEDPITKKRRKNMGELPQYFVENTHEAIIDMETFQYVQDEMARRRKLGALANKSLNTCCFTGKIKCPYCGFSYMHHIRKRENGTENYWKCGTTKKKDGRCPVKGGIRDDKLRIACADALGLDEFDETAFLEQVDHIEVPKRYQIEIHMKDGRIIPKDCTPTGHQDCWTQEYRDKVSEQRRKNGTNPKGASCFTAKIKCAECGNNYRRQTRKRSTGEKYYLFACATTKDCSNNYIHEDVLKELAAEALGLSAFDDDTFTDLVDHVDIAPGGHITFVLKDGTSKAMTYSIKRRMPKWTEERRKKQGDAIRASFTEERRQRMSETMKKVRRERYWHSTGKSKRSQQP

SEQ ID NO: 13691 - protein, 570 aa, synthetic construct
MAYRKITDIKDTIGMRAVFYARVSTAEEEQLNAIELQIEENRGCIKDHGWKLVGEYIDRSKSGTMVKGRDDYQRLYEDLYEDLFDIVVIKDQERLQRNTLDWYLFINRVVQTGKLLFMYMDGKFYSPDDALITGVRAIIAEEFSRNLSKKLHNYHDHRIEKARQGQEIALQGSGNVYGWDKKDGKYYINPEQAKVRRLMCEGIMARKGSTLIAKELNDAGYRNTVGKPWKPMDIPKFVYDCKNVGTMIINKERHDFESKQTIKLPKEEWVYVENALPPIVTQEEWDLICKIHEERVIATGSDRRGKKTSGYSFSGKLVCGICGAPYWRKQRVSKDEYWVCSTKQTKGRRTRKRDSTMGKAGEINPLGCDNENISYNSLMEIMGVVSERLQANTDTIKQDMINWLTKLRKQLIEANGGHTEADLQRELSRKSKLLDAYLDGILNKQEYQTKAEELDERIIQLKAETEKNKANSGDIAEIDKVLANIDEEVSRYVDGNEKLKVEYLLEHLEQVQIFPDKVIVIVPILSEGIVVEKTQYVSRAKRCGQDNFNAYDLRCSKAYFRQYLFERKEH

SEQ ID NO: 13692 - protein, 464 aa, synthetic construct
MARSVTVIPARSQKVRTGHKAVQEKKIRVAAYCRVSTDQEDQLHSFEAQVEYYTKYINEHENYEMAGIYADEGISGTNTKKREQFKKMIADCEDGKIDLVITKSISRFARNTQDCLAYSRKLKNLGIGIIFEKENINTLDSTGELLFTILSSLAQDESRNISENCKWGIRTKFKNGEMHLNTFKFLGYDKDENGKLVINKEQAKTVRRIYRDFLIGINPAQIAKELTEEKVPGCLGQTKWYPSTVTGILKQEKHMGDALLQKTYTADFLTKRQVRNNGEIAQVYVKDSHKGIIDKQTWNAVQEEFDRREKFMESHGTDRYSYGADCMPFCEKVFCGECKSLFTRHSWSSRGIVQWQCKNHRKDGKVACTNAYVDNADLEKGFVKAFNRLVTDRDKHMERWQQMKSDGTPLEKIRAGQMMEAVENEPLTRFVPEIAQLVLCEVTVLGAKKYEFFFLEGSRVKVSV

SEQ ID NO: 13693 - protein, 502 aa, synthetic construct
MEIQIREGNSRQKQKLKVCAYCRVSTDADEQENSLENQIRHYKEVITSNPDYEYAGVYSDFAISGFKEKRPGLQKMLADARKGKIDLILTKSVSRFARNTSIVLEATRKLKELNVGVFFELQNINTLSGEGELMLTILAAFAQAESESGSVGAKMVYQRKYEAGIPVQYLERSFGFKKDERGVYIADEEEAVWVRKIYDMAAQGYTLAAIKRYLNENNVKTVGGAKWLDSTVLRILENEIYKGDYIMHKYFVNEERKLVRNRGEVDAWYVEDDHEAIVSPKLWQRAQDALEAKRDYLAESSVIEEFTEENYPYMNRIYCARCGHPLYKRIYSNGNRLNWGCSGTKRYGKSFCEGINIPDGVLRGAWHFDENMYIGEKPTDKGKKEFTYLKEASWKRRHKKKEPEPIPENTETEYPYREKIFCGLCGSRLVRHVNTKNHKVIWVCNGRKRKGKDFCDGTRVPDTIIKGWGEIKKDIYIQRKDDKNGKKRYSYTSKKPKGADRA

SEQ ID NO: 13694 - protein, 535 aa, synthetic construct
MLPSNVKIIKPRAQVVIDEQPLIQYIRVAGYARVSTGKPEQKTSFESQQKHYKSLVARHPDWIDVGLYADEGITGTSIRKRKNFIRMIEDCRAGKIDKIIVKSVSRFARNTVDCLATIEELTALNVEVYFELQNLSSIKDSKTTKLQLTLFASMAQEESETLSESVSYGIRMGIESGRYRMPKAYGYYLDENKKLKIHPQEAEEVRFIFNAFLEGYTAAQICRVLNDRGVKPPKGKAWYDSTIVNMLRNEKYAGDLMLEKTMSRDLKSRKRIPNPGNKYFVGDNHEPIISKEMFERVQREFEYRQNLRGYGKKGKAQYTTKYAFSNKLFCGHCGAKYRRHCYDIKRKDGAGIDHIYTWVCINHKLNGKDACPITQVREETLQRAFVAALNSLVDDKEGFVATVIANINVILQTELSPINIEKLRDQYASKQKELQTLMAQSVTSHDAALVARYETLMVELEELKGRIEKAEESRVTASMHRERSEELQTFLAGKQPFEKFDDMIFRKLVQKAIIKEEEVTFVFSDYLERTVPIIK

SEQ ID NO: 13695 - protein, 512 aa, synthetic construct
MEIQLKRAGSYVRVSTYQESQEKSITDQVRMLNEIIDKDETLVNVGTYIDQGVTGKYQTKRKQFLALIKDCMEGKIDVVYCKQMSRFGRNALETMQAIEKLRSVGVAVRFVLDDIDTIVDKDCSRLAMLASIAEDERDNLQDTMTWSFHRRLEQGHYIFRPDMLYGYGLDENKNMVVIPEEAVAVQYIFEEYAKGTMVKKICEWLNEHGYKTRKGMPFNKSSISDITTNEKYYGDMIIGKWRTEGPKRVKNNGESEMYLFENHHEPIISRELFEKCAEVRRTRSEHSKPVQNYDRADPFRRKVFCGQCGSLFICQGRTNCTHDFAKLAFVCGKATRSSRRECRNKLQRIGTLEDSFMAVFNYLLENRSVLSDIVTDNEEFNEVTARLDELRESEKKYFELEVKGLMNEQMTKNHTRLVGEMLQLEEKRKAFLTRNYEISTCNQNLKKFQKILKTAKPMTTMDAEMCDLFVKRILVMDRNNLIFELTSGHKVKVEVLDFYKTRDEIRRVYVTE

SEQ ID NO: 13696 - protein, 523 aa, synthetic construct
MAKSVTTIPATLSRFTAAPINSTKKRRVAAYARVSTDNEEQLTSYEAQVDYYTNYIQGRDDWEFSGVYTDEGITGTNTKKREGFKSMVADALAGKIDLIITKSVSRFARNTVDSLTTIRSLKEHNVECYFEKENIWTFDGKGELLLTIMSSLAQEESRSISENCTWGQRKRFADGKVTVPFNRFLGYDMGPDHNLVVNPEQAKLVKRIYGMFLQGQSPFQIARTLTEEGILSPGGKDHWNPSNIKSILTNEKYKGDALLQKTFTVDFLTKKKKANEGEIPQYYVKDNHEAIIDPETFEMVQTLMATRKKGRNRKSSVSIFSSKVKCGDCGSWYGSKVWHSNDAYRKVIWQCNHKFDGEKCATPTLTEDEIKELFLRAANQVIDQKEQFIAIYEQVLSRSLDTTALESELSDLEAEINIAAELIEECIKENAHVALNQVEYQKRYGALVARFDKAKARHTEVTDLIAERMARKHQIEAYLKNLRSREPLTEFRETDWLAMVDYITVHSKKDIRVTFKDGTEIKA

SEQ ID NO: 13697 - protein, 563 aa, synthetic construct
MESERMQHSLSAQVSYYSALIQKNPEWEYAGVFADYGISGTGTKKREEFNRMLAECEAGNIDIILTKSIQRFARNTVDLLNTVRHLKDLGIEVRFEKENINSLSGDGELMLSILASFAQEESRSISENVKWGTIKRFKQGIPNGKFSIFGYEWQDDKLVIVPEEAEIIRCMYAEYMKGASRIEIGRALMDRGIYTRQGKPWVDSNVKVILTNITYTGNMLFQKEYCEDPITKHRRKNYGELPQYFVEDTHEAIIPMDEWQAVQAEFKRRRDLGPFGNKSLKLSAFSTKITCGCCGKHYRHSGKRNTAGEVYYIWTCQTKSQKGASACPSKNIPEKMLQNTTAEVLGLAEFDEDAFSQQIEEVIVIGDDTLTFRFYDGHEVTTKWQSTAKTDWWTDERRKLWGERHKRKDTNPNRHLFYEFTGFIKCGCCGANYRCQSGKRKDGTPTRSWYCTGPKDQCHNPGIRDETMKRLVADVLGLDEFDEATMDAQIENATILDHTVTFHFRDGHTESRDFLDKRHGTPWTEERREKARESMKAAWTDERREAMSERIKKIRSEKKWPNP

SEQ ID NO: 13698 - protein, 513 aa, synthetic construct
MAKAKQKAATNDISKLAVIYARYSSHNQTEQSIEGQLAAGHRYADLKGYTVVHEYIDRAMTGRNDNRDDFQKMLSDTSKKQFGAIIVWKVDRFGRNREEITFNKYRCKKNGVRVEYVAENLPDSPEGVILESVLEGMAEYYSLQLSQNVQRGLLESAKKHQVIGGNVPLGLMMDAHKKYVPDPKTAPTVKLIFDMYAEGSTTSEIINHLNSIGMRTKAGKPFTKSSLTTVLKNEKYIGVYKYKDIIRDEGVIPPIVDKEIFYKVQELLKVNRRMPSHKWSYSDYILTDKLFCGKCGTAMVGESGFGKMGVKYSYYICAKRRKDKTCDKKPVRQEWIEEIVLQRVQGILQNEELLEFIAENTWQYYLAQDESMEKLKGLQTELDKVEKSAANLMKAIEAGIFNDMTKARMDELDDQRAVIKKAMAEIEIEKGFKLTKDHILYFLEQFKKLDYKDRDCQRRLIDVFVNSIFVYDDKLRIAFNFGGSDSTITLNEVDKADRGEGFVCCASCPVIKP

SEQ ID NO: 13699 - protein, 650 aa, synthetic construct
MTDYIGNYKNRPRRVVFYGRVSTEHEEQLSALGNQMEWYTDLALRNSNWTVVAQYIDEGITGTQMKKRPSFMRMIEHAKEHRFDLIVTRELSRFARNTVDALNATRELKQYGVEVYFVNDGIWTMDGDGEVRLTIMASIAQDESRKTSERVKAGQKMSREKGVLYGSGNIIGYDRVDGTYVINEEQAATVRRIFNLYAEGHGETTVAKMLIEENRKDGGGGLSWTASKVSRVLRKPTYKGYMTYNKSHIDDFLSHNRINHSEEDFVLVKGNFEPIVSEALWETCNQIRSKRAAFVKGKDGRAHKFGVSFPQNKWTKILFCDCGMRFQIEGYDKTANGGKNMRLICARSKMFKKKDAARALNGIPCPAPYASEWKLELMAREVFRTVWKENAEDILGLLRMLDANLNTTGTPNDGNQLENKLSALNEELDDLVSQRASRSITMDDFLSRSTEINNEIINVEGLLQSSIQEQRPKARLDMHSIEAALSDDASFPDGKIEPGFLDRYANRIVKSNNRYIWMLQLMNVQQIMPIQSERQPIAMVTYKSGVPYDIEQEQIGKQDKESAGPDCATICRPQDFFLNMSRTKRKRKLVEWLESCQENQVNVLDEKIPLLSFAVDFVTAYEYQKARGIKIHPGLWKDMRVDIFLVKKEN

SEQ ID NO: 13700 - protein, 523 aa, synthetic construct
MKAAIYARFSSHNQREESIEGQVRACKRFAKEHGMTIVEIYADRGLSGLHADNRPEFQRMIQDSDHHRFEALIMWNLDRFSRDKYDTAVYKTRLKKNGVSLYYSDQSIPDTPEGIILESLLEGFAQYYSANLARNAKRGLQENARKCLWNGGCVPLGYLIDEHQRFVLEPIGAACVRMIFELYASGQSIKSIVCTLNEKGYKTVKGNRFRLGSIQGILRNRKYIGEYHASGITVPNGIPAIVDVQLFNDVQARLGVVASAKAHNKADIPYLLTTKVFCGHCGSPMIGESGTGKGGATYRYYKCSCRKNRKGTCDKKTEPKDWLEENVVRQTVKNVLRPEVIKEISENCAAALKADASDESLVQALKAQLAETDKALRNLLKAIEAGIISSTTRERMAELESQKSELEAQIAREQLRKPEITAEQISFWLESFLAGDIHDPKYQERIINALVRRVDVYDDGPEKQKLTIFYNITKNNRSFSKISISKCSDIECIALPVMENPNMFFLRKNLVFGFSFLILRSER

SEQ ID NO: 13701 - protein, 433 aa, synthetic construct
MERKIKRVEFVAPRRIDVLRVAAYARVSTGKDAMLHSLSAQVSYYSNLIQKHPGWLYCGVYADEALTGTKDNRDNFQRLLEACRAREIDMVITKSISRFARNTVTLLESIRELKELSVDVFFEEQNIHTMSSDGELMLTILASYAQEESRSASENQKWRIRKGFEKGELLNWRFMLGYDIGKDGVTVNREEAELVRKIFRRFIDGESMNAIAADLNERGITGVFDGRWTPQRLRQLLANEKYTGNALLWKHFRNNHIEKKKTVNRGELPMFYAEETHPAIIDAATFAAAKARLDEIAAAASKRSRPTRCAFSGIIVCGQCGEKYKRIKNHNHHAWNCGAYAMHGKAGCSGLQIREDVLQQAAADALGLDAYDEDTFRERIASVISGADHVLTFRFRDGHTAEITWEKPSRARSWTPEMRQAAAERTRQQRRKN

SEQ ID NO: 13702 - protein, 528 aa, synthetic construct
MAKAVRAVTMIPPTINPLTRQAIVATVKRRVAGYARVSTDSDEQFTSYEAQIDYYTQYITSHADWEFVKVYTDEGISGLNTKHREGFNEMIRDALDGKIDLIVTKSVSRFARNTVDSLTTIRKLKDAGCECYFEKENIWTFDGKGELLLTIMSSLAQEESRSISENVTWGQRKRFADGKVSMPYKQFLGYEKGPDGLPKIVPEQAETVRYIYDLFMSGKTITAIAKQLTADGIPTPGGKEKWVGRTVESILTNEKYKGDARLQKKFTVDFLQKKMKVNEGEVPQYYVENSHEAIIDPLLFDRVQEEMARRKALGRSYSGKTIFSCRLICGDCGHYLGSKVWNSTDKYRRVIWQCNNKFKGECKCGTPHLTEEVIKAKFLEAYSQLLPERDRLIEDCRLMQETLTDCTELDREMKEQLQELEVVEELIKRCVDENSSAALNQDDYLARYNGLVDRYEKAEGKIKELEKKRTERMAKADAIGAFMFRLRELDQPLEHFDERLWLEVIDSVTVHRDGDLTFKFQNGKEITV

SEQ ID NO: 13703 - protein, 433 aa, synthetic construct
MSGKITIVSKPPKLERKKRVAAYARVSSGKDAMLHSLSAQVSYYSDLIQNHGDWLYTGVYSDEAKTGTKDSRAGFQNLVADCRAGKIDMVITKSISRFARNTVTLLQTVREFKALGVDIYFEEQNIHTISGDGELMMTILASYAQEESRSASENQKWRIKRSFESGIPWDRTLMGYRMENEHYVIVPREAEIVRRIYNEYLSGSGYQLIAKRLNEEGVPSRFGGKWNQSAVSRILSNHTYTGNLLLQKTFRENHITKRKIFNNGELPKYLAEESHEAIVDEKTFQAVQEEKSRRAARFNKKSVPKKTYPFSSLMVCDNCGKNYPRKITKTGAVWVCGTYNSLGKAACASKQIPESTLQQVTADVLGQNDFTHEWLCHRIQHIRVCNDNTLIFYFKDGSEITRIWKDRSRSQSWTDEMKEAARQKTLERSKHNA

SEQ ID NO: 13704 - protein, 497 aa, synthetic construct
MRYAIYLRKSRADDTSEPLEVTLQRHRQMLEKYMQQHDIAVQDEDVFEEVVSGDSLYARPQMLRLLEAVEAGTYTGVLCVDIQRLGRGSMQDQGMILDAFKWSDTKIITPTRTYDLSNDMDETYTEFESFMGRQEYKMIKKRLRRGLNATIENGGYIANAPYGYDKTKIGKTPSLKINEAEAKFIHMIFDLYQGGMGALTIATTIDRLGAKPRRGEHFARSTILKILKNDVYRGKIVWNRKTCVRPGQRGNEHHLTIYNAPEKWTVVDGLHPAIIDNEQFEAVQRILAGHYHPPANTGKRINPLAGLVLCGNCGRPLQRIAIQSAGGPLLGCQVPGCIVSSKLEYVEQAVLREIQKEFDKLCANAEQKQQESQIDYAAMAKSIDAEISTAHQQLGRLYDLVEQGVYTIEVFNERRGALLSRISALEDERKNLVPPQQLDLEKMRANIEAVFDAYPTADFNTKNQLLKSIIDKIVYNKQKGVQPKGFTLEVFLHCLYL

SEQ ID NO: 13705 - protein, 549 aa, synthetic construct
MNNTGVQVRTKTVTKIAANPALSKRNDPNRILRVAAYCRVSTDDEDQLNSYRTQKSYYTELIKKNPKWRFAGIYADEGITGTMVKKRDDFLRMIEDCEKGKIDLILIKSVSRYARNIVDCISYVRKLKALGIGIYFEEQNINSLTEDSEVYIGIYGVMAQSESENISANVKWGINKRMQNGTYACRFTLLGYRRNKDTKEIYIVPEEAETVKKIFQMYLQGRSLDQIKRYLEENNILTVRGNPVWDKGVIKSMLTNEKYVGDIMFQKTYREDCISKRTKINRGEMDRYLVTDNHPAIIDRETFRMAKKEMVKRSSKRRTSSNAVTELGKYSGKYALSELLFCDICGSPFRRKTWTRKGVKRVYWRCLNHVENGDKACPQSRGIEESVLHEAICRGMSKCIPETGDVKNLVRTMLAYATSEDQGPLECQTLENAIRELQEKANEAEEMCIRTEGNKEPYMEQIQKYYASIAELRARIIEIKKQLEKSDEFQTEMQQIDRWLENEDILFAEYDDDIVRYLIESIRVTDDLKLIINVKGGASVTEELYQRED

SEQ ID NO: 13706 - protein, 517 aa, synthetic construct
MTTNKKVQIIRGSKSYAENILRVAAYCRVSTDSEDQVNSFIAQMHYYYSFIKQAENMELVDVYADEGITGTSVAKRDDFNRMIKDCKAGKIDRIYVKSVSRFARNALECLEYLRILKECEVSVFFENDGIDTGALNSELILYIKAAFAEAESTSNSKRVQTANRMRAENGEYVFVSAPFGYRIENNELVPIPEEIKVVERIFKEYLAGLGAGKIAAQLNAEADMIGKPWGKERIRYILSNEKYIGDSLFQKTFTPNVLPLKNRPNRGEVEMYYISNTHAPAIDRELFDAVQEMLKRNMQKKAKCAKSGKYSLSGKLYCGDCGWRYKRKVQNGTAYWICSGDGIAGRHCKTKPLSEEVFFKTFVNFYNRLRAHENLILRNSVTRLSEIKKMITCMDSEISDLDKQLGLLTERHNLYVTLMQGCQMDEISFAEQCAKAEREINKLRSRRNKLLSEDEDEKSIDDIRMLRNKLSSAPKAILKFDFELFDAVVEKVIVEDDSKVSFVLCCGLKLREAIAWN

SEQ ID NO: 13707 - protein, 572 aa, synthetic construct
MASRIAEKLAAKKAAIYIRVSTHWQVDKDSLKVQRRELIAYVTLVLGITDYVVFEDPGYSAKNTDRPEYQAMMDRIRTGEFTHLVVWKIDRISRNLIDFAAMHDELQSLGVTFVSKNEQFDTSSAIGEAMMRIILIFAELERKTTAERVTAVMLSRASDGQWNGGRVPFGYSWSKETKTFSIVPEEAKAIRRMAELYEQYQSLLYVAKYLNDAGIVTKTGGQWTPTTVRTILTNPWYIGQYVYNVHSDGKGIEKRDSDEWITVENHHEPILNEDVFCRMKFLLTRNKRGGVPSHQTYVRKNIHIFAGLLRCGQCGSNMTANLDRRRANGFRPSQYACGSRRRKGTSCTNKYISDTTLGPFVLNYVANIIRASKNSSDTTTPEVLERKLLRGEAFEDVASVSTDALGQLLDAFRSAGDAVEYRPQIAFSGDDNSIREIDTLRARRRKLDNALARLNALYLYDDEAMPEKDFIMQRGQITKQLEEVNARIEELQNQESSEELGDDFIGKASYYIMANKLIEDRYIDYEKYIRAIDPSIPRSFLQQIIDHIVVNDGRVISITFKNGSTHTFTYKA

SEQ ID NO: 13708 - protein, 521 aa, synthetic construct
MKKITKIDGVQNNSTIKKELRVAAYCRVSTGSDAQLESLEAQKTHYERYINSRKDWKFAGLYFDEGITGTKAEKRPELLRLITDCEARKIDFVITKSISRFSRNTTDCLALVRKLQSLNIPIFFEKENLNTGSMESELFLAILSSMAEGESASISENSKWSIKRRFQNGTFKLSYTPYGYDWDGENMIINPAQAAVVKIIFADILSGKSTNAIADELNAEKIPSKKNTNWTSSTIRGILANEKYTGDVIFQKTYTDENFNRHTNYGEVDQYMVPDHHEAIISHADFNAANALVSQRALEKGVKKGSDKYQKRYAFSGKIICGECGDTFKRRIHTCTTYKYVAWACNTHLKDKSTCHMKYVRDDDIKAAFVTMLNKLIYGHRLILAPYLKALENSSGDEAIQRIQHLELLLDQNSEQRETLTKLMAQGYIDQILYNQETNALLLQAETYRSDIEAITICMTGDSAKVTETNLLLHFVSHADMLTNYSEELFESYADHIEISGRNEIRFVMKCGLTFTERIGD

SEQ ID NO: 13709 - protein, 585 aa, synthetic construct
MKQSKNVSDKLSNQKCALYVRVSTHWQIDKDSLPVQREDLINYAKYALNIDKYEIFEDAGYSAKNTDRPAFQQMMARLRTGEFSHLVVWKIDRISRNLLDFAEMYAEIKKLGITFVSKNEQFDTSNAMGEAMLKIILVFAELERNMTSERVTAVMLSRASNGQWNGGRVPYGYNYDKETGLFSINEAEASVINMIYDTYERVHSLLVVARTLNEKGILPRSGTPWSPTTISTILKNPFYTGAYRYNYHDESKSGGNTSSKFLKPKADWISVQEHHPAIVSAERQERVCAILEDNRRSNKRSSKTYVRKNIHIFAGILYCGYCGNQMQSTIDRERADGYRPSIYACSRKRRFDDCENKYISDVVVAPFVLNYIANVIKAQNNFGKSTSIETFERKLLRGPTFSEVEHIEQVGLQEMYDMLRSGISDAVYTSRTLSDIAGAEELADERDLLLAEHRKKERALARLKSLYLYNDEAISESDYIIERKNLSDSIASIDKRLEEIEKHSSRQFTLSDDEFLAKASMFIMTHHLQDKRYVDFEKLIRKVEPIIIKEFINSVTQKIVIKQGKIISIRFKNGIEHKFLYKTQE

SEQ ID NO: 13710 - protein, 523 aa, synthetic construct
MVSFDSIIIYLRKSRSDDPAQTVEEVLAKHERILQDYCMKEYGKAIPEKRIYREVVSGETIQDRPVMQQLLKELETGNISGVLIVEPQRLSRGDLQDCGQIINSFRYTNTAIITPGKTYNLSDEYDRKFFEMELTRGNDYLEYTKKILNRGRVASVRQGNYICSVRPYGYKKITLGSGKDKCHTLEIIPEEADAIRLMYHLYLDENMGFTNIARTLDSLHIKPLKSDNWSAATIRDMIDNPIYIGKVVWNSRKVVKKWENEQITKVRPRNKGDDVICVNGRHEAIIDEHTFDAARNKRGLTPKVKKFKELRNPLAGLLFCGTCGHGMSMKKYVDKRSHTGKVTTVMLCNQQAVCHTKSAQYEDILAKIKVSLSNAISDFKIKLKEQENNNIDMHELRIASLEEELNRLYNKDVRQKDAYEDGIYTKEEYIERNSKLQERILNVKEEIADEKNNVPVKIDYEDKIMTFKDCLSSLDDSDISAADKNILLKSCIDKIIYYNDMPSKPGIGRYIENSFRLEIFLKL

SEQ ID NO: 13711 - protein, 508 aa, synthetic construct
MPTVTVIQPTIAAEQNTKIRCAAYCRVSSDSEDQLNSFMAQTRYYEKAFEKSDREQLVDIYADEGITGTREDKRDEFQRMIKDCRRGKIDRIYTKSISRFARNTKDCLKNIRELKSLGITVFFEKENIDTAKLTDEMMITIMGGLAQEESISISKNLKWSYQKRFEKGIVNVFSAPFGFKLNNGVLIIDKIQARIVEEIFDMFLNGIGYQRISEICQNKYKAYKDKFSYYGIRYILSNEKYIGDSVYQKTFTTNNLPYRKIQNNGQLNKYYIQNTHEAIISIEIFEKAQKLIESRKHKNIVSESPFRGKLICANCGTKYKRKDSRNKIYWVCRKHDNLAELCMNKRVEEKFIKQSFIRLHNKLWHDYKQILVPLQTALQDLKFRKFSGKTQVMDISKEIAKLREQTHVLARLKTKGFLDEAKYIEQTTEFTAKINKLQAELKKLTRSDDEDETLDKIEILIDFFEKRDSPMTEFEETAFESIVDKIVVKSQHELEFHLIGGLKFEEKI

SEQ ID NO: 13712 - protein, 538 aa, synthetic construct
MPTSPNVTVIPAKVQTAENRDKYHQLRVAAYCRVSTAQEEQQNSYQVQIAYYTDLINRKKEWTLAGIFADEGISGTQTKKRTEFNRMIRMCRNKKIDLVITKSISRFARNTVDCLEYVRQLKDLGIGVIFEKENINTLTMTSEFMIALYGSFAQAESESISKNVSWGKEKAYREGKVQFQYKYLLGYKKGEDGKPEIVPEEAETVRLIYTLFLDGYSMSRIKKLLENKGILTSQGKKVWNESLIRSILKNEKYVGDALLQKTFTSDCITHKVVKNHGERPMYLVTDHHDPIIDRDTYNRVQQELARRSSKRKVSDKTITEQGKYSSKYALTELLICGKCGTPYRRTTWTSRGKKLIVWRCISRLEHGKRYCPDSPTIKEEQLHKAIIRAINNYYSCGNDVEKILKANIGNVLECQGQEEIIAAENRLKEIDQARNDLISLIATGGCDEDKLDSEFEKLYKEEQSLSERLAMLKSKNQTSAETQAKLDKIIDMIEHEKFELETFDNVLIRKLIECVKVLSKTEILLIFKGGYEVRTEIE

SEQ ID NO: 13713 - protein, 422 aa, synthetic construct
MRLRKIEPIEAKTKKIRVCAYARVSTDSLKQGESFENQVTTYEALIKSKPEYEFAGVYADQGLSGTSENRPEFQRMLADCRAGKIDLIITKSISRFARNTTIVLDYTRELKQLGIGVYFEENNINTLSAEGELMMTVLASFAQEESRSISENNKWSIGKRFERGEGMINTTRFMGYDKDETGDLVINKKEAKIVRRIFEMYLSGEGCHRIAKILNDEGIKTITGSTWHPSTIKGMLTNEKYKGDFHIQKYYTPEGKRNQTVRNKGEVKSFYVSENHPAIVSEEEWHQVQELMQYHKKQRNIQSGDKYQRRYPMSGMLVCPHCGKSLRRRYVYKRKVEWICSTYIQQGKEACKGIRVRDELLTGLSFTEPMVVEEVFENGEKHYGYTSKAAYDNGERAADRIEEERSSVLPRINRSRRTVIEL

SEQ ID NO: 13714 - protein, 532 aa, synthetic construct
MAKREITMIPATIPKFTGKHTMPGRKRRVAAYARVSTDMEEQQTSYEAQMDYYEKYIIARSDWDFAGLYSDEGISGTSTKYRTGFNQMIEDALAGKIDLIVTKSISRFARNTVDSLVTIRKLKEHGVECFFEKENIYTFDSKGELLITIMSSIAQEESRSISENVTWGQRKRFADGKVSMPYKHFLGYSKGPDGLPQVVEKEAAVVRSIYLMFLEGYSPTYIAKTLTSKGIPTPAGKKRWQNSTVESILRNEKYKGDALLQKRFTVDFLTKKMKTNEGEIPQYYVTDSHEGIISPEVFELAQYEFQCRRENGGSQNHNVSPFSGHIICGECGAYYGHKVWHSNDKYRRLVWLCNKKYGKGAGDGLRCKTPHLTDDEVKTFFVGAMNAALSNKQEILDNCRTAVEFLTDTSQLESDLRKLEAECDVATGLLRKCIDENAHAAISQEDYETKYAALAARYEAAKGKCDNMNEKILQRKLKANRIEAFFKTMETSDIVTEFDEGLWNATVDSLTVYSKKKIVLKLKDGTEIEWHI

SEQ ID NO: 13715 - protein, 423 aa, synthetic construct
MKTITKIDAAVAEPAVAKKRVAAYARVSSGKDAMLHSLSAQVNFYSRFIRQNADWEYCGVYADEAYTGTKNERPEFQRLLANCRAGRLDIVLTKSISRFARNTVTTLETIRELKRLGIDVWFEREKIHTLSEDGEFLITLLSSFAQEESLSTSENQKWRVRKNFKEGKPTSARITGYQLIGDTFVVIPEEAETVRSIFSLYLSGLGKTAIAKKLNARGIPAKNGGLWHESVIGNILKNEKYVGDMRLQKTFIADHISKRQVKNEGQLPQYYVRDAHEAIIDRDTFERVQAEIQRRAEKHAPNQPHKNAYLFTGKIVCGKCGKHYKRKTTASKAVWICSTFNQLGKAYCASQQIPEQVLLDLVDGEPFTQLRIPKANTVVIIRPDGAEITKHWHTSRRDSWTEEKRMDASKKAKERYGTWQKEK

SEQ ID NO: 13716 - protein, 572 aa, synthetic construct
MNEQKIVALYTRVSTGYQIEKDSLPFQKKELTAYCKHILHADNMELFEDAGKSGKNTERPAFKRMMNKIRAGEVSHVVVYKIDRISRNLVDFSVMYDEFRKYRVTFISLNEQFDTSSAIGEAVLKIILVFAELERKLTSERVTGVMIDRAISGKWNGARMPFGWKWNPETQFPEHDPVESEQARTLYRVYDETHSTAKVRDFCYDNDIQTKRGGKWTTTTILNFLKNPMNKGDYRYNYRNSARGMKKPENEVVYLPGVFPPLVDPDLWERVNAVIKTNGEKSRTSENPHVKKHTHIFAGGILKCADCGASFQVSRLDKPRLNGFQPSLYVCTSRRTYRACNAPGASDVVIGAFLFNYVRNLVQATKSRSKISAPADLERILLSGDEFSGIRCIDSADLDIVYQAIRGTIAPGSGVTYVPAPLASEKTDAPEVAGLRAEAARLSRALERLKNAYLFDDNALPESEYLSTRSDLTEQLTRINNKIADALTDNSYKAAAELSFVNSASSFLLSYRLQGADHIVYSDFAASVDVSVLKNFVNLIVDHITIKGGSVAEIVFKNGLRNRFIYQDNGDA

SEQ ID NO: 13717 - protein, 597 aa, synthetic construct
MANKVVKVIPARPQGIIIDQAGVIKRKRVAAYARVSTEKDEQTNSYEAQVNYYTNYIQANPEWVFVGIYSDAGITGTSTKKREGFKRMIDDAMNGKIDLILTKSVSRFARNTVDSLVNVRKLREKGVEVYFEKENIYTLDTKGELLLTILSSLAESESVSISQNTTWGQRKRFADGKVSFAYSNFLGYDMGQDGKLHINEEQAKVVKRIYEEYLLGYTPSYIAKRLTADNIPTPQRKKVWYQGVIDSILTNEKYIGDSILQKTFSTDVLTKKRKKNEGELPQYYIENNHPAIITDEIFEMVKEEMARRKSAGLMTNVSCFSGRILCGDCGGYFGRKVWHSNQPNRTIVWQCNKKFSNPDACGTTSIKEKAIEEAFVRAFNEMFSRKDEIIENYKLCIDVICDDSKFQERKNELDKALEEKTIVIKDFLLKCSKTEENIEESNTRYDVLIKEFEALNAERQKCLDMISSLAAKRVKINSFLNILNSTEGVINSFNEVLFQKSVNHMVINHDLTIDVIWRDESKTTTYIERGVKEVKKSAPRIKPEKVLSDHICLCCGKQLYITPGKVQRIFCNKKCGETYRRAKAKEARLENNTISHA

SEQ ID NO: 13718 - protein, 430 aa, synthetic construct
MKKIVKDITPELRANDTIKRVAVYARVSCEKDTMVHSLKAQIDYYRKFIMKNPGWKFAGIYADEGKTGTKEAREQFQALLTECRNGNVDMIITKSISRFARNTVTLLSITRELKELGINVYFEDQKMDSMSSDGQLMLTLMAGIAQAESKDCSDAVKWRIRHGYEHGRASSFKILGYRWDDGNVVMVPEEAPLVKRIFDLYLSGKGANAISKILNSEGVTAAGITKWAPTTIRNVLMNEKYYGDLLLQKSFVEDHINKRKVINNGELPQYFIEDDHEAIIDRQAMSDVKNEIAIRRARFYHGQGKESCLTSKIKCPYCHANYHRKKINGISKWSCATSNRKGKSMCPKSKDIREDVLLAILAHQLGYKDFDEKLFAEQVDYIECFDDHIITHFYDGSIKNSKWSNPSRKDSWTDDMKEKARQRGLNQYGK

SEQ ID NO: 13719 - protein, 458 aa, synthetic construct
MAEKITKIAAKPALISKKRVCAYARVSSGKDAMLHSLSAQVSYYSKYIQGYPDWIYSGVYADEALSGTKDERPNFQRMIADAKEGKIDIILVKSVSRFSRNTVTLLEVTRELKESGVDVYFEEQRIHTLSSEGELMLSLLAGFAQEEARSVSENMKWRIKKDFSEGILWGGKSYLGYDVVDKKLVIIPEEVEIVKRVFSMFLNGMGIQKITNILNADGVKPKVSNHWSKSTVRHLLNNINYTGDLLLQKTYRIDYLTKKKKINKGELDQYYIENDHEAIISKEDFKKVQELIKVKGERNKINSSKRTFSVFTSKIKCGKCGASYRHKVTRYNKVWICQTYDSIGKASCASKQIPEEQLIQAINKYLGIDNFSDEAFNKQIKLITVLPDNILRILSTDDKETDIRWEDPKRSNGWTPEMREAARQRTIQQWKKEEMMANGKSYNNTFKTESCYTSKSRC

SEQ ID NO: 13720 - protein, 486 aa, synthetic construct
MQLTSYEAQVDYYTELIKANDEWEFVKVYADEGITGTSLKNRKEFNKMVNDALDDKIDLIITKSVSRFARNTVDALTTIRKLKEKRKEIYFEKENIYTLDSKGEVLVTIMSSLAQDESRNISENVTWGQRKRFSDGKYNLARKNFLGYKKDQDGNIVIDEKEALVVKKIYRYFLDGVTPGGIAQSLMEEGVPTPGGKTKWIYSTITSILQNEKYKGDALLQKRFTVNFLEHKMKKNEGEVNQYYVKKGHPAIIEPLIWDRVQLEIKRREMGKNVYSSKDVFSSKLKCAECGSYYGKKVWHSNDPYRKVIWRCNHKYDGDKKCDTPTLEEDKIKDAFLAAYNNICVNKEIVIETTKELVDSLCDFEDLDNKIIKESEDLDLIADKVHKMVMENASTAQDQEEYQKRYDYLSNKYDEGKAKVKALQEERARRATQKEILELKIKELETADILKEWNGSVFKMSVDEILVSKEELTFKFYIGDEIKIKL

SEQ ID NO: 13721 - protein, 546 aa, synthetic construct
MAKPEVSELAVVYARYSSHSQGEQSIEGQLSNARDYAAAHGYTIVHEYVDRAKSGRTDNRAEFQQMLKDTAKRQFSVIILWKVDRFGRNREEIAINKMKCRKNGVRVEYVAETIPDSPEGVILESVLEGFAEYYSLQLSQNIRRGRAESAEKCQSLGGNRPLGYKTGADKKFVIDENTAPTVKMIFTMYADGKTVTEIVDKLNELGLRTLRGGPFTKNSLHSILKNKKYIGIYEYQGREIKDGVPRIIEDDVFNKVQEMLKINKRAPAKTWSRADYILTDKLFCGKCGALMFGESGTSKTGVKHNYYICSNKKRFRSCDKKAVRQADIEDAVLNATHELLQDDELLDYIVDRTWEYYLAQDNSQEELRNLQRQLAQTDTAISNLIRAIEAGILTEETKKRMDELTQQKADLKASIADREIARGFHLQKSHIAFYLRSLRDADWSDKEAQKRLIQTFVNAVFVYDDHITLTYNFSGDKSTITLHDMQRFEDGEEFGCRASRSTIMWRQKRCLLRKARIYRAFLLPKRRFFSVPKHRCKIAVFPNEVR

SEQ ID NO: 13722 - protein, 527 aa, synthetic construct
MPEQYCLYLRKSRADMDAEKAGDEDTLLRHEKLLMQVAKSKNLNITDIYREVVSGETISARPQMQRLLSAVGQGVYTGVLVVEVERLARGDTIDQGLVAQAFKFSSTLIITPTKTYDPNNEFDEEYFEFGLFMSRREYKTINRRLQRGRIASVQEGKFVGSITPYGYDKVKLEHDKGYMLVPNPDEAPTVRLIFSLYVNGLPQEDGTTRRLGVAMICRYLNEHSIPNRTGNVWVNATVRDMIRNIVYDGKTRWNWRPTHKKMVDGIVKLERPRTKPDTWIISDGMHEPLIDHDTFVKAQVLIDSNPPRPIGERGTVRNPLAGIVICGKCGRRMVRRPKGSRQPEDVIMCGCAACHNVSVYSRYLEGAIIDGLKSWVDTYKLQCSDDDVGTETIAALSEQRAAINKQIQDYKRQRENVYTLLEQGVYTTETFLQRLKIISDKIGVATSSLADLEQVVADEERRLRGKKSIIPKIENLLAAYWSLDSAAAKNDMLKEVIEKVVYEKDKGGRWADPTDFRIKIYPRLPKN

SEQ ID NO: 13723 - protein, 538 aa, synthetic construct
MEQKKRVNCLYRVSTIGQVEKDDIPMQRQYCREFIASHPDWVLQNEFYEKGVSGFKKSAKERDAMQELQQEAVAGSFDILLVYMFDRLGRRDDETPFVVEWFVRNGVEVWSAVEGQQRFDNHVDKLLNYIRYWQASGESIKTSVRVKTRMEQLTKDGCFTGGIVPFGYKLQKQGRINKKNQEVNDFVIDEDAAEIVRFIFYKYVNEGYGAQRISHYLLENGIRRADGSMIPNTTIVRMIKNKLYMGVISNGNAESEIIPELQIVDEATFRRAQELMEKRTTHHADTPLNLRGSSLLVGNIFCGHCKNRLTLTTSGKKYIRKDGTVRNQVKSRYQCHFKARHPDLCDGQSGYGVIKLDEIVDALVRYQLSRIRVSAKDSLIAEQHEKAAALARSRYKMSAMRLEEKQKELSDYEAETINVIRGKSRLNVDRLNSLVAKCKEEIAELSQEVDAQKADMEHQLESAAQEQAEFEKLESWADLYDNCTFEAKKMIVSQLIKAVYVYRDYRLEVEFRVSFDDFRRLCVGCEPNGGRIATVESV

SEQ ID NO: 13724 - protein, 464 aa, synthetic construct
MARSVTVIPARSQKVQTGHKAVQEKKIRVAAYCRVSTDQEDQLHSFEAQVEYYTKYINEHENYEMAGIYADEGISGTNTKKREQFKKMIADCEGGKIDLVITKSISRFARNTQDCLAYSRKLKNLGIGIIFEKENINTLDSTGELLFTILSSLAQDESRNISENCKWGIRTKFKNGEMHLNTFKFLGYDKDENGKLVINKEQAKTVRRIYRDFLIGINPAQIAKELTEEKVPGCLGQTKWYPSTVTGILKQEKHMGDALLQKTYTADFLTKRQVRNNGEIAQVYVKDSHKGIIDKQTWNAVQEEFDRRERFMESHGTDRYSYGADCMPFCEKVFCGECKSLFTRHSWRSRGIVQWQCKNHRKDGKVACTNAYVDNADLEKGFVKAFNGLVTDRDKHMERWQQMKSDGTPLEKIRAGQMMEAVENEPLTRFVPEIAQLVLCEVTVLGAKKYEFFFLEGSRVKVSV

SEQ ID NO: 13725 - protein, 502 aa, synthetic construct
MEIQIREGNSRQKRKLKVCAYCRVSTDADEQENSLENQIRHYKEVITSNPDYEYAGVYSDFAISGFKEKRPGLQKMLADARKGKIDLILTKSVSRFARNTSIVLEATRKLKELNVGVFFELQNINTLSGEGELMLTILAAFAQAESESGSVGAKMVYQRKYEAGIPVQYLERSFGFKKDERGVYIADEEEAVWVRKIYEMAADGYTPASIKRHLNENGVKTVGGAEWIDSTVFRLIENEIYKGDYIMHKHFVNKERKLVRNRGEVDAWYIEDDHEAIVSPELWQKAQDALEAKRDYLAESSVIEEFTEENYPYMNKIFCARCGHPLYKRIYSNGNRLNWGCSGTKRYGKSFCEGINIPDGVLRGAWNFDENMYIGEKPTDKGKKEFTYLKEASWKRRHKKKEPEPIPENTETEYPYREKIFCGLCGSRLVRHVNTKSHKVIWVCNGRKRKGKDFCDGTRVPDTIIKGWGEIKKDIYIQRKDDKNGKKRYSYTSKKSKGADRA

SEQ ID NO: 13726 - protein, 519 aa, synthetic construct
MKKVTKIAETANSKVKLKKIRVAAYCRISTDSDAQLESLDAQKTHYENYITSRDDWEFAGLYYDEGITGTKKDKRPELLRLIDDCKAGKVDFVITKSISRFSRNTTDCLELVRKLQALHIPIYFEKENINTGSMESELFLAILSSMAEGESVSISENNKWAIQKRFENGTYKVSYPPYGYDWDGEQMIINPEQAAVVKEIFAALLSGKGTHAIADDLNRRGIPTKRNGRWTATTIRGMLSNEKYVGDCLFQKTYSDSRFVRHNNHGEQTQYMVKDHHEAIISREDFEAAHAFIRQRATEKGVVKGSDKYQNRYTFSGKIICGECGDTFKRRIHSCIGYKYASWCCNTHIKDKDKCHMLFVKDDDLKQAFITMMNKLVYAHRIILKPYVDALKNTSSDDSLRRIQEIQTLLAQNTEKRETLTKLMTQGIIDPILFNKETNELLSQADSFRDEINALKNAVSGDVTKVTAATALLHFTEKGGIPQEFDDGLFEEYVNRIIVRSRNEVCFELKCGLKLRERM

SEQ ID NO: 13727 - protein, 592 aa, synthetic construct
MIDNCVRAVFYARVSTQEEQQLKALPKQIQENRDKIREKGWVLVDGYVDEGKSGTVIKRRDEYQRLLEDMELNKFDVVVVKDQERLQRNTRDWYNFIDRLVQNKLKLYFYLDNTFYSPDNALITGIKAIMAEEYSRNLSKKMNNSNKRRIEKARAGEEVSAMGNGQTYGYSIVNGKWVVDESQRELVKKMYELYTELHSVRKVRDALNEQGYRNQRGNLFTDENIGRIVKNVMHKGWVILNRHHREFDSKETIEKLEDEWVIVKNDHEAIVSEELWDAVNDEIQSHRNKGNSGTRGKRGGTDLLSGKMVCSCCGRVLWKHASQGSYKSKEGRKYTYKRYTQWYCSGKMGRGELACTDPATISGVKLQKYLVEMADMFLDYSTVEYSKNLLKRRTISWLEDLKDKLTTPNDNGKIEQDLKALEGKRGKLIDLYTDELISKEEFKSRSVDLDAEIEKKRALLVPVEENPDIKAIEDTIANIDAEIEALFEDEAMVEEKKVQFIQEHIKKIYVSKNSDVFIVLDNVAGAFLFIDKEDTRIEVVPVAEYNPEELSEEGITENDFVPFDRESMPVNSCPKFFHPSGEHPWSCRPVCH

SEQ ID NO: 13728 - protein, 520 aa, synthetic construct
MARKKNIAASQNAVIYARYSSHNQREVSIEQQVRECMKHAAELGLHVVGTYEDRAISGKTDKRPNFQRMMRDAEKGKFQAVVAWKSNRIGRNMLQAMVNEAKLEDCGVKVFYAEEDFDDTAAGRFALRNMMNVNQFYSENMAEDITRGLYDNASKCMANGRQPLGYKRGEDGRVVLDEANAAVVREIFTRVAAGDLFVDIARDLNAQGIKTSKGANWNKGSFQSICQNERYRGIYIYGDVRVADGIPRIVSDDLWYRVQEAMRMKKNPVGTRHRVGAEDYLLTGKLRCGHCGSYMTGVSGTSRNGELHYYYTCQKRRTEHACDKKNIRRDVIEPAVARAIKMYCLTDDVIAWIADRTVEYWEKHDNDLQIEALEQQLEENKKATSNMLKAIEMGIITEATRTRMVELETEQSRLSVQLNVAKEDVVKIDREQIISYLELLQQGDIHDRDFQMELFKNFLVAVYVYDDNRMKLVFSCIGDQNSVEIPLETGEDPPDGGLSPDAKMFVLTPDSSTKKAPYFM

SEQ ID NO: 13729 - protein, 463 aa, synthetic construct
MSFFTPNPQLFGLRVVKYIRCSHDDQVLHGDTLEAQDLILEDFIKVNRMILVDTFIDEALTARKRFNKRKEFVRLLNGVKAHDFDLIIFTKLDRWFRNIGDYHKIQEILEANGVQWKAVTENYDTTTTNGRLHINIRLSVAQDECDRDSDRIKDVFAYKLKNKTYVSGSLPRGLKLDAEKHVIIDPEWNCFALDMFDRFEATCSKRDTQLFLQEKYNIRVCYDTVARYLKNPLFKGQYRDDPDFCPATISPERFERIQKLAIRNVRIRHTQQFYIFSGLLICSSCNHYMCGTVTYRRMADGSEKMYKNYRCNFKAQSKLCDRGKTYREADLEEYMLAHIRPALSDYIAKYEVTAASTVQKNPVTEIAKIERKMKKLYDLFMDDLIDKEAYRSEYDKFKAQIEELQKCSTAAPMRSLDSVKKLLSEDWEAVYHTFSDREKNTFWKSFVESVLVYEDGSMDIRFL

SEQ ID NO: 13730 - protein, 464 aa, synthetic construct
MARSVTVIPARSQKVRTGHKAVQEKKIRVAAYCRVSTDQEDQLHSFEAQVEYYTKYINEHENYEMAGIYADEGISGTNTKKREQFKKMIADCEGGKIDLVITKSISRFARNTQDCLAYSRKLKNLGIGIIFEKENINTLDSTGELLFTILSSLAQDESRNISENCKWGIRTKFKNGEMHLNTFKFLGYDKDENGKLVINKEQAKTVRRIYRDFLIGINPAQIAKELTEEKVPGCLGQTKWYPSTVIGILKQEKHMGDALLQKTYTADFLTKRQVKNNGEIAQVYVKDSHKGIIDKQTWNAVQEEFDRREKFMQTHGTDRYSYGADCMPFCEKVFCGECRSLFTRHSWKSRGIVQWQCKNHRKDGKVACTNAYVDNADLEKGFVKAFNKLVTDREKYMEIWQQMKSDGTPLEKIRAGQMMEAVKNDPLTRFVPEIAQLVLCEVTVLGARKYEFFFLEGSRVKVSV

SEQ ID NO: 13731 - protein, 502 aa, synthetic construct
MEIQIREGSREQKRKLKVCAYCRVSTDADEQENSLENQVRHYEMVIKANPDYEYAGVYSDFAISGFKEKRPGLQKMLADAEKGKIDLILTKSVSRFARNTSIVLEATRKLKELNVGVFFELQNINTLSGEGELMLTILAAFAQAESESGSAGAKMVYQRKYEAGIPVQYLERSFGYTKDERGVFVADEAEAVWVRKIYKMAAEGYTPASIKRYLNENGIKTVGGVQWVDSTVFRLLENEIYKGDYIMHKHFVNEERKLVRNRGEVDAWYIEDDHEAIVSPELWQKAQDALAAKRDYLAEGSVIEEFTEENYPYMNKIYCAKCGYPLYKRVYSKGNRLNWGCSGTKRYGKTFCDGINIPDGVLRSAWHFKENTYIAEKASDKGVKEFTYLKEQSWKRRHKKKQPPAIPENTEAEYPYREKIFCALCGSRLVRYVNPQSHKVTWVCSRRKRKGKDACDGTRVPDTIIKGWGEIKKDIYIQRKDDKNGKKRYSYTSKKPEGADRA

SEQ ID NO: 13732 - protein, 463 aa, synthetic construct
MNTYFHPQPELFGLRVVKYIRCSHDGQVLHGDTLEAQDSLLDEFIKVNRMVLVDTFIDEALTARKKFTRRKEFVRLLDGVRARNFDMILFTKLDRWFRNIGDYHKIQEILEANGVQWKAITESYDTTTTNGRLHINIRLSVAQDECDRDSDRIKDVFAYKLKNKTYLSGSLPRGLKLDDEKHVVIDPEWHQFALDMFDHFEATCSKRGTQLFLQEKYGIRVCYDTVVRYLRNPLFMGQYRDDPDFCEKTISRERFERIQNLAIRNVRIRHTQQFYIFSGLLICSSCNHYMTGTVTYRTLADGKEKAYKSYRCNFKAQSKLCDRSKHYREEYVEEYMLQHIRPALSSYVANYEVISAASVKKDPAVEIAKVERKMKKLYDLFMDDLIDKASYRKEYEKFQSQIDEFRRCPATPVRNLDSIKKMLSDDWETVYHTFSDQEKNVFWKSFVQSITVHEDGEMDIVFL

SEQ ID NO: 13733 - protein, 534 aa, synthetic construct
MNTVIYARYSAGPRQTDQSIEGQLRVCTDFCKQRGLTVIDTYCDRHISGRTDERPEFQRLITDAKRKKFEAVVVYKTDRFARNKYDSAVYKRELKRNGIQIFYAAEAIPDGPEGIILESLMEGLAEYYSAELAQKIKRGMHESALKCQSTGSGRPLGYRVDEQKHFQIDPESAQTVQTIFEQYIKGESNAAICELLNSRGLRTAQGKPFNKNSINRIIKNRKYIGEYRYHDIVVEGGMPAIISKDTFNLAQAEMERRRTRKAPKSPKAEYLLAGRLFCGHCKGPMQGVSGTGKSGNKWYYYYCGNTRGENKTCDKKQVSRDRLERAVVDFTVRYILQEEVLEELARKVHAAQERQNDTASEIAFYEKKLADNKKSIANVLRAIESGAMTQTLPARLQELENEQAVILGEISFLKGKRLAFTEDQIFFALMKHLEPYPGESEQDYRRRIISDFVSEVYLYDDRLLIYFNISSEDGKLKSADLSNIEGGEFDEGLVSSTIQQKTSMKSGFLFFVHEFCMNFNVKKRVTMNKHCHSS

SEQ ID NO: 13734 - protein, 587 aa, synthetic construct
MKKGIALRTVKKTAEELLNTIKVAIYIRVSTHWQVDKESLPVQRQDLISYCKLILNTDNYVIFEDPGYSAKNTDRPDFQRMMARVRTGEFTHILVWKIDRISRNLLDFAAMYQELKELGVTFVSKNEQFDTSTAIGEAMLKIILVFAELERHMTSERVTAAMLSRATNGKWNGGKVPFGYKYDKGAQEFVIDEAEARVVKLMYDLYDEQRSLLVVSKELNDRGYRSRKGSLWSPVTVGNLMRSPFYIGVMRYNYRDESGATFTFKPEDEWIMIEEHHPQIVTHEQWNRVVDTMKSQRRGQPGHGKSFNRGNVHIFAGLVTCGYCGSLMRATKDRVRADGSRPSIYNCASKRTGSDCPNKYISDLTIGPFVLNYIANIIRARKSFGVSTSIETLEKKLLRGDTFKDVIHIGRPGLEELYRHFQGTRGVEQNFMASPGATASNTEEERDLLLAEKHRKERALNRLKALYLYSEEEQAMSEAEYIVERKRLLDSLEGIDARLAEIDEALAQQIKLSDEEFIQKASYFIMAQQLTEKRQIDYTRFMRKADPQIVKNFIQNVCANFCIKSGRVTSIRFKNGIEHQFFYRDPE

SEQ ID NO: 13735 - protein, 544 aa, synthetic construct
MRVVLYMRYSSDRQTEQSIEGQNRVCTAFCEQQGYEIVDRYIDRATSAFKDTDKRTEFQRMIRDSEKQLWEGIVVYKLDRFARNRYDSATYKARLKKNGVRVISATENISDNPEGVILEAVLEGMAEFYSKELSQKITRGMFESANKCHSIGGHIPLGYKIENKKLVIDEAGAAIVREAFDLYANGATVAEICETFNTKGYRTAKNAEFNKNSFRSMFKNERYIGIYKYKDLRIEGGVPAIVDKDTFAIVQKKLSKNAEAPSRGKAKIDYLLSQKLFCGHCGSLMTGESGTGKGGTTYFYYTCGKRKREHTCDKKPLKKDFIERAVVEDALTLLTPETIDELADIAVNESIREMEENSIIPALKDQLHDTERSINNLVKMVEKGVESDTIADRLKELEKEKRAIEKRLVVAQDDYVLLEKDHIVWWLSEFCNGDIEDEEFRRHIIDLLVNSVTVWDEPDGWYKITSVYNLTSNKTKTFRCSDLSGQAPPKPQRRKSLGLYFLLLHYSLNSPLALWKERYIMYFLSHWFFSKFALVRYICYNLFG

SEQ ID NO: 13736 - protein, 516 aa, synthetic construct
MARKKKVSPGNRLVAYYRYSGGSQQTEQSIEGQRRDCEAYARQHGLTIVHEYIDRHISGRGVESRLAFQQMIADSSKHLFDLVICWKTDRFARNRYDSAVYKKKLRDNGVRILYAAESSVEGPEGIILEGLMESLAEYYSAELAQKMRRGMRESALKGRAINPSRPLGLTTDEHKRFIIDEKNAPTIRFIFEHYAAGESSASIVEQLNAAGLRTSKGNAFNKCSIPRIIQNEAYHGVYICKAYDVRIDGAIPAIIDDDLWKRAQKMLTLNKQHRAPHSSHADYLLSGKLFCGCCHSLMRGISGHNCRNDVYYYYACGNKADGGTCKKKNIPKDVAENLVVNAICENVLRPDTLEDLADAIAAAQQADVNQPDPERAMLEQNLADVHRKINNIIESIENGTASSRLSARLADLEQQESTLNYQLESMKEIHPPVLDRERILFLLEQFLISPNERTEDYNRRIIDTFVNRIEITDTEMLIYFNLSEASASEKQKNSQPNSCSTGNHLVRVARIELTAS

SEQ ID NO: 13737 - protein, 519 aa, synthetic construct
MKKVTKIAETTSAKVKLKKIRVAAYCRVSTDSDAQLESLEAQKSHYENYITSRDDWEFAGLYYDEGITGTKKDKRPELLRLIEDCKSGKVDFVITKSISRFSRNTTDCLELVRKLLALRIPIYFEKENINTGSMESELFLAILSSMAESESVSISANNKWSIQKRFENSTYKVSYPPYGYDWDGEHMVINTEQAAVVKEIFAALLSGKGTHAIADDLNQRGIPTKRNGHWTATTIRGMLSNEKYVGDCLFQKTYSDSRFVRHNNHGEQTQYLVKDHHEAIISREDFEAAQAFIHQRATEKGVVKGSDKYQNRYTFSGKIICGECGNTFKRRIHHCTGYKYTAWCCNTHIKDKDKCHMLFIKDDDLKQAFITMMNKLVYAHRIILKPYVDALKNTSSDDSLRRIQEIQTLLAHNTEKRETLTKLMTQGIIDPILFNKETNELLSQADSFRDEINVLKNAVSGDVTKIDEAAALLRFTGKGGILQEFDDDLLQEYVNRIIVRSRNEVCFELKCGLTLRERM

SEQ ID NO: 13738 - protein, 522 aa, synthetic construct
MGNVMVIPARRQVGNTVKQSAQKKLRVAAYCRVSTDSEEQETSYEAQVTHYTEYIQKNLEWELAGIFADDGISGTNTKKRNEFNRMIDECMAGNIDMVITKSISRFARNTLDCLQYIRQLKEKNIPVYFEKEAINTMDSKGEVLITIMASLAQQESQSMSQNIKLGLQYRYQQGKVQINHNRFLGYTKDDNGHLIIDPEQAEIVKRIYREYLEGSSMNKIADGLMADGILTGAGKTKWHTSTINKILRNEKYIGDALLQKTYTTDFLTKKRIKNNGTVPQYYVEDDHEAIIPKELFMQVQAELVRRRAVHVSPTGKKRSFSCNHCFAQMVLCGDCGELYRRVHWNNHSCKSIVWRCISRLEPISAEKSCTNRTVNELLLQEITVKAINQILTERDFFLKTLQQNIAKAVVGADTLSPDGIQARLEELQKELIKKANNKQDYDAIADEIFRLRDQKEKSELDSHHREEAMNRIKELQDFIAAQETGITEFDETLVKKLIEKITVFADHFIVEFKSGITIDIEG

SEQ ID NO: 13739 - protein, 577 aa, synthetic construct
MRGAIYSRVSTEQQDYSKQTNELQEYAERNGIEVVYVFEEKESGFNNNRPEFEKLRKLTKQDIDIVLVWEISRISRRAIYLQQQVQEFTDKGICIYAKKDGFSTLNDDGSVNASTKMLIGFASIIAEQEAATLKERTISSKRNKILREGKSYTYYAPYGYDYSKETKILSINEKQAQVIKRIFQLSTEGYSTERIAILLNAEKIPTKGRKKNWTAATVCNMLSNPVYKGEAKYSLKKEKKAGSTYTKPIEVVTIPTPAIVSKELFELSRQKLSERVWRSNSFGTKYNPLLRGLIYCPYCDIKYTYNFGTNLYLCFNKYKKASNKNVHCTAKCISNRLDSIVWNVVKTFFYKELSAGKAQEQIEPLQAEIESYKQQIHLLDGKQSELTAKATIIVDAAIEIKTKFHNMPDLYTNKMKEVEEINKEASKYQKEKERLEKLIHSNEYRIKNINRVSKESTLVESITDETEKYDLVHKAIDKIMVFGEDKTSIIIVTFTTGQTIYLGYSSKSNSKYYTIFCPTSDIYFDIQTEKGYIHSNGKPAINSDGSICLGDLTGETKEYGIADFVNYLDRKEDRRYY

SEQ ID NO: 13740 - protein, 463 aa, synthetic construct
MPSKIERCAIYIRVSTAEQMMHGKSLEAQKQYLTNYAKEHNMTVAGVYADEGKTARKELKKRKAIHSLLEDVKAGKIDVIIFWRIDRWFRNLSDFYKVQEVLDNNNVRWISTSEPGINMETRDGRLQLNVVLSIGQNEVDTTSERIKFVNEASIRQGKLIFGDVNMGYGYKSGIIDGVKRMVKDPDREDTVNAFYRFFFKHHAKGLSMRYIQENYDPDFTWANMRTLLSSEFYKGTYRGIPYCPAYLTESEWNNLQEIQNANVKRAPSGRIYLFSGMINCPICGRRLSARGGSSIINRKTGAKKVYCYYRCNKAFIDHKCTYKHMVSQNLIEQYLIDHLEYEYNKFKIKCEKIEKEQEKKKKVQTPEKLQKELERLNLLFQKGRIEWDYYSKEYDRIENELNELLNAAPELEPDYAYLEELLNTDFRTMYYNLTQENRRAFWHSIIREIHLNTDHTVDSVDFL

SEQ ID NO: 13741 - protein, 530 aa, synthetic construct
MPYCLYVRKSRADAEAEARGEGETLTRHINALLDLAKRRHLDITQIYREIVSGETIAARPVMQQLLSEVEQGLWDGVLVMEVERLARGDTVDQGIVAQTFKFSDTKIITPIKDYDPNNEFDEEYFEFGLFMSRREYKTINRRLQRGRIASVKEGKYVGSQSPYGYQREKLVGDKGYTLAPLPAEADIVRLIFQLYTKGEEQEDGSYKRLGVSRIVRRLNDMRIPPRKSTHWSPATIRDILINPVYIGKIRWNWRKDSKKMVDGRVVIARPRSSIDDCVLADGKHPPLIDDATFALAQEYMAQNPPHPIGERNKVKNPLSGLVVCAKCGKKMVRRPYNDRNQADTLLCADTACDNISSALFYVEERVLQALSDWLAEYRLQWETADDTSENASAVNLKEKALRRLDTEYDTLNKQLDNAHDLLEQGVYTTEQFLDRSRKLSERIKKNEADRSTLGADIAADKKREQGRKQIIPKVEKLLDVYDSLPSAKAKNDMLKEVLEKVVYLKTKNGRWNNAPDDFEITLYPKIPKSD

SEQ ID NO: 13742 - protein, 668 aa, synthetic construct
MAYVRNKKKILKFWSKKKAALYVRVSTRYQVDKDSLPFQRKKLKEYCKFLGIEDFVIFEDDGYSAKNTDRPHFQEMMSRVRDGEFSHLIVWKVDRVSRNLLDFAAMYQELKDHKVTFISMNEQFDTSTAIGEAMLKIILIFAELERNMTSERVTGIMLDRAEQGLWNGARMPVGYRWNPEIKFPEPDPEETKIVQFIFDEYERVRSTTKIARYLNHNQIASKRGGQWTSKLIRDIIRNPFYIGTYRYNLRESGRGPLKPESEWIIRENNHPAIITKEQFDRCNAIMDENGTSRDTSELRARKYVHTFSGRLVCGKCGANMIASKDRARANGWRPSMYRCAQRSRMMDCDNSKTVNESYIGPFIFNYVANLARIQKNFKNIKTLEQLEKELLKGPEFENMKVSKESLRRTFDALAFQEVGKGAYLPDIDLSDGDDDYTAAEQLSILKRELDKCKTAIDRLTDLYLYDPDSMTKEEFAKKKRDLVNKIAGYEKQIEASQATGGKDDLADLEFIRKASAFLVAQRIVSKKHVDYIQMALDLDNEILKDFVDQVIDRIEILEGRVQSIRFVNGLVHEFTYSTPADLPVCQKCGGHIGSTCGCRTRTFDFAGKPYRRIKVGDPGDKFHGVAGAVCPECSAQAGRWHHWKCGIERCPICGEQLIACEHGPNGKD

SEQ ID NO: 13743 - protein, 501 aa, synthetic construct
MEIQIREGSREQKRKLKVCAYCRVSTDADEQENSLENQVRHYEMVIKANPDYEYAGVYSDFAISGFKEKRPGLQKMLADAEKGKIDLILTKSVSRFARNTSIVLEATRKLKELNVGVFFELQNINTLSGEGELMLTILAAFAQAESENGSAGAKMVYQRKYEAGIPVQYLERSFGYTKDERGVFVADEAESVWVRKIYEMAADGYTPASIKRYLNENGVKTVGGVQWVDSTVFRLLENEIYKGDYIMHKHFVNEERKLVRNRGEVDAWYIEDDHEAIVSPELWQKAQDALAVKRDYLAEGSVIEEFTEENYPYMNKIYCAKCGYPLYKRIYSKGNRLNWGCSGTKRYGKSFCDGINIPDGVLRSAWHFEENTYIDEKASDKGVKEFTYLKERSWKRRHKKKQPSAIPENTETEYPYREKIFCALCGSRLVRYVNPQNHKVTWVCNRRKRKGKEACDGTRVPDTVIKGWGEIKNDIYIQRKDDKNGKKRYSYTSKKPSGIRV

SEQ ID NO: 13744 - protein, 590 aa, synthetic construct
MKTVEKIERKLPVLKTRKRVAAYARVSMESERMQHSLSAQVSYYSALIQKNPEWEYAGVFADYGISGTDTKKREEFNRMLAECEAGNIDIILTKSIQRFARNTVDLLNTVRHLKDLGIEVRFEKENINSLSGDGELMLSILASFAQEESRSISENVKWGMIKRFKQGIPNGKFSIFGYEWQDDKLVIIPEEAEIVRWMYAEYMKGASRIEIGRALMQRGIYTRQGKPWVDSNVKVILTNITYTGNMLFQKEYCEDPITKHRRKNYGELPQYFVEDTHEAIIPMDEWQAVQAEFKRRRDLGPFGNKSLNLSAFSTKITCGCCGKHYRHSGKRNTAGEVYYIWTCQTKSQKGASACPSKNIPEKMLQNTTAEVLGLAEFHEDAFSQQIEEVIVIGDDTLTFRFYDGHEVTTKWQSTAKTDWWTDERRKLWAERHKRKDTNPNRHLFYEFTGFIKCDCCGANYRCQSGKRKDGTPTRSWYCTGPKDQCQNPGIRDETMKRLVADVLGLDEFDEAAMDALIENATILGHTVTFHFRDGHTESRDFLDKRHGTPWTEERREKARKSMKAAWTDKRRKAMSERIKKIRSEKKWPNP

SEQ ID NO: 13745 - protein, 523 aa, synthetic construct
MAKSVTTIPATLSRFTAAPINSTKKRRVAAYARVSTDHEEQLTSYEAQVDYYTNYIQGRDDWEFAGVYTDEGITGTNTKKREGFKSMVADALAGKIDLIITKSVSRFARNTVDSLTTIRSLKERNVECYFEKENIWTFDGKGELLLTIMSSLAQEESRSISENCTWGQRKRFADGKVTVPFKRFLGYDMGPDHNLVVNPEQAKLVKRIYGMFLQGQSPFQIARTLTEEGIPSPGGKDHWNPSNIKSILTNEKYKGDALLQKSFTVDFLTKKKKTNEGEIPQYYVKDNHEAIIDPETFEMVQTLMTTRTKGRNRKSSVSIFSSKVKCGDCGSWYGPKVWHSNDAYRKVIWQCNHKFDGQKCATPTLTEDEIKELFLRAANQVIDQKEQFIAIYDQVLSRSLNTTALESELSDLEAEINIAAELIEDCIKENAHVALDQAEYQKRYDGLVSRFDKANARHTEITDLIAERMARKHQIESYLKELRSREPLTEFRETDWLAMVDYIAVHSKKDIRVTFKDGTEIKA

SEQ ID NO: 13746 - protein, 430 aa, synthetic construct
MKKIVKDITPELRANDTIKRVAVYARVSCEKDTMVHSLKAQIDYYRKLIMKNPGWKFAGIYADEGKTGTKEAREQFQALLTECRNGNVDMIITKSISRFARNTVTLLSITRELKELGINVYFEDQKMDSMSSDGQLMLTLMAGIAQAESKDCSDAVKWRIRHGYEQGRASSFRILGYRWDDGNVVMVPEEAPLVKRIFDLYLSGKGANAISKILNSEGVTAAGITKWAPTTIRNVLMNEKYYGDLLLQKSFVEDHINKRKVINNGELPQYFIEDDHEAIIDRQAMSDVKNEIAIRRARFYHGQGKESCLTSKIKCPYCHVNYHRKKINGISKWSCATSNRKGKSMCPKSKDIREDVLLAILAHQLGYKDFDEKLFAEQVDYIECFDDHIITHFYDGSIKNSKWSNPSRKDSWTDDMKEKARQRGLNQYGK

SEQ ID NO: 13747 - protein, 597 aa, synthetic construct
MANKVVKVIPARPQGIIIDQAGVIKRKRVAAYARVSTEKDEQTNSYEAQVNYYTNYIQANPEWVFVGIYSDAGITGTSTKKREGFKRMIDDAMNGKIDLILTKSVSRFARNTVDSLVNVRKLREKGVEVYFEKENIYTLDTKGELLLTILSSLAESESVSISQNTTWGQRKRFADGKVSFAYSNFLGYDMGQDGKLHINEEQAKVVKRIYEEYLLGYTPSYIAKRLTADNIPTPQRKKVWYQGVIDSILTNEKYIGDSILQKTFSTDVLTKKRKKNEGELPQYYIENNHPAIITDEIFEMVKEEMARRKSAGLMTNVSCFSGRILCGDCGGYFGRKVWHSNQPNRTIVWQCNKKFNNPDACGTTSIKEKAIEEAFVRAFNEMFSRKDEIIENYKLCIDVICDDSEFQERKNELDKDLEEKTIVIKDFLLKCSKTEENIEESNARYDVLIKEFEALNAERQKCLDMISSLAAKRVKINSFLNILNSAEGVINSFNEVLFQKSVNHMVINHDLTIDVIWRDESKTTTYIERGVKEVKKSAPRIKREKVLSDHTCLCCGKQLYITPGKVQRIFCSKKCGETYRRAKAKEARLENNTISHV

SEQ ID NO: 13748 - protein, 453 aa, synthetic construct
MECVAYMRVSTEKQAEEGNGLDSQKRDIQNYCRKNKLIITDWYIDDGYTGSNMDRPELQRLINDCSKKRVKCVVAFKLDRLSRSMIDGIYMIERIFQPNNIEFYCVHDSVSYDSPMEQAYTQMMAVFSQLDKNTMLLRMRGGMLERVKKGYWMGGGNTPYCYEYDKEQGILVPIPEKAEQARQALELFIDGYSDRSISDMLHFSSDIVVSRILTSPVNIGMIPYKGKMYQGRHQPVFQRDRFELAQEVRKSRRKNRTYRKTEPNLLTGLCYCGVCGCKMRYQKWGCEKQKIHCCSRDKYLQYLPNYSANCDNMAIWADEIEKQVEEEIIKISLNLSEYKPKQKESKIEIMQKNLNREKSKLKRLYNLYAEGNDTVLEMVKELEKTIGESKKRIEEEYKNIGNTNKKEYVYENIKSLADVWNTISKTGKNSILKSIVEKIVIVNGDVEIVLKNF

SEQ ID NO: 13749 - protein, 513 aa, synthetic construct
MLYAIYLRKSRADLEAEAMGQGETLARHRAALLDYAAHHGLEIGAVYEEIISGESIDARPKMKQLLREVEQGRWAGVLCMDIDRLARGNSADQARVSNTFRISGTLIITPSKVYDQSRESDEEYVDFELFMARREYKAISRRIMRGRIASVKEGHFIGSTPPYGYDKVKVEKGRGFTLSPNYESDIVKQIYSMCISGMGCNAIARRLDMMGVTPRKGSSWSSASIQDILKNPVYCGKIRWQYRKEEKSLTDGIVTTRRRENPDCIIAQGLHPALISEEEFEKAQQFLNSRRIPHKKESTELRNPLSGLVYCGMCGSMMTRLGTGSRNHSDTLRCPNRNCGNVSAKLELVESALVEGVARWLNDCRVNVSRKPAADTAKAERTAADKVRAELAKLDSQRERIYSFLEQGVYSAREFRERMEALEKRRTQLSENLRQAEQAVSEAEGDRQLYARIIPRVERVMDIYAQSTPEEKNRLLKTIISRAEYIKTERNTRGNADRCNFTLNVTPLFPETD

SEQ ID NO: 13750 - protein, 454 aa, synthetic construct
MECVAYMRVSTEKQAEEGNGLESQKRDIELYCRKNELIISDWYIDDGYTGANMNRPELQRLINDCGRKRVKCVVAFKLDRLSRSMVDGIYMIERVFQPNNVQFKCVHDSISYDSPMEQAYTQMMAVFAQLDKNTMMLRMRGGMLERVKQGYWMGGGNTPYCYTYSKEKGILIPIPERAEQANKAIDLFIAGNSDVAIQRILGYTSELVVRSILTGVVNIGMIPYKGNIYQGLHEPIFDKDKFEMAQQIRKSRRSKKSYCQNLTPNMLTGLCYCGVCGCKMRYQKWTNGVRKIYCCSRNKDLYYLPNFNNDCDNSIEWADNIENIVESEMLKISVNLSKYKPKEKENKIDIMQSQLDKEKSKLKRLYELYADGNDTVLDMIKDQESKVKNLDDSIKEEQKSGDNNPKKQFVYENIKKLADVWDDIDKPAKNKILKTIIDKIIIVNGNVEIQLKNF

SEQ ID NO: 13751 - protein, 558 aa, synthetic construct
MNKLRAAAYCRVSTDRAEQSGSLASQRSFFDDYIRNSDSMTLVGVFYDEGTSGTTTLNRYGFNKMISLAVSGGIDIILTKEVSRFARNTVDTLNITRMLRAKGVGIIFINDNIDTRDSDGELRLSIMATIAQEESRKISERVKWGQQRKMEQGVVFGRSCLGYDVKDGKITVNADSAEIVKRIFTEYTVLLKGAESIADGLNAEQIRTVNGGRWSGAFIRKVLRNVKYVGDLEQKKTCTPDFLTHKKRLNSSEHIYIRNHHEPIISRELWEQTQAEISRRKPTDTSRHSDRYVFSGKVYCGVCGSVMVSRVKTLKNGKIYHALRCSGRIGGKSCNNETLNVTALKACVKRIFTDIPIDKTSVINAVIKGLSRTDKPDIPALRRKIETLNAKKRRAVDLMLDGLITQQELIEQKSYYDSIIEKLSQEISSDRSVFETDKIRKNAERFLDFTSDPIWLLVIRADYIHGTLTVYLKGIEKGFTTCFTATGRGDSYRVITGNTVRSQGIIPGTMQVQKNWFHHDVNDKSIKKSAPDTFQVHFVLICRLFCFLFVAGYLAPTL

SEQ ID NO: 13752 - protein, 572 aa, synthetic construct
MASRIAEKLAAKKAAIYIRVSTHWQVDKDSLKVQRRELIAYVTLVLGITDYVVFEDPGYSAKNTDRPEYQAMMDRIRTGEFTHLVVWKIDRISRNLIDFAAMHDELQSLGVTFVSKNEQFDTSSAIGEAMMRIILIFAELERKTTAERVTAVMLSRASDGQWNGGRVPFGYSWSKETKTFSIVPEEAKAIRRMAELYEQYQSLLYVAKYLNDAGIVTKTGGQWTPTTVRTILTNPWYIGQYVYNVHSDGKGIEKRDSDEWITVENHHEPILNEDVFCRMKFLLTRNKRGGVPSHKTYVRKNIHVFAGLLRCGQCGSNMTANLDRRRANGFRPSQYACGSRRRKGTSCTNKYISDTTLGPFVLNYVANIIRASKNSSEATTPEVLERKLLRGEAFEDVASVSTDSLGQLLDAFRSAGDAVEYRPQIAFSGDDNSIREIDTLRARRRKLDNALARLNALYLYDDEAMPEKDFVMQRGQITKQLEEVNARIEELQNQESSEELGDDFIGKASYYIMANKLIEDRYIDYEKYIRAIDPSIPRSFLQQIIDHIVVNDGRVISITFKNGSTHTFTYKA

SEQ ID NO: 13753 - protein, 463 aa, synthetic construct
MRRKTTAPVEKILLRVAIYIRVSTDKQVKDGDSMRDQLATGQKYIDSHENMILVDTYIDDGISGQKLKRDDFQRLIDDVRAGRIDLIIFTRLDRWFRNLRHYLNTQDILYKHGVSWTAIEQPYFDTSTPHGRAFVNNSMIWAELEAQNDSDRILGVFDDKVDNGEVLSGSTPLGYKIVNKHLVPDDDAPTAVAIFQYYRKTGNLSMTLRYMESEFGLVRSAASLKNMLTNTKYIGEFRDNKNYCPAIIDRDLFFDVQRLLKINIKSGKKHDYIFSGLVVCDDCDHIMSGCQQRAGGRVRADGTRIVYKYSVYRCRQGVNLHRCTNRKLVFETTLEKMLLERIRPELENYIAEYEVANLPALRTDAKRRSVEGKMQKLKDLYLNDLITMDEFKLDREKLLMQLEKINAEDSRPVKDLSYLKNFLKMDFESVYDSLSIPERRELWRSIVKEIRVDHDKNIHIIFL

SEQ ID NO: 13754 - protein, 573 aa, synthetic construct
MAYNAQNKTGARVAIYVRVSTLHQIDRDSLPMQKQDLLAYAKLMLNTDDCVIFEDAGYSGKNTDRPKFQEMMSQMRAGAFTHLLVWKIDRISRNLLDFATMYNELKALGVTFVSKNEQFDTSTAMGEAMLKIILVFAELERNMTSERVTATMISRANNGLWNGGRIPYGYDYDYETHEFSVNEEESKVVILMHDMYEQERSLVRVVRELNERGYRSRAGNLWSPVSLLIILRNVFYCGDYRYNMLKEGDRQKVKDESEWVTVENHHVAIIPKDQKERIMATLDSNSKLCKQRNIYKSSKHTHVFGGLIYCGSCGKPLGSTPGNLTRDGWHYSKYTCPTRRKSVTLCTGKSTSDPIIGEFVFNYILNMLNAQNDFDKISSPEELEKLLLIGDTFTYIDHIEPNGLNDLFNVLSSGAVKGAVFGKGASLPTKKATVEPEVARLRNEKQKTERALDRLRSLYLYADEAMSEAEYMIQKNKLEETLEDINDQIGMMNTDSWQQSVSDEEFIQRASEFIIAQKLSGRKYVNYKRLAMSVDSEVLKNFVVSIIDSITIQDGLVSNIVFKNGLCHTFIFR

SEQ ID NO: 13755 - protein, 481 aa, synthetic construct
METGKFMGGENYIEEVAAYIRVSTQEQKLHGISLEAQVEKLTEYAQNHGMKIVKFYKDEGVSGRKLIKNRPALQEMIQDAEKGKFKRIIFIKLDRFFRSVAEYHECMKRLSVGGVIWTATEEKYDLSTPSGEAFVNMKLTMAQFEADQAGERIRMVNEYKIKSGQPLYGSQCLPFCYAVGCPEEGERHKYIGKRDEEIMRDLIDYVMKNHSVRAGMNYINQKYNRNFLYNAVMNALKNEMICGTYKGNPNYCEPYITREEFNQLQKIISRNPRTTEKRTYLFTGLIRCPRCGYRLSGGQYYTYSRPNKETGKREKRRGYLAYKCGRSRVNNQCDFNNIVQEQKLEKMLLEQLDDIIAGKKLQAISVKSAGKKVSKHDVEALTAELDRLNYAWQKGRIKSVEEYDKSYDDLMDKIHAAENEQAELNQEPDYEKIQAVLSNGWQEIYKELDGEHKRAFWRSFIEEIQVVWSKDKKEIKDIIFF

SEQ ID NO: 13756 - protein, 536 aa, synthetic construct
MKRVYTLYRVSTKQQVDKAKNDIPMQRIECREFAQKQGWEIVKELEEKGVSGFKVSAADRDAIQDLKEAAEKKKFDVLLVYMFDRIGRIDDETPFVVEWFCKHGIEVWSVEEGEQRFDSHVDKLTNYIRFWQASGESGKTSMRIKTRIHQLRIEGAYTGGPVPYGYCLEQKGRLNRKGQPIPDFAIEPHEAEIVREIFRKTLCDGYGSHRMAQYLNNRGLRTHGGARFHSIAIIRILRQKFYCGYIDDETSEGLQNLKIIDLDVFNQVQSILDQRAEKDTEKRQIALRTQGEAMLSGNIFCAHCGGRLNVIRYKDHYTRKDGSEYSVNQIKYACYHKSRKLCDCEGQTTYLAERVDEIVSQVIRQLFATMKGAPQQERLEATLKHQIASNRAQQKKINHELEKRRSRLGKLQEEIANALSGESIYSPEDVAQAISKIKEGISALEQQLYDLENDAFKQRRAMQMITPSYNQFKSWAEEFEQASIEQKKMIACQLFKKIEVGREYNVTFELNMTYQQFCSEWDGLATIFEQQDLIAQ

SEQ ID NO: 13757 - protein, 590 aa, synthetic construct
MRVSVNLNAQKPDTTTNAVIYARYSSHGQTEQSIEGQLAKGHEYAAAQGYTVVHEYIDRAMTGRNDNREAFQKMLSDTGKHQFQVVIVWKVDRFGRNREEIAFNKHTCKKNGVRVEYVAESLPNSPEAVILESVLEGMAEYYSIQLSQNIRRGQLESAKKCQCVGGSVPLGYTLDSDKHFVIDPQTAPVVKKIFDLYAEGATISEITGQLNEQGIRTARKQLFTKNSLTKLLKNEKYIGVYTYKDIVRVEGGVPAIVDESTFDRVQELLKINRRAPSHTWTKVEYLLTDKLFCGHCGSPMVGESGFSHTGAKYSYYGCIKRRREKACDKKPVRQDWIEALVLDETVKLLHDDELMEYIIDRTWEYYQVTDKVQEEKAVLEAQLAEVDKAINNLVRAIEAGIFNAATKSRMDELDAQKAALTASLADLELTSGIRITRDHIEYFLLRLRDLDVKDRECQKRLVQTFVNAVFIYDDGRVKITYNYSGQSSTITLNQIASAEKGKGFVCCLPCSTSSPRFPRGVAALFLFWGKSGANQLPISTVLCYNGSENGRGGMENEKAACCVPDGARLLGLRGVRGRNAGWRYGHFRAV

SEQ ID NO: 13758 - protein, 543 aa, synthetic construct
MKNAVIYARFSSHAQNEQSIEGQLAECRAFAERNNLRIVREYIDRALTGTTDKRPDFLQMIEDSKRKGFQFVIVYQLDRFARNRYDSATYKAKLKKNGVRVLSAKENITDDASGILIEGVLESMAEYYSAELSQKIKRGIAISASKCKYFGGSVPLGYKVDEQKNFVVDEETAPLVKTMFEMFVGGRTYADIIRYMNGRGVTTSRGGKWNKSSFHRIFSNRRYLGKYIYHGEEIDGGMPQLIDDELFAEAQKVLAKYAAAPSRGKAKVEYLLSDKMICGHCGNKMTGISSTSKSKKIHHYYKCTGNNKGICKKRTVRKQFIEDEVVAAIVGEHGVLTDEFIDMVAAETYLLIQSEQNDTEIRRLENLVAENQKAINNLMQALMLGKIADTILAQIEKLENENKELQDTIANEKAMQINYSYADIRKWLSHFRTLDYSKTKNRKDLIDTFIYKVILYDDKMKVLFHLKGAQQGELLLNLIFPDYPDGHGDGGENAKKMPENEKETDKAVSNSDVNAECAYTSRLVELTRIELAAFSLRTRRSAR

SEQ ID NO: 13759 - protein, 640 aa, synthetic construct
MYCIYLRKSRADMEAEARGEGETLARHKRILTELAQRRDLEIGEIYQEVVSGESLAARAEAQRMLSDVQAGMWEGVLVMEIERLARGDTIDQGIVMNTIKYSGTKIITPTKTYDPNNEFDEEYVEFSLFMSRREYKTIARRMNAGRIASVKEGNYIGSRPPYGYDKVKDDKSFTLAPNPAESDIVRSIFSWYVHGCINENGELERIGISKIARKLNDMHAPTRKGGAWVTATIRDMIKNPVYIGKIRWNWRKGVTQFKDGKKTVARPHSPEDSWLLVDGRHVPLVDEDTWNAAQSIIADNRPATVPGNREMQNPLAGLMVCGKCGRKMVRRPYSNREQPPSLICSCNACDNVSAALHLVEERIIEALAFWLKNNAIKYESAKPAATDEEQAAISILNAEITELEKQRKNLFGFLERGIYSEAEFRERRADIDAQITALREDVKTLGDKIILKETYNEAIRNEVPKIRTVVETYSSLSSARAKNDMLKEVLSKVVYTRDKGGRWSGLCDNFVLDLYHKIPTPSPELLQRWDNHIQVVGTDEIAHWEMIGTMIHQCLRDATLKDIEAAGLMGYYTMHSKGVYPADPNGVPFTAAYLQCTGDPIADITEDMAADAAMSKRQHFAQKKKNCPAWQCFFLRCINK

SEQ ID NO: 13760 - protein, 571 aa, synthetic construct
MSIRDKLSALKVAIYIRVSTHWQVDKDSLKVQERELIAYCQMVLGINDYVVFTDPGYSAKNTDRPDYQAMMDRIRTGEFSHLLVWKIDRISRNIIDFATMSEELKHLGVAFVSKNEQFDTSTAMGEAMLQIIMVFAQFERKQTSERVTAVMLSRAGNGQWNGGRVPYGYLWDKETASFQLCETEAGYVRRMAQLYEEHQSLLHIVKWLNDAGVKTRRGFAWTPTSVHVILTNPWYIGQYVYNVHSDGKGVERRDESEWVCVEHHHEPILSEDQFYRIKFLLTRNRRGTPTPGKSYARKHTHIFSGLMRCGICGSNMSASADRRRANGFRPSQYACASRRRKGTTCTNKYISDLTVGSFVLNYAANIIRAARNSAADVQPDILERKLLRGETFKDVESINSEAIQQLLSSFAEAGEAVEYRPQYAFTSASGEGRDMDNLRARKRKLETALSRLNALFLYDDEAMPEKDFIVERTNIERQLAETDKRIAELAATGLSSSEDSSDFLKKASYFIMVNKLIEDASVDYEKLVRTLDPTAIRDFVLNIVQEVEATDGRITAIAFRNGTAHRFKYKT

SEQ ID NO: 13761 - protein, 577 aa, synthetic construct
MALPKKTIPQIEQKRAAIYVRVSTQYQVDRASLPVQRSELVNYAKYALDIPDFVIFEDAGYSAKNTDRPDYQQMMARIRTGEFSHLLVWKIDRISRNLLDFAAMYSELKQLGVVFVSKNEQFDTSSAMGEAMLKIILVFAELERNMTAERVSAVFLSRANDGIWNGGKVPFGYAYDKQTKTFSILEDEAKTVRLIYALYESYKSLVTVSKALNERGIKTRNGSEWSPTTVHTMLSNPFYSGTYRYNYRNESDPHHHVPKKKEDWILVKNHHPAIVSPEHQAAVELILASKSYGKNQTYQRKNIHAFAGLLTCGYCGSTMAATIDRARADGWRPSVYICSRRRMSNDCQNKYVSDVTLGPFVLNFFANLIKASNSFGKSTSIETLEKKLLRGDALSIVDHIERPGLEELYNHLRSGFDEKPFDSLAVNAAEASSDVQERDLLLADKRRLERALKRLNAIYLYGDEEIPGKDFILDRKSITDSLQQIDDRLKELDAAAVFDVSLSDDEFMEKASQFILTQQLLDKRSVNYEKFIRKIDPRIVKDFLNETVSNFCIKDGLTTSVLFKNGIELRFCYKAQQ

SEQ ID NO: 13762 - protein, 455 aa, synthetic construct
MECVAYIRVSTERQAEEGYGLESQKRDIDEYCRKHQLIIKEYYVDAGLSGMEMSKRVELQRLISDMAKIDVIVVYKLDRLARDTVDALYMIEKIFTPKGICVESVHDFARYETPQDKFQTQVMAAVAEYDRNTMMLRMRGGMLERVKRGFWMGGGNLPFCYSYDKELGILVPIPERAETARNALELYINGYSDGRIARICHYSGEPVTRKILTSVVNIGMIPYKGKVYQGKHEPIFDIERYELAQEIRKSRHDAKSWIAHPTNLLTGLCYCGVCGCAMRYQKWGQKEDSPRKIYCCSKNIDLDYLPNYNHDCDSKPQWASDIEKQAEKQMLEISVNLSKYKPKEKETKLQIMQSQLSREKNKLKRLYILYSEGNDTVIELIKQAEEEVKRITAAIEEESKAAKNTQKKEFVYDNIKKLADVWDKIDKQTKNKILKTIISKIVIANDNIEIQLKNF

SEQ ID NO: 13763 - protein, 580 aa, synthetic construct
MEFSKLTRVAIYIRVSTTMQAENGESLNVQRTQLTTYAQMMLNALPENIVIFEDAGYSGKNMDRPKFQDMMSQIRAGKFSHLLVWKIDRISRNLLDFSMMYKELKELGVTFVSKNEQFDTSTAMGEAMLKIILVFAELERNMTSERVTHTMIAMAQSGRWNGGRVPFGYTYRTEGEKKEKQIFEIDKGEAALVQEIFDLYEQERSIVREAKILNDRNAISRYGHEWSPVTVHLVLRNIFYVGDYRYNALREGDRSKPKPESEWIIVKDHHPAIISREQFARVQAILKANKRYRKDMAPASSRERIHIFGGLLFCGNCGKPLNNSVSNKKADGWQYSNYPCPTRRRSSNKCTGKSTSDPVVGEFVFNYILNMLNAQKGFKDIQTPAQLQDRLLFGDAFHNVISIDSDGLNSFFNLLSSGNISGAIYGKDVAVSKPKTAKVDPELVRLRKEKKRLERALDRLLNTYIMSDRPISENEYIRKRTDLETLLSDVNDKLGIAQSEEVQMALTDSEFLTKASQFIIGQKLSNRLYINYKNLAQSVDSSVLKTFVVSVIDNIVIYNGKVKSIVFRNGLAATFEYSSI

SEQ ID NO: 13764 - protein, 456 aa, synthetic construct
MRNKEIAPALVRVALYIRVSGEEQKIKGLSLEAQQERLEAYARERGWVIVGIYIDAAKTARKNIHKRTEFQRMMDSVKRDEVDILLFARLDRWFRSVADYYKVMEVLQAHNCDWKTTDEEYDTTTANGRLYINVKLSIAQNEADIDGERIDVVFDSKIAHGTVVSGSAPFGFRVNEEKRLEVVPEDAAIVQDAFNYFENTVSQRATVRYVRETYGVNWCDATFRRMLKEKLYTGVYDRGGRYNDQFCPVIINRQQFDRVQALLTRNVRSAPSGKVYIFTSILTCAECGHKLVGYKSSDYFYYRCNQHFQRGRCSHNHSAREDVVEAWLFDHLGEELERCQLEWDVEAAKKKASVARTDKAALKRKLTKLKELYVNDLIDIEDYKKDYQIYVSALNQIPEPAQEAPPDFAAVRRLLDNSFRTIYDTLTREEKRTLWRSVIKEIRIDNDQNITGVVFV

SEQ ID NO: 13765 - protein, 516 aa, synthetic construct
MRTVSRIDPIPRQKKKLRVAAYCRVSTDMDAQLESLEAQKSYYENYIDSRADWLLVGIYYDEGVTGTKKDKRPDLLRMMEDCEAGKIDFILTKSVSRFSRNTADCLELVRRLMELHIPIYFEKENLNTSEMEGEFLLSTLSSLAESESVSISENSKWSIQNRFQDGTYKLCSAPYGYRWDGKNLVVDPVQAKVVKRIFTEVLAGKGAGTIAADLNDDGIPAQRCDHWTSTSILGMLTNERYVGDALLQKTFTDEQFNRHRNTGEMDMYCVQEHHEAIISREAFDAVAVLLEQRAAEKNIQKGVNKYQKRYTFSGLIRCAECGGTFKRRVNSGKGGKYAAWCCGTHIADKTKCSIQSVRDEDIKLVFTTMLNKLIYGNRLILKPYLKALKNTSQDESQLRIQYLQGLVAQNTEQRETLTRLMAQGYIDQVLYSRENNGLLAQCEEFRSEIETLKKSQTTDAVQTAETEKLLKFVEKAEIQEEWNSDLLRQFVDSITVDSRNEIGFVLKCGLTLRERI

SEQ ID NO: 13766 - protein, 519 aa, synthetic construct
MKNITVIPARKTAKGAPLVSQQKLKVAAYCRVSTDSDEQATSYDAQIKYYTELIENNPEWTLAGIFADEGISGTNTKKRDEFNRMIEECKVGNIDMVLTKSISRFARNTLDCLKYIRLLKEKGIAVYFQKENINTLDAKGEVMITIMASLAQQESESISKNVKLGIDFRNKQGKVQVNHNRFLGYTKDAEGHLIIDPEQAEVVKRIYREYLEGASMDMICHGLEVDGILTGAGNRKWYTSTVKKILTNEKYIGDALLQKTCTIDILNKTRVANNGIAPQYYVEDDHEAIIPKELYMKVQEELVRRRNVRASPSGKKRMYSCTHCFSQMVVCGNCGEVFKRIHWNNHGCRSIVWRCASRLEQDGAVCNARTVNEKELEQVVLRALNEMLGAKTTYKEQLQKNLMQVLRNDTSAQKGRIVERLLVLQQELLNCANNREAYDDVAEEIFHLRELQQQTDSDETTKAIQMERIKELQDFIGQQGSELTEFDEKLVKRWLRQITVWDDHYTVELKSGLSIDVPA

SEQ ID NO: 13767 - protein, 539 aa, synthetic construct
MSTGTELRAVFYARVSTEEEKQLNALEKQIQENKDVIRDHGWRLVGEYIDEGKTGTTTKRRNDYKRLLKDMTENKFDIVVCKDQDRLQRNTLDWYLFVDNLVTNNLKLFMYLDNKFFKPSEDALITGVKAIIAEEYSRNLSKKLNNSNKRRIERALNGEEVSAMGNGKSLAFKIVNGKWVKDEEEAKLGKKIFELYLEYDSIRKVRDWVNEHGYTNSVGKPFTSESISRILKNEKAKGVIVMGKYHHDFDKKKIVRRSEEELVRIPAPELAYVSEEVFDKVQERLRAKTGNGRGVNAYSDPLSGKIYCGSCGRKLWKHASNGYVNWMCASQVAKGDVECNGTRITTVAIRNIYKKITDNLEVNKGVVKQDIVKWLNELKATLSDTSVNEKIQKDLDKLERKRTKLLEAYLEDFISKDDYKAKYEAIEGQIEEKKKLLVPVEENEDIKVIESVLQNIDDEIDAYVKTLDMEESKVDFLIEHTKRITVLENRDIIIELDLVAGAIIAGKDFLLYVHDTMPFPHGRIHIKRYSNKTWYCRSV

SEQ ID NO: 13768 - protein, 468 aa, synthetic construct
MDKKINNNMNDFTKKVEEVALYIRVSTEEQAINGDSLRTQREALTKFALANHYHIYGIYEDDGFSATNLNRPALQRLLEDVRKNKINRILLTKLDRLSRGVRNYYKVLDVLDAHCVFWQTIFEKYDSSTASGRLHINIMLSVAENESAQTSERIRSVFNNKIHQKEIISGKIPIGYKKEEKKLVVDEDKKALVIDAFNFYLKIGSVYKTFEYLALFDPSMNYPRTARLLANPLYIGTKVCKYGSIENYCEPIISKETFDEVQNLLKKNQRKRDNSDHEFLFSGLLRCNECGYKMSGKYCKNFPPNCTFYYLCSNARLKKKCNMLKQLNETKIEKKLLEQIVPEINKYIDKNNILEQEKVQTRDISKERDKVNKQLEKLRDLYVNDLIQIDHYEKQYKELTSKLDNLKEEEKPVEKKKTVNYDEFKSFLSRDFVSLYNNLSRTEKRLIWASAIDTIYIDDNYNLRIVFI

SEQ ID NO: 13769 - protein, 514 aa, synthetic construct
MSMNAVIYARYSSHNQTEQSIEGQLRDCYDYAKRNDLTVIGEYIDRAISGKTDERPDFQRMIKDASKHQFERVIVWKLDRFARNRYDSATYKHKLKQFGVKVISAMENVGEGDESVLLEALLEASAEYYSLDLKKKIERGMRESALNGKFVGGAVPWWCSVGTDRKLVVNEERAAIVKEAFARYDSGEGSKSIVDDFAKRGLRSNRGMPVTLSWLLSILKNRKTIGEYTYNGIEIPGGLPAVVDKPLFDRVQERIARKRRTGGGEATSKTEYLLQGKLFCGLCGSPITAECGQNRKGVVYNYYACSLKKKKHQCKKANERKDFLEWYVVEQTLDYVLTPDRTDYIAEAIVAEYERQFDKSGIKALEQKIALTEGEIQKTMDLCIQATTDAMRKRFMKRCEELDAKKADMEIDLSKLRVAASITYTKEEVRAWLRQFCAGDSFNPAFRRRIIDVFINTVYLYDDKLIIYYNLRDSRQVSYIEAIGASSEIENLRPVPDNKKSAVECSTADKNGGA

SEQ ID NO: 13770 - protein, 529 aa, synthetic construct
MSRYCIYLRKSRADLEAEAHGEGETLSRHKTALLELARRMGITISATYEEIVSGETIAARPQMQRLLSEVGAGEWDGVLVMEIERLARGDTMDQGLVAQTFKYSGTKIITPLKTFDPQNEFDEEYFEFGLFMARREFTTTNRRLVRGREASAKEGKYVGSIPPYGYRKVKIPNDKGFTLEIIEEQAKVVRMIFEWYAEGAEVNGQKKRIGPYSIAVRLNELGIKSVAGKDYWTIYGVQHMLINPVYIGKIRWGYRKVKKTVTPEGMKKKSREFAQDGDYIVVDGLHEPILSEELFYKVQDLIAANPPTPIKYRHKNINPFAGLIFCAKCGHCMNYRRGYGRQPDYIGCYTAGCDNKASRFDLIEQRVLSILNSWVKDYSVDKAQIKHEVDLNAELSNAISLAEKEIEALQGQLDNVYSFFERGTYTEKIFKQRSSAIEQQIMEIGEKIDRLKAEHQQVLERQNVQAEFVPSIKHLLEIYSTLEPVEKNKWLKQIIDRIVYEKNADGKYHNVDPGDFTLGILPRLPKKGI

SEQ ID NO: 13771 - protein, 513 aa, synthetic construct
MLYAIYLRKSRADLEAEAMGQGETLARHRAALLDYAAHHGLEIGAVYEEIISGESIDARPKMKQLLREVEQGRWAGVLCMDIDRLARGNSADQARVSNTFRISGTLIITPSKVYDQSRESDEEYVDFELFMARREYKAISRRIMRGRIASVKEGHFIGSTPPYGYDKVKVEKGRGFTLLPNSESDTVKQIYSMCISGMGCNAIARRLDMMGVTPRKGSSWSSASIQDILKNPVYCGKIRWQYRKEEKSLTDGIVTTHRRENPDCIIAQGLHPALISEEEFEKAQQFLNSRRIPHKKENTELRNPLSGLVYCGMCGSMMTRLGTGSRNHSDTLRCPNRNCGNVSAKLELVESALVEGVARWLNDCRVNVSRKPAADTAKAERTAAEKVRAELAKLDSQREKIYSFLEQGVYSAGEFRERMESLEKRRTQLSENLRQAEQAVSEAEGNRQLYAQIIPSVERVMDIYAQSTPEEKNRLLKTIISRAEYIKTERNTRGNADRCNFTLNVTPLFPETD

SEQ ID NO: 13772 - protein, 503 aa, synthetic construct
MQRAVIYARYSPGPNQTEQSIEGQVRECTKYAELHDLRIVGTYIDRKISGKTDNRREFQRMIDDSEKHIFDVIILYHTDRFARNRYDSAIYKHKLKENGVELRYATTDIPKGPEGIILESIMEGWAEYYSAELSRKIKRGMRESALKCHSTGAGRCLGYRTAEDKSLVIEPEGAKAVQTVFDMYIKGKSHADICRYLNDCGFRTAQGKLFNKNSVTHIIRNKRYIGVYTYDDITIEDGIPAIISKDTFHLAQLEAARRKTAKRPKEPKAEYLLSGKAFCGHCQKPLVGVSGTGKSGNKWYYYYCQESRAKRGCTKKPVKRDWLEREVVKRTVAEVLQPEVIQHITKKCYDLQMEYRQDNSDVLFYELKLKDVRKAIKNTMHAIESGVKTKTLPARLQELENEEEALEAELAIAKASDFVITADQIEFLLTQFTEPWECESEEEYHRRIIKCFVHKVFLFDDKLLIYYNVSRDGKTREQSEAELLEDALGEGFDKRSSGSTKTI

SEQ ID NO: 13773 - protein, 515 aa, synthetic construct
MLRAVIYARFSSDMQREESIDAQVRACQEHCNRRHYIVTNIYKDEARSGKSIIGREGYNQMMADAMEHKFDVIIFHKIDRNARNEFNYYSFKNTLAQLGISYEYAAQNIDFTPEGQMMENMLVGFAAYYSRNLSKETKKGLNENAYKAQFNGGTPPLGYRIENKHYVIDEHEAEAVRMIFSMYLNGKGYATIAYKLQENGYKTKDGRNFSKNSIYDILDNEKYIGVYSFNRTSKANGAKRNFHSSYRPKDFIRIENALPAIVSEADFYAVQEKKKNNRHRASSYTAKANYLLSGKIFCGCCGSAMSGHRYTPRKNKTYTYYGCLRKDRTAPDRCPQKQLRQDVLEKWVLTIIEKEVFSEQAIAKLVVLMREEYNKFIKATASNKENLLQSKASAERKLNNLYNIIENGAADQYDLERLSTVKKELSDIKEKLDNLQSIANYPELTEKEIAATLAAMRDDFSSNQSSQKFIIDLLVDKITVKDKQITLLLNTNNVSTYMVPRTGIEPVRVSLPEGF

SEQ ID NO: 13774 - protein, 434 aa, synthetic construct
MERVVERVDALIPAQPKALRVCAYARVSTGKDAMLHSLSAQVSYYSKMIQSHNGWMYCGVYSDEAVTGTKRERAGFQHMIEECRQGNIDLVITKSISRFARNTVTLLQSVRELKSLGVDVFFEEQHIHTMSADGELMMTILASYAQEESLSASENQKWRVRKAFENGKIINLRFLFGYDITPDGIRVNEVDAAIVREIFARFNGGESMSSICRDLDARGHKGVLGGTWCAERMRNTLSNEKYLGNALLQKRYRNNHIEKKLLPNRGELPMYYAEGTHEPIIDQATFDKAQERLRILAQQTSNRKKPTHSAFSGLIRCGLCGNTYKRVTYRKKHYWNCTTFQTKGKSECAAKRIPEETLEVLTCEVLGAVSFDPDMVRSKITAIRAEKSNMVVFCMDDGSEIVKRWTDRSRAESWTPEMKEKARQRALQARRKKK

SEQ ID NO: 13775 - protein, 525 aa, synthetic construct
MSKVTVIPATVNPATKMPALTSKKRKVCGYARVSTDKDEQFSSYTAQVDYYTKYIANNPDWEFVKVYTDEGISGTNTKKRDGFNQMIKDALDGKIDLILTKSVSRFARNTVDSLVTIRQLKEKGIEVFFEKENIWTLDSKGELLLTIMSSLAQEESRSISENITWGKRKSAADGKISLGYSQFLGYDKGPNGTLTVNPEQALIVKRIYREFMQGKAAWAIADGLTADGIPTPSQKTKQWSLTTVRSILRNEKYKGAALLQKNFTVDFLTKKVKANEGELPQYYVENSHEAIIPPAEWERVQVEYARRHSLSTKYSGKSIFSTKIICEQCDAFFGPKIWSSNTHLRRKVWQCNAKFDRKTYCNTPYLTEDAIKAAFVEVVTRLFCTREEVITNCETELRALTDCTAIEQEQSMLQEELEVVINLTQKYVDKNATSEEDQNTYLRQYNEYVERYQAIKERLLQLNTERSASIARSVAFEDFLNSLRSMENAPVEFDESMWRLLVEKVVVKKDGFLKFVFTNGMEVVI

SEQ ID NO: 13776 - protein, 426 aa, synthetic construct
MDRTVECIKVDAPAKTNIKRVAAYCRVSSGKDAMLHSLSSQVSYYSGLIQNHADWSYCGVYSDEAITGTKSDRPGFQRMLKDCEAGKIDLILTKSISRFSRNTVTFLQTVRKLKSIGIDVFFEEQNIHSIDGSGELMTTILSSFAQEESHSVSQNMKWRIKKNFEEGIPWNNALLGYRLKGERYELIPEEADTVRRIFREYLGGFGKTKIANGLTADGIPTRFGGPWHPNTVGKILRNETYTGNLLLQKTFIEDHITKKKRINNGERPKYLVESSHEAIIPPETFEAVQKELQKRSEMYYHASKKSVSYPFTGLLICAGCGKTYTRKITPTGAVWICRTFNTRGKAYCPSKQIPEATLYEVTGQITASIKEIRQITVCNGNSLQYDMADGRIISQVWKDRSRSESWTDEKKAAASQQLKKRRKADE

SEQ ID NO: 13777 - protein, 578 aa, synthetic construct
MGYVTKKVAQRFEEKKAAIYVRVSTQYQVDRASLPVQREELINYAKYALGISDYVIFEDAGYSAKNTDRPDYQQMMARMRTGEFSHLLVWKIDRISRNLLDFSVMYAELKELGVVFVSKNEQFDTSSAMGEAMLKIILIFAELERKTTSERVSAVFVSRANDGIWNGGKVPYGYSYDKESKTFSIAEDEAKIVRLIYSLYESEKSIVRVARIMNERGLKSRAGNDWSPTTVHMILSSPFYSGTYRYNYRDESNTKRFREKGKDEWVLVENHHPAIVSPERQAAVGVILESKRYNKNATYQRKNVHVFAGLLTCGCCGSTMAATTDKVRADGWRPSMYICSRRRKSDDCTNKYVSDVSLGPFVLNFFANLIKASNSFGRTTSIETLEKKLLRGEALSRVDRIERPGLEELYNHLRSGFEEKRFESPTIAATESSVDLSERDLLLSEKRRLERALNRLKTVYLYGDDEMASKDFNIEREHITKALSEVDSRINELDIANAFDLSLSDEAFMQKASQFILTQQLLDKRYVNYERFIRKIDPKIVKDFLNETVSNFCIKDGLTTSILLKNGIELRFSYKTAE

SEQ ID NO: 13778 - protein, 573 aa, synthetic construct
MAYNAQNKTGARVAIYVRVSTLHQIDRDSLPMQKQDLLAYAKLMLNTDDCVIFEDAGYSGKNTDRPKFQEMMSQMRAGAFTHLLVWKIDRISRNLLDFATMYNELKTLGVTFVSKNEQFDTSTAMGEAMLKIILVFAELERNMTSERVTATMISRANNGLWNGGRIPYGYDYDYETHEFSVNEEESKVVILMHDMYEQERSLVRVVRELNERGYRSRAGNLWSPVSLLTILRNVFYCGDYRYNMLKEGDRQKVKDESEWVTVENHHVAIIPKDQKERIMATLDSNSKLCKQRNIYKSSKHTHVFGGLIYCGSCGKPLGSTPGNLTRDGWHYSKYTCPTRRKSVTLCTGKSTSDPIIGEFVFNYILNMLNAQNDFDKISSPEELEKLLLIGDTFAYIDHIESNGLNDLFNVLSSGTVKGAVFGKGASLPTKKATVEPEVARLRNEKQKTERALDRLRSLYLYADEAMSEAEYMIQKNKLEETLEDINDQIGMMNTDSWQQSVSDEEFIQRASEFIIAQKLSGRKYVNYKRLAMSVDSEVLKNFVVSIIDSITIQDGLVSNIVFKNGLCHTFIFR

SEQ ID NO: 13779 - protein, 655 aa, synthetic construct
MGLLSKYTSLQIGKLDKKQFMKEANYDDIFTDFGIDLNVMVMCRESTAHEEQQKALCDQVERMKAIIDSHRQFNLVEDGIVIEDGKSGLAMDIRPKFKATIERAVSEDIDIIIVQEASRFSRNVGDFFYNMNILQNAGVGLLIMEGEFWTYFMSPHDYPRLANEVAKGQAESLTTSKRVFRGIETYRERGQLVSGSMFGYDLVKAVDRKDNTYKINPVDGATVQLIFDMYVNKGKGTALIATYLNANNYPTHDRKGEWSASKVRRVLMHEKYANLILYGKFKIINTNTKKKVATHIKPIRYTTYDKDGNVIQERNVVYGTWEPLVDEETWWKAQEILKTRSEEYNITKDGKTIRQNWGRRQSVDAYANKGYCSCGYTLTHVLRHKATDERYSQYAYECRWQKNSGTESYRKKHGLKPSDCTCKLPAVTDVAMKLMSVKVFKYLLTDIRDTIEDTIRIIEMANEQALVNLTNSGVALEELEATLDKLNNRLSRFADMYADGDLTKEQYRAKKESTENEIKHTDELIKSRKLAISEQKKKKLDVASIKERLNTFVDLNGYGVSNEMIEFFVERIIHRDNNEFVWELNLTGQPSKPNKYKIKEYSKEYSDSLKDDSNFNIIKTFVISLDECKEFCETMAHRQFKGAYWSQITVKIAVK

SEQ ID NO: 13780 - protein, 545 aa, synthetic construct
MSGATNKITALYCRLSQEDERLGESLSIENQKDILLDYAKKNHFSNPVFFVDDGYSGTNYDRPGFQSMLVEIEAGRVGIVITKDLSRLGRNSALTGLYTNFTFPQYGVRYIAINDNYDTIDPNSVNNDFAGIKNWFNEFYARDTSRKIRAVQKAKGERGVPLTVNVPYGYVKDPENPKHWLVDPEAAAIVKRIFSMCMEGRGPTQIANQLWADKVLTPTAYKLSHGRSTNAPAPEDPYRWDKRAVSLILERREYTGCTVNFKTYTNSIWDKKRHLNPVENQAIFLDTHERIIDDDVFEKVQEIRNQRHRMTRTGKSSIFSGMVYCADCGSKMQYGSSNNRDFSQDFFDCSLHKKNGSKCKGHFIRVKVLEGRVLSHVQRVTDYILRHEDYFRKVMEEQLRVESTEKLTVLKKQLARNEKRIADLKRLFMKIYEDNASGKLSDERFDMMSQSYDAEQKHLEEEALSIQQEIEVQEQQIENIEKFVQKAHKYVHIEELTPYALRELVSAIYVDAPDKSSGKRVQHIHIKYDGLGYIPLDELEAKEKA

SEQ ID NO: 13781 - protein, 598 aa, synthetic construct
MRKINKIEPLMPVLPTRKKVAAYARVSMETERLQHSLSAQVSYYSELIQSNPEWEYAGVYADDGITGTKSNRAEFQRLLADCEDGKIDIILTKSISRFARNTVDLLETVRHLKELGIEVRFEKERINSLSGDGEVMLTLLASFAQEEIVSLSNNVKWGTRKRMEQGIPNGHFRVFGYRWEGDQLVIVPEEATIVRRIFQNFLDGKSRLETEREFAAEGITTRDGKRWVDSNIKVVLTNVTYTGNLLLQKEYIEDPLTKKRKKNRGELPQFYVEDTHEAIIDKETFDYVQAEIARRKELGAFANKSLNITCFTSKLKCCRCGCSYVRNQRSNRTKHTSTYDDTIVAWGRGTTKKKGGRCSNKDIPERVLREACATALGLEEFNEDVFLERVDHIQVLEGQVLEFHFYDGTTALQEWVSTAKKDCWTDEHKDRQREWIKNYMANNSDGRYSEFTTRIRCEHCASTFRRNTQPSKSANGGKMHYWRCPASGDCVTTGIREDRLKDITASVMGLAEHDADAFKEQVEYISVSDDMKLTFHFFDGREPVVQYNTKRQGTPWTEERHKKFSDSMQGKYTEERREAMSQRMKQIRSEKHWSSKRK

SEQ ID NO: 13782 - protein, 527 aa, synthetic construct
MVVQKKVTTIPASLTRFTATPITELKKRRVAGYARVSTDHDDQFTSYAAQIDYYTNYIKSRDDWEFVEVYTDEGITGTSVKHREGFKRMVADALAGKIDLIVTKSVSRFARNTVDSLTTIRQLKEKGIEVYFEKENIWTFDGKGELLLTIMSSLAQEESRSISENCTWGQRKRFADGKVTVPFNRFLGYDRGPDGNLVVNPEQAVIVQQIYAMFLQGMSYHGIAKKLTADGIPTPGGKDKWSISTVRSILSNEKYKGDALLQKSYTVDFLTKKTKINEGEIPQYYVEDNHEAIISPEIFAMVQREMTKRGRGKKYHSSVHAFSSKIRCGHCGSWYGSKVWHSNSQYRKTIWQCNHKFDGDKRCDTPHLCDEDIQRLFLSAANKLLVDKDEVIANCREMMDLLFNTTELEAEQTALLEETQLISDMVQQTIYENAHVALDQTEYQKRYDSLTQRFETAKQRLETVMAELDRMQTQRADIEAFIESFEALPETLTEFKLENWHSLVDYATVYSIDDIRFTFKHGQEVQA

SEQ ID NO: 13783 - protein, 465 aa, synthetic construct
MARSITVIPASQPYRVGGRTQPKTRNLRVAAYCRVSTDQEEQLNSFENQVEYYTKYIQDNPLYQMAGIYADEGISGTNTKKREEFKRMIRDCEEGKIDLVITKSISRFARNTQDCLEYSRRLKNLGIGIFFEKEHINTLDASGELLFTILSSLAQDESRNISENCKWGIRSKFKKGIPQVDCTKFLGYDKGDDGKLIVNKEQAKIVKRIYREFLNGYNPAAIAKMLMEDHIKTGTGREEWRSASVRAILKNEKYMGDALLQKTYTADFLTKKVKKNHGEVEQFYVKESHEAIIPKEQWEAAQLELERRDSYMQKLGLTFYGYGSEINPFSCRVVCGKCGAVCGKKSWKSRGVEFWQCNNRSKNHGVKGCASENLPHENLLKGFITAWNQIVVEREQYLPKWEKKKKEGNPLEKLRAEQMIELTLQPPLTKMLPELGQMVLERVIVQGKEIMVIRFLDGTEIKVRI

SEQ ID NO: 13784 - protein, 514 aa, synthetic construct
MNTVIYARYSAGPRQTDQSIEGQLRVCTDFCKQRGLTVIDTYCDRHISGRTDERPEFQRLIADAKRKKFEAVVVYKTDRFARNKYDSAVYKRELKRNGIQIFYAAEAIPDGPEGIILESLMEGLAEYYSAELAQKIKRGMHESALKCQSTGSGRPLGYRVDEQKRFQIDPESAQTVQTIFEQYIKGESNAAICELLNSRGLRTAQGKPFNKNSINRIIKNRKYIGEYRYHDIVVEGGMPAIISKDTFNLAQAEMERRRTRKAPKSPKAEYLLAGRLFCGHCKGPMQGVSGTGKSGNKWYYYYCGNTRGKNKTCDKKQVSRDRLERAVVDFTVRYILQEDVLKELARKVHAAQERQNDTASEIAFYEKKLADNKKSIANVLRAIESGAATQTLPARLQELENEQAVILGELSFLKGKHLAFTEDQILFALMKHLESYPGESEQDYRRRIISDFVSEVYLYDDRLLIYFNISSEDGKLKSADLSNIEGSEFDEGLVSSTKKDIAFCSVFFLLYVQF

SEQ ID NO: 13785 - protein, 518 aa, synthetic construct
MVAIYVRQSLDKKDSLSIDSQIEDCITLCKRNSWNAYKVYRDKGWSAKNLDRPSFQQMNEDVLNGKIEAVVCYKIDRISRSIRDLVNLIEDYNEIGVHFVSYSDNINTAAPGGMMLATLFGSLAQMEREAIIARVTDNYYYRCEQGFWGGGPAPYGYRLKKVVVNGQKHTVLDQDPAEAAVVRQFFDWYLEPGGTVYKILQRAADQNILTRKGKSWTSRVVSDILSKPVYAPNTMDIYNYYASQGVKLRIAPEQCDGTQSVNLFGKRDRGSKHPKRSRPASEMTFAIARHQPIIDSDQFLRVQFKKKATLATTPRSGTSRNTILSGLVRCGSCGRPMSPSGNNCGVRYLICSGRRNYAAGTCSSPSIQVHKLEDIVLAHTLNHYSSNQIIQILEKYKDHALSPQESIRMNTLKQELAKTEDEISSLIDACLVSNPTAISYLNNRIEKLDEEKKKIIEKIAELKNSKNDLQELLQNIDIEQLPEIFTGDDFDLKKYVCSQLIRKITFYNQEHIKIEYTV

SEQ ID NO: 13786 - protein, 549 aa, synthetic construct
MNNTGVQVRTKTVTKIAANPALSKRNDPNRILRVAAYCRVSTDDEDQLNSYRTQKSYYTELIKKNPKWRFAGIYADEGITGTMVKKRDDFLRMIEDCEKGKIDLILIKSVSRYARNIVDCISYVRKLKALGIGIYFEEQNINSLTEDSEVYIGIYGVMAQSESENISANVKWGINKRMQNGTYACRFTLLGYRRNKDTKEIYIVPEEAENVKKIFQMYLQGRSLDQIKRYLEENNILTVRGNPIWDKGVIKSMLTNEKYVGDIMFQKTYREDCISKRTKINRGEMDRYLVTDNHPAIIDRETFRMAKKEMVKRSSKRRTSSNAVTELGKYSGKYALSELLFCDICGSPFRRKTWTRKGVKRVYWRCLNHVENGDKACPQSRGIEESVLHEAICRGMSKCIPETGDVKNLVRTMLAYATSEDQGLLECQTLENAIRELQEKANEAEEMCIRTEGNKEPYMEQIKKYYSSIAELRARITEITKQLEESDEFQTEMQQIDSWLENEEILFAEYDDDIVRYLIDSIRVTDDLKLIINVKGGVSVTEELDQKED

SEQ ID NO: 13787 - protein, 517 aa, synthetic construct
MTTNKKVQIIRGSKSYAEDILRVAAYCRVSTDSEDQVNSFIAQMHYYYSFIKQAENMELVDVYADEGITGTSVAKRDDFNRMIKDCKAGKIDRIYVKSVSRFARNALECLEYLRILKECEVSVFFENDGIDTGALNSELILYIKAAFAEAESTSNSKRVQTANRMRAENGEYVFVSAPFGYRIENNELVPIPEEIKVVERIFKEYLAGLGAGKIAAQLNAEADMIGKPWGKERIRYILSNEKYIGDSLFQKTFTPNVLPLKNRPNRGEVEMYYISNTHAPAIDRELFGAVQEMLKRNMQKKAKCAKSGKYSLSGKLYCGDCGWRYKRKVQNGTAYWICSGDGIAGRHCKTKPLSEEVFFKTFVNFYNRLRVHENLILRNSVTRLSEIKKMITCMDSEISDLDKQLGLLTERHNLYVTLMQGCQMDEISFAEQCAKAEREINKLRSRRNKLLSEDEDEKSIDDIRMLRNKLSSAPKAILKFDFELFDAVVEKVIVDDDSKVSFVLCCGLKLREAIAWN

SEQ ID NO: 13788 - protein, 428 aa, synthetic construct
MNKTVTDITPKLQKDLRKLRVAAYARVSSDKDAMLHSLDAQIHYYRNLICGNPDWEFAGIYEDEAKTGTKESREQFQQLLSDCRAGTIDMVITKSVSRFARNTVTLLRTVRELKELGINVFFEEQNIKTLDADGEVMLTLLASFAQAESLSVSDNCKWRIRKGFEEGRASTCTMLGYRLVNGEITMVADEAVIVKKIFDLYSDGCGLQKICNILNEDGIRTRRGYIWHPSAIRLILGNEKYAGDLKLQKVFVRDHLTKEKVVNHGELPIYWVENDHEPIISREQFQSVQLRLKKQSEGCIADKGTESVFTGKIRCAGCGKNYRRKTTPYRVVWCCATFNSRGKKYCPTSKMIPEETLKTACATALGLPEFDEEIFDEQVLYIDACPGNLLRFHFHDGSEKELTWRDRSRSESWTQEMREAARQKALSR

SEQ ID NO: 13789 - protein, 556 aa, synthetic construct
MAKNVRKIEPTAPVMSVLDLRPLLKKKRVAAYARVSTEKDEQQNSYDAQIDYYTALIRNNPEWEFVDIYSDEGITGTSIKNRDGFNRMIDDALAGKIDLILTKSVSRFARNTVDSLTTVRKLKEKGIEVYFEKENIYTLDAKGELLITIMSSLAQEESRSISQNTTWGQRKRFADGKMSLAYSNFLGYRRGAELGDMEIVEEEAVIVRRIYSEFLAGKTPYDIAKHLTEDGIPTPMGKTKWHTTVIESILKNEKYKGDALLQKTVTTDFLTHTHKRNEGEAPQFYVEKNHPAIVRPEVFEMVQEEFRRRKAAGGRMQSVSIFSGRIVCEDCGGFYGRKVWHSTSEKYRAYHWHCNNKFQKRCSCQTPTLKEESIEQAFLSAINSLIKKKKEIRENYALCLDTITDDSAYVARLDEINAECCRLQQETKSLLTAAGRKNGGGLSEINRQYEDYLAKFEGLQKEKSELSTQISKCAAKRVQVSSFLEELQKYDGPLKEFDPLIWQATLNHAVVHKNCTITLVFRDGTEVTRKIKNGVRKYVKRKASDPDNPESAGEKA

SEQ ID NO: 13790 - protein, 490 aa, synthetic construct
MSSEKQVIQIIQSPPEKRRKERVAAYCRVSTQAEEQLHSLAAQREFYEKSLSGNSEVEFVGIYADEGISGTRTRNRTQFLALIQDCRDGKVDRILTKSVSRFGRNTVDTLIFTRELRSLGVDVYFEKENLHSISPEGELLLTLMAALAESESVSMSDNIKWGKRYRYKQGLVNALAISNIYGYCKKDGEIAVNEAEAVIVRRIYKEFLDGKNYDEIIAGLTADGVPTRKNATWHSRTVIGILSNEKYCGDCLFQKTFIPDPISHKTVVNCGEIPQFLVEDCVPAIIEKKQWLAAQEMRKRHQGVSKPPVKALPFRSLIFCGTCGKPCPQYSSHSEGRRLTAYHRCISWRDHTAAEVPGMTYVPPHKAGYNYNPTPELAAYRATYKKPKSRPFLCTDVKIRTERFPKAFVQAWNLIVSKKQRYLPSLQNTAATSDNPLTAYRAEEMIGLLETTGRLDEFDFSLMIRTLDRVEIMPTEKLSFIFQSGIRITV

SEQ ID NO: 13791 - protein, 528 aa, synthetic construct
MAYCIYLRKSRADRELELQGFGETLKRHRDTLIELAKKKNLPIGEIYEEVVSGDSIAARPQMQRLLNDVSDGKWEGVLVMEIERLARGDTSDQGIVTKTFTYSNTLIITPMKTFNPTDEFDQEYFEFGLYMSRREYKTIKRRLHAGMEASCKEGNYIHHTPPFGYSIVKNKKSKGYRLEPKPGEAEIVKLIFQWYTKGILKEDGSYELLGTARIADKLNSEYSIKPLGGVWTIPTISTMLRNEHYLGYIVFGKKKRKKVVENGIIVDKWTRNESYGLYKGKHPALVSQDTFNLAQERLSRNPRRPSKTITNPLAGVIKCGMCGRSMYRRPYQKRGQSASLICSEKTCHNVSSAFYLVEDALLTAIKEWIDGYEIKEEANKYDTSVLESKTKLLEEQQKQLITYKNQLTKVFEAYENGIYDSDTFLNRQKTVSESISSTEEAIVKLNKEIANEREIISHQEEIIPKAKKILEIYKTSDDVQLKNDLMKSILDKVVYTKTANGHFKDQRQDDFKLELFPKLPKNKGDSSE

SEQ ID NO: 13792 - protein, 519 aa, synthetic construct
MKKVTKIAETASSKVKLKKIRVAAYCRVSTDSDAQLESLEAQKTHYENYITSRDDWEFAGLYYDEGITGTKKDKRPELLRLIDDCKAGKVDFVITKSISRFSRNTTDCLELVRKLLALHIPIYFEKENINTGSMESELFLAILSSMAEGESVSISENSKWSIQKRFESGTYKVSYPPYGYDWDGEQMVINPEQAAVVKEIFAALLSGKGTHAIADDLNRRGIPTKRNGRWTATTIRGMLSNEKYVGDCLFQKTYSDSRFVRHNNHGEQTQYMVKDHHEAIISREDFEAAHAFIHQRATEKGVVKGSDKYQNRYTFSGKIICGECGDTFKRRIHSCTGYKYTAWCCSTHIKDKDKCHMLFVKDDDLKQAFVTMMNKLVYAHRIILKPYVDALKNTSSDDSLRRIQEIQTLLAQNTEKRETLTKLMTQGIIDPILFNKETNELLSQADSFRDEINALKNAVSGDVTKVTAATALLHFTEKGGILQEFDDDLFNEYVNRIIVRSRNEVRFELKCGLTLRERM

SEQ ID NO: 13793 - protein, 668 aa, synthetic construct
MAYAKAKKHLKIWTKKKAALYVRVSTRYQVDKDSLPFQRKKLKEYCKFLGLEDHVIFEDDGYSAKNTERPHFQEMMSRVRSGEFSHLIVWKVDRVSRNLLDFAAMYQELKDHKVTFISMNEQFDTSTAIGEAMLKIILIFAELERNMTSERVTGIMLDRAEQGLWNGARMPVGYRWNDETKFPEPDPEEVKIVQLIFDKYEEWKSSIKIARYLNNNNFKSKRGGQWTSKLIHDIIRNPFYIGTYRYNMRESGRGPLKPESEWIVRENNHPAIIDKAQFDRCNKIMDQNGSSRDTSDLRARKYVHTFSGHLVCGKCGANMIASKDRARANGWRPSMYRCAQRSRMLDCDNSRTINESYIGPFIFNYIANLARVQKNFKNIATPEKLERELLKGETFDGVAGILPEGLNLTFQALSFRQVGNGTYIPDIDFLGDSDGASDRDQIELLKSEIEKSKNAVTRLTDVYLFDPDSMTKEEFATKKKELAKKIEGMERQLADLLDDSGNDDLADMSFIKKASAFLVAQRIVSKSFVDYVGMAQELDNEILKDFIDQIVDQIVVLDGRVQSITFINGLKHEFRYATPAELPVCQKCGGHIGSTCGCRTRTFDFSGKRYQRIKVGDPRDMLHGKKNPVCPECFAQEGRWHHWNCKVETCPICGGRLAECEHGPNGKN

SEQ ID NO: 13794 - protein, 524 aa, synthetic construct
MARSKRNEYSSAEQIGVIYARYSSHNQKEESIEQQIAECSDFAAKNGIRIVGIYADKAVSGRSDRRPNFQRMMRDAEKRQFQIVVAYKSNRIARNMLNALQYEARLDLLGIKTLYAKEEFGNTAAGRFALRTMMNVNQFYSENMGEDIKRGMVDNANECKVNGMLPLGYVKSKEGKYAIAPDEAAVVREIFDSVLKDVPVAEIARSLNQRGIRTKLGREWNKNSFHIMLKNDNYIGVYRHSGVVVEDGIPPILEKEVFAAVQEKLANKKKTAGRRSANGEYLLTGKLFCGYCGSYMIGVSGTGENGTVHNYYQCQKRHAEGRCEKKNVRRDFIEKLIARLTQDYILQDDTIEWIADSTMSFQAMARRESGVAQLERDLADNRKVAKNIMAAIEQGIITETTKARLLEVEGTIHDLERSLSIAKAASQPIERERVVFSLEQMREGNVGSKEHQKKLIDTFVKSVTLWDDRIQIDYYHTPGKHKFSYSLEELTSKAENESNASDVRTDSLELHHKRTLILIEWLSR

SEQ ID NO: 13795 - protein, 526 aa, synthetic construct
MPKVTMIPATVNSLTHLPKASVQKRRVAGYARVSTDSDEQFTSYEAQVDYYTRYIQSKPEWDFVRVYTDEGISGTNTKRREGFKEMIADALAGKIDLIVTKSVSRFARNTVDSLVTIRKLKENGVECYFEKEGIYTFDGKGELLITIMSSLAQEESRSISENITWGQRKSFADGKIHLAYKHFLGYKKGKDGRTAIVEEEAVVVRLIYRLFLDGKTQAGICRYLEDLEIPSPSGKAKWSKTTVTSILTNEKYKGDALLQKSFTVDFLQKKTKLNEGEVPQYYVEGSHPAIIEPDEWNHVQAEFARRKALGNAYSGKSVLSAKLVCEDCGGFFGSKVWHSTDRYRRTVWQCNNKFKGGERCLTPTVDTETVQQLFIKAYNQMMGNRKQIIEDCELMRKKLTDFKSLDADIERHLEETQIVAELVKAAVKDNAVTAQSQEAYLKKYESLTKRYETAAAELARLQNLRTLRSQKDKAVALYIRTLKKQPTVLSEWNDTLWTVMVEKAIVHRNSEITFVFYNGTKVKVRQ

SEQ ID NO: 13796 - protein, 527 aa, synthetic construct
MNTAVRTVTVIPPSINPMTHLTDTPLYKLRVAAYARVSTDSDEQFTSYEAQIDYYTQYIQRNPEWTFVKVYTDEGISGTNTKHRAGFNEMIEDALAGKIDLIVTKSVSRFARNTVDSLVTIRKLKEKGVQVYFEKENIYTFDGKGELLLTIMSSLAQEESRSISENVTWGQRKRFADGKVNLPYKQFLGYRKGADGFPEVVPEEAVIVRRIYTRFMEGLTPGAIAKELTADGIPTPSGKQRWQTSTVESILQNEKYKGAALLQKCFTVDFLTKKRKVNEGEVPQYYVEHSHEPIITPEEFDKVQTELARRKRISRQYSGKSIFSSRIVCGGCGSYFGSKVWNSTSKYRRVIWQCNGKFKGEHKCETPHLDEETIKARFVAAINAIIDSKDNILEDCRLMQTTLTDCTGIDAEIESLLEEIDVVAELTKRCIAENSQTAQNQNEYAARYNGFVERYEKAKAQLEQLRATKVAREAQAEAIGAFMFEVQELDALTNFDDKLWLTVIDTVTVHADGRMTFKFQGGTEIEA

SEQ ID NO: 13797 - protein, 427 aa, synthetic construct
MDRIIKRVDFPKIMQPQFLKVCAYTRVSSGKDAMLHSLSAQVSHYSEMIQSHSGWVYCGVYSDEALTGTKSDRDGFQQMLTDCRAGKIDMVITKSISRFARNTVTLLETVRELKSLGVDVFFEEQNIHTMSADGELMLTILASYAQEESRSVSENQKWRVKRNFEAGIPWNGRMLGYRMQDGKYYIIPEEAELVRRIYREFLDGMGRNRIAAKLNDEGIQPTRYGEEWHPQTIAKILRNYAYTGNLLLQRFYCESYITKKTVPNNGQKTMYHAERTHEAIIPLEEWKAVQTEIERRAEQHKSKPPAQPSFFYTGRIQCAKCGKNFRRKTTAARVVWICATLNTKGKKHCASKQIPEATLDELVRQVTDDPFSVKKIIADDGNTLHFHFSDGSVVTRTWTDRSRAESWTPEMKEKARQQSLARRRQKS

SEQ ID NO: 13798 - protein, 465 aa, synthetic construct
MKGNAGDTIVKKIDLSPELVRVALYIRVSGEEQKIKGLSLEAQQERLEAYARERGWVIVGIYIDAAKTARKNIHKRTDFQRMMDSVKRDEVNILLFCRLDRWFRSVADYYKIMEVLEAHNCDWKTTDEEYDTTTANGRLYINVKLSIAQNEADIDGERIDVVFDSKIAHGTVVSGSAPFGFRVNEEKRLEVVPEDAAIVQDAFNYFETSISQRATVRYIRETYGVNWCDATFRRMLKEKLYTGVYDRGGRFNDHFCPAIISKQQFDRVQALLERNARSVPSGKVYIFTSILTCAECGHKLVGYKSSDYYYYRCNQHFQRGRCSHNHSAREDVVEKWLFEHLAEELERCQLEWEVAAAKKKASVARTDKAALKRKLAKLKELYVNDLIDIEDYKRDYQIYTAALKQIPEPSIEPPPDFAAVRRLLDNDFKTIYENLTREEKRTLWRSAIKEIRIDNDQNITGVVFG

SEQ ID NO: 13799 - protein, 596 aa, synthetic construct
MPKIAIKKVAIYIRVSTVHQVDKFSLPMQRRDLSTYSELILGIPDYEIFEDAGYSGGNTDRPAYQNMMTRIRKGEFSHLLVWKLDRISRNLLDFAAMYEELQRLGVAFVSKTEQFDTSTAMGVAMMQIIMVFATLERRTTAERVTATMLSRAHSGQWNGGRVPYGYNYDADTKTFSINEDEAKNCRTIFNTYLKEKSIVVVTQYMNSLGAKTRNGIDWTPGTVWKILSNPFYAGIYRYNRYSGTKNRIINDKNEWILVKNHHPAIITQDAYEQAATTLLENGTQRNTLGRLHHAKQPYVFRDLIYCGLCKTRMVASPGNKNAHGARIPIYTCPLRRTSSCDNQSTNEYAIGEFVLNYIINMLWAKKEFSSIKSPTELEKRLLRGSSFCKIAYIEPDGLNDFYNLLTHYKRGSSFIFTASKPRKKKAPENSEVAALRKEQEQQERALSRLQNLYLYDESAISEKDFILRKHDIMAKLDEINRKLGMMNTAAVATLSDSDFVAKASYLLISKELQSKKYIYYRDFAESVSPDVLKTYMRSIIDSIFLVYGHVTAITFKNGLTHRFAYSAPLSPRFSHKSGYNLDKQKQAEQENHQNTE

SEQ ID NO: 13800 - protein, 433 aa, synthetic construct
MPRAITIVPKPPKLEQKKRVAAYARVSSGKDAMLHSLSAQVSYYSDLIQNHDDWLYVGVYADEAKTGTKESRADFQRLIADCRAGKIDMVITKSISRFARNTVTLLQTVRDFKAWGVDIFFEEQNIYTMSGDGELMMTILASYAQEESRSASENQKWRIKRNFEEGMPWNGAMLGYRLKSGRYEIIPEEADIVHRIYDEYLSGDGYLTIAKRLNEDGIPSRFGKQWGQSVISKILSNYTYMGNLILQKTFRENHITKKTIINNGELPKYHAENAHDAIIDMETFQAVQAEKTRRAARFLKKPASKKAYPFTSLLVCDGCGKNYRRKVTKTGSVWVCGTFNSIGKAACASKQIPEETLQAVTAEVLGQVDFSEELLRRLIKSILVCNGNVLIFHFFDGSEVTRKWKDRSRSQSWTVEMKAVARQKALERRNQNA

SEQ ID NO: 13801 - protein, 590 aa, synthetic construct
MKTVEKIERKLPVLKKRKRVAAYARVSIESERMQHSLSAQVSYYSALIQKNSEWEYAGVFADYGISGTDTKKREEFNRMLAECEAGNIDIILTKSIQRFARNTVDLLNTVRHLKDLGIEVRFEKENINSLSGDGELMLSILASFAQEESRSISENVKWGMIKRFKQGIPNGKFSIFGYEWQDDKLVIIPEEAEIVRWMYAEYMKGASRIEIGRALMQRGIYTRQGKPWVDSNVKVILTNITYTGNMLFQKEYCEDPITKHRRKNYGELPQYFVEDTHEAIISMDEWQAVQAEFKRRQDLGPFGNKSLNLSAFSTKITCGCCGKHYRHSGKRNTAGEVYYIWTCQTKSQKGASACPSKNIPEKMLQNTAAKVLGLDEFDEDAFSKQIEEIIVIGDDTLTFRFYDGHEVTTKWQSTAKTDWWTDERRKLWGERHKRKDTNPNKHLFYEFTGFIKCGCCGANYRCQSGKRKDGTPTRSWYCIGPKDQCHNPGIRDETMKRLVIDVLGLDEFDEAAMDAQIESAAILDHTVTFHFRDGHTESRDFLDKRHGTPWTEERREKARESMKAAWTDKRRKAMSERIKKIRSEKKWPKP

SEQ ID NO: 13802 - protein, 573 aa, synthetic construct
MAYNAQNKTGARVAIYVRVSTLHQIDRDSLPMQKQDLLAYAKLMLNTDDCVIFEDAGYSGKNTDRPKFQEMMSQMRAGAFTHLLVWKIDRISRNLLDFATMYNELKALGVTFVSKNEQFDTSTAMGEAMLKIILVFAELERNMTSERVTATMISRANNGLWNGGRIPFGYDYDYETHEFSVNEEESKVVILMHDMYEQEHSLVRVVRELNERGYRSRAGNLWSPVSLLIILRNVFYCGDYRYNMLKEGDRQKIKDESEWVTVENHHVAIIPKDQKERIMATLDSNSKLCKQRNIYKSSKHTHVFGGLIYCGSCGKPLGSTPGNLTRDGWHYSKYTCPTRRKSVTLCTGKSTSDPIIGEFVFNYILNMLNAQNDFDKISSPEALEKLLLIGDTFAYIDHIESNGLNDLFNVLSSGTVNGAVFGKGASLPTKKATVEPEVARLRNEKQKTERALDRLRSLYLYADEAMSEAEYMIQKNKLEETLEDINDQIGMMNTDSWQQSVSDEEFIQRASEFIIAQKLSGRKYVNYKRLAMSVDSEVLKNFVVSIIDSITIQDGLVSNIVFKNGLCHTFIFR

SEQ ID NO: 13803 - protein, 464 aa, synthetic construct
MNSTYFRPQPELFGLRVVKYIRCSHDGQVLHGDTLEAQDALLDEFIKVNRMVLIDTFIDEALTARKKFTRRKEFVRLLDGVRSHSFDMILFTKLDRWFRNIGDYHKIQEILEANGVQWKAITESYDTTTTNGRLHINIRLSVAQDECDRDSDRIKDVFAYKLKNKTYLSGSLPRGLKLDDEKHVIIDPEWKQFALDMFDHFEQTNSKRGTLLYLKEKYGIYLCYDTISRNLRNSLYKGMYRDDPDFCEPLIEPERFDRIQVLGKRNVRQRYSNRTYIFTGLLICSSCNHYLVGQTTHRTLSDGTEKHYPSYRCNQRYQSHSCDRNRSYREDYVEEYLLQHIRPALSEYVAEYEVTGTNPARKNPAAEAAKIRTKMQKLYELYMDDLIDRDTYKRDYSAFQEKLKELDSIVVAPSRDLADLKKLLEQDYEEIYRTFSPQEKNAFWKSFVQSITVHEDGEMDIVFL

SEQ ID NO: 13804 - protein, 457 aa, synthetic construct
MSEKNIISDGKVMRAALYPRVSTEEQAKYGLSIHDQQNDLERYAKEHGMKIVGVFADAGFSARKKIEKRPAMMALLDAIRRDEVDIVLVTKLDRWFRNIGEYYKVQDILDAHNVSWKAIYEDYETATASGRLKINIMLAVAQDEADRTSERIKKINEGKRLRREALTGDKPLGYTIINKKFVKDPQTALAVDAFFRKYMACGSVSATQDYIREEFGLTIPYQGANKMLRSTAYYGVYYGVDGMCPPYITKEQYDQIQTMRRKVIKRTDENRIYLFSGLIVCGDCGGRIGGKVNQDHKTFHYNCSNHFCRRKPCGNNRSISEKKLEKYLLDTVECKLESYKAEFSAVQENVVEKDYRSEINALRGKLSRLKDLYLNELLTLDEYKKDYASITEKIHELEIKQQPPRPSNLPQIQKLLSHNWRDMYGALSPMQKREFWRIIIKEIRWYPDRHIEFDINF

SEQ ID NO: 13805 - protein, 525 aa, synthetic construct
MPKSVRAIPATVNLFNSTPITNNKKRRVAAYARVSTDQEEQLTSYEAQVDYYTNYIKSRSDWEFVDVYTDEGISGTSTKRREGFNKMVESAMAGNIDLIITKSVSRFARNTVDSLTTIRKLKDIGCECYFEKENIWTFDGKGELLLTIMSSLAQEESRSISENVKWGHRKRFADGKVSVPYGIFLGYKKGEDGNLAIDEEQAKIVRRIYREYLSGSTAVAIAKGLTNDGIETPGHKQKWHASTVRSILTNEKYKGEALLQKYYTPDFLTKKQKINNGEVQQYYVENNHPAIIEPDTFEMVRLEMDRRLMLNGKYSGTDILTSRIKCGECGGSYGAKVWHSNDKYRKIMYQCNRKYSGKENCKTPAIRSDDIESRFVNVVNSMIENKDEIISNLERILDKICNKKGLSEEKEKLENSLAEQVEKIQELIEMNSRVAQNQEKYKKEYDAIIKTYDETKAKYEQLEIEISKQSAKHQMIKDYINTLKKQTRLLEKFDGLMWGSLLESATIKDKDTIVFKFKDGTEING

SEQ ID NO: 13806 - protein, 454 aa, synthetic construct
MRKITKLETKSIDLPKFKRVAAYARVSVERGRTLHSYSAQVSYYNELIQKNPEWEFAGVYADLGISGTGIEKRNDFKRLLQDCEEGKIDIILTKSVSRFARNTVDLLKVVRHLKELGIEVRFEKENINSLTGDGELMLSILASFAQEETISISNNVKWGIRKKFEKGIPNGGFIIYGYRWINKKLEIVPEEAEVVRYIYDNYLQNKAYQKVASELNELGYKAYKGGKFSPSSVHEILCNITYTGNLLLQKYYIVDPLVKKEKKNNGELTQYFVENSHEAIISMKQYEAVQKEFERRRKLGQRANQSLHTTCFTSKVKCPLCGKNYRRSGKKNRLGKDYTYYVWVCLTKSEKGARYCGAKVIPEEELKIATCNALGWDEFDSDLFDENIEKVVPIGDDMLEFYFYDGRMIKQEWHSTARQRGWTEERKRITLEKRLKTMEERKNAKKCKSDTSNS

SEQ ID NO: 13807 - protein, 538 aa, synthetic construct
MKAAIYARFSSHNQREESIEGQVRACKRFAKEHGMTIVEIYADRGLSGLHADNRPEFQRMIQDSDHHRFEALIMWNLDRFSRDKYDTAVYKTRLKKNGVSLYYSDQSIPDTPEGIILESLLEGFAQYYSANLARNAKRGLQENARKCLWNGGCVPLGYLIDEHQRFVLEPIGAACVRMIFELYASGQSIKSIVCTLNEKGYKTVKGNRFRLGSIQGILRNRKYIGEYHASGITVPNGIPAIVDVQLFNDVQARLGVVASAKAHNKADIPYLLTTKVFCGHCGSPMIGESGTGKGGATYRYYKCSCRKNRKGTCDKKTEPKDWLEENVVRQTVKNVLRPEVIKEISENCAAALKADASDESLVQALKAQLAETDKALRNLLKAIEAGIISSTTRERMAELESQKSELEAQIAREQLRKPEITAEQISFWLESFLAGDIHDPKYQERIINALVRRVDVYDDGPEKQKLTIFYNITKNNRSFSKISISKCSDIECIALPKRSVAKAADFFCSLQKDIFPIPVFSKCATKFSCIFIFLCYTI

SEQ ID NO: 13808 - protein, 434 aa, synthetic construct
MSYFIYARKSRKDAELEALGIDVLERHITTLLELAKTLSLPIGAIYREVVSGDSIDARPVMTQVLSEVEACMWDGALVMDVDRLARGDTIDQGRVQRAFFYSNTRIVTPNKTYDPANEYDNEYFEFSLFMSRREYATIKRRMQRGRERSSSDGYYVGNVAPYGWERVIAPDGKHYSLAPHQTEAPVLDLMYDLCGNKQYGYQKACTYMSNMGILARSGKPFTPSTLKGIISNPANIGKVRWGHRKTVRAVKDGRVVKSRPKATDYILSDAAWAPRISPDLFKRANQPKGCFSAPVRNDRPIQNLFAGLVRCSQCDRLMVRKKAQTKTPYDMLICQYAECSTVGIRIDELEEALLGWLKDYIAKYEFTDTHEEDTAAIAAKELIVTNFETEHQTLLKQRESLFDFLEQGIYTKEIFIERSNALEQRIRDCMNNIT

SEQ ID NO: 13809 - protein, 502 aa, synthetic construct
MEIQIREGNNIQKRKLKVCAYCRVSTDADEQENSLENQIRHYKEVITSNPDYEYAGVYSDFAISGFKEKRPGLQKMLADARKGKIDLILTKSVSRFARNTSIVLEATRKLKELNVGVFFELQNINTLSGEGELMLTILAAFAQAESESGSVGAKMVYQRKYEAGIPVQYLERSFGFKKDDWGVYIADEEEAVWVRKIYEMAADGYTPASIKRHLNENGVKTVGGAEWIDSTVFRLIENEIYKGDYIMHKHFVNEERKLVRNRGEVDAWYIEDDHEAIVSPELWQKAQDALEAKRDYLAESSVIEEFTEENYPYMNKIFCARCGHPLYKRIYSNGNRLNWGCSGTKRYGKSFCEGINIPDGVLRGAWHFDENMYIGEKPTDKGKKEFTYLKEASWKRRHKKKEPEPIPENTETEYPYREKIFCGLCGSRLVRHVNTKSHKVIWVCNGRKRKGKDFCDGTRVPDTIIKGWGEIKKDIYIQRKDDKNGKKRYSYTSKKPKGADRA

SEQ ID NO: 13810 - protein, 587 aa, synthetic construct
MSNTFSFQQIAAPKVLSAEVREVISNNVLQFYVRDQQQDTQDEGITALYERLSQEDKLEGESNSIANQKKILERYCREHGITAYRHYDEDDGYSGTNFNRPGFQRMLADIKAGKIKRVIVKDMSRFGRDYLQVGFYTDMLFPDFGVHFIAVNDGVDSTRGENEFTAIRNVFNEMYARDTSKKIRATFQSKGKSGEHLTTIPPYGYMKDPDNKKKWIIDEEAAAVVQQIFALCVSGMGPTQIAKWLEKHEIYNPTAYSQAKGRPVTNKPTANPYKWTNETVSRTLERIEYLGHTVNFKTRKQSYKSKKKLWNDPSEWVIFENTQPPIVEESVFLIVQNIRRSRRRPTKMGDMGIFSGLLYCAECGGKMYQCRATNFTEEQKYFICSTYRKGKDLCTTHSIKNVVLHEIVLRNLREAIEYVTQYEAEFIQEAADSRLRERDAEFSRKRETLSRAESRIAELDNLFKHLYEDNVTGKLSDERFIKMSRDYELEQENLKSMAEVLREEIKQQEKQKTNVKAFISVVKKYTDMQELDASILREFIDRIEVSHTDKKSKTREITIVYNFIGAFDFERAKEKAQNTTQKQQRTA

SEQ ID NO: 13811 - protein, 462 aa, synthetic construct
MAKNITVIPARSQQGIRQQDRIVKKIRVAAYCRVSTDQEDQLHSFDAQVEYYTKYINDRENYEMAGIYADEGISGTNVRKREQFKKMIEDCKEGKVDLVITKSISRFARNTQDCLQYSRMLKNLGIGIIFEKENINTLDSTGELLFTILSSLAQDESRNISENCKWGIRTKFKKGELHLNTCKFLGYDKDEDGKLVINREQAKTVARIYEEFLWGMNPQQIARELEEEGVQGCCGQTKWYTTTVIGILKNEKHMGDALLQKTYTVDFLTKKQVKNNGEITQVYVKDSHEGIIDKETWNAVQEEFERREKFMEQHGLKKYVYGAECNPFTSRIFCGECGHSYTKHSWKSRGVEQWQCKNHRTGGKLTCKNDFVDNGDLEQGFIKAFNKVLADKESKIRWERMRTEGAPLQKIRSEQMIGIAAEGKIKTFVPELAQLVVIKVTIFSAKCFKFEFMDRSKVKVTI

SEQ ID NO: 13812 - protein, 499 aa, synthetic construct
MQIEIIEGRHRGQRKLRVCAYCRVSTDAEEQENSLENQITHYRELIQSNPDYEYVGVYSDFAISGYKEKRPGLQQMLADARAGKMDLILTKSVSRFARNTRIVLEATRELRELNVGVFFELQNINTLSGEGELMLTIIAAFAQAESESGSVGAKMVYRRKYEQGIPVQYLERSFGYTKDKNGNFVPDMVEAEWIKIIYKMAAEDYTPTAISHFLNEKGVATVGGAEWTTGTVIRILENEIYKGDYIMHKHYVNEDRKLVRNRGEVDAWYIEDDHKGIVSPELWQKAQDALERKREYLATGSVVMEMNDDNYPYRSKVFCSECGHPLYPRVYSNGNRLNWGCSGTKRYGKTFCEGLNVPDSVIRKWNFEDNIYIRVADDTKGRKEFVYLKEQSWKRRHKKKLHRSNVPKATAANYPYMKKLHCALCGSKLTRHINNKNGKIFWICGGNKRKGSIFCKGVRVLDEVVRSWGDIEKEIYIIGKEEKNGEKHYSYSSEKPAGD

SEQ ID NO: 13813 - protein, 426 aa, synthetic construct
MQVKIINKLPASAVRKKRVCAYARVSTDSRRQEDSLENQTAAYERLIKGNPEYEFAGVYADQGISGYCENRPQFQKMLERARAGELDLIITKSISRFARNTVTVLKSARELKELGVGIFFEEQNINTLSGDGEMMLAVLASFAQEESRSMSENNKWSIKKKFERGEGMISTTRFCGYDKNEYGDLVINQKEAEIVRLLFDLYLMNVGCSRLSDLLNYLGVKTVTGGQWESGTIGGMLSNEKYKGDFHLQKYYTPPTQRNATRKNRGEVQSYYISENHEPIVSPELWGQVQEMREYRKKVRNIGQDGTGKFQNRYPLSGMLICPYCGKTLRRRQVYKKKIQWLCSTYIEKGKKACRGIRIADAALVGLNITEQTVVEEVIQNGKKRYRYTRKEDFDCGIRNSAGCEETKNGGVLQGINRPRRTVIKL

SEQ ID NO: 13814 - protein, 445 aa, synthetic construct
MAAYCRVSTDQEEQLLSYENQVNYYTNYISENPLYEYAGTYADEGISGTNTKKRDEFKRMIADCRAGKIDMIITKSISRFARNTLDCLNYVRELKDLGIGIIFEKENINTLDAKGEVLLTILSSLAQDESRSISENCTWGIRRRFETGKHKMSTKRFLGYDTDENSGKLVINRKQEPIVVRLYQEFLDGKTTDYIKRIFEREGVQNWNGGTKWQATTLMSMLENEKYKGDALLQKSYTVDFLTKKRTQNTGEIQMYYVEDDHDAIISKRIWECVQLEIKRRARYLEEHGTNSYSHRPESNPFASKIICGECNKVFARKGWRSSTGIDRKVWQCSERYRVKGVMGCSNRHVDEETLIKAYLMAWKALVENRETFMERWKEQMQSENLLEGYRAEMFMKYTDGAESLTEMDTDFMLKTLDHIKVFEDGTLLVVFLDGTEIECKNEEK

SEQ ID NO: 13815 - protein, 463 aa, synthetic construct
MARSVTVIPAKSRQKANKSVPQEKKLRVAAYCRVSTDQEDQLHSFEAQVEYYTKYINEHANYEMAGIYADEGISGTNTKKRQQFRKMIADCEAGKIDLVITKSISRFARNTQDCLMYSRKLKNLNIGIIFEKEHINTLDSTGELLFTILSSLAQDESRNISENCKWGIRTKFKNGELHLNTYKFLGYDKDENGKLVINEEQAATVRRIYNEFLWGMNPAQIAKGLEDEEVPGCLGQTRWYPSTVVGILKQEKHMGDALLQKTYTADFLTKRQVKNNGEITQVYVKDSHEGIIDKETWNAVQEEFERREKFMADHGLDHYSYGAECMPFSVRAFCGECGHLYTRHSWKSRGVVQWQCKNHRKDGKVNCKNAHVDNADLEKGFIKAFNKLCENRGKYIARWMEQAENGTPLEKIRAGQMMEITEKEPLKQFVPEMAQLVIQEITILGAKKYEFIFMEGSKVRVSV

SEQ ID NO: 13816 - protein, 501 aa, synthetic construct
MKIEIREGRQSQERKLRVCAYCRVSTDADEQENSLENQIQHYEKVIKANPDYEYVGVYSDFAISGFKDKRPGFQSMLADAKAGKIDLILTKSVSRFARNTAIVLEATRELKERNVGVFFELQNINTLSGEGELMLTILAAFAQAESESGSEGAKMVYRRKYEQGIPVQYLERSFGYTKDSDGNFIPDEKEMVWVKKMFQMAAEGYTPAAIKRFLNDKGVLTVGGAKWIDSTVIRILESEIYKGDYIMHKYYVNEERKLVRNRGEVDAWYIQNDHKPIVSEALWQRAQDAIGRKREYLATVSVIEDFTEENYPYMNKIFCAKCGYPLQKRIYSNGNRLNWGCTGTKRFGKEFCEGVNIPDGVLREAWRFEENMYIAEKPTDKGIKEFTYLKESSWKRRHKKKIPGKAVPDNTEENYPYKNQLFCGLCGSRLVRHYNPKNKKVFWICNRSKRKGKESCTGVRVPDSVIRAWGDIKSNIYIEGKVDRNGKKRYSYSGKKPTESE

SEQ ID NO: 13817 - protein, 576 aa, synthetic construct
MAYKKAISTIERSKARVAIYVRVSTLHQIDKDSLPMQKQDLIAYAALMLNTDDYVIFEDAGYSGKNTDRPKFQEMMAQVRDGAFTHVLVWKIDRVSRNLLDFAAMYAELKSLGVVFVSKNEQFDTSTAMGEAMLKIILVFAELERNMTSERVTAAMISRASNGLWNGGRVPYGYQYDKENQEFSFDPDEKDMVVIIHDKYEEMRSLVREARWLNEQGWRTRAGNFWNPVSLLQILRSVFYCGDYRYNVLSEGDRQKPKDSSEWVTVQDHHPAIISRDQKERIITALDNNSRIKNRNTYRSVKHTHIFAGVMFCGNCGKAMGATPAAAKKDWQYSKYSCSTRRRLASACDGKSVSDPIVGEFIFNYILNMLNAQNDFDNISSPEELQERILHGDTFSYIASIESDGLNDLYNMLASGKIKGKVYGKGTKVKTREKQLSSERTRLRNQKQKTERALDRLTNLYLYSEQSMSESEYIIQKTKLTDTLDEINEQIGFANSDEWEQSLTDELFIARASEFIISQKLDGRNYVNYKRLATSVDLEILKNFVQTVIDSIIMDAGRVKQVIFRNGLSHIFIFRE

SEQ ID NO: 13818 - protein, 457 aa, synthetic construct
MIKKTENTALRVALYIRVSGEEQKIKGLSLEAQQERLEAYARERGWVIVGVFVDAAKTARKNMHKRTEFLRMMDLVKRDGVDFLLFCRLDRWFRSVADYYKVMEVLEAHRCGWKTIDDGEGYDTTTASGRLYINLRLSIAQNEADLDGERIAVVFDSKISHGTVVSGSCPFWLRVNDQKHFEVIPEKAAILQDAFNHFEATISQRGTIKYIRDTYGVNWCDATFRRMLRDKLAMGVYDKNDRYNDNFCEAVISPEQFERVQKLLGNNAKSTPTGRVFLFTSLLVCEECRHKLVGAFTRGYYYYRCNQHFQRGRCPHKREIQEGVVEKWLFDHLGEELEKYRLEWEVQEEKRRKAAASVDRAAVRRKLSRLKDLYVNDLIDIEEYKRDYDKYNAMLEEKPEPAADQRPDFAAIENLLSQDFKTIYDSLERVEKRTLWRSVISEIRIDNDQHVTGISFL

SEQ ID NO: 13819 - protein, 466 aa, synthetic construct
MRRAALYIRVSTLEQAQEGYSVGEQKERLIAYCKAQDWIIADIYVDGGYTGSNLKRPGIQKLITETDKFDLVLVYKLDRLSRSQRDTLYLIEEVFRPNSVDFVSMQESFDTSSPFGKAMIGLLAVFAQLEREQIKERTWMGRVARAKTGLYHGGGNIPIGYDYSDGKLTINPYEAEQVRKIFEWYLSGLSLKAVTDRLQDEGYTNKYSSYSSWSSVRNILENETYTGKMRFGEIVVEHAHDAIISEEQFNAAQVLRGKRREQFGSNAFQSKHLLTGLMFCGHCGGRYYLRNSGKYSYYACYSRTKQIKSMVKDPDCKNKIWKAQDLEPQIESQIRELLRSPQIAKDIIESRPKSVPVNQNTDIEKRIREIDKQIGKLMELYQREDMPPELLGERINKLYGERTALQSALVPVAEPDTMPFDLVEELIADAAQIWDFADESQKRRIMQSLISRIILTDDEVKIEWAF

SEQ ID NO: 13820 - protein, 573 aa, synthetic construct
MPRKKAGQAPAHDKRKAALYVRVSTKHQVDKDSLPMQRKKLKEYCKMYDIGEYQIFEDDGYSAKNTDRPNFQKMMDCIRKGDYTHMIVWKVDRVSRNLLDFASMYRELKERKVTFISLNEQFDTSTPIGGAMLKIILIFAELEREMTSERVTAIMLDRAENGLWNGARPPLGYSVDPEKQILIPVPDEKETVKMIFDLYEKLHSCKKVARTLYQNGIKPQNCDEWSPNFIRHIIRNKLYIGTYIYNRQENGGADRPEIDWIIKENNHPPIITKEQFERCGSIMDQNAITRDVSELRRTKHIHIFGGKLVCNLCGTNMNASKDKARENGLRPSVFRCGRRARLLACENKLMISDLSLGPFVFNYAANLARIQKNPSGIDTPEKLEAALLSGDEFSGVKIAPDCLSATFSLLTHRNIGKGSFSPDIGKSESQDGQSEDRIAYLEKEKEKYKSAISRLTDLYMFDPDALTKEEFSKRKREMTQKIQELTRQIIDLKENAGSGSTDLTFIRKASAFLVAQRIASNEHIDYMQIAVDLDNKILKDFINQIIDKIFIQDGRIMKIRFASGLEHNFVYPD

SEQ ID NO: 13821 - protein, 542 aa, synthetic construct
MEQTVQRQVRVIPATKQARAAAPRRGGKQRVAAYCRVSTDSEEQLNSYAAQKNYYTQKIEENPDWEMAGVFADEGLSGTSMKKRKEFNRMIAACKRGRVDMILTKSLSRFARNTVDCLKIVRLLKAQGIGVMFEKENINTLTESSEFLITLFSGFAQAESESMSRNIIWGKQKSGEAGHVAFQYKKLLGYRRGPDGGPEIVPEEAEMVRRIFRRYLEGASLGDIKKELEADGVPTAEAVEGWSYQVIRNILTNEKYCGDALLFKTRTLDPISKKTVKNTGEWPMVYIEGNHEGIVPKAVFLRVQEEMARRASKRKVMQKHGRTEQGKYSGRYALTELLVCGECGSPYKRCTWARNGKKRIVWRCVSRLEFGTKYCHNSPTLDEDRLHRAILGTLNEYGAARGEAAASALKLARMAQGGTESGDEAALRQRLDELGVEQAALVDQALKNMEDSELNARMKAVVEEKQDILNQLAALQKETERQALQASRRQEMEAWLTRQPDILTEYDDGVTRRLVERITVVDAETIRVKLKDTDVEIEQKMC

SEQ ID NO: 13822 - protein, 460 aa, synthetic construct
MKNKEKKLSSPIRVALYIRVSKEEQKIKGLSLEAQQERLEEYARQQGWVIVGIYIDAAKTARKNIHKRIEFQKMMEVVKHDEVDILLFCRLDRWFRSVADYYKIMEVLQAHNCNWKTIDEDYDTTSASGRLYINVKLSIAQNEADMCGERIGVIFDSKIMHGTVISGHCPFGFQVNKEKRLEISQKEAQIVVDAFNCFENTVSQRRTVKHIRETYGVNWCQTTFKRMLSEKLYIGIYDRGNRISENFCPAIISKEQFDRVQMLLKRNARSVPSGRIYIFTSILKCNECHHNMVGHIASKSKHFYYYRCNQHFQRGCCDHKIEAREDRIEQWLFDNLESELNRVKLEWETKVAEKKKANLQIDKAVLKRKLSRLKELYVNELIEMEEYKRDYEIYSTALQQIPEPIEEPCPDFSAIERLIQPDYKKIYESLTREEKRTLWRFVISEIRIDSENNITSVSFG

SEQ ID NO: 13823 - protein, 574 aa, synthetic construct
MEFAKLYGNRKLKAALYVRVSTLYQIDKDSLPFQKQELINYCKYALNIEDVEIFEDAGYSGKNTDRPAYQRMMAKIRRGEFTHVCVWKIDRISRNLLDFAGMYEELKKHRVTFVSKNEQFDTSSAMGEAMLKIILIFAELERKLTSERVTGIMLDRAAKGLWNGARMPLGYKWSEEAKYPVIDDAESVTIHFIYDKYEEIKSCLQICRMLNNNNIKTKRGGEWTSKTVCDIIRNPFYKGTYRYNYRESARGALKAESEWIVVPNNHPAIVSEEQWEKCNKIMDANKAAKDTAKFRPRRYVHVFAGILKCANCGGGFSSNKDKERSSGWRPSAYRCNRATRMRDCPALGVSDVVLGPFVFNYIANFVRLQRKGGPYTAESIEKALLSGKCFSEVAGIDSKGIQDTLKALGYADTAGPDFVPDLGVQDTTGGDSGGFDIEILRQEEEKLKNALQRLLDLYLFDSAAISQQNYITKKEELEKNLKGVQAAIEKSMDDSGIRPDALNTSFMKKASAFIVNQRILSKKEIDFEELACKCDADVMKDLISATIERIDIRAGRIEAITFKSGLVHRFSYAE

SEQ ID NO: 13824 - protein, 527 aa, synthetic construct
MAKKVTTIPATLNRFDSSPIAVAKKRKTAGYARVSTDSEEQATSYEAQVDYYTRYINGREDWEFAGVYTDEGISATNTKKRDGFNQMIEDALAGKIDLIITKSVSRFARNTVDSLTTVRKLKEKGIEVYFEKENIYTLDTKGELLITIMSSLAQEESRSISENTTWGKRKQFADGKGSLAYSTFLGYEKGEDGSLRVNPEQAETVKLIYQLFLQGLSPYAIGKKLTGLGIKSPAGKDTWHQSSVKSILTNEKYKGDALLQKQYTADFLTKKRKRNQGEIPQYYVEGNHEAIIPPETWELVQEEMERRKSMGARYSSTSIFSSKIKCSECGNWYGSKVWHSQDKYRRVIFQCNRKFKNDKKCRTPHLTEDEIKDAFVKAVNAVIPEKDELIANTKVMMRTLCDTTELEVEQSRFLTETKMVAEMVKRIVAENKAEAMDQEEYQRRRNELVARYEAARDGYEKASGEISDRQGKRKTYMRFIGGLQKLDGFCGKFDEELWTALLDYATVYARDDIRFTFKAGNEVKVDG

SEQ ID NO: 13825 - protein, 503 aa, synthetic construct
MPRISVIGQVLPELKKRKRVAAYARVSMETEMLLHSLSAQVSHYNGLIQKNPDWEFAGIYADEGISGRDTSHRDDFNRLLADCDAGKIDMVLVKSISRFARDTVDTLTATRHLKELGIDVYFEREHIHSISDEGELLLTLLASFAQEESRSISENVKWGIRKRFEQGIPNGHKAPYGYEWDGEMYRVIPEQGEVIKEIFAKYLSGTSAYGIAKELSKRGITGQKGVPMDDSTIKFILTNPSYTGSMLLQKNYISEGHTRKRNKGELPMYMVEGMFEPLIPQADFEKAQLIREQRADAAANKNPTLTAFSGLVKCGECGRSVSRRTTKYGKKWNCNTRERKGKDVCGLRPVYETELEQAAAAALELAAFDGVAVRREVEQIVINADRIEFRMKSGKAREVMRAYQRGRSAFSQKITCGCCGRKLECDYWKMGPKGQKEKYKVWVCRGCSFRRLLDDEFRKAAAEVLGREDYEPRFVKEIAGVTAYEDRFEFHFTDGEVVEWQRK

SEQ ID NO: 13826 - protein, 575 aa, synthetic construct
MPGKAIQKLSRAKKVAIYIRVSTTYQIDRDSLPMQRKDLIAYAELVLGIEEYEIFEDAGYSGKNTDRPAFQEMMQRTRKGEFTHILVWKIDRISRNLLDFAEMYEELQELRVTFVSKNEQFDTSTAIGEAMLKIILVFAELERNMTSERVTAAMISRASNGQWNGGRVPYGYDYDPERKEFSIREDEERICQLLKKDYLESKSLTHTARFLNESGFKTRADAEWSPTAVWIIASSPFYAGIYRYNRYKGTERRVENPEEEWVLVPDHHPAIFTLEEHEAMLQLLKKNLRSFENPIGRPHSTDNIHLFSGIVYCGKCGSKMTSTPGRLHADGYRTSTYSCPKRRKTKDCDNPSVNDLIIGEFVINYILNMLNAKSGFSKIRNPEALEKKLLFGSTFAEVDHVEENGLNEFYNLLSRYGSDDSYTFAIRKPRKKRAAVDPEIEKLRREKEKHERALKRLQNLFLYSDSPISEKEFIIKKSEISKNLEDVNSMLGMVSRGADSVLSDEEFVKQASHLLISKELSDRQYIYFKKLVQSVSPEILKTYMETILDSVMVIDGRISSIVFRNGLTHKFIYKA

SEQ ID NO: 13827 - protein, 533 aa, synthetic construct
MQTIHPVPAKYCAYLRKSRADRDAELRGEEETLKRHRRLLEEFAAANHMTISKFYNEVVSGETIDSRPMVRQLLTDVEAGRWEGVLVVEVERLARGNTRDQGIVADAFKYSQTKIITPSKTYDPENEFDEEYFEFGLFMSRREFKTINRRLQRGRLASVEEGKFVGSTPPYGYRKVKLPHDKGYTLEIVPEQAQVVRRIFQWYCSGEPQPDGSLRLYGTDAIAARLDALGIQPVSSRSWSKATIRDMLQNETYTGIIVWGREKEIKVPENGKVARIRKRSTDYKRIQGLHPAIIDPALFACARKRLQEMRRRTAPASSGLQNPLSGILRCGKCGRLMTRLAPGTRNPYSTLKCPGRSCDNISSPLFLIENQVLAFLQEWLGSYSLEPSFSPDTPLTEELQEKELTLKKVNTDITAHCNQREKACSLLEQGVYTVELFQQRLKTLEHRISLLETNRKELLSDIEQLRRLQKEQDNYLPRIRHLLETYHTNTPAVNNDILKELIDRILYEKSQPNRRGQLNRCNFSLDIYPRLPK

SEQ ID NO: 13828 - protein, 596 aa, synthetic construct
MKEINNVVAYCRYSSENQRDGYSIEAQKKAISDYCKRMNYSLLRFYVDEAKTGMNDNREEFQAMIADSSSKEFSAVIVHKLDRFSRDRYNSVFYRKKLKDNGVKLISVLENIDDDNPEDLILLSVLEGMADYYSKNLSREVKKGMNAAASKGLSTGGIPPFGYRINQETKKLEIIPERAEIVKTMFNMYAKGYNLVDIELELNGLGYKTIHGNLWDKKQIRKILQKEAYTGVKVYNKYAYKSASSVKSPLIRVEDAFPRIISNEVWNAVQNRFLKDKRTIKPRKNMVDYLFTGLLQCKNCGGNLTGCSSFKNQNGERIYHHYYVCSGKQKTRIGKCPTPRFPKDLLENHIITTIIDFIFTDESIGLWADAILKSHNKSSDIKDIDTLKLQLSKVKNQEERLLDLYLSGDIEKDKYNTKIYELKLQSSKLETDILYTSSSHSFTKEELCLAIRLMMEDLKSDATIKTKKGIVNTFVKKISIDNESIDIELTLPNLEGAYNGLNGGADGIRTHAPVTRSTSLAGKPLEPLEYYSNYQALLHYIVKHSACQMIFAVNLRQLLFLQSLLEPLDYSSNIPLYSPYLEQSLFRYRRTMLQTY

SEQ ID NO: 13829 - protein, 479 aa, synthetic construct
MKRAALYIRVSTLEQAQEGYSIGAQKERLMAYCKAHDWAVADFYIDGGYSGSNLDRPGIQKLIAEVDSFDLVLVLKLDRLSRSQRDTLHLIEEVFLPAGVDFVSMSESFDTSTPFGRAMIGILSVFAQLEREQIKERTFMGRLERAKEGLYHGGVNFPIGYDYDSSGRLCVNEYEAAQVRKIYAWYLEGTSPEKIAERLRSEGFTNRYGSWNEISGRASVLRILSSDVYLGTLRFAGVVVEHAHDAIIDQETFEKATALRMKRREVFGDSPYQSKYLLVGLCWCARCGARYAVKHNYGGDKYYVCYSRARTVKRMIKADHCDNKNWPLDELDSIVECEVSRLLFEPGYYESLRKRKAAEVKEQPRGDGDVFRDKIAGLEKQIDRMMDLYQDEKIPVDVLSARIDKLHREKVALEEQLAAVEPPKPKRDYNEDAFAGLLADFSTVWNSAGLEDRRQIISALIRKITLDGESVNIEWAFLD

SEQ ID NO: 13830 - protein, 458 aa, synthetic construct
MKNKELPPLVRVALYIRVSGEEQKIKGLSLEAQQERLEAYAREKGWIVTGVYIDAAKTARKNMHKRAEFQKMIESVKRDEVDLLLFCRLDRWFRSVADYYKVMEILQAHGCDWKTIDEEYDTTSANGRLYINVKLSIAQNEADICGERIDVVFDSKIAHGTVVSGSCPFGYRVNKEKRLEISPEEAGIVQDAFSFFESNVSQLSTVKHIRETYGVNWCTATFRRMLSETLYTGVYDRGGRKNESFCPAIISKEQFDRVQVLLQRNARHAPSGRVYIFTSILKCAECNHNMVGRIAYKGSELYYYRCNQHFQRGRCSHKAEAREDIVEKWLFDNLESELNRVRLEWEVKAAEKKKAVLRTDKAVLKRKLTKLKELYVNELIDIEEYKKDYEIYTAALQQVPEPAAEAPPDFSAVEKLLQADFKNIYDTLTREEKRTLWRSVIKEIRIDNENNITGISFG

SEQ ID NO: 13831 - protein, 527 aa, synthetic construct
MAKVTVIPPTIHPLTHLPSTAAGRRRVAGYARVSTDSDEQATSYEAQVDYYTRYIQSKPEWEFVSVYTDEGISGLNTKKRSGFNSMVADALAGKIDLIITKSVSRFARNTVDSLTTIRKLKEKGVECYFEKESIWTFDSKGELLITIMSSLAQEESRSISENITWGQRKRFADGKVSMPYKRFLGYEKGEDGLPAVVEEEANVVRLIYRLFLEGKSSAGICKCLEELGIPAPGGGSKWSKTTVESILLNEKYKGDALLQKKFTVDFLQKKMKPNEGEVPQYYVEGSHPAIIEPDEWDHVQSEYARRKRLGRSYSGKSVLSAKLVCADCGGFYGSKVWHSTDAYRRVVWHCNSKFKGEKRCGTPTLGTETIQDMFIRAYNQMMSNRPQIIADCELMRKSLTDFAALDAEIVRQTEETEVVAELVRAAVRENAATAQSQEEYMKKYDSLRKRYEKAAAELDRLQSERALRQRQDKAMALFIRTLKKQPVVLDKWDDAIWTVMVEKGIVHRDGRITFVFYNGTEITVGAE

SEQ ID NO: 13832 - protein, 432 aa, synthetic construct
MPKSITIVPKAPKLEQKKRVAAYARVSSGKDAMLHSLSAQVSYYSNLIQRRQDWLYCGVYADEAKTGTKDSRGEFQRLLSDCRAGTVDMVITKSISRFARNTVTLLETVRELKSLGVDVYFEEQNIHTMSGDGELMMTILASYAQEESHSASENQKWRVKEKFEAGIPWNGTVLGYRYENGVYVIKPDEAEIVREIFAGYLSGLGIEAIMKKLNAEGRTTRNRNAWTRTGVRRVLSNYSYTGNLLLQTTFRENHITKKALPNRGELPMYHAENAHEAIISPEDFQAVQAEMAWRSAKHNKTKRTPTKYPFTSLIVCGICGAHYRRKVTHGGPVWICSTFNIHGKAVCPSKQIPEGALEKAAVEIFGLDIFDENVLCGKVAFIRAEKDNALAFRFKDGSERTVRWTDRSRRESWTPEMREAARQKTLMQRRDP

SEQ ID NO: 13833 - protein, 525 aa, synthetic construct
MAKSVITIPATVNRHTAAPIGSYKKRRVAAYARVSTDHEEQQSSYEAQVDYYTNYINVREDWEFVSVYADEGITGCNTKKRDGFNKMVEDALSGAIDLIITKSVSRFARNTVDSLTTIRKLKENRVECYFEKENIWTFDSKGELLLTIMSSLAQEESRSISENCTWGQRKRFADGKVTVPFKRFLGYDRGEDGNLVINEEQAETVRRIYGLFLQGRSPHAIAKLLTAEGIPSPGGKEAWSSSTVKSILTNEKYKGDALLQKVYTVDFLTKQKKVNEGEVPQYYVENNHQAIISPSVFEEAQHQMAARHSGKNRAGSMGVFSGRIKCADCGGWYGSKVWHSNSKYRKTIWQCNHKFDGGEKCGTPHLDEETIKQLFLKAANAIFAEKDGVREDYDSIKDTLFGTAELETERLRLQEEMNVVAELIEQCMAENARVALDQTEYQKKYDGLAGRFNRAKGRLSEVSQAITERQAKREKIGRFVSALEKRDGPLTEFNEDDWYSLVEYATVYSREDIRFTFKNGMEIKA

SEQ ID NO: 13834 - protein, 517 aa, synthetic construct
MKKISRIEPVRPVLTDRKKVAAYARVSRDTERLMNSVSAQVSYYSALIQNNPEWEYAGVYADCGISGTGTARRSEFLRMLADCEAGRINIILTKSISRFARNTVDLLETVRHLKSLGIEVRFEKEHINSLSEDGELMLSLLASFAQEESRSISENVKWGVRRRFQSGEIGTANKHILGYRYDEDEKKYVIIPEEAEAVRWMFQMYIDGVSFRRIAENMNRVGIRTTLGNDFQEASVRQLIFNEVYAGDIRRQKCYMADPITKAKVKNGGELPQYYMADCHEAIIDRETYAKVQAEMERRAGLVNPAYPFTGKMKCGVCGQPFTRKKGTIRGKTYVHWICRSQKETGMSCTSVNFSEEELERISARTLGMDEFDGAVFEKAVRGITVMENGDLEFHLTGGETKVWKNLHLDPPRHIATVTDCFQGKIRCAACGNTYHRVNGAGKWVYWYCIGKKRKNVECHNPNYTDYKLRQVSAHMMGLEEFDEAEFEKQIEEITAFPDGSLEFNFYGGRKERWQRA

SEQ ID NO: 13835 - protein, 456 aa, synthetic construct
MSGKKSPVPEVRRAALYIRVSTEEQAKKGYSLPAQKEDLESYAKKNGYAIAGYYIDEGKSARKKYTNRKEFMRMIEDVKADKIDVILFIKLDRWFRSVADYYKIQEILDAHGVAWKTTQEHYDTETTNGRLYINIRLSVAQDECDRDSDRIKFVFESKVARGEPITGSMPFGLKIENKRIVRDPETAHIVEELFRHYQEHGTVGGAMRHVRETHGILLYDHAVRRMLRNPMYKGMYRDNPDYCEAIIPPEEFDAIQQLLESRSIRSNPTGRIYIFSGLLVCGACGQRLSGHYTSPRGGRQEYYLYRCRNALIYHRCSNHKCMNEEKLEQWLLLNVMTELDNWQTEWEIEAARAPKPKVDRAAIRRKLERLKDLYVEDLITMEQYKEDFTRYNLMLQQEADEPPPPPDFEGLRKLLSGDLQSIYRTFDREQRRDFWRSIVQEIRLDGENDPRLVFRR

SEQ ID NO: 13836 - protein, 530 aa, synthetic construct
MQPYCIYLRKSRADMEAEAHGEGETLARHEKLLLEVARRGPYNVTQIYREVVSGETIAARPVMQQLLQEVEQGLWEGVLVVEVERLARGDTIDQGIMAQTFKYSGTKIVTPLKVYDPNNEYDEEYFEFGLFMSRREYKTINRRLQRGRLASAKEGKWVSGVAPYGYERVRVPNDKGWTLRPVEAEADIVRFIFRLYTSGEEGDDGSVKRAGTYSLALRLDKMGVTPPGSALYWSSTTVQSILQNPVYIGKIRWNVHKSKKRIINSAVRVERYTAPPEEQILVDGLHPAIVDEAVFLAAQDLIAQKGPPPVQSENIVKNPLAGLLVCGKCGRNMTLRPNAYGGMLLCPSRVCNNIGSKYEIVEERLLQALSRWLDDYRLEWSDRLPAEEQALIDLKEKSIRKAQSEVETLRKQLSRTHDLLEQGVYDTDTFLARSRSISERISAAQESAEALAAELVEDEARAASRKNIVPKVEKLLEVYAALPSAQAKNEMLKEVIERAEYVKLSRSGKNGPFDNFELVLFPKLPRTIGE

SEQ ID NO: 13837 - protein, 562 aa, synthetic construct
MSIDKYETLNQERKIQHTKRKVAAYCRVSTDNEDQANSFESQQRYFRQYIERNPDWELYEVFADEGISGTNTKKRKEFNRMIACAKNGDFDLIVTKEISRFARNTLDSIFYTRDLKKHGVGVIFLNDNINTLDGDAELRLAIMSSIAQEESRKTSERVKWGQKRQMEQGVVFGRSMLGYDVKDGKMYINEDGAKVVRLIFHKFVNEGKGTHVIARELREEGIKPMRVKEWQNTVILRVIRNEKYCGDLVQKKTYTPDFLSHEKKVNLGQEEFVIIKDHHEPIISRELFDKANRILDEKSLSQEGKTKHSNRYPFSGKIKCGCCGRGYVARYKTRKNGSRYKAWRCLEAARHGSPHVDKAGNQVGCSGLSIRNEDATHIMYLVTSSLKYNKEKITNNLLAIIKSIIAMDTAGTDSEKLKSQIKAIEQKRTNLIDLYTSGDITRDEFSAARAKCENEIAELQSVIDSIDKQREMIEKQQELVAEITDAMNELINGVEYEDDFYKEILDKMVVNDNDHIDVYLNLLPLKWSYTVAKSVNCPQGRPLKKAGAPEMEHFRGFSTDIR

SEQ ID NO: 13838 - protein, 446 aa, synthetic construct
MKRVFLYIRVSTEEQAIHGLSIEAQTAALEAWAKERGHKVVGVYTDAGISARKPASKRPELQRLLSDVQTGKGDLVAFTKLDRWFRNIAEYYKVQEVLEKHHVDWRTIHEDYDTSTASGRLKINIMLSVAQDEADRTSERIKAVFEAKRQKLEPLTGNTPTGYKIEGKKLVKDPETEEAVTAFFQKFLACGSVSVTQRHVLETYGLRIEYQLASKMLDSPAYYGHYYDMDGMTPPYITREEFDRIQALRIRPVRKTKYNRTYLFSGIAVCGECGFRLGPKTNTRNKVPMYNCPGHYIKRSGCQNKTNLSERKIEAYLISMLETEMRRLKIEYEDISSKRVKVDHKKEIAAIRGKLSKLKDLYLNDLITLEEYKNDQRSLTEQLERLARQDAPAREPNFERIEGILSFEWKSIYAEVSKEKKREFWQAVLKEIRIYPDRHIEFDPNL

SEQ ID NO: 13839 - protein, 440 aa, synthetic construct
MERIIQKVGLKVPAQPKAKRVAAYARVSSGKGAMLHSLSAQVSYYNSLIQNHPGWLYCGVFADEALTGTKENRAEFQRLLAECRAGSIDLIITKSISRFARNTVVLLQTVRELKAMGVDVYFEEQNIYSMSADGELMLTILASYAQEESLSASENQKWRIKKNFEDGKPWSGQILGYRYENGIYIVKAEEGEIVRGIFADYLSGMGVEAIMKKLNAQGKTSRNGHAWCRSSVRKVLGNYSYTGNLLLQTTFRENHITKKTLPNRGELPMYHAENTHEAIVSMEDYRAVQTEMARRSAKHNKTTHGPVKYPFTSMIVCGTCGKGYRRKVTRTGPVWICSTYNVYGKVVCPSKQIPEGTLEKAAAEALGLDAFDAKALHDKITAIRVEGNNTLVFLFKDGTQTVKRWADRSRAESWTPEMRAAASEFAKKGRAMRSCQQQEQ

SEQ ID NO: 13840 - protein, 527 aa, synthetic construct
MPAARAVTVIPATINLHTHAPATATKKRRVAGYARVSTDSDEQFTSYEAQVDYYTRYIQGNAEWEFVSVYTDEGISGTNTKRRAGFNQMISDALAGQIDLIVTKSVSRFARNTVDSLTTIRKLKEHGVEVYFEKENIWTFDSKGELLITIMSSLAQEESRSLSENITWGQRKRFSDGKVNLPYKQFLGYRKGPDGFPEVVEDEAKIVRRIYTLFMEGKTSYAIAKALTADGIPTPSGKSKWGASVVESILTNEKYKGAALLQKCYTVDFLSKKRKVNEGEVQQYWIERSHQPIIQPHEFDVVQAEFARRKGMGLHYSGGGVFASRLVCGDCGSCYGPKVWHSNSKYRRVVWQCNSKFSNEEKCRTPNLLEEDIKTRFLAAFNQLLDGKDALLEDCRIMQDHLTNCSAIDAELDELLREIEVVTELTQRCIQENARSAQSQEEYAERYNGYVARYEKAKPKVDALQEQKKQRQSKADLIGGFMFALHEREVGITEFDNALWLAVVKKATAYHDGRLVFTFQNGMEIEE

SEQ ID NO: 13841 - protein, 574 aa, synthetic construct
MEFAKLYGNRKLKAALYVRVSTLYQIDKDSLPFQKQELINYCKYALNIEDVEIFEDAGYSGKNTDRPAYQRMMAKIRRGEFTHVCVWKIDRISRNLLDFAGMYEELKKHRVTFVSKNEQFDTSSAMGEAMLKIILIFAELERKLTSERVTGIMLDRAAKGLWNGARMPLGYRWSEEAKYPVIDDAESVTIHFIYDKYEEIKSCLQICRMLNNNNIKTKRGGEWTSKTVCDIIRNPFYKGTYRYNYRESARGALKAESEWIVVPNNHPAIVSEEQWEKCNKIMDENKAAKDTAKFRPRRYTHVFAGILKCADCGGGFSSNKDKERLSGWRPSAYRCNRATGMRDCPAIGVSDVVLGPFVFNYIANFVRLQRKGGPYTAESIEKALLSGKCFSEVAGIDSKGIQDTLKALGYADTAGPDFVPDLGVQDTTGGDSGGFDIEILRQEEEKLKNALQRLLDLYLFDSAAISQQNYITKKEELEKNLKGVQAAIEKSMDDSCIRPDALNTSFMKKASAFIVNQRILSKKEIDFEELACKCDADVMKDLISATIERIDIRAGRIEAITFKSGLVHRFSYKK

SEQ ID NO: 13842 - protein, 541 aa, synthetic construct
MQRAVIYARYSSHGQNEQTIEGQIRVCRDYAQKQKLNIVNIYVDKHKTGTDVNRPQFQKMIADSASGSFDYVIVYMIDRFARNRYYSTIYNFQLSQNGVKLVSATENISESEEGEFFQMFLEWNAEKYSTRLSKRVKEGVTTSVTNGTYTGGRIIFGYTVKDKRVYINPDESPVVQYIFQQYADGVTKKDIAADVNAKGWRFRGARWRARDFDNLLRNAKYTGEFYTGGRLCVNTFPAIIDKPLFEKVQKRLGQNKYFSGAFSAKLDYLLQGKLYCGHCGASMVADGGTSRNGKKYHYYACTNKKKRHTCTKSNEHKDFLEWYATEQTVAYLSDPRRVDIIATDVIKYYELRTNTDEIKRISAERTKTKKEIDNAVNLMVSGVDAATVRVLDAKIKELSTLLSDLERHQAQLELEQGLKVTKRDIIAFVAEFIKGDLHNKDFQKRIIDNLVNAMYIYDDKVVLYFNIKGGRETAFIGKDETDDALSDIDGGAPSSGDSASGKRVQTLSNSPSQKHCILWFSSRETYNLRCFFYAIWGLFGD

SEQ ID NO: 13843 - protein, 500 aa, synthetic construct
MKTAVIYARYSCDKQTEQSIEGQLRTCNEYAERNDIIVVDTYIDRATTGTNDNRASFQKMLKDSNKRAWNYVIVYKLDRFSRDKYETAMHRHTLKINGIKLLSAMENIPDTPEGIILESLLEGMNQYYSAELAQKVKRGMRETRNKGNFTGGKIMYGYRVENKKVVIHEDEAQVVRRIFTEYANGKQGKTIIDELNEQGVLYRGKPFAKTTFYRMISSEKYAGIFRHGDEIFTNIYPAIVSDALFRTVKRKADNNKYGKHKQDVCYLLKFKLFCGYCGKPVGSDSGTSQTGKTMRYYRCSGRKTKSGCTLSPIRKELIEKLVTDAVQEAFNENDLNNLADKILEQNKKMLADNSVLNLLTDEYKETEKSLNNLIRAMEQGIFTQSTKDRLERLEEKKTELNIKITIEKARAETALTKEQILEYLKSSIKLQPKLMLDYFIEKVILYNDKMEIHCKYTDNPDGTDDHRDFIFYTTNYSVKIDRHIFGGKLKNITYQMQLFI

SEQ ID NO: 13844 - protein, 542 aa, synthetic construct
MDTGNKINQTTAVIYARYSSHGQQEQSIDGQLRDCHAFAERQGYSVITEYIDRALTGRNDDRPDFQRMLSDAKKKQFQYILVWKLDRFARNRYDSAVHKAELKKYGVRVISATENITDEPEGIMLEGLLESLAEYYSANLSKHVKRGQRESLLQGHVPGGTPPYGFKLVDKHLVADEEKAPIIRYIFEQYAKGVPKKEIFDTLNVRGIRNAYGRPFSYSSLQHNLRNPKYIGKFMFNGIEVKGCCEALISEDVFNAVQKRLDSVKHAPAAQKAREEYLLQGKAFCGHCGSPLVGESGHGRNSVYHYYACAKKKKSHTCDKKNEKKGFLEWYVVEQTVEYVLTPERIDYISERIVAKYNEEFSDKQIKELQRQSARLEGEINAAVDASLTAPEKIRPRYYEKIELLETQKADIDLNISTLKIAAGHRYTKEQIAAWLKAFCNGDYLNPEFQRRIIDVLVNSVYVYDDKIVIYYNVKGGKQISYIEMCDSINENKSNEGNAVQGCAVRISHTPPRQREIPAAENVLAAMRGHFLLQISKNLFSI

SEQ ID NO: 13845 - protein, 518 aa, synthetic construct
MRAALYARYSAGPRQTDQSIEGQIRECTDYCKKKGFTIVAAYADRHISGKTDERPEFQKLIADSRKNKFDVVVVYKTDRFARNKYDSAIYKRQLRQNGVQIFYAAEAIPDGPEGIILESLMEGLAEYYSAELAQKIRRGMHESALKCRVLGNTMPLGYRASKEHTYEIDPENAKAVEIIFDMYVDRQPNADICRRLNELGFKTSRGNPFNKNSISRIIQNEMYIGIYEAVGVRVENGVPALIPKETFYLAQKERERRKVSKKERAGVAEYMLSGKLFCGYCKKPMAGVSGTGKGGGKFYYYQCPTVRQKGNCQKEHVRRDFIEDLIVQKTVEHVLQPDILTDIAQRLCRLQSESDTREQDIAYYRKKLQENKKAMDNIIKAIEKGLAAETLLQRLDGLESEKIAIEGELAYFQSLKFGLSEEEMLFFLRQFLEPDNDWQAYKRRIINSFINQVFLYNDHFLVYYNIQKDGAMDFNSTEINESPGFDELSLGSTIRAVLELLSAVLFLVYCRRSSPGRF

SEQ ID NO: 13846 - protein, 530 aa, synthetic construct
MPIGTTKIVKEIPALYHQKNTIVPDRPNVTYYARVSTESEEQEDSYERQKAYFEEKIKAHPEWNYIEGYADWGVTGTKAEARKNFMRMIEDCRAGKINKILCKSISRFGRNTVDTLKYIRELRELGISVFFDSQGIDTLTPGGDVLITILAAMAEQESRTMSTNIKWAFEKRFKEGNVLINFRGTLGYTKEGDEYVVVEDEAKIVRRIYAEYLSGKSLRQIADELNAEGLQTKKGKQWMPSSIQGILQNERYTGNAILGKSYKTDVLSKTRKKNEGQAPMYYVENSHPPIISQATFEMAKAEQIRRRDIRSSVNTGSGRYSSRYPYSGLLICGDCGAKLRRFGRKVVSGEYVPTWVCITHQKTPKECDIRPIKEEDINAAYERVVGRLLGDVAEIKAAVRKTIECEIKIERDADLTPIQRALDDAREKIHELFQKRRKNEITVEEYNRLYKEYSAAVIDLQAKEKELQTVNIETQMNQQKLLSIIDALESNETDYNDSAIMRLLLDNIKVVGKHELEFQFKCGINITETI

SEQ ID NO: 13847 - protein, 498 aa, synthetic construct
MAKQRAVAYIRVSTKSDAQSHSFEYQLEYWRNTITQNTECEYMGVYADKGISGRALAKRPQLLKLLTDARQHKFDVVYTKSVSRFGRNTEELLETVRELRELGVKVVFEKEQIDSFNPAAETYLTIAASIAENDLQIYSDNMRWSIRNRFKNGWFSVGHGIFGYRTNKDTDELEIEPSEAETVRRMFDLYLEGYGTIAIGLILEKENRPNSFGKVKWNRGAILYMLTNEKYKGCALSQKYVQSQGVCRLNKNEAPKYYIENTHPPIISPEQFDKVQAELEKRGKSHKGKGKPIYAFTTKIVCGQCGHGYVHKINSSGKPWANPIWICSHQNFFGTKNCNNRRIKDSVLKEKFVECFNEFIANKTESDEAIELRQRLASLIESENELNLLRINRMIDGAAFAVESASLRKEITAVTMQIAAKEMRGIDKADFTQITEYDDDKVEKFVERVTINNNVVTFTFINGAEISREYTNGPSGNQKGWRDKQRERLEKENKTEVQ

SEQ ID NO: 13848 - protein, 515 aa, synthetic construct
MMRTAAYARYSSDAQREASLEDQLRNCRAFCARMGWPDPVVYTDAAVSGSRLDREGYQRLLVEAHRFNVLLVDDLSRFGRDSAELTMTVRRLKFAGVRLIGVSDGVDTERKSHKADVGLRSLMSEMYLDDLADKVHRGLTGRALSGASAGGLPYGYRITTVGQRAIDDAQADIVRRIFAEYIAGSSPREIVSALNRDRVPSSRGGDWYVSAVYPDRKRGIGILANAIYVGRQIWNRSHFVKHPDTGRRLRQDRPQSEWIVTEHPELSIIDEATWDAAHSRARRSTNGSYAGSTKPARPGRPTRYLLSGILRCGDCGGPMVIVDRYRYGCSVAKDRGATACPSTVKVARVPAERALVAGVQRELLTETAFQRFTAAVTAELKRAAPDTEGAKRRLAEAEKVHANVMMAIRAGIVTPSTRAELVRAEGEVEAARAELAAVKSFQPAQILPRARETWRRLVAELTTVTDTVRARDALRELIGESVRVTKENGAIFGEIAPFQINLVAGVGFEPTTFGL

SEQ ID NO: 13849 - protein, 551 aa, synthetic construct
MDMKKGKKKRGIWQDFRPCDPEGKASAVYIRISRDDAGAKNPKEAKESARVQQSKCEAYAKERGWAVRLYQDINLSGFDDEGRPDFQRLLADINAGLIHSVIVLEPKRLARDNSIMDAVVKEYLYPNGIKLHGVMSPIDITNDDGLFMLGIEMAFSRKAISEQRKKSMASIDSQLKEHTFIPRPCYGYRRDEKGRIHVVESEKAVILEMYRMCLKGDSMNEISEYFNRAGVPGKRGARWWTHRQIKIVLTNPAYVGKIRYRGVHETRLIPKMVTKETQDSAAEMLAIRSHKRAPSKRHLLSGLVTCSYCAEKASRGERAYPAMVLNIQTQGPKGEKKKYAYFFCQSQNRGVFHCESPRVPEAALDAIVEGTIVPYVLDRYSRQIGADSHQETLKRLEAARGRVRLVESRNKEIEDSFASGEMGKLEYLRLRDKNQAKSSVAREEISVLLQMAESEDPNKVQEVVDVLQRWQEMPMEKRRDAIRTFIESIEVSAEWVTFHIRPVGGDKWSFNVRLETVRRYQEKPIGDLKNHMEWTLGQAGYANQEPCPNVG

SEQ ID NO: 13850 - protein, 523 aa, synthetic construct
MFFGIYGRKSVYSDKSDSVDNQHRMCNDYIKTHFKSDDITLITSYSDEDYTGANTKRPDLQRLLEDVKSGAINVLVVYQLDRISRDVRDFSNIYALLEEYHVMFISIKENIDTTTPIGRAMMYVTVVFAQMERETIATRVRDNMIGLAKKGFWTGGNPPYGYVRKNIVINGKKHVTIEPDPDGVAYNIWIYDSFLKNHCSLQSMETYFRKEGIKTRNGAFFSSTQLYKILTMPYCVEATPEIYDYFAAKGCQMDPDSPRDKWDGSVGVMVYGRSTEVNKKHQLQPPEKWLICLGLHKPFMPAAKWLAVQNQFSKNKFDKTPKYDIPLLKGVLRCSCGSIMAVSRKKKINGEVSSWYYCLRRMRNGVEACDRKQIKVDIIDQKLLNTLHSIESDPSMIFCFVQKKELPLPDIKTINNKISSVESKISKLASSLALADGSAASKYIVAEIERLDSDLQFLKRERAAINIEIKKRDELNESAESKALHIQNVMKGLSGFTAEEKNLIMRDILKECVWDGSELSIVL

SEQ ID NO: 13851 - protein, 407 aa, synthetic construct
MKPGKIRVCAYARVSTMTEKQQESLTNQQAYYNHFFKNKKDVEFVGVYYDQGISGKLAKRPGFQQMLEDCRAGKIDVIHTKSISRFARNTELLLAVSRELKTIQVDIFFEEQNLHTLSNEGEVMLTVLASYAEEELRNMSENQRWAFQKKFQRGELVINTKRFLGYDKDENGELIINPEEAKIVKRIYNLYLSGMGVHVIAKLFNEEKVSTVDGGKWYSSTITNILKNEKYKGDAILQKYYFAEIKAKQRLNQGQVQQYLITDNHEAIVSREDWESVQKLLRQNSKRDARIDYNRRYPLSGLLKCEHCGSTLKRQKYYKGKVVWVCSKYIREGKAACIGMRVPDSVVQDWSIHEPTVVKEENIGGKKYYSYSSKENDTSRAEATHSENPNGGLLPSIHRPRRTAIKL

SEQ ID NO: 13852 - protein, 435 aa, synthetic construct
MAAYCRVSTDQDEQLSSYENQVRYYKEYIQQNPLYELVDIYADEGISGTNTKKRTEFNRLIADCRKGKVDRIIVKSISRFSRNTLDCLKYVRELKELGIGVTFEKENIDSLDAKGEVLLTILSSLAQDESRSISENATWGIRKKFERGEVRVNTTKFVGYDKGENGNLIINEEQSKIVRRIFRDFLQGETPESIARSLKEEGVPGWNGKANWYPTTIQRMLQNEKYMGDALLQKTYTVDFLTKKRSENQGQVNQYYIEGNHEAIINKEDWDLVQLEVERRNKYRQDNHINFYIIQCEQNPFTCKVFCKECGGLFGRKNWTTSRGKRPVWQCNNRYKVKGIQGCTNRHIDEETLQQAFLRAIEILHEKKEQLLEKWNSLNEEQKLEKYHAAQLKRLLDSEQEVFDGRKMCQVLEKIMLGEDGSITVKFLEGTEVNL

SEQ ID NO: 13853 - protein, 446 aa, synthetic construct
MAAYCRVSTDQEEQLLSYENQLNYYTGYISNNPLYQFAGIYADEGISGTNTKKRDEFNKMIADCRAGKIDMIITKSISRFARNTLDCLNYVRELKELGIGIIFEKENINTLDAKGEVLLTILSSLAQDESRSISENSTWGIRRRFEKGQHKMSTKRFLGYDTDEDGKLVVNPKQAGIVKRLYFEFLSGKTVDYIKRIFEREGVVNWDGSTKWQVTTLQSMLENEKNKGDAVLQKSYTVDFLTKKRVMNQGEIQKFYIEDDHEAIIEPWIWECVQLEIERRKRYLEEHGTKSYSNNTEKNPFASKIVCGECNKVFTRKGWRSSTGEIRKIWQCSERYKAKGVLGCNNRHIEESTLIDIYLMAWNRLLECRGILMSEWEEKIKTGNSLTKFRTLGFMEATKITQLVTMLDINLMLQTVDHIKVFECGVILTVFLDGTEIEWENKELGR

SEQ ID NO: 13854 - protein, 426 aa, synthetic construct
MKIRILEPIAEMTQKKKKVCAYARVSTDSRKQEDSLENQKETYEQLICSNPEYEFVGVYSDQGISGFCEKRPGFQEMIRKAKAGEIDLIITKSISRFARNTVTVLKVARELKELGVGIFFEEQNINTLSGDGEMMLAVLSSFAQEESRSMSENNKWTIRKKFEQGEIMINTERFLGYDKDEYGGLSINAKDALIVAFLYDMTLFGLGSSRLKNLLNFLGVKTVTGGEWHEGSINGVLINEKYKGDCHLQKTFTPENKRNQSRKNKGEVQSYYITDNHPAIVSTDLWDQVQKERVRRKKSRNIGAGGTAKYQNRYPLSGMLVCPYCGKNLRRRQVHKNKIQWLCSTYIDAGKQACKGLRIDDTEVQKQNITEPTVIEEVEQNGKKYYHYTSKAEFDCGCRKQPECAEAEDGSVLPGINRPRRAVIKL

SEQ ID NO: 13855 - protein, 456 aa, synthetic construct
MRNQNTSEVPIRAALYVRVSGEEQKIKGLSIEAQKERLVAYAKERGWIIVGLFVDAAKTARKNMHKRSEFQKMLDLVRADGVDMLLFCRLDRWFRSVRDYYKVMEVLETHNCQWKTTDEEYDTTTANGRLYINVKLSIAQNEADICGERIHVVFDSKIQHGTVLSGKCPFWLRINDERRYELIPENAAIIQDAFNHFENTTSQRATIRYIRETYDVNWCEATFRRMLRDKLTIGVYDKNGRYNDDFCPPVISKEQFEHVQELLRRNSRHNPAGRVYIFTGILVCEECRHNLVGYYSRGYIYYRCSQHFQRGRCTHNHSAREDVIEAWLFDHLGEEIEKYEVAWNVQAAERKRTASSIDRSVLRRKLTKLKDLYMNDLIDIDEYKKDYETYTAALSALEEPEEEKHIDLSGVRRIISHDFREIYDSLTREEKRTLWKNTLKEIRVNNANEITGISFF

SEQ ID NO: 13856 - protein, 530 aa, synthetic construct
MSKKAAIYARFSSNNQREESIAAQIRAAKEFAEREGYEIVATYADKAKSGTSAKRPEFLRMIKDAESEKFDYVVVHKLDRFSRDKYDSAIFKRKLKQCGVRLISVTENLDGSPESLILESVIEGMAEYYSKNLARETMKGLKENAYKAEHTGGKPPLGYDVNSEKKYILNPKEAESVQLIFKMTIEGYSRGEIIKELNERGFKTKLGTVFRPNSIHSILTNEKYTGIYVYNKIASKDTFGKRNGHAIKDENEIIRVEGGMPQIVSKDDFQKVQEILKMRKQKPGANKAKENYLLTGIIKCGCCGRPYQGNRRVRKDKPLYVSYRCSLRKKSVTGECDNKEIRKEYVEEYVLSELERKIFNDEAIKYLTKGINDNIRSQELVDGDKKVILLKEGNEIESQIINIVNAISQGFVQEEFKEKLEELKKRKAEIEFKLSEIESREVSKVITEADVRALLSDFSGYVISRNIPECKKFIRDFVKEVVVYKDHIEVIFNVAFSLFKNRKGEVEITSSIKRYDLIERFSDSFYIMVS

SEQ ID NO: 13857 - protein, 523 aa, synthetic construct
MFFGIYGRKSVYSDKSDSVDNQHRMCNDYIKAHFKADDITLVTSYSDEDYTGANTKRPDLQRLLEDVKSGAINVLVVYQLDRISRDVRDFSNIYAMLEEYHVMFISIKENIDTTTPIGRAMMYVTVVFAQMERETIATRVRDNMIGLAKKGFWTGGNPPYGYVRKNILINGKKHVTIEPDPDGVAYNIWIYDSFLKNHCSLQSMETYFRKEGIKTRNGAFFSTTQLYKILTMPYCVEATPEIYDYFAAKGCQMDPDSPREKWDGSVGVMIYGRSTGVNKKHQLQPPEKWLVCLGLHKPFMPAAKWLAVQNQFSENKFDKTQKYDIPLLKGILRCSCGSIMAVSRKKKINGEVSSWYYCLRRMKNGVEACDRKQIKVDIIDQKLLNTLHSIEIDPSMIYRFVQKSELPLPDIKTINNKISSIESRIGRLASSLALADGSAASKYIVAEIERLDSDLQFLKRERAVINVEIKKRDELNESAEGKAQHIQNVMKGLNGFTAEEKNRIMRDILKECVWDGSELSIVL

SEQ ID NO: 13858 - protein, 639 aa, synthetic construct
MANRQTEEKITALYERLSRDDDLTGDSNSILNQKRYLESYAAQRGYTNIVHYTDDGWSGGNFDRPAWKRLVADIEAGKVAHLLCKDLSRIGRNYLQTGFYTEVMFRQNGVHFVAVANNIDSEEQDSGEFAPFLNIMNEWYLRDQSKKVSAAYRVKGKAGKPTTNNAIYGYKKDPEDKDHWLVDEEAAAVVRRIFRLAVEGHGPHEIAKILTQEQVECPAYYLARNGRGSRKNTVDTSRPYDWYGFTVSSMLTKPEYMGHTVNFRSSKKSYRDKRVKNDPSDWLIFENTHEAIVDPETWQLAQQVKRTVRRTDTTGVANPLTGLVFCADCGAKMYNHRGKRQKDGREYGTDFYNCSTYTLTFERETQMCFSHTVSTKALNALILETIRTTASYAIQNKEELIQKVRSISQVRQQEAAKELKRKVAKERRRSAELDVLIKKLYETYAMGKLEEKRFELLCAEYEKEQAELEQLLASEQAQLDQFHEDTDRASHFLALAQKYTDFTELTAPMIHEFVEKILVHAPDRSTGERVQEIEIYLNFIGKFEVPMPEPTEEELAAEEKRRQKRIRDHEKYLRQKERKQKIAEGLIVPGEPYQLVCQCCGELFQSVRPNAKFCKPACREKFYRQEKRKAKETETSQTA

SEQ ID NO: 13859 - protein, 523 aa, synthetic construct
MAINKNVMIIPAIKRVGNNRKEDETPKLRVAAYCRVSTDSDEQASSYEVQIEHYTEFIKKNSEWEFAGIFADDGISGTNTKNRDEFNRMIDECMAGKIDMVITKSISRFARNTLDCLQYIRKLKDKNVAVYFEKENINTLDAKGEIMLTIMASLAQQESQSLSQNVKLGYQYRYQQGEVMVNCSRFLGYTKDENKRLVIVPEEAEIVKRIYREYLEGSSMDKIKKGLEADGILTGAGKKRWHTSTIRKILSNEKYIGDALLQKTYTVDFLTKKRVVNNGIVPQYYVENNHEAIIPREIFMQVQEELVRRSRGHISTSGKKRNFSSNHVFSQIIFCGECGEIYRRVHWNNRGKKSIVWRCVSRLENTGLTCHSRTVLEDMIGLATVEAINKLIGQKDGFLTILKENIEIVISETDNNIVAEIDKKLEELQKDLLRLANSKEDYNDIADEIYRLREERHKALAEEAGKKGSKQRLEDMEKFLNEQSTLLEEYDEQLVRRLIEKITVYDDKLTVEFKSGTMIDVVL

SEQ ID NO: 13860 - protein, 528 aa, synthetic construct
MTYQEGGEAMKKITKIEGNKVASIIKPKLRVAAYCRVSTGSDEQLVSLQAQKSHYEAYIKANPEWEYVGLYYDEGISGTKKENRTELLRMLSDCENKKIDLIITKSISRFARNTTDCLEMVRKLLDLGIYIYFEKENINTQSMESELMLSILSGLAESESISISENNKWAIQRRFQNGTFKISYPPYGYDNIDGQMVVNPEQAEIVKYIFAEVLSGKGTQKIADDLNQKGIPSKRGGRWTATTIRGILKNEKYTGDVILQKTYTDSRFNKRTNYGEKNRYLIENHHEAIISHEVFEAVEAALNQRAKEKGIEKRNDKYQNRYSFSGKIICSECGSTFKRRIHSSGTRKYVAWCCSKHLKQITECSMQFIRDEDIKTAFVTMMNKLIFGRKLILQPLLDALRGMSNSDNLSRIQELEKQIEKNAEQRELLVKLMAKGYLEPALFNRENNELQMEADNYMGQKEALIHALNGELSKVQEVSNLIKFTNKAEMINTFSEQIFNDHIEKIIVYSRVEIGFVLKCGITLRERM

SEQ ID NO: 13861 - protein, 588 aa, synthetic construct
MRIVNKIEAKTPQMPRRKRVAAYARVSMESKRLQHSLSAQVSFYSSLIQSNPAWEYVGVYADNGITGTKAEAREEFNRMIADCEAGKIDIVLTKSISRFARNTVDLLNTVRRLKELGVSVQFEKERIDSLTEDGELMLTLLASFAQEEIRSLSDNVKWGTRKRFEKGIPNGRFQIYGYRWEGDHLVVHEEEAKIVRLIYDNYMNGLSAETTEKQLAEMGVKSYKGQHFGNTSIRQILGNITYTGNLLFQKEYVQDPISKKSKINRGELPQYFVENTHEAIIPMEVYQAVQTEKARRRELGALANWSINTSCFTSKIKCGRCGKSYQRSNRKGRKDPNANYTIWICGTRRKTGNAHCRNKDIPEPMLKEACAAVLGLDTFDEIIFSEQIDRIEIPAPNEMIFYFKDGHIVPHHWESTMRKDCWTDERRAAKGRYVQEHQLGPNSSCFTSRIRCDSCGENYRRQRSRHKDGSFDSVWRCASGGKCNSPSIKEEVLKNLCADAMGLESFDETAFREQIACIHIVAPFQLSIRFFDGHTFEAAWENKRKMPKHTEQRKQHMREVMIQKWREKCGESNDYTGDDKPVHGNADQ

SEQ ID NO: 13862 - protein, 523 aa, synthetic construct
MAKVTTIPATISRFTATPINERKKRRTAAYARVSTDSEEQLTSYSAQVDYYTNYIKSRDDWEFVSVYTDEGITGTNTKHREGFKRMVADALAGKIDLIVTKSVSRFARNTVDSLTTVRQLKEKGVEIYFEKENIWTLDSKGELLITIMSSLAQEESRSISENCTWGQRKRFADGKVTVPFKRFLGYDRGPDGNLVLNKDEAVIIRRIYSMFLQGMTPHGIAARLTADGIKSPGGKDKWNAGAVRSILTNEKYKGDALLQKSYTVDFLTKKKKVNEGEIPQYYVEGNHEAIIQPEVFELVQQELKRRKQGRGPHSGVHLFSGKIRCGQCGEWYGSKVWHSNSKYRRVIWQCNHKYDGEEKCSTPHLTEDEIKAMFISAANKLIGKKTAIISPLRASLDIAFDTSALEAETEKLQEELMVASDLIQKCIYENAHVALDQREYQKRYDSLTARFDIAKARLEEIETAIADKKSRRAAIESFLGTLAQADLMGKFDPVLWCGLVDHVTVYSKDDVLFTFKNGQEIRA

SEQ ID NO: 13863 - protein, 478 aa, synthetic construct
MNKVALYVRVSTTSQLEEGYSIEEQKAKLESYCDIKDWHIYKVYTDGGFSGSTTERPALEQLIKDAQSKLFDTVLVYKLDRLSRSQKDTLYLIEDIFLKNNIEFVSLLENFDTSTPFGRAVIGLLSVFAQLEREQIKERMQLGKLGRAKSGKSMMWAKTSYGYNYDKETGSMTVNEYEALAVKEIFTSYLAGMSITKLRDKINEEYPKQPAWSYRTIRGILANPVYCGLNQYKGQTFQGTHKPIISLDDFEQTQRELAKRQQTAKELSNPRPFQAKYMLSGLAQCGYCHAPLKVILGQKRKDGSRFKRYECYQRHPRKTRGVTVYNDNKKCESGYYDMELLEHYVLTRIAQLQNDPDKIQELFSDDTSPAVDKQAIQKQIDSLTLKLSKLNDLYLDDRITLDELRTKSADFIKQRNALEDEIKKASNDKQAGKREKIEKMLDASSVLEMSYDNQKVIVRELIDKVQVTSDKIVIRWKI

SEQ ID NO: 13864 - protein, 666 aa, synthetic construct
MERVGGLRSEFEAVFQPQAEAMKEENEFISTASFRRTKEKEGHLNVAAYIRVSTDSSDQENSYETQERYFHQLIENNPDWNSIGVYSDYGISGTVKDKRVGFKRLLRHCREGKIDRIVCKSISRFSRNTADFMTALNILHDNNVTILFEKENLDTADPTSDFILTTLAAIAQEESRSISRNINLGNKMRYPRGEVKNMVIYGYRYNGKMVTTESGYQYRDIEIVEEEAKIVRRIFQEVAEGTAYTDVARGLNFDRIPAPETVAVKARKKNSKKGQLNSDLEEGWTGRIISQMIQRERYTGAVLIQKKFTVDFLNHNTQRNNGELPQYLVKNHHPAIIDEELFETVQEIRRANAAKKEKGVKKGSKPFSRRILCGECGRFFRVRNSKNYPIWYCPTAEIDNGKRICHCEKIYEEQIVRAFRKAIIERFRLSTQPIHDNVGVADIMSGRYGEQFEGFTKEADDFVPQMIKRLENIQHTDFMERDRAFYKRQIATLQIGMESSGKKLRLLESQNDVMQTRRELLGDESIDEAVIQSNAEKIRRLKEKLDRDMDEKKHLEERLEYLEGYWEDLETDHERRERAIEWMKELPKGRDGVVQFLNGVTSDYCKAFVLSITVHSPLNYTVHWYDDTRTEVVMYSNIEDYRYTASYFDGQAMRDNCYRKKYVKKG

SEQ ID NO: 13865 - protein, 416 aa, synthetic construct
MKNIYYMPVKKENMEPLRVAAYCRVSTKKETQLASLAHQIVAYTEQISDHPGWVFSGVFWDCGRSGLRKKGRNGLKHMLESAAEGKFDYIITKSAKRVSRNTVELLQIMRYLKERGIQMYFEIENVNSFDPDAEAAITLSGAMGQEESRNLSENIQWGIKKKFEEGLFSSYKHFMGYRCVEGELVIVLEQAEIVRLIFELYLKGYTFSQIKTHLEESGVKTVTGKTVWSANVIQQMLKNEKYKGDMMLQKTFTEDYLNGIRKKNIGQRTRYYVKGSHPAIISPEIFDKVQEEMLNRARLIRTANGNQISSGNRYSSKYLLSNLLVCGYCGGGFRRRTERGKIVWRCGTRMEKGKAECENSPTLNDQDVREMLGKVVCNGEYDENVVKDRVKRIDVYEKRLIICYAEKEGYQICEFE

SEQ ID NO: 13866 - protein, 576 aa, synthetic construct
MEVHEIKASSSLQQRLRVNGTALERIRVAPYCRVSTDSEDQLNSYRSQVAYYTDLVNKTKEWHLVDVYADEAITGTKVTKREDFQRMINDCLNGEIDMIITKSISRFARNTLDTLKYVRMLKEKNIAVLFEDENINTLTMDGELLLVILSSVAQQEVENISSNVKKGIKMKMKRGELVGFNGCLGYDYNKEDKTISINEEEAKIVKLIFQRYIEGVGATVIIRELNSLGYKTKRGNGWSQSSLIGIIKNEKYKGDLLLGKTFTVDPIDKRRIDNLGEEDRFYVKNHHEPIISVETFDKAQAILNKRSFSMKRGVEPGKREKYSRLYPFSSKLECGFCGHGLSRRSWHSNTKNQKTVWQCITATKKGKKYCPDSKGIAESVIEDAFVESYKIITSDNKEILDEFLNRIEKNLSSDQFGKKLIKIDRQIQDIISKQKKLLNLRIDDEIDPEMYNEKLSELKVEEQKLLVQRSECQKQINGEKEIKDRLKTFKNVLENNEIMDKFDRYVFESIVEKVIVGETDNEGNKDPYKLTFVYKTGYHNKINPKLKKEKNKTNKVCCNSSNDTDRMCSNSINDTC

SEQ ID NO: 13867 - protein, 461 aa, synthetic construct
MDKKKMRCAIYIRVSTTEQAMEGYSIGEQKERLEQYSSAMQWTIMGEYIDPGYSGSNMNRPELNRLISEVKNYDVILVYKLDRLSRSQKDTMFLIEDVFLKNDIAFVSMNESFDTGTPFGRAAIGLLATFAQLERENIKERMSMGMKGRARKGYWKGTSRPPIGYDYSDGNLIINDYEAMQIRELFSITANGIPGMTYNVRNIGRYLSGKYSNKYGGWTDSSGITYTIQNKVYIGMVKFNDEYFPGQHQPIIDDLLFEKANDRLNTYLSTFGAHATYNKYMLSGITYCKLCGRPYYRRNSQVKKHGSKKEYGYYSCQGRKADVEIKCPSKIFRQDELEQAVIEQIESLKSTNWTAQEKHEDTAALLQQLKQIDSRQERLIDLYSFGSIQKNQIDDKVRELNLEREKVKALLSSRNTLDTDEIINMASKIHDSDYVVKCDIVSILIKKVEVDGENIRVYWNF

SEQ ID NO: 13868 - protein, 519 aa, synthetic construct
MNAVIYARYSAGPGQNEQSIEGQLRDCRDYAKKNDITIIDTYIDRHISGTDFENRTEFNRLIKDCERHQFSAVIVWKVDRFGRNREEIAMNKVKMKKHGVKLLYAKEHIPDGPEGIILESLLEGMAEYYSAELSQKVRRGLRESMLKGHALGGNPMLGYKIINKKYVVDPVTSPIVVEIFERYAAGETAKAIATDLNTRGVVNAKGEPFKNNTVYFILRNEKYIGIYRYGDIVVNDVIQPIVNMELWGKVQMILEMNSRNRSRSRCTAPEEFLLTGKIFCEYCKRPIIGESGTSRNGVSHYYYKCSSRKNKGVKCEKSTVRKTDLENFIISQTIDNVLQPDTIDYLAKKVVEIQNSDSQELQMQSLRKQLSDVQKGLNNLVNAVEMGIITESTKERLMALEQRKEELNICIAQAEIKRPALTEEMVRFWLNKFRSQDVDSTEFKVRLINTFVNSVYLHNDYAIIVYNFCDDESGHRAEIRAQLDDALRAKKEDQTCSSDPVQVPATGIEPVRAIRPAGF

SEQ ID NO: 13869 - protein, 525 aa, synthetic construct
MKVAAYCRVSTDKDDQANSFESQQRYFREYIDRQPDWELYKIYADEGITGTSTQKRAAFNRMINDARLHRFDLILTKEVSRFSRNILDTISYTRDLRYLGIGVQFMNDGINTLEPDSELRLSIMGSIAQEESRKTSSRVKWGQTRRMEQGIVFGRSMLGYDVQNGKMTVNPEGAEIVRLIFHKYVHERKGTSVIAQELREAGYKTFTGSPNWRNTVILKILRNEKYCGDLKQKKTITPDYLTHQKKYNRGEEKFVFLKDHHEPIIDRELWEEAQREIARRDIDGKYGTGHGNRYPLSGKIKCSECGQSFVSRSRRRKDGSKYKAWRCGTTTAEGKRHTDPAGNEIGCDVSYQLRDEVGMEMVRKSVGMLKMDMDTVIRDITRIVMEAIRSSQDSSQLSAERLKKELEETQAKKAAVLDAFFAESISKDDMKLMNAEYDRRMAELTEKIAVAEKRESLSYDTATLEKDIRAKVVGIVNGETASGNFYGNLLDHITAYPDRRMEVYLKLLPTKWTYVLESLVASKNV

SEQ ID NO: 13870 - protein, 574 aa, synthetic construct
MAYNKLSLPGHIRVAIYVRVSTLHQIDRDSLPMQKQDLLAYAKIMLGTDDCVIFEDAGYSGKNTDRPKFQEMMSQIRAGGFTHLLVWKIDRISRNLLDFATMYNELKDLGVVFVSKNEQFDTSTAMGEAMLKIILVFAELERNMTSERVTATMISRASNGLWNGGRVPYGYDWDTEDKEFSFNTDEYNIVHMIHDLYEEERSLVREARILNAKGYRTRAGNEWNPVSLHIILRNIFYCGDYRYNVLKEGDRQKVKDESEWITIEDHHPAIVSREQKMRIIAILDSNSRINKKKNNYKSGKYTHIFSGLVFCGSCGNPMGAAPASLRADSWRYSKYSCPTRRRSASACVGKSTSDPIVGEFAFNYILNLLNTQRDFCKISSMDEMQGKLLTGDTFGYIDHIQEDGLLDLYDVLAKGEVQGAVYGKGVNIPSKQEKGSEIASLRVEKQKTERALDRLRNLYLYSEDAMSEKEYILERTRLTEKLEEVNEEIGMMQSDEWQQSVTDEMFIARASEFIIAQKLTERNYVNYKRLAQSVDAEVLHSFVTSIIDSIIIQDGKVQRITFKNGLSHTFIFKE

SEQ ID NO: 13871 - protein, 559 aa, synthetic construct
MKTKLYSYIRFSSMRQNDGSSYERQIRMAREIAAKYDLELVNDYQDLGVSAFKGANSKTGALSRFLDAIGRSVPVGSWLFIENLDRLSRADIVSAQELFLSIIRRGITIVTGMDNKIYSLDTVTANPMDLMFSILLFIRGNEESQTKRNRTNSSALIKIKAHQENPQNPAVAIEEVGKNMWWTDTTSGYVLPHPVYFPVVQEIVELRKNGRSTAEILDHLNETYTPPPAVSNKKHSKWSRAMVERLFHTRALIGIKEVSVDGVNYELKDYYPRVIDDPTFYHLKKNIGARAWNFGDKEEVKPIPLLSGIGLLKCDHCGCAMVKVKGTNKRSDQYRYTCDATRSRRLDCEHPNWSFRGDQLEKAVLQLLADKIWIAEDKANPVPALKVQVDEISRKIDNLIALSAMTGATKELADQITTLNSERETLYNQIKMAEEEMYSVDSQGWEKLAEFDLEDVYNEERLKVRFKIKQALKRIGCSRIDRNKNLFVLEYIDGKTQRVVIENSRGTRKGQIFVDLKTINDRQILESNGLVLHPCLDMLTDKNWKPEEEIPGPLQEFGI

SEQ ID NO: 13872 - protein, 518 aa, synthetic construct
MKTITKLQQVKAPAEKKKLRVAAYCRVSTGSDAQLESLYTQKTYFENYINSRNDWELAGIYYDEGITGTKKEKRTALLQLMSDCENHQIDMVITKSLSRFSRNTTDCLELVRRLLAVNVPIFFEKENLNTGSMESELMLAILSSMAEGESTSTSENTKWAVQKRFQNGTFKISYPPYGYDWDGEEMKVNPEQADIVKEIFQAFLSGIGINQIAKDYNARQIPTKKGGRWSHGTIKAILTNEKYTGDTIFQKTYTDVQFNRHQNNGEKDQYFCAEHHEAIISHEDFELAARLLEQHSIEKGIVKGCDKYLQRYAFSGNIICSECGATFRRRIHTCKGHKYAAWTCNTHLDNVKACSMLYIRNDDLEHAFITMMNKLIFSRKMLLAPLLEQLKNTSEDGGICRIRELERQLLQITEQRQTLQRLMAQGYLDQIIFTQQKNELMTQTEACKTEIEMLQNSSGQASTRIAELQKLLHFTEHTDMLQEFRETLFTEYADHIIVYSREEVGFELKCGLTLRERM

SEQ ID NO: 13873 - protein, 522 aa, synthetic construct
MAQSKVMVIPARRQIGNTIKSSEKPKLRVAAYCRVSTDSDEQATSYDAQIEHYTEYISKNPEWQLAGIFADDGISGTNTKKRTEFNRMIDECMAGNIDMIITKSISRFARNTLDCLKFIRQLKDKNIPVYFEKESINTMDAKGEVLLTIMASLAQQESQSMSQNIKLGLQYRYQQGHVQVNHNHFLGYTKDADGKLIIDPEQAETVKRIYREYMEGYSMDKIAAGLMADGILTGAGKTKWWTSTINKILRNEKYIGDALLQKTYTTDFLSKTRIKNNGTVPQYYVEGNHDAIIPKEIFMQVQEELVRRRVIHTSANGCKRSYSSNHCFSQLIFCGECKEMFRRIHWNNRGCKSIVWRCESRLQNTGIACRARTVNEELLQDIILKAINEMILDKSGYMKMLQENIATVIRNDASASTDDIDAKLLELQKELLQKANNRDDYDSIAEEIFQLRELKSKSETDSVIRDEKLARITELCDFLKEQPSGITDFDESLVRRLLQKIMVFDDHFTVEFKSGVSVDIKG

SEQ ID NO: 13874 - protein, 597 aa, synthetic construct
MPKKRGSNEEFLNPGARRFRPPEVMPRKLKAAIYVRVSTRYQVDKDSLPFQKEELINYIKYALNIEDYEIFEDAGYSAKNTSRPKFQEMMSRIRNNEFTHLVVYKIDRISRNLLDFAQMYEELQKHNCSFVSKVEQFDTSTAMGEAMTRIVLVFAELERKMTGERVTAIMFSRAEKGLWNGAPIPIGYKWSEEKKYPVVDPEEAKVVRYIFDRYISLESALKVSYDLAANSVKTKRGGEWTSKTVRDVIRNPFYKGTYRYNHKTQTGTEKPLSEQIIIECNHEPIISEEVWSRANAIMDTNAERSVAHLRNNIRYTHIFSKMLKCWYCGMTMGAGLDRPRSDGYRPSKYYCTSHNRKQGCPNRYISDIVIGPFVLNYLANMVQAAQSVSKRTRVDTLEKMLLRGKFFSNVDHIEREGLLTTFNNMVYGVARADFDPKKDQQDEPNNAELDLLASEREKYIRALDRLQSLYLFSDDGISEKDYIVQKGELEDKLESVNRRIAEIQGEAPEDDADLLQKATRFYIQNELVKKRSLDFKKAVSVFDKESLKDFFSSVIDTMTVKDGRVKAIRFKNGLTNVFVYKDETGPEEHESAVETSE

SEQ ID NO: 13875 - protein, 463 aa, synthetic construct
MSEKIKRCALYIRVSTAEQLMHGKSLEAQKEYLASYANDHGMIPVGVYADEGKTARKELKKRKAIHALLEDVKAGKIDVILFWRLDRWFRNMSDFYKVQDILDEYGVYWISASEPGLNMETRDGRLQLNVVLSIGQNEVDTTSERIRFVNEASIRQGKVIFGDGNMPRGYRVGIVDGKKCMVKNPDEEEMVNAFFDYFERHQSKQGTLRYMQRNYDPEFSYSVLRTMLSSEFYKGTYRGIPYCPAYLSEERWMRLQKINGRNVKHTPSGRVYLFSGLIRCPVCSQKLSGTGCSSIINRKTKEKRTYCYYRCNHALLDRICTNTHRVSQNLIEAYLLDNLEAEYEKFHIRCEKIEEQKAKIRETRTPEKLQKELERLNLLFQKGRIEWDYYSEEYDRIENELHELQQIRPEPQRDFSYLEEILQADFRTIYAQLTPENRRSFWRSTIKEIHLDEDFSVKSVDFL

SEQ ID NO: 13876 - protein, 524 aa, synthetic construct
MTKKVTTIPAKITKFSQTPINRVTKRRVAAYARVSTEQEEQQTSYEAQIDYYTNYISGREDWEFAGMYSDEGISATNTKKRVGFQTMVTDALDGKIDLIVTKSVSRFARNTVDSLTTVRQLKEKGVEIYFEKENIWTLDSKGELLITIMSSLAQEESRSISENVVWGQRKRFADGKVTVPFKRFLGYDMGEDRNLVVNPEQAKLVKRIYGMFLQGKAPHTIAKILTEEPETLTPAGKQKWNPSTIKSILTNEKYKGDALLQKSYTVDFLTKEKKANEGEIPQYYVKGNHEAIIQPEIFDMVQKQMALRTKGNNRRRSTSIFSSKLICGDCGNFYGSKVWHSNTKYRRTVWRCNHKYGNDEKCQTPHLTEDEIKEIFIKATNQLVDMKDEVISNYDEMKEMLFGTVDLESEQGKLEDELNEVASLIEDCINENARVALDQSEYEKRYNSFVERFDKANGRLEEVKVQITERQARGQQIEIFLKDLEEVGVLEEFEDDLFLALVENIEVGRYKVVVRFKDGTEVEG

SEQ ID NO: 13877 - protein, 590 aa, synthetic construct
MKVIQKIEPTKPKIAKRKRVAAYARVSVDKGRTMHSLSAQVSYYSKLIQKNPDWEYVGVYSDGGISGRTTESRNEFKRLIKDCKDGKVDIILTKSISRFARNTVDLLETVRDLRAINVEVRFEKENIHSLSGDGELMLSILASFAQEESRSISNNIKWSIQKRFKEGKHNGRFNIYGYRWVGQELIVEPSEAENIKLMYANYMNGLSAEFTAKQLTKMGVTAMKGGPFKATSVRQILKNITYTGNLLLQKEYTPDPITGKSRYNNGEMPQYFVENHHEAIIPMEEWQAVQDERLKRRKLGAHANKSINTTCFTSKIKCGNCGKNFRRSGKRQGKNKELYHIWTCRNKSEKGVKVCNARNIPEPALKKYATEVLGLEVFDEQIFIDSIEEIVASEGNMLQFKFYGGREVEVKWTSTARKDYWTPEVRRAWSERNKRKESRTWNGRTTEFTGFVVCGRCGANYRRQAVTSKTDGTVRRKWHCSNSAVACNEGKSRNCIYEEDLKVMVAEILGIPTFNEPTMDEKLSRISIIDTEVTFHFKDGHDEVRTFEIPKKKARTFSEEERARRRLVMKKRWEEKKRDEESNNDTSENH

SEQ ID NO: 13878 - protein, 626 aa, synthetic construct
MRNEKITPLYERLSRDDELQGESNSISHQKQMLEEFARRNGLPNPTHFTDDGVSGTRFDRPGFLAMMEEVEAGRVEAIVIKDMSRLGRDYLKVGQVMEILRQRGVRLIAINDGVDSLKGDDDFTPFRNIMNEFYARDTSRKIRSVFKSKGMSGKHLTGTVIYGYLWDEKREHWLVDEEAAEVVRRIFSLTLEGYGPYQIACKLSADRIEIPVVHLARFNEGVNRSKPVKDPYGWGSSTIVNILKKREYLGHTINFKTRKHFKDKKSHYVSEDEWTIFENTHEAIIDQQTFDLVQKIRSNVRRYPNGWGEAAPLTGLLYCADCGGKMYVHRTNNGKRISQYTCSNYTKVPCGTLCPTQHRINESAVLTLVSDTLRAIAEYSRNDRTEFIHTVQETQVAQQSADISKKRRRLAAAQKRAGELEKLICKIYEDNALGKLPDARYRALDAQYAKEQDALEIEIAELEKAVTGYEQSQKSAEKFIALIDKYENFDTLTNTMLNEFVAKILVHERARKGSQDTTQEIEIYFNFLGRYIPPSLQPVPLTPEEQEELRKKEERKDRLHQNYLKRKASGAQKRYEDKIKAKKKAEMDAKKALIRAEDMEKGVFSTVGQLPKEEPRKGSIAASAAV

SEQ ID NO: 13879 - protein, 597 aa, synthetic construct
MEVEVIKAKNKFDDSAKQRYKDRLRVAAYCRVSTDDKEQEKSYNSMIKHYTALIQENKLWTFAGIYADPAVTGTKVDKRDEFHRMIQDCKAGKIDMIIVKNIPRFARNTLDTLKYVRMLKEINVAVYFEKENIHTIRDGEFLIAVLGSIAQQEVENTSANVKMGLKMKMKRGEMVGFNNCLGYDYDKELKTISINPEGAKVVRYIFERYIAGAGSTMIARELNEKEIHTIRGNKWTASSIMGVINNEKYKGDLLLGKTFTVDPISKRRLENFGEEDKYYVRNHHEPIISEDMFEKAQAMRSRRNGGKLSVVPGKRDKYSRKYAFSSLLECGFCGGHLTRRQWHSNSIYKKSIWQCIAASKNGKYNCPDSKGIPEQVIEEAFLESYRLLCRDNKEVVDEFIKRAEQTLGKQNLEKEIKKCKKKINEIKKQRQKLLDNYMNNIIAQDMYEENETTLVREISDVNIQFAQLLEKQKDQKSLEERISDFKEALLNDEIITEFDRVVFESIIEKVIVGGFDENGNKDPYKLTFIYKTGFTNEVKDAKKRFAKKDSIIDKTKKMCSYIADEMQGLCSYVSNGACGDGSTAFPQKARRTYQRKS

SEQ ID NO: 13880 - protein, 610 aa, synthetic construct
MSDVQVIKANRSENRIRGRKVEVLRVAAYCRVSTDSEDQLNSYKSQVTYYTDLIKKKHEWTLADIYADEAITGTQVAKREDFQRMINDCMNGDIDMVITKSISRFARNTLDTLKYVRMLKEKGIAVFFEDENINTLTMDGELLLVVLSSVAQQEVENISSNVKKGLKMKMQRGELVGFQGCLGYDYHKDTKSISVNEKEAEIVRYIFNRYIEGAGCTVIGNELENLGYKTKYGSSKWVQSTVIGIIKNEKYKGDLLLGKTFTVDPISKRRLENFGEEDKFYIRDHHEPIISEEIFEEAQKILAKRNTNRNVYQEGQKRNKFSRKYAFSCMIKCGFCGGTLTRRNWHSSSAYTKTIWQCVTATKNGKRHCPHCKGIPEEVIEKAFVKSYQLLCTDQQEIVDEFLQKVEGILNDDTSLKRLPKIEKEMADLHRRKEKLLDLRLDNNIDRDIYEKKNQELSEQLKKLQEEQERLMELGRNQDNTRTRLREFRKVLGSGEILESFDRVVFESVVEKIVIGGYNDEGVEEPLKITFVYKTGIHSNFNGKDFKPKRKNAAAVHNDAELCSYTSDEAEKLCLHSSSDTCGDCRSSVKETYIERGKWLKTRGFAESAS

SEQ ID NO: 13881 - protein, 495 aa, synthetic construct
MKKCVIYARYSHGPNQTEQSIEGQLMDCSNYAKEHDLTIVKTYTDKAKTGTNDNREAFQRMLRDSAKGLFDVVLVWKIDRFGRNREEMALNKVKLRKNNVQLITVKENIPDGPEGVLIESLMEGLAEYYSLNLAQNIRRGLNTNALKAKVNGGHVAFGFRIGKDHHFEVVEELRPIIVEIFTLYDSGWSFKDICDHLNAKGIRTSRGNRFNKSTLRPMLSNVKYIGTYKYKDVVIENAFPAIVDKALFDRVQVRLKASLQHRQAYRKKVVYMLSGKIFCNKCGAPYIADAGTSKSGKVYNYYVCEDKKKRKNCKNKTYSKDVLDNIVIKTTLKYVLTADRIEKIADNLIRVNEKRNESPYLSKLICDKAESEKKINNILSAIEEGIFTPSTKERLLALEEEVKNLEAAITEENIKKPPLTKEAVLWFLNRLKKLNYSDEQCKDQLVKTLIHSVLIDDDRVIINYNYTNNDGITAFAECSSDSKMVETRGLEPLTF

SEQ ID NO: 13882 - protein, 566 aa, synthetic construct
MKKSNELPKSIIYSRYSSTNQREESIDSQIRIINTFAKSKYNIIKTYIDSAQSATTDNRESFQQMINDVKSGNLPDVKFLLVSKRDRFARNRYDMAYYKNILAKAGISIVSATEHLDDSPESVILESVLDGMSEYYSLNLGRECIKGLKENAYTCRTTGSTPPLGLKVNKDTLKFEIDEPNADAIRLLFKRFVEDGWSYQLICDELNAKGFRTTRGNLFNSKSTLIDYLNNEKYVGRLTYLKSKKDPLTGKRTCKRNYNRDEIIVVENAIPAIIDEETFNRAQEILKYRKRNASSFRTTNKMNMLVGKVICGKCGSHMNINTRKSGKNKEYYSTYRCSAKKEKMAKRCDNRELSATHLERYVISQLMFYLKQDTIVDRITDMLNEVLEHEFDSHDSEISQVNQQLMNVDVKIKNTTNAIAEGGVSLPSLVESLRALEDDKAMLKKRLHEINSAVPVFKKIDRNEVLELIEKAKEYMLSENDELIRSVINLFIEKINVGENGVEIIYYLHPFSYISHELWKTYVTRQELISYKGFSPKIMKGRWSRKAIISLSESKPTLARLISLVA

SEQ ID NO: 13883 - protein, 620 aa, synthetic construct
MKEILGILTRVSSKPQETDGTSLDVQKNLGIMCGEKLGLEPMIFNEGSQSSFEVEINQRPILVELLDKIQKKDGIRKVYVFNTDRLGRFSDSWFTILKVLFDYRVELYVGESLKPYDFRNPTDKLTINILSSVSIYDNELRRLRSVMGKRNSLKSGNTFVGGTKPFGYDVENKHLIINKEESKVVKTIYEMYRDGKSTLDIKYYLDVKTDFNPKRSKSGWNVGTIQKMLGSSLYRGIQIWEWKEKIGNEIKIIDTIEVQTPKIISTKLWNEVQKKLDKNNFNKDNRKKNSTVFDGLMYCKSCNSKLSIVSNKDSEHQLYSCRSVEYQWKNPEKWKEKHQNCTLKKSVRVGSTDVELINHLINILKESKRVRENFKMKSLKSKFEDIGNVKKERTKKEKYLSEKKRYKSKLEDSLVDTELKIITSELTKTVGRKMKERVNQLIIEVNDEISGLENDLRVLNNSSEWIDWLNQMYLEVDTLEELPLKKQREFVSNYIKKIDVEYIPKIQSHRFNFKFIYPIVEDDIRIEGKDKSGMRKYEILDGSSTSTFLQKHSNKRRRISDEEKDRLDRMISQLRVEKSLSLSTICEELNLVGLRTPTNKKWDKPKLSSYIRNMKIDVGK

SEQ ID NO: 13884 - protein, 527 aa, synthetic construct
MLNNNNTQNGQRKTLRCAIYTRKSHEEGLDQEFNSLDAQREAGEAYIESQKLQGWKAIPYRYDDGGFSGGTMERPALQRLLADIDAGKIDVIVVYKIDRLSRSLLDFMKMIELFNEKEVSFVSVTQHFSTTDSTGRMFLGILITFAQYEREVIGERIRDKVAAAKRRGKYCGGPAVLGYDVDRENKKLLINQSEAPLVKLIFRRYTQVGSAKKVAQELNEQGYKTKSWTTKKGKERIGTEWNTAQVYRLLNNRLYIGEIAYKGKNYPAEHDALIDQNTWDKVQALLSENNRIKMSKARVKMVSPLSGVIRCGHCDSAMGITYTNKGDRRYSYYICEKDTKRAVSRCPLKRVPAGDIESVVLDQLGAVFRTPTLVAKTYFAAREIEAEERERLQGQKKELEQSLQSVRQEALKLMSPDNDDPDRNSRLPLVNQQAVDLTKQLTNVSARLKVIDTEQISEGDVSEAFQSVETFWEDLFPLERNRLFQLLVETIEIRETGIDMELKTNGLTNLVTELAGLACEVRERSNN

SEQ ID NO: 13885 - protein, 579 aa, synthetic construct
MKMILIARVSDEEQRKALVAQERRLKKYADDNNSEYEYHEFDESAFKDGRVKFTKLVDDIKKQCHKNKLIVVFDKIDRLTRDSSQAVVADMKSLVKQDKIELHFPHDNLTVDAYAPAQIWFQLDIGMSLAQYYARSTSDNVRRRFDQMLNDGFWPHKAPIGYKNVRRSKRSTTIKIDTERAPYIVKAFEMRAKGMPYQTIGKTLDNDGLRSSYKGSGIVCTANIERILKNPFYYGVMIHNGKEYGHKYPPIISKDLFDQCQDTNDSRGGGKATKYDSKWFTFKSIARCGKCKTRTMSPYQPVRGGPYLKCPLTGSERCVGSNVSERHILPPIERTIEAVIIPPHFVPKVIQALKSNHDTHNKYRKHNLTQTRTQHTRIGKTIERNYMSYIKGSITEELYEAAAKTLEREKSQLNATLRLLSNTDEGLEITESYLLSLATQMSELFKCSKPELRQRLLTVLVSNIEITNKNITFDVNDPFKTMMEIKKSDPEGTDSSTWRRRGDSNSRSRSLRTNDLANRPLKPLGYPSNFTRQTSGFSHRAVRRSKFAETGCSFPMLQTTELNLQYCSTKQRPRVDFLG

SEQ ID NO: 13886 - protein, 518 aa, synthetic construct
MQQNQVKVNKRAAGYFRVSSEEQVEGYSISAQERAYRLFVEAHGYTSVGEYSDEGRSARTDNIKKRPQFARMLQDAQAGLFDVIVVHKMDRFSRSLRVAVQVFELLGKCNIGLVSVSEPNLDYSTPQGKLFMHMLWALAQFYSDNLSQETKKGKNERKLQGLYNGTLPFGVIKGENGIPIPDRRDIGLGPNRTNYDGVKMIFNMAASGSTAREIAEKLNSYGYRTTGSWGNNLFTKDTVTDILRSRFYLGELPDGEYTKGHSSRGSYTKGIEGKHEKFIDPEIWEAAKRNREANNKYGSIKITKKASTYSLSGLLVCSYCGGKMHIQGNRRGTPYLYCYKRQQGIAKECQQHATKLEIYEQQIEQYLRCIKLPEDYQQQIIEAYKKEDEEGPGFEKMRQALTNRLNRLKEIYEWGDMTAEEYRFKKEQLRNELVSLPAPISTQKDKLESLGTYLKNIGVSWQDASQELRNELARTLFEKIRVEDHEIRGITPTSEFIPLLTLSSFRQCMAEAEVTGLT

SEQ ID NO: 13887 - protein, 450 aa, synthetic construct
MKRAALLLRCSTDAQDYERQKLDLLDTIKGMGYTTSDDLVFGQYITGKDDVRKKDRESVAECKQAVREGKVDAIFINEVSRLSRDSIAGRLFIREFNDEYKIPVYFRDLGMWTINPTTRIVDRSFETMLGFHFDMAQNELKSMKTRFASGKRKNAREGKTIGGAVPFGFYKDEDGKLQVDEEQAQVVRLVYNKYLEDGGSIPSVCRYLLSCGYDKKFNKKFGTGSVRNLLRERRYIGEQRYNLVNPDEPDEAKKQEVYIYKVDAIIDTTIYNKVQIKLDKNRTTETKKVNKDKKIHLLAKLITCPICGDSYTSKTASANKSGERYRIWNYCCVSKYNFSECTSDITLNADNIESIIWQLTKREILALQELSLEERQSKIDEAEQKLASYKDELDVIAKSIDKLNVKKKKLVALFLDIEDDDTAIFNEQREAINKEIDSYNNRIQFLNTEM

SEQ ID NO: 13888 - protein, 506 aa, synthetic construct
MQRAVIYARYSPGPNQTEQSIEGQVRECTKYAELHDLRIVGTYVDRKISGKTDNRREFQRMIDDSEKHIFDVIILYHTDRFARNRYDSAIYKHKLKENGVELRYATTDIPKGPEGIILESIMEGWAEYYSAELSRKIKRGMRESALKCHSTGAGRCLGYRTAEDKSLVIEPEGAKAVQTVFDMYIKGKSHADICRYLNDCGFRTAQGKLFNKNSVTHIIRNKRYIGVYTYDDITIEDGIPAIISKDTFHLAQLEAARRKTAKRPKEPKAEYLLSGKAFCGHCQKPLVGVSGTGKSGNKWYYYYCQESRAKRGCTKRPVKRDWLEREVVERTVAEILQPEVIQRIAKKCYDLQMEYRQDNSDVLFYELKLKDVRKAIKNTMHAIESGVKTKTLPARLQELENEEEALEAELAIAKASDFVITTDQIEFLLTQFAEPWECESEEEYHRRIIKCFVHKVFLFDDKLLIYYNVSRDGKTREQSEAELLEEALGEGFDKRSSGSTIKGLLF

SEQ ID NO: 13889 - protein, 528 aa, synthetic construct
MNRTAARSVTVIPPTINPLTHLSKVTIQKRRVAGYARVSTDSDEQFTSYEAQVDYYTQYIKRNPEWEFVKVYTDEGISGTNTKHRIGFNEMIADAMSGKIDLIVTKSVSRFARNTVDSLVTIRKLKEKGVEVYFEKENIYTFDGKGELLLTIMSSLAQEESRSISENVTWGQRKRFADGKVNLPYKQFLGYRKGADGFPEVVPEEAIVVHRIYTRFMEGLTPGAIAKELTADGIPTPSRKQRWQTSTVESILQNEKYKGAALLQKCFTVDFLTKKRKVNEGEVPQYYVKHSHEPIITPEEFDKVQTELARRKQISRQYSGKSIFSSRIVCGDCGSYFGSKVWNSTSKYRRVIWQCNGKFKGEHKCETPHLDEETIKARFVTALNAIIESKDNILEDCRLMQATLTDCAGIDTEIESLLEEIDVVTELTMRCIAENSQTAQNQEEYAARYNGFVERYEKAKARLEQLRTTKAAREAQSEAIGAFMFEVQELDALTEFDEKLWLTIIDTVTVHTDGRMAFKFQGGTEIEA

SEQ ID NO: 13890 - protein, 434 aa, synthetic construct
MERVVERVDALIPAQPKALRVCAYARVSAGKDAMLHSLSAQVSYYSKIIQSHNGWMYCGVYSDEAVTGTKRERAGFQHMIEECRQGNIDLVITKSISRFARNTVTLLQTVRELKGLGVDVFFEEQHIHTMSTDGELMMTILASYAQEESLSASENQKWRVRKAFENGEIINLRFLFGYDITPDGIRVNEVDAAIVREIFARFNGGESMSSICRDLDARGHKGVLGGTWCAERMRNTLSNEKYLGNALLQKRYRNNHIEKKLLPNRGELPMYYAEGTHEPIIDQATFDKAQERLRMLAQQTANRKKPTRSAFSGLIHCGLCGNTYKRVTYRKKHYWNCTTFQTKGKSECAAKRIPEETLEVLTCEVLGEGSIDSDMVRSKITAIRADKNNVVVYCMDDGSEIAKRWKDRSRAESWTPEMKEKARQRALQARRKKE

SEQ ID NO: 13891 - protein, 415 aa, synthetic construct
MRTIRKIEQSIPIIKKRKKVAAYARVFMESERMQHSLSAQVSYYSSLIQKNPDWEYAGVYADYGISGTSIKKRQDFQRMLEDAEAGKIDIILTKSIQRFARNTVDLLQTVRRLKELGIEVWFEKENIHTMSGDGELMLTILASFAQEESRSLSDNIKWRFRKKFEQGIPHAKFFVYGYCWEKDNLVIKPEEAAIVREIFDAYLQGRTRKDILRELKQRGIRTMYGNYFKDASIRQILTNRIYTGVLEIQKTFVTDPITKRQAVNHGEKNKYVVERHHEAIISSDMFERVQQELKSRKEMGMQRGGYARDFLNTSCFTGIIKCGICGKSYVHVVRKYKGRIREYWTCDSHKGKGTNCGAYGSVPQSALKKACAAVLSTDEFDEELFVRRVKKIVVPSYKKLVFYLRDGSIVERQWD

SEQ ID NO: 13892 - protein, 464 aa, synthetic construct
MARSVTVIPARSQKVRTGHKAVQEKKIRVAAYCRVSTDQEDQLHSFEAQVEYYTKYINEHENYEMAGIYADEGISGTNTKKREQFKKMIADCEGGKIDLVITKSISRFARNTQDCLAYSRKLKNLGIGIIFEKENINTLDSTGELLFTILSSLAQDESRNISENCKWGIRTKFKNGEMHLNTFKFLGYDKDENGKLVINKEQAKTVRRIYRDFLIGINPAQIAKELTEEKVPGCLGQTKWYPSTVTGILKQEKHMGDALLQKTYTADFLTKRQVRNNGEIAQVYVKDSHKGIIDKQTWNAVQEEFDRREKFMESHGTDRYSYGADCMPFCEKVFCGECKSLFTRHSWSSRGIVQWQCKNHRKDGKVACTNAYVDNADLENGFVKAFNRLVTDRDKHMERWQQMKSDGTPLEKIRAGQMMEAVGNEPLTRFVPEIAQLVLCEVTVLGAKKYEFFFLEGSRVKVSV

SEQ ID NO: 13893 - protein, 502 aa, synthetic construct
MEIQIREGNSRQKQKLKVCAYCRVSTDADEQENSLENQIRHYKEVITSNPDYEYAGVYSDFAISGFKEKRPGMQKMLADARKGKIDLILTKSVSRFARNTSIVLEATRKLKELNVGVFFELQNINTLSGEGELMLTILAAFAQAESESGSVGAKMVYQRKYEAGIPVQYLERSFGFKKDERGVYIADEEEAAWVRKIYEMAADGYTPASIKRYLNENGIKTAGGAEWIDSTVFRLIENEIYKGDYIMHKHFVNEERKLVRNRGEVDAWYIEDDHEAIVSPKLWQRAQDALEAKRDYLAEGSVIEEFTEENYPYMNRIYCARCGHPLYKRIYSNGNRLNWGCSGTKRYGKSFCEGINIPDGVLRGAWHFDENMYIGEKQTDKGKKEFTYLKEASWKRRHKKKEPKPIPENTETEYPYREKIFCGSCGSRLVRHVNTKNHKVIWVCNGRKRKGKDFCDGTRVPDTIIKGWGEIKKDIYIQRKDDKNGKKRYSYTSKKPKGADRA

SEQ ID NO: 13894 - protein, 538 aa, synthetic construct
MSTAPNVTVIPAKVQTAESRSKYHQLRVAAYCRVSTEQEEQQNSFAVQVAYYTDLINKKKEWTLAGIFADEGISGTQTKKRTEFNRMIRMCKKKKIDLIITKSISRFSRNTVDCLQYIRQLKELGIGVIFEKENINTLTMTSEFMIALYGSFAQAESESISKNVSWGKEKAYREGKVQFQYKYLLGYKKGEDGKPEIVPEEAETVRLIYTLFLDGYSMSRIKKLLENKGILTSQGKKVWNESLIRSILKNEKYAGDALLQKTFTSDCITHKIVKNHGERPMYLVTNHHNPIIDRDTYNRVQQELARRSSKRKVSDKTITEQGKYSSKYALTELLICGKCGTPYRRTTWTSRGKKLIVWRCISRLEHGRRYCPDSPTIKEEQLHKAIVRAINNYYSCGNDVEKILKANISNVLECHGQEEIAAIEKRLKEIDKARSDLISLIATGGCDEDKLDSEFEKLYEEEQSLSERLAMLKSKNQTSAETQAKLDKIIDMIEHEKFELETFDNVLVRKLIECVKVLSKTEILVIFKGGYEVRTEIE

SEQ ID NO: 13895 - protein, 516 aa, synthetic construct
MPTVTIIQPTISEEQSHKLRCAAYCRVSSDSEDQLNSFMAQTRYYEKAFENSETEQLVDIYADEGITGTREDKRDEFQRMISDCRKGKIDRIYTKSISRFARNTKDCLKNIRELKSLGITVLFEKESIDTADMTDEMMITIMGGLAQEESTSISQNLRWSCRKRMANGTYELSCPPYGYKKINGKLVICPEQAKVVKEIYDSYLSGIGMISIMKNLNERNIPCCKNSERWHMIGVSYILTNEKYTGNTLLQKTYSTNTLPVRRFKNNGNADQYYVRNTHPAIIQQETFDKVQRLISEKNQKQPRGTPHNSALHKHIFCGSCGSILIRKSCREKYYWSCRKHDLAAMDCPTKQISEDKIHSAFIRLYNKLVYNFKPVLTPLQQALQDLKYKNTKSGTSIIEKYKEIAKLKEQTHVLARLKTKGFLDEAKYLEQTTELNSKIAKLQTEIKKLNVSDEEDETLEQLDMLIGYFEKRQKLMVEFEELAFESIVDKIVVKNQNELEFHLIGGLELTEKICS

SEQ ID NO: 13896 - protein, 516 aa, synthetic construct
MARKKKVSPGNRLVAYYRYSGGSQQTEQSIEGQRRDCEAYARQHGLTIVHEYIDRHISGRGVESRLAFQQMIADSSKHLFDLVICWKTDRFARNRYDSAVYKKRLRDNGVRILYAAESSVEGPEGIILEGLMESLAEYYSAELAQKMRRGMRESALKGKAINPNRPLGLTTDEHKRFIIDEKNAPTIRFIFEHYAAGESSASIVDQLNAAGLRTSKGNSFNKCSIPRIIQNEAYHGVYICKAYDVRIDGAIPAIIDDDLWKRAQKMLTLNKQHRAPHSSHADYLLSGKLFCGCCHSLMRGISGHNCRNDVYYYYACGNKADGGTCKKKNIPKDVAENLVVNAICENILRPDTLEDLADAIAAAQQAEVNQPDPERAMLEQNLADVHRKINNIIESVENGTASSRLSARLADLEQQESTLNYQLESLKEVHPPVLDRERILFLLEQFLISPNERTEDYNRRIIDTFVNRIEITDTEMLIYFNLSEASASEKQKNSQPNSCSTGNHLVRVARIELTAS

SEQ ID NO: 13897 - protein, 520 aa, synthetic construct
MKNVTKINQVDFSIFKKTRVAAYCRVSTDSDEQELSLETQKNHYERYIKANSEWEYAGIYYDDGVSGTKTAKRDGLLRLMEDCEKGLIDLVITKSISRFSRNTTDCLTLVRKLLNYEVYVIFEKENINTGSMESELMLAVLASMAESESRSISENEKWSIKKRFQNGTYVISYPPYGYANVDGEMVIVPEQAEVVKEIFAGCLAGKSTHIIAKELNEKGVPTKRGAKWTGATINGILTNEKYIGDALFQKTITDASFKRKRNYGEEEQYYCEDHHEPIINRETFEKAKEAIRQRGLEKGNCTEDTSKYQNRYAMSGKIKCGECGRSFKRRYHYTSHGKSYNAWCCGTHLEDSKSCSMKFIRDDDLKRAFLTMMNKLVFGNDLVLKPLLISITTNNSKKNVNSVEDIEKEMKSNEEQRKQLNTLLTNGYLERPVFAEAHNKLIMEYEHLVAKRDLLFRMDDAGYTMEQALKELVDFLNDAKPFTEWEESLFERFIEKVKVLSREKVEFEFKCGLKLKERID

SEQ ID NO: 13898 - protein, 501 aa, synthetic construct
MEIQIREGSREQKRKLKVCAYCRVSTDADEQEYSLENQVRHYETVIKANPDYEYAGVYSDFAISGFKEKRPGLQKMLADAGKGKIDLILTKSVSRFARNTSIVLEATRKLKELNVGVFFELQNINTLSGEGELMLTILAAFAQAESESGSVGAKMVYQRKYEAGIPVQYLERSFGYTKDERGIFVADEAEAVWVRKIYEMAADGYTPASIKRYLNENGVKTVGGAEWIDSTVFRLIENEIYKGDYIMHKHFVNEERKLVRNRGEVDAWYIEDDHEAIVSPELWQRAQDALEAKRDYLAEGLVIEEFTEENYPYMNKVYCAKCGYPLYKRIYSKGNRLNWGCSGMKRYGKSFCDGINIPDGVLRNAWHFEENTYIDEKASDKGVKEFSYLKERSWKRRHKKKQPPSISENTEVEYPYREKIYCALCGSRLVRHVDTKSHKVTWVCNGRKRKGKDFCDGTRVPDTILKGWGEIKKDIYIQRKDDKNGKKRYSYTSKKPSGIGA

SEQ ID NO: 13899 - protein, 468 aa, synthetic construct
MARQILHIPAQQRSVMVGGARMPQKKLRVAAYCRVSTAEEEQLNSFENQVAYYTAYINNNPEYELVDIYADEGISGTSTKRRDEFNRMIADCQAGKIDLVITKSISRFARNTQDCLNYSRKLKDMGIGIRFEKEGINTMDGSGELLFTILASLAQDESRSISENTTWGIRSLYKKGILHMNTNRFYGYDKDENGHLIINPEQAKVVKWIFESYMDGTSPDVLARTLNERQVPGCMGKPKWTVDTIMGILQNEKHMGDTILQKTFTADFMTKKMVKNEGQVAQYYISDDHEPIVSKELWQATQQEIRRRKEYMKVHGLRTMGRYTDAQPFTNRIFCGTCGELYWRRRMQRLGYVKYQWKCKQKCLGKESKGCINTDIWETDLHQTFVMAWNSLLEQRKILLENWNAQLASEDPLVRFRAKQFMELTKGNPLDEVDFTLVGKVLDHADILPTGLVRYTFLDGTTIDVTFP

SEQ ID NO: 13900 - protein, 523 aa, synthetic construct
MAVSRNVTVIPAIKRVGNNKNSESKPKIRVAAYCRVSTDSEEQASSYDIQIEHYTNYIKKNKEWELAGIFADDGITGTNTKKRDEFNRMIEECMAGSIDMIITKSISRFARNTLDCLKYIRQLKDKNIAVFFEKENINTMDSKGEIMLTIMASLAQQESQSLSQNVKLGIQYRYQQGEVQVNHKRFLGYTKDENKQLVIDPEGAEVVKRIYREYLEGASLLQIARGLEADGILTAAGKAKWRPETLKKILQNEKYIGDALLQKTYTVDFLSKKRVKNNGIVPQYYVENSHEPIIPRELFMQVQEEMVRRANLRGGKDGKKRVYSSKYALSSIVYCGQCGDIYRRVHWNNRGYKSIVWRCVSRLEEKGSECTAPTINEETLQTAVVKAINELLANKEPFLQALQKNIATILNEENDNATNDIDSKLEELQQQLLIQAKSKNDYEDVADEIYHLRELKQNALVENAEREGKRQRIAEMTDFFNEQSCELEEYDEQLVRRLIEKVTVFHDKFAVEFKSGVEIDVEG

SEQ ID NO: 13901 - protein, 650 aa, synthetic construct
MKKEKIKVYLYTRVSTTMQIDGYSLDAQKTKMKAFCDYNEYEIAGEYEDAGKSGKSIEGRVSFNQMMEDIKSGKDGVAYVLVFKLSRFGRNAADVLATLQVMQDFGVNLICVEDGIDSSKDAGKLMISVLSAVAEIERENIRVQTMEGRMQKAREGKWNGGFAPYGYSLIDGKLEVNEEEAVAIRMIFDQYVNTDLGENGIAKYLENHGIHKIDRQNGKNPLFDAALIRRIIQNPVYSGKISYGRRRTEKVHGTRNEYRQVKKDDYLLVDGLHEALVSEEVWEQAQVKVAAQAKKYEKVNRDKREKLHLLSGILKCPVCGAGMYGNKSIKKRKDGSNYKDFYYYGCKHRNMTRGHKCDYKKQVHEEMLDASVAEVISKLVSNPKFSDLIRNKINMEVDTSALDQEIENYKIQLRKLYHNKDTILSDMDSLDYEDKHYQRRKTDLENHLYKTYDKIDEAEELLVSAKTKKRSLLADKITGDNIYKALVFFDKLYVQMNEAEKREFLSQLVDNVQIYEERKENGQWLKSIEFKLPIIEKEFTLSLDNDTQNETVVKLSLKKDTPKIEVTMEPDEESNYTPEEKATYQKIKDYVKNKYGVNVHTSYIAQVKRMCGLDMGENYNKSKKKNPEVKQCPQEKVEYIKDALRYFNEI

SEQ ID NO: 13902 - protein, 502 aa, synthetic construct
MEFIREDCIYARQSVDRKDSISIESQIDFCKYELKGGSCRVFKDKGYSGKNTDRPEFQKLLGEIRKGKVRRVIVYKLDRISRSILDFATMMELFQEYDVEFVSSTEKFDTSTPMGRAMLNICIVFAQLERETIQKRVTDAYYSRCLKGFHMSGQAPYGYQLEPTVVEGIRTKKMVADPVAADHVRLMFEMYAEPETSFGDITRYFEEHDIKIYGKSMFRTFLSQLLRNPVYAQADLELYEFFKSQGAAIVNDVSDFAGTNGCYLYQGRDVKEDKDRCLKDQILVIAPHEALISSDTWLKCRKKLMANTTFQQGRKPKNTWLAGKIKCGHCGYALKATHVPNSTGYFRCTKRTENKGCPGCGKIHKEAFEQFIFSAMQEKFKDFQILHGREEKVNPKLTAYQVELAQVEAEIEKLLDTLTGANATLLAYANKKIEELDTRRQTISKAIAELSVETISPQQIKKLSYYLDNWDSIDFDDKRKAADGLISTIKATSDRVQIEWKI

SEQ ID NO: 13903 - protein, 547 aa, synthetic construct
MIRKKIKVAAYARVSTDKDDQLNSLDNQRIYFQNYIKGHPDWEFVDVYWDEGISGTQTKNRVGFNNMIADAINGKIDLIITKEVSRFARNTVDTLSYTRKLKQFDVGVIFILDNIDSRDVDAEFRLTIMASNAQEESRKTSERVKWGQKRQMEKGVVFGRSLLGYIVDNGKISINQEEVPIVKKIFHKYTIEGKGTHVIARELLEEGIEPKRVKKWSNTVILRVLRNEKYVGDLCQKKTITPDYLTHKKKYNRGEEEMVYIKDHHEPIISRELWKATQEELKRRSVSKKQKLKHSSRYWCSGKIKCAECGNRFVGRSRILKNGQKYKTWKCFENVTHGSKKKKLNGEIVGCCNNAINEKSLVVCMNYCISFMQDGKELLKKEILQEIGKIKKEKENKLFGEESIRESIEHYERKKRKSIDLMLDGLISEEDFINQKNWYDEKIKNLKDKLIEESKKDREDKKEYIIQSYRNALDEIMDIDNPSEMVFKEILDHIDVHKNKVLDIWLKSVPFGIRLKIETEGRSTTYKTKILETELIEKSKGVISKTI

SEQ ID NO: 13904 - protein, 527 aa, synthetic construct
MEERAKAVIYARFSSDKQREESIDGQIRECTAYAESQNLEVIGAYIDRALSARSDNRPDFLRMIADSARKGFQYVIVYQLDRFSRSRYDSAIYKNKLKKNGVRVLSAKEHIGDDPSSIILESMLEGYAEYYSAELSQKVKRGMTENILEGKWVGCRVPLGYKLTADKKLQIVSRDADAVRLIYTMYNANERIIDIVRYLNAHRYKTAAGRAFTRSSLTKILGNKIYIGTYEWDGHVVEQFAPPILDDDVWEAAQKRTQQHKLNPRPKRRSADYALTGLIYCGECGNPMTGQSGRSKNGSMYHYYRCSTKNNYHSRGKKQHIKCKSRNISREKVEDLVLDETVRILSNPKAVKIIAKQAANVQKIDPTAQEQARIAQERKTIQSKLENSIAAVENGLCSKTIAENIERYESRISELDQQIDELKFAYAPIRIDAVAVEFFLKSLLNKKKDHDKYRLDMFRTFIRQVIVYADKIEIRYNYTACPQILKNPVSIALTGLPECSGNDSMVRLEGFEPSHPVPETGALSPEL

SEQ ID NO: 13905 - protein, 463 aa, synthetic construct
MRRKTTAPVEKILLRVAIYIRVSTDKQVKDGDSMRDQLATGQKYIDSHENMILVDTYIDDGISGQKLKRDDFQRLIDDVRAGRIDLIIFTRLDRWFRNLRHYLNTQDILDKHGVSWTAIEQPYFDTSTPHGRAFVNNSMIWAELEAQNDSDRILGVFDDKVDNGEVLSGSTPLGYTIVNKHLVPDDDAPTSVAIFQYYRKTGNLSMTLRYMESEFGLVRSAASLKNMLTNTKYIGEFRDNKNYCPAIIDRDLFFDVQRLLKINIKSGKKHDYIFSGLVVCDDCDHIMSGCQQRAKGRVRADGTRIIYKYSVYRCRQGVNLHRCPNRKLVFEATLEKMLLERIRPELENYIAEYEVANLPALRTDAKRRSVEGKMQKLKDLYLNDLITMDEFKLDREKLLMQLEKINAEDSRPVKDLSYLKNFLKMDFESVYDSLSIPERRELWRSIVKEIRVDHDKNIHIIFL

SEQ ID NO: 13906 - protein, 517 aa, synthetic construct
MTKNKKTDTVSEKCKAVIYARFSSDKQREESIEGQIRECTQFAKSQNLEIIGTYIDRALSARSDNRPDFLRMIADSSKGLFHYVVVYQLDRFSRSRYDSAVYKHKLKKNGVRVLSAKERIGDDPSSIILESMLEGYAEYYSAELSQKVKRGMTENVLEHKWTGGYVPLGYCLAPDKTLQIDPIGAEAVKIIYDKWLAGCRIMEIIRYLNDHNYVTSRKAKFRYSSLNRILTNPIYTGLYQWGSIEVADYAPAIITQKQFALAQEKIHHIKAHPRAKRRSANYALTGMIYCGVCGSPMTGQSGHSKSGALYHYYRCSTKNNYHNRGKKLNVKCTNRNISREKLEDLVLQTTINILMNPEAVHMIAKQAVAVQQKDPASMELDRIKEDKKSIQKKLNNSIKAVEAGIISATLAANISQYEKEIADLDIKMEKIKLSSTPVKIDEIAVEFFLKSLLLNKKEHDKYRLDMFQTFIRRVIVYPDKVEIQYNYTATPHILENPVTKMMTGNPGCSRCERLVTR

SEQ ID NO: 13907 - protein, 574 aa, synthetic construct
MRKKKIDAPKEKPQRAAIYLRVSTAYQVDRDSLPMQRKDLVGYCEYALNISDYTIFEDAGYSGKNTDRPAFQKMMMQIRNGMYSHLLVWKIDRISRNLLDFAQMYEELKTLGVTFISRNEQFDTSTAMGEAMLKMVLIFAELERKTTAERVTATMISRANDGTWNGGRVPFGYDYNKETQTFSVNGDESFIVLEMYDLYEKTDSLVHTARELNDRGYVSRQHNPFSPVSVWTILRNPWYIGTYRYNYYKIPGRKAIKDESEWVVIPDHHTPLVSKERFDRVQKMLDSNARYRNTPGRSATQKNVNIFSGLIWCACCGAAFTASPGKLHASGYRSAKYGCPNVRKTKTCNAKYTSDTVLGEFLLNFILNVINAQKRFDQIKSPADLEAQLLRGDTFKNVAGIDSASVDALYEMLAEYSPADSVLLKKPTVKKNLDPELRKLRADKRKTERALARLDHIYLYSNKQMSDKEYLIKKNDLMNDLKEQDKSIGLLTSESWAQSLSDDDFLEQASSFIMSQRLQEREYIYFQGLAECTEPSVLRSFFLSIVDSVRMRNGHVETLTFKNGISHKFTYLAI

SEQ ID NO: 13908 - protein, 519 aa, synthetic construct
MKKVTKIDKIQPAKKAEDKLRVAAYCRVSTATDAQLESLEAQKSHYENYINSRDDWCFAGVYYDEGITGTKASKRPELMRLLADCKAKKIDFVITKSISRFSRNTMDCLEIVRTLLNLNIPVYFEKENINTGSMESELFLSVLSTMAEGESASISSNNKWSIKKRFKNGTYRLSSAPYGYKLESGGLQVVSEQADIVKRIFRELLSGKGMYSIAKELNAEQVPTQKGGRWTSTSVHNILTNEKYTGDCIFQKTYADSNFNRHTNNGELNRYLIQNHHEAIISHEDFNATAALIKQRATEGRIESGSDKYQQRYAFSEKLICGECGNTFRRRIHKGKYNSYVAWVCNTHLSDTNRCSMLFVRDDALNLAFATMLNKLIFSYRLLLKPYLAAMQSNTADEALLRIQYLEKQLDQNAEQRSTLHKLMAQGYIDQILYTQESNELLLQARDFRSEIEALNNTVAGDTTKVYETERLINYCKRGEMLTDFNESLFELFVDHILIYSRQKIGFVLRCGLTFEEMI

SEQ ID NO: 13909 - protein, 514 aa, synthetic construct
MPKKNPSGGKRLVAYYRYSGGSHQTEQSIEGQRRDCETYARIHGMVILHEYIDRHISGKTDDRPEFQQMIADAGKGMFDYVICWKTDRIARSRYDSIVYKKKLRDNGVELLYAAEANVEGSGGIIVEGLMEALAEYYSAELAEKVRRGMRESALKGKAIGSSRPLGLTVDKDKKYIIDPAGAAAVRYIFEQYAAGAASSAIVAHLNEQGLCTSRGNPFNKSSVVRIIQNEVYRGVYVSPKFDVRIEGAVPAIIDDDLWERAQKMFIRNRQSRSPRNDRADYILSGKLFCGECGTAMKGVSGHSSNGEVYFYYNCPCKDCHRRNIPKDELEGLVIRTVCNDVLQPDVMNRIADSVIEAQTAELNQPNPEKEALQHELADVQRKAKNLLAALENGTAGAMLTNRLAELEQQADTLSYQLSSLESEPKFPVFSKEEVLYLLEQFLIAPSEKTKAYRRRLIDTFVSKIEVSNTELTIYFNIAEEDCGKMKKAPQSNQPEGCSTEKQMVRVARIELTAS

SEQ ID NO: 13910 - protein, 538 aa, synthetic construct
MVKKVTVIKAAKAQKHTQEERRLKVCGYARVSTGSQAQATSYTAQVEYYTEKIESNPLWEFAGVYADEGISGTNVKHRDEFQMMISDCEDGNIDLILTKSITRFARNTVECIQTIRKLKEIGVGIYFEKENINTLSEKSELFITILASVAQGESENISSNNRWAIQKRFQDGTYIISTPAYGYGKDEDGNLVIIESEAETVRWIYESYLNGMGVYVIAKALNQKGIPTIRGAEKWQDGVIQDILKNPIYEGDMLQQRTYTETRFPFVRRVNNGQRNQYLIKDSHPPIVTHEEAEAVRNLMAYRVDVLHMNKSDYTKRYLFSGRIICGECGRTFRRQKIYIGKPYEKIIWTCSGHVEDKESCCMKAIREDVLHRAFTDMWNKLYTNQGTILEPLLKGLTELVAARQDSEEIRQLDKEIKDISGQSQILNQVMRKGYMDSALFMESSSKLGWQLTECRRKKTLLTRKLRRTKEIVRTEQLIQLIAEQDGLREEFDEQLFKMTAEKIVVSKEHDITFCLHNGLKLTERGGGQDAVAHANRL

SEQ ID NO: 13911 - protein, 548 aa, synthetic construct
MAETAKKISMIPAKVQYDRNVKLSEKKMKVAAYCRVSTELEEQDSSYEAQVEYYTSKISENENWKNAGIYADDGKSGTNTKKRADFNAMIQDALAGKIDMILTKSVSRFARNTVDSLVTIRKLKEKNVAVVFEKEGINTLEGTGEILITILSSLAQEESRNISENIRWGVVRKFEKGKVIVNCTKFMGYTKNEDGDLVIVPEEAEIVKLIFRLYLEGYSTGKIAKHLEEQGVKTATGQDKWHSTVIDKMLRNEKYMGDALLQKTYTVDFMTKKKVKNTGIVPQYYVEDDHEAIIPKELFYRVQEEMMRRASLCKAAVTRKKNQRSRYSSTYALTGMLICGKCGQEYRRVTWARNGKKKVVWRCSNRLTNGVKKCGESETLEENALNRAVMEAIHRITSDDMEFMENFRQNIIHVIGNYSTAKESEEYEEKIKEKIKEKQEEMVVLIAENAKTGSYTPEFDERYRTIAEEINALKEAQKTARNEKWMADSYEQRIQDIDHYLSTSTCQIQEFDNDLVRRLISTIKVESSEKLLIQFQSGIVMEQEIRYE

SEQ ID NO: 13912 - protein, 479 aa, synthetic construct
MPKVAIYARVSTLNQAEEGYSIEGQLASLRKYCSALDWQIYQEYVDPGFSGGSLNRPAIQKLIEDAKSCRFDIVLIYKLDRLSRSVQDTLYLVKDIFDKNKISFVSLNEKIDTSSPMGNLFLTLLASIAEFEREQIKERMMMGKVGRAKSGKAMGWSKVPFGYTYDKQTGIYQINTLQAQIVKRIYRDYLDGVSITKLVDLLNAEGHITKDRPWTYRTVRQALDNVVYTGRQFYQGNVYPGQHEAIISIEDYDKTQAELKRRQLTNAQKFNPRPFRAKYMLSGLLHCSVCGSSMMVQTRYLKYADDYHYYRCVSSIRKRIRFSYRQDTELCQNRSNYLKDDLESAIIKTIRHLQLHPDQMPVDTVKFDDKPLKDELNRINDKLNKLVDLYLNSNGISIGIINQKREELLQQKEALENKLQERKPKQPELDPKKALLLLSKKNILELPYEEQVKLVKSLISKIEVSPSKMKIHWRFNAEK

SEQ ID NO: 13913 - protein, 558 aa, synthetic construct
MLQQSNNAITSIYPIGNQTEELTALYCRLSQDDKQEGDSNSIINQKKILKRYAIEHGYQPYVFFVDDGFSGTNFNRPDFQRMIAEVEAGRIKRVIVKDMSRLGRDYLQVGMYTEIMFPNMDVHFIAVNDGVDSHVGENEFTPFRNIINEWYAKDTSKKIRAVKRSKGMAGEHIGSHAPYGYMKNPDNKKEWLIDEEAAEVVREIFRLCVNGYGPTRIANILTERKILCPTYYALEHGEKPRTVLPPDKYLWSATVVSHILERMDYLGHTVNFKTHVKSYKNRKKIDNSPEQWKIFENTHEAIIDKETFEIVQKIRSGKRRPTKMGDMPMFSGLLYCADCGSKMTFHRQMAQSAEKHNFVCSNYRHNSKSCTMHYIRNVVVEQIVLENLKEVIRYVSDYEDEFVQMVMDTDMRQRNKELSQKKKRLTEIHSRIQELDKIFQRIYEDNISGKLSDERFMKLSKGYEEEQHTLQEEQTSLEKELQKEEKQSVDVKQFLSVVRKYTNLTELTPEIVHEFIDKIIVHAPDKSSGKRLQEIEIIYNHIGVFDHSKVTLWKGKAV

SEQ ID NO: 13914 - protein, 456 aa, synthetic construct
MRNKEIAPALVRVALYIRVSGEEQKIKGLSLEAQQERLEAYARERGWVIVGIYIDAAKTARKNIHKRTEFQRMMDSVKRDEVDILLFARLDRWFRSVADYYKVMEILQAHNCDWKTTDEEYDTTTANGRLYINVKLSIAQNEADIDGERIDVVFDSKIAHGTVVSGSAPFGFRVNEEKRLEVVPEDAAIVQDAFNYFENTVSQRATVRYVRETYGVNWCDATFRRMLKEKLYTGVYDRGGRYNDQFCPAIIDRQQFDRVQALLTRNVRSAPSGKVYIFTSILTCAECGHKLVGYKSSDYFYYRCNQHFQRGRCSHNHSAREDVVEQWLFEHLGEELERCQLEWDVEAAKKKASVARTDKAALKRKLTKLKELYVNDLIDIEDYKKDYQIYVSALNQIPEPAQEAPPDFAAVRRLLDNSFRTIYDTLTREEKRTLWRSVIKEIRIDNDQNITGVVFG

SEQ ID NO: 13915 - protein, 477 aa, synthetic construct
MKDSKSKTVIIYNRVSTIMQDKNESLTEQTDECIRYCKTNGYEIYKILKDVKSGTKDDRAGYLELKKHIKRKDFDILVVLETSRIARKMKELVLFFSLLNENNIEYISIREPNYNTTTPDGKFAMNIRLGLIQFERDNTAERVTDRLYFKASKGQWVNGKPPIGYKLVNKRLEIDEEKAEIVRNIYEDFLNGYSLNQINNKLQFSWGSKQVKRILTNPTYKGYIRYGTRSNRKKNNREAFIVKGWHEAIIPEEKWEKVQEMYKSLNRKASNTKPTLLSGLLKCKECGNNYIRKRGGSYDKNLYYGCNLNNLRYSDKFFYKDIPECSSATIKGDLLEKAVIDTLKKQINDLNFNDIEVDKKRQVNIKQIDSSINKFKNRLNKIYELYIEDEIPKDKYLKDKKDIEARIISLEKQKKSFGEIEVEKSNNEMIQEYFSKIDLSNIEEANRILKIIVNKIVVYKKKKTPKDDFEVEIYLNI

SEQ ID NO: 13916 - protein, 463 aa, synthetic construct
MPSKIERCAIYIRVSTAEQMMHGKSLEAQKQYLTNYAKEHNMTVAGVYADEGKTARKELKKRKAIHSLLEDVKAGKIDVIIFWRIDRWFRNLSDFYKVQEVLDDNNVRWISTSEPGINMETRDGRLQLNVVLSIGQNEVDTTSERIKFVNEASIRQGKLIFGDVNMGYGYKSGIIDGVKRMVKDPDREDTVNAFYRFFFKHHAKGLSMRYIQENYDPDFTWANMRTLLSSEFYKGTYRGIPYCPAYLTESEWNNLQEIQNANVKRAPSGRIYLFSGMINCPICGRRLSARGGSSIINRKTGAKKVYCYYRCNKAFIDHKCTYKHMVSQNLIEQYLIDHLEYEYNKFKIKCEKIEKEQEKKKKVQTPEKLQKELERLNLLFQKGRIEWDYYSKEYDRIENELNELLNTAPELEPDYAYLEELLNTDFRTMYYNLTQENRRAFWHSIIREIHLNTDHTVDSVDFL

SEQ ID NO: 13917 - protein, 413 aa, synthetic construct
MKHGLFDTVLVYKLDRLSRNVRDTLYLIKDVFNINKIDFVSIQENIDTSSAMGTLFLTLLSAIAEFEREQIKERMQLGKLGRAKSGKSMQWAKTSFGYDYIKETGTLSVNPYQALIVRKMFEWYLSGMSITKLRDTLNEQYGQDKEWNYRTVRVILSNPVYCGYNQFKGQIFPGTHEAIISEEEFNKTQEEIKTRQRTAAQRFNPRPFQAKYMLSGIAQCGYCSAPLAIKLGMVRKDGTRLVKYECKQRHPRKTKGVTVYNNNEKCDSGFYFKDDIEHFVLTEISKLQTDSDYIDKLFSNTDKETIDRDSYQKQIDNLTAKISRLNDLYIDDRISLEELQKRSSDFMAERTALEKELDADSSLKAVERKKDIRRVLDTKDIFTLDYEQQKAIARALIGKVRVTSEAIVILWKL

SEQ ID NO: 13918 - protein, 467 aa, synthetic construct
MKRRVIIYARVSTIMQEEKDSLEFQIKKCKEYCSLYDYEIVDVVTDVESGWHDDREGFLKLKKLITHNVFDLLLVYETSRISRKMVTLLSFINELMANKIGFLAISQKDIDTSTDIGMLIFQIISSLAEYERKLISARVKSSKLARAKAGKWQGGTKPLGYDIVNKKLIPNAIEAITIRKMFQYYIETQSLAKTAKKFDRKMASIRWILTNPLYIGKLKWGQKEKDPITGKQITKDTFQIYDGEHEAIVKEDIFYKTQEIIEQRNRIRIAQAKSDALFVGNLYCSCGAKMYNLSMKNKRFNYYKCENKECGKMIRREKVESKVIDLIFLNQDLKKLDDVDETNIESYEIIDKLEEQLKDLENEKLNLTRGFIKKNIEESIFEQLKKEIISKEKIITEEIKREKEKIKKVESKTLDREYSKKLISILQNINFNNDEEIKEIKQILYLIIGEIRLKKSDELDFEIYFKL

SEQ ID NO: 13919 - protein, 527 aa, synthetic construct
MAKRKVTQIPATINKFTAKPVDSKKKRKVAGYARVSTDHEDQTTSYAAQVDYYTNYIKSRDDWEFAGLYSDEGISATNTKKRDGFNKMIVDALAGKIDLIITKSVSRFARNTVDSLSTIRKLKEHNIECYFEKENIWTFDSKGELLLTIMSSLAQEESRSISENVTWGHRKRFADGKVSFAYSRFLGYDKAPDGSLIINEEQAKTVKLIYKLFLDGLTMHSVAKELTKRGLITPGGKTNWSQSTVRSILTNEKYKGDALLQKSYTVDFLTKKVKTNEGEVPQYYVENNHPAIIEPELFDLVQSEIQRRGKGSSRYSGVTIFSSKVQCAECGGWYGSKVWHSNDKYRRVIYQCNNKFRHKTGCNTPHLTEFEIKDYFVKAVNQLIMEKAEILDNLQIIRTTLCDKADLIKQKESLEEEINVTVEMTQNIVAENARVAQNQDEYNKRYNSLVERYHKLKEEYDEVCTTISDKDAKYEQMGRFIKVLKGQQELITEFDESLWSSLTEKIVVKSKEEVTVVFKDGTEITVE

SEQ ID NO: 13920 - protein, 597 aa, synthetic construct
MRTIKKIESTIPTIKTRKRVAAYARISMESERMSHSLSAQISYYNDLIQKNPDWEFAGVYADNGISGTSTAKRDEFRRMVADAEDGKIDIILTKSIQRFARNTVDLLETVRHLKDLGIEVRFEKENINSMSGDGELMLSILASFAQEGSRSISDNVKWGIRKRMQEGMPNANGHFNIYGYKWNGDELVIVPEEAAVVKRIFQNFLEGKSRLETERELEADGIRTRNGCVMRDSNIKKILSNVTYTGNMLFQKEFISDPINKKRKQNRGELPQYWVEDTHEAIIDLETFQYIQDEMERRKQLGALANKSLNISCFTGKIKCPYCGVSYMHNTRKPRTPNAKRLEFWVCGSRKKKGGYCEVGASINQDNMKKILAEVLEIDEFDDDVFLEEVDFINVPKQYTLEIHLKDGAVVTKPCKNTGHQDCWTKEYRDRVSKQRKKNGTNPKGASVFTSKLKCKPCGCNYRRCTQPSSTSKDGKFYYWRCAERTNCKAQGLREDFLKTQLADVLGMEDWDDTTFSDKVDHINIDGYQLYIVGTDGTTISMTFDPPKRGGRHCSEEQKEHMRKVMKEKWTPERKAKMSQRMKDMRKERGRNWRKEK

SEQ ID NO: 13921 - protein, 481 aa, synthetic construct
MNTINKVAIYVRVSTNVQAEEGYSIDEQIDKLKSYCQIKDWTVYDVYKDGGFSGGNINRPALEKMIVDAKKKRFDTVLVYKLDRLSRSQKDTLFLIEDVFSKNDISFLSLQENFDTSTPFGKAMVGLLSVFAQLEREQIKERMQLGMIGRAKSGKPMMFTNVSFGYTYSPKTQQLTINQAEAVIVKQIFNEFLGGMSPLRLMAYLNENNILRNGKEWNYQGIQRILRNPVYIGKIKYNNVIYPGLHEPIIDEESYYKAQKLLDARQDEMRIKGKNRQFKAKYMLSGTAKCGYCGAPLRIKIGNKRLDGTRLRVYQCCNRYPRKYAVVTYNDNKKCNSGNYQKENLEQYVIAEIRKLQLKPEKIDKLFNKVSKIDTVQINKQIASIDNKINRLNDLYLNDMIDIDKLKADAEKFKEQKRVLEKELDKDLKIQEQEKNKEDFKNTIGFKDVTKLDYEEQSFIVKSLIDKILVKKGFIKILWKI

SEQ ID NO: 13922 - protein, 437 aa, synthetic construct
MAENITKIAAKPSLIRKKRVCAYARVSSGKDAMLHSLSAQISYYSKYIQSHTDWIYSGVYADEALSGTKDERPNFQRMIADAKDGKIDIIIVKSVSRFARNTVTLLEATRELKEYGVDVYFEEQKIHTLSSEGELMLSLLAGFAQEEARSVSENMKWRIKKDLSEGIMWGGKSHLGYELIDKKLVLIPEEAKIVKRVFQLFIEGCGIQKIANSFNKEGIQPKYSDHWNKSSVRHILSNVNYTGDLLLQKTYRESYLTKKKRINKGEQDQFLVENDHEAIIDKDTFNLAQQLLAERGVLPKSNYIKGNKSIFTSRIKCGLCGASYRHKTTRYKKIWICHTYDSEGKENCSAKQIPEDNLIKAINQYLGIDSFSEDAFNKKIDYITVFPGNVLRIKRVDGNEDDITWNDPKRSEGWTPEMREKARQRAKAHYKKEGADE

SEQ ID NO: 13923 - protein, 524 aa, synthetic construct
MAKVTIIPSKINPITHQHLDVKVKRRVAAYARVSTDDEMQLTSYEAQVDYYTKLIKANDEWEFVKVYADEGITGTSLKNRKEFNAMIKDALDDKIDLIITKSVSRFARNTVDALTTIRKLKEKRKEIYFEKENIYTLDSKGEVLVTIMSSLAQDESRNISENVTWGQRKRFSDGKYNLARKNFLGYKKDQDGNIIIDEKEAVVVRKIYRYFLDGMTPGGIAQSLMDEGVPTPGGKTKWIYSTIISILQNEKYKGDALLQKRFTVNFLEHKMKKNEGEVNQYYVKKGHPAIIEPVIWDRVQLEIKRRENSKRIYSAKDAFSSKLVCADCGSYFGKKIWHSNDPYRKVIWRCNHKYDGDKKCDTPTLEEDTIKNAFLLAYNNLCVDKDIIIETTKELVDSLCDFEELDQKIIKESEDLDIIADKVHKMVMENANTAQDQEEYQKRYDYLSGKYNEGKVKLNALQEERARRATQKEILELKINELEDAYVLEEWNESIFKMSVDEILVSKYELTFKFYIGEEIKIKL

SEQ ID NO: 13924 - protein, 571 aa, synthetic construct
MSIRDKLSALKVAIYIRVSTHWQVDKDSLKVQERELIAYCQMVLGINDYVVFTDPGYSAKNTDRPDYQAMMDRIRTGEFSHLLVWKIDRISRNIIDFATMSEELKHLGVAFVSKNEQFDTSTAMGEAMLQIIMVFAQFERKQTSERVTAVMLSRAGNGQWNGGRVPYGYLWDKETASFQLCETEAGYVRRMAQLYEEHQSLLHVVKWLNDAGVKTRRGFAWTPTSVHVILTNPWYIGQYVYNVHSDGKGVERRDESEWVCVEHHHEPILSEDQFYRIKFLLTRNRRGTPTPGKSYARKHTHIFSGLMRCGICGSNMSASADRRRANGFRPSQYACASRRRKGTTCTNKYISDLTVGSFVLNYAANIIRAARNSAADVQPDVLERKLLRGETFKDVEGINSEAIQQLLSSFAEAGEAVEYRPQYAFTSASGEGRDMDNLRARKRKLETALSRLNALFLYDDEAMPEKDFIVERTNIERQLAETGKRIAELAATGLSSSEDSSDFLKKASYFIMVNKLIEDASVDYEKLVRTLDPTAIRDFVLNIVQEVEATDGRITAITFRNGTAHRFKYKT

SEQ ID NO: 13925 - protein, 527 aa, synthetic construct
MYELTQSMESLSVNEIIVYLRKSRSDSPEMSVEDVLKKHEEMIQDYATTHFGSPIPEKNIYREVVSGETIDSRPQVKIVLQKIESPQIKAVLIVEPQRLSRGDLEDCGRLINILRYTNTMVLTLTHSFNLQEEYERKFFEMEITRGNDYLEYTKRILRRGRESSAAKGHYIGSVDPYGYRKIVIKKDGVNCHTLEIVPEEANVVKLIHELYAYTPGGIGFTNIAHKLDSMNLKPKKATHWTPAIISSILCNPLYLGLIRWDTRKVVKYINDGQLEKSRPRSSDAKYYKGLHEPIISQELYDACMARRGTNPSLRRNKELCNPFAGLLYCGTCDHAMSLKIYKNHNSVSQLMLCNHQSYCHTKSVLYSAFLERFISSMENTIHDFELALLADDGNAQTVNQSIVANLETRLKKLQEKDMRQKDAYEDGIYSKEEFLERNIKTQQEIASTITALTAAKETKENYVDYGEKIRRFRDCINALNDPELSATEKNQFLKSCVSKIIYYNNMESKAGVGRYVENVFSLEIQYK

SEQ ID NO: 13926 - protein, 498 aa, synthetic construct
MEIQIREGNREQKRKLRVCAYCRVSTDADEQENSLENQIRHYETVIKANPAYEYAGVYSDFAISGFKEKRPGLQKMLADAQKGKIDLILTKSVSRFARNTSIVLEATRKLKELNVGVFFELQNINTLSGEGELMLTILAAFAQAESESGSAGAKMVYQRKYEAGIPVQYLERSFGYTKDERGVYIADESEAVWVRKIYEMAADGYTPAAIKRYLNENGVKTVGGTKWIDSTVFRLIENEIYKGDYIMHKHFVNEERKLVRNRGEVDAWYIEDDHEAIVSPELWQKAQDAIEAKRDYLAEGSVIEEFTEDNYPYMNRIFCAKCGHPLYKRIYSNGNRLNWGCSGTKRYGKSFCEGINIPDGVLRKAWHFDGNMYIDEKPSVKGTKEFSYLKESSWKRRHKKKAPEAIPENTEEAYPYRKKIFCGLCGSRLVRHVNPKSHKVIWICNGAKRKGVAFCRGTRIPDSVIRGWGEIKKDIYIQRKDDKNGKKRYSYTSKKPTA

SEQ ID NO: 13927 - protein, 535 aa, synthetic construct
MKKAVAYCRFSSDNQRTESIDAQVRAIEEYCRKEGYTLIKIYKDEAISGTSIDDREEFLKMIEDSKNKEFNYVIVHKFDRFARNRYDHAINEKKLNENGVKLISVLEQLNDSPEAVILKSVLTGMNEYYSLNLAREVRKGQKENALKCVHNGGIPPLGYDLTEDKTYTINEEEAKAVRLIFKMYLEGRGYAYIADELNSLGFKNKLGKPFKKISIRDTLYNEKYIGNFIFGKKDKKGKLTGKEIKIENGIPAIISKEDFEKVQIMLQKKVRSSSGRSTVLTTYLLTGLCECGECGGSYSGGYRSVNRNKTVSYGYQCRNRKDKVNDCKNTPIRREVLEDLVITTLKENIFSTSQIEVITDKVYDYVQDTFKRSNKELIKIDKSLEKLKAKAEKLLDLTLDGTISDYEYRNKKGEIDMEILNLKEERFKYTDAPKFMDKQKIKNHLIELGKNLDSKDENLLKILIQTFVKKIVVHRDSIALELRIFPGLTPAKVGGDDGNRTRVRNYQRHRLLQCLVYYFISQQSLPQTGLTEAIL

SEQ ID NO: 13928 - protein, 544 aa, synthetic construct
MAYRKITDIRDTIGMRAVFYARVSTAEEEQLNAIELQIEENRGCIKDHGWKLVGEYIDRSKSGTMVKGRDDYQRLYEDLYEDLFDIVVIKDQERLQRNTLDWYLFINRVVQTGKLLFMYMDGKFYSPDDALITGVRAIIAEEFSRNLSKKLHNYHDHRIEKARQGQEIALQGSGNVYGWDKKDGKYYINPEQAKVRRLMCEGIMARKGSTLIAKELNDAGYRNTVGKPWKPMDIPKFVYDCKNVGTMIINKERHDFESKQTIKLPKEEWVYVENALPPIVTQEEWDLICKIHEERVIATGSDRRGKKTSGYSFSGKLVCGICGAPYWRKQRVSKDEYWVCSTKQTKGRRTRKRDSTMGKAGEINPLGCDNENISYNSLMEIMGVVSERLQANTDTIKQDMINWLTKLRKQLLEANGGHTEVDLQRELSRKSKLLDAYLDGILNKQEYQKKAEELDERIIQLKAETEKNKANSGDIAEIDKVLANIDEEVARYIDGNEKLKVEYLLEHLEQVQIFPDKVIVIVPILSEGIVVEKTQYVSREKRRR

SEQ ID NO: 13929 - protein, 569 aa, synthetic construct
MKQSSNKKSREATAFLYERLSRDDNLEGESYSIGNQKKLLTKVAKEKGYTNLVHFLDDGISGVTMNRPGFVEMMQQLEQGKASAVFVKDLSRLGRNYIEVGRLTEEFFPDHDIRLVAVSDNIDTAEGENELAPIRNLFNEWYARDISKKRRISNKIKGNSGEPMGLPPYGYINDPNNPKHWVIDEEAAQVVRRIFDMTLEGFGTEQIATQFEKEGILTPQAYWIQKGIGRPGKSKTRPSTKWNGSTITHLLYQQEYCGDILNFKTYSKSYKNKKRIHNDPENWVVFQNVHEPIIERAVFEQVQQKRGKMRKRRTSNGEHNMFSGLLVCADCGCNLHFHFNQGNPEIKYFNCSNYKGNRGTCQSTHYIRVDFLEEVVLGEIRRLTKFASLYEDDFLKAVIGHSQQADEADRKLKEKELKALLARDEELDGLFERIYEDNVSGKISDERFSRMSRRYEDEQKELTEKIKQLRSEIEKQSNRTMTTDMFISLVRKYTRAKKLTPRMLNELIEKIEVFNAEKVNGVWEQRLRIHYNCVGTIEIPSSLPLPTPDVSVNTRKGVVVNYAPCDVAI

SEQ ID NO: 13930 - protein, 576 aa, synthetic construct
MIKRAYAYLRVSTFQQVDGKSLTGQEEEIRKYCNVYGIELVDVYSDEGKSGKSIEGRPQFQKMLRDIKEKQEVDYVIVWKLSRFGRNACDSLNSLNILQDNGVNLVALTENVDTATPMGRLVFTLLAALAEMERENIREQTANGLKYNALSGGWNGGIPPYGYDAVNKELVINEEEAAVVRKIFEWYLESEEASCDSVTGRLNEEGIKPRHYKRVDRKATEESETDETVYLPPVADWYTSQVKKILDNPTVCGKIRYGYHKTDDSGNKGKPSNDSENDYILVDGKHEAIISEEMWNRAQEKRKKSRKPRGRRDSTSENVNNVFNGIVKCPQCGAHMINYGSRYKRANGEESYYSTYVCGYWNNHKKGKCRKNPIKTEILEKAVIGGLREYTRRPNLAEEIHQYMEQELDTGKLEKETEELKNKIAALDKNEDMQYKILCQIGVNPTYQNMKPERIQINLDKIATEKKELQEKLDYKMKQIESVQLEKMDFELVKNLLENFNEVYEDAPKELRKRLVRSLIKEVQLGYDDKGKVVPVKMILKFSGEQIELMKEHKENFGLNEAHAEEIVVAELLYIN

SEQ ID NO: 13931 - protein, 477 aa, synthetic construct
MGTTKNAVIYARYSSHSQREESIEGQLRICHEYAKAEGLAIVGEYIDRAISGTTDARPDFQRMIDDAKKKQFSYVIVYRLDRFARNRYDSVLYKHELKQCGVKVVSATEGIGTGDESILLEALIEASAEYYSMELSRKIKRGRQDSAMKGNFLGGSVPLGYKVVDSKFIIDDETAPIVRYIFERYAAGTGKKQIIDELTAKGYMRRNGKPFTYRSFDSVLRNRKYTGEFTQTGITVEGGCPAIVDTEMFEKVQARLEINRRAPAKAKAKTEYLLSGKMFCGYCGEPMIGISGTGRHGKTFYYYSCVGRRGKSGCKKQHEKKDFIEWYVCEQTVQYMQDPERLSHVAKRIIEINDAEFDGGKVKELERAVENCDNDIRKLVDALTTIPDAGRAALYDKIERIGAAKADMEIDLAKLRVLSEVRYKQEDVEAWIRSMCRGDLMDFDFRRQLMFSSTLCICLTIELLLFIISRTASRCLP

SEQ ID NO: 13932 - protein, 519 aa, synthetic construct
MADFEHVIIYLRKSRSDDPATTVEEVLFRHENILQEYAVKEWGARIPEDRIYREVVSGETIKDRPVMQHVMKILETGLVSGVLVVEPQRLSRGDLQDCGHIINSLRYTNTAVITPPKTYDLSDEYDRKFFEMELTRGNDYLEYTKKILNRGRIASVKAGNFIGNSAPYGYRKICVGTGKEKYYTLEIVPEEAEAVRLMFDLYVNKDYGFRSIAHALDMAGYKPRRSAEWSPAAISCMIANETYIGRVVWNRRKTIKKWENDTIVRTRPRQSEYISVPGKHSAIISDELFYAAKAKRNRTPRIKRYVQLLNPLAGLLYCGTCGHAMSRKRTVDKKYGSVSVSFLCNNQSNCHTKSVMYDAVIDRVKETLRQSIEDFEVKVNNKDETDIAYHRAMITNLKGELKKLKEKDMRQKDAYEDGIYTKEEFVVRNAKLAEQISIAQLKLDEAESSTTQLVDYQERLVRFRECLEALDDDTISAADKNALLKSCIDKIMYYNDSPSLPGIGRYVDNPFRLEIFLKL

SEQ ID NO: 13933 - protein, 552 aa, synthetic construct
MGKKQKTNGGDAVIYARYSSHNQRDVSIEQQVEACRKHAAELGLTVTATYEDRAISGKTDKRPSFQRMMRDAEQHKFAYVLAWKSNRIGRNMMQALVNESRLVDCGVKVFYAEEDFDDNAAGRFALRSMMNVNQFYIENMAEDVKRGLYDNAKKGLVNGSLPLGYKRGADGKPEIDEPKAAIVREIYTRVAAGELFASIAADLNARGIRTARGREWNKGSFHVLCHNDRYRGIYMYGDIRIPGGMPRIISDELFYDAQEAYGMKKDNRYGRARHGAENYLLTGKLYCGHCGSYMVGISGTSKTGEMHYYYACQKHRLEHTCEKKAIRRDVIENAVARVIMMYCLDDETIDFIVDSTIAYFKQKDHELHIEAMENELAAVQQAISNLMKAIEAGIITPTTRTRLLDLEEQQAKLSGKINTAKAERVEIDRDDLIAGLQLFRTGDIKNKKFLAKLFNTFLLAVYLYDDNRLKIVFSFTGNHNNIEIPLELDNDCPDSESGPYETEVRMSHLECRKNSGTPPSSGGAEKGDGCSGGRFVRTAPLPPHKKTPQAYA

SEQ ID NO: 13934 - protein, 656 aa, synthetic construct
MSLRSKYTEHQICKLEKKEFMKEASFDDIFIDYGHDLNTLILCRESTAHEDQQKALNDQVERMKAIVDKHRQLHLVDDGIIIEDAKSGLAMDVRPKFQATIKRAVAEDIDVILVQEASRFSRNTGDFFYNMNILQNSGVGILIMEGEFWTYFMAPADYPRLANEVAKGQAESLTTARRVNRGIETYRSRGQLVSGNMFGYDLVKAVERKDNTYKINPVDGATVQLIFYMYVNKWIGTELIATHLNANNYPTAKRKGEWSASKVRRVIKNEKYANLIMYGKYKVVDTSTKKKIATHIKPVRTTTYDKDGNIIQERNVQYGTWEPLVDEETWWKAQEIMASRSNSYNLKDDTGKSKRCANGLRTSNDAYANKAYCCCGHTLSPQYTHAATDTKYAQFRYNCRWQINSHTDEYRKKHGLSPSDCTCKLPAVTDVAMRLMSIKVFEYLFTDIRDTIDDTVRIIEMANKQAVDSLNNLGVSVEDLEATYAKLNNRLSRFADMYADGDLTREQYRDKKSSVEEELKHTKELIDSKTLAISEQKKKSLDIETIKARLNTYVDLKGYGVSNEMIEFFVERIIRRPNNEYVWELNLTGQPSKPNKYKIKKYNKEYSDSLQDDSNFNIIKTFVISLDECKKFCETLAHRQFRASYWNQITVKIAVK

SEQ ID NO: 13935 - protein, 526 aa, synthetic construct
MPKVTMIPATINPLTHLPSVAARKRRVAGYARVSTDSDEQFTSYEAQVDYYTKFIQSKPEWEFVKVYTDEGISGTNTKRREGFKEMITDALDGKIDLIVTKSVSRFARNTVDSLVTIRKLKENGVECYFEKEGIYTFDGKGELLITIMSSLAQEESRSISENITWGQRKSFSDGKVHLPYKRFLGYEKGEDGRPAVVESEARVVTLIYGLFLEGKTQAGICKYLEELGIPSPGGKAKWSKTTVTSILQNEKYKGDALLQKKFTVDFLEKKMKPNEGEVPQYYVTGSHPAIIEPDEWEQVQAEFARRKALGKAYSGKSVLSAKLVCEDCGAFFGPKVWHSTDQYRRTIWQCNGKFASEEHCHTPALDTETIQRLFIKAYNLMMQDRVQIIKEIEAWRQKLMDFGTLDADIERQLEETQVVAELVKTAVNENASTAQSQEAYLKKYEALTERYEKAAAELERLQSLRTSRSQQDKKMALYIRTLKKQPEVMHDWNDTIWTVMIERAIVHRNGEVTFAFANGTEIKVGA

SEQ ID NO: 13936 - protein, 552 aa, synthetic construct
MSTITKINSYQRDVKQLRVAAYCRASTDNVEQLESLENQRQHYQEYINRHPNWQLVRVYFDEGISGTKLNYRNALKELLADCHNHRIDLVITKSISRLSRNTTDCLKIVRELQQLNIPIYFEKERINTGEMASELFLSILSSIAQDESHSTAGNLRWSIRKRFANGSFRVSSAPYGYSIQNGNLVTNPHEAQIVKQIFDQFLQGSSTGQIAKQLNYEHLPTQRGHHWWSSTIINILRNINYTGDMLCQKTYRDDQYHRHFNQGELAQYLIEEHHPALVSRKNFNKAQELLKQTAQQRNIESGSHKYQQHYLFSGKIICGHCGSTFKRQTRPNKICWACQKHLHSAKLCPVKSVPEKSIQNAFCTMMNKLIFSRKFLLSPLVQELKEHFNDPDGELGRLTNQIKANDQKAETLMNLVKEGLIDKGLYINQTAELEQSTHQCQQQIKQINSNNTDNANNLEDFRDLLRWCQQGQMMKKFDSKVFKAFVQVIKVNSEHEIVFQLKCGLHLSEFLPKKAGVSQHFYREVIRQCFNEPLKQAEYLYSIIKSEVDLIG

SEQ ID NO: 13937 - protein, 525 aa, synthetic construct
MGKVRIIPAHKQRGNSINRSPDEPQSERLRVAAYCRVSTELDEQVNSYETQVSHYKELIQKDPSWEFAGIFADDGISGTNTKKRDQFNKMIRACKAGKIDLIVTKSISRFARNTIDCLKYIRDLKAINVAIFFEKENINTMDAKGEVLITIMASLAQQESESLSQNVKLGLQYRYQQGKVLINHNHFLGYTKDKDGNLVIEPEEAKTVKRIFYSYLQGMTMKQIAELLKADGVLTGGKKTNWHSSGIALILKNEKYMGDALLQKTYTVDFLTKKRVKNNGIMPQYYVENDHAAIIPKSVFMQVQNLIRRRHNGITTKNCKHRRLNGKYCFSQKLFCGKCGDILQRNMWYRPEKVAIWRCASRIRRSKTGRQCMIRNVKEPLLKEATVEAFNQLIEGHELASKQIKANIMKVIKNSKGPTLDQIDHQLEKVQMKLIQAASQHQDCDALTQQIMDLRKQREKVQNCETDKQAKLHNLDEINKLVELHKYGLVDFDEGLVRRLVEKITIFQRYMEFTFKDGEVIRVNM

SEQ ID NO: 13938 - protein, 520 aa, synthetic construct
MTEKNIMVIPARKRVGSTAAKEKIKKLRVAAYCRVSTETEEQNSSYEVQVAHYTEFIKKNNEWEFAGIFADDGISGTNTKKRDEFNRMIAECMDGNIDMVITKSISRFARNTLDCLQYIRQLKDKNISVYFEKENINTMDAKGEVLLTIMASLAQQESQSLSQNVKLGLQYRYQQGKVQVNHKRFMGYTKDEDGNLIIVPEEAAIIKRIYREYLEGQSLVGIGRGLEKDGILTAAGKPRWRPETVKKILQNEKYIGDALLQKTVTLDFLTKKRVKNEGHLPQYYVENSHEAIIPKELFLQVQEEIHRRSNIYTGEGKNKRIYSSKYALSAITFCGDCGDIYRRTYWNIHGRKEFVWRCVTRIEQGPEVCKNRTVKEDELYGAVMTAINKLLAGGNNMIKTLEENIHAVIGETTEYQISEINNLLEEKQKELIKLANKGQDYEHLADEIDELRDKRQILLVEDASLSGENERINELIEFIRKNRFRTLEYDDKLVRKIIQSVTVYEDHFVIAFKSGIEMEI

SEQ ID NO: 13939 - protein, 520 aa, synthetic construct
MKKITKIDELPQGQLSNTKLRVAAYARVSTDSDEQLESLKAQREHYERYIKSNPEWEFAGLYYDEGISGTKMEKRTELLRMIRDCKQGRIDFIITKSISRFARNTVDCLELVRKLIDIGVYIYFEKENLNTGDMESELMLSILSGFAAEESASISQNSKWSIQKRFQNGSYVGTPPYGYTNVDGEMVIVPEEAEIIKRIFAECLSGKGGGTIARGLNKDKIPARRGNHWSAGTVIDMLRNEKYMGDVLLQKTYTDSNYNRHPNTGEKDQYYYKDNHEPIVSREDFAKAQDLIDERAKMKCKGVKKNVYLNRYALSGKIVCGECGRNFRRKTNYSAGRSYIAWSCIGHIEDKESCSMLFLRDGEIKATFTTMMNKLAFSNKLILEPLFKSISQIDEESDRERMDAIDKRMEQLMEERNTLITLMAKGFLEPALFNQERNVLDSEMKNLSTEKTNLVSNSTSGVLRANEIKDLIDYVSADNFNGDYTEELFEEFVVNIIVNSRDELTFNLKCGLSLKEKVVR

SEQ ID NO: 13940 - protein, 453 aa, synthetic construct
MNENVTLIPARRRAGNRISKEENKPKLKVAAYCRVSTDSDEQAGSYEMQVQHYTEYIGRNKEWELSGIYTDDGISGTNTKKREGFNEMIDDCMAGKVDMIITKSISRFARNTIDCLKYVRQLREKNIAIIFEKENINTLEASGELLLTIMASLAQQESASLSQNVKLGLQFRYQEGKVLVNHEHFLGYTKDGEGNLIIDEDEAKIVRRIYREYLEGASLRDIAEGLERDKIKTGGKQYKWHLSTVRGILRNEKYMGDALLQKTITTDYIEKIRIKNDGTVPQYYVKDSQEPIIARDIFAQVQEEMIRRANLTSGKDGKKKRIYSSKYALSSICTCTKCGDIYRRIVWNNRGKKSTVWRCCTRVENGPFACDASTVKESELQNATVKAINQLLSCSDRMMRILKDNIETALADDNSDEIEKVNVILKKKQKELVKLAHAKKDYTALADEIDNLR

SEQ ID NO: 13941 - protein, 521 aa, synthetic construct
MARITKIEVARDFTEKKKTRVAAYARVSTKSDEQLLSLETQKEHYDNFISSNPEWEYAGLYYDEGISGTKVEKRDGLLALLKDCEDGKIDRVITKSISRFSRNTADCLEMVRRLAKLNIYLYFEKENIDTEHMSSELMLSILSSIAESESRSISQNSKWSVKHRYEEGTFIIGYPPYGYENKDGKMVIVPDEAEIVRDIFTMTINGMGTYVIAKELNRRGIPSKKGGKWCSTSVRGILQNEKYIGDVIFQKTYTDDNFNRHHNYGEKNMYLCKNHHEPIVSHEIFDKAAAVMEQRGKEKSIETGIGKYQHLYAFSGKIICGECGAKFKRRQHYKPSGKYVSWTCNTHITDKNACSMMFIRDEDIKLAFLRMIRKLQTAQTQVLKPFISDLKGTNNKGRLHQVLDLEEQIEQNAEQIMVLTNLMASGYIAPEIFHAEKNRLTLEADRLAKEKEVLSKSISGDLTHLDEAQKLMRFVSKKTEIKAFEDTLFLEYVDTITARSRDEITFNLKCGLNLTERLVRA

SEQ ID NO: 13942 - protein, 468 aa, synthetic construct
MEKLKAVAYCRVSTIMQEEGRSLEFQIKKCQDYCEFQNYELIEIIQDVESGGNDDREGFLELREKVRAKAFDVLVVFESSRISRVTLTMLNFVLELQKSNIHFVSISQPELNTTTPTGMLFFTIQATLSEYERKQISVRVKSNKWARAKAGIWQGGKLPLGYTKDPEDNNNILIDEENSFIVQNIFEYYIKTQSLAKTAKYFNRHLESIRWILTNPFYIGLFRYGKKENNINTGIVKTNSDYQYFEGVHPPIITEDIFNKVQSIINLKKKNIKSTFKLLFTGMITCTCGGKYFASKNGKKYNYRCSDCGKSISYRKMESSIIKNIFNMSELEDLNNANIKTENYQKEIDTIKKLIEKDKKNREKTLLLFKNEIISIDELKKEIDIIDSGINGKFKEIEKLESVIKYQNNNSEKINNIKILKETLEYMEDEDRENIYEIFKLLIKEIILLNKDEINLKNDNLKLQIFLN

SEQ ID NO: 13943 - protein, 421 aa, synthetic construct
MKLRKIEPLKPKQKKLRVCAYARVSTDCLKQGESFENQVSTYERVIKSNPEYEFVSVYADQGMTGRSENRPEFQRMIADCKAGKIDLIITKSISRFARNTTTVLKYTRELKELDVGVLFEENNINTLSSEGELMMTVLASFAQEESRSISENNKWTLKKKFERGEGMVNTARFMGYDKDETGDLVINKEEAKVVRRIFEMYLSGIGCHRIAKALNEEGIPTVAGTSWHASTIKGMLKNEKYKGDFHIQKTYIPEGSHQSVINNGQVQSYYVTEDHPAIISAEEWQQAQEMLEYHRKERNIGKGTKYKNRYPMSGMLVCPYCGKSLRRRYVYNRKVEWLCATYIHKGKEACKGIRIKDTELAGLSFSEPMVVEEVMIDGEKHYGYTSKRAYDAGERAADRIQEESSSVLPRVNGPRRTVIKL

SEQ ID NO: 13944 - protein, 577 aa, synthetic construct
MNQNYEMPESGTEKRVRVAIYVRVSTVYQIDKDSLPMMKQDLTSYCKYILNTDGYVIFEDAGYSGKNTARPAYQKMMSQIREGLFTHLLVWKIDRISRNLLDFANMYQELKDLGVTFVSKNEQFDTSTAIGEAMLKIILIFAELERNMTSERVTATMINRASNGVWNGGRVPYGYDYDKENQIFSINPEENVIYNFLLDTYEKTGSMVITARTLNDSGYRTRNNNLWSPVGVCIILHNPWYKGIYRYNYYKIPGRKAVKDQDEWVVVENHHPASIDPERFEHIQKLIASNARNRNAPGRKTTRKNTHVFSNLLWCAECGAAFVASPGKIRASGYRPSKYGCPNVRKTEKCHAKYVSDGTLGEFLLNYILNILNVQKNFASIQSIEDLQKQLLHGSTFENVDHINEDGLLSLYTMLEKFPGKESVLTRPVTVKPKVDPEIKRLVADQKKQQRALERLDHLYLYSDNPISEREYVIRKQQILDCLQEINETLGMTSQEHWTRIVSDNEFIRQASSFILTQKLSDRQYIYYDTLAESIQPEILKNFFLSLLDSVILKDGLPQTIVFRNGLCHTFTYKNNS

SEQ ID NO: 13945 - protein, 463 aa, synthetic construct
MARSVTVIPARNRQASGHRAVPQKKIRVAAYCRVSTDQEDQLHSFEAQVDYYTKYINDHENYEMTGIYADEGISGTNTKKREQFKRMIADCEKGKIELVITKSISRFARNTQDCLMYSRKLKNLGIGIIFEKENINTLDSTGELLFTILSSLAQDESRNISENCKWGIRTKFKNGEMHLNTFKFLGYDKDENGKLIINREQAKTVRRIYRDFLWGLNPAQIAKELEEEQVPGCLGQTKWYASTVIGILKQEKHMGDALLQKTYTADFLTKRQVKNNGEVAQVYVKDSHKGIIDKETWNAVQEEFDRRKKFMQRHGTDRYSYGSECYPFCEKIFCGECGSLFTRHSWKSRGIVQWQCKNHRKDGKVACTNAYVDNANLENGFVKAFNRLVSEREKHMERWNAMKADGTPLEKIRAVQMMEATENGQLQKYVPEAAQLVLEEITIFGAKKYEFAFLEGSRVKVSV

SEQ ID NO: 13946 - protein, 470 aa, synthetic construct
MARSVTCIPARQTIATEGNTIEIPKKRVAAYCRVSTDEDGQLSSYQNQVQFYTEHIKSNRAYEFAGVYADEGISGTNTKKREQFNKMIQDCKNGKIDLIITKSISRFARNTLDCLQYVRELKEIEVEIFFEKEHIFTLDSKGEVLLTILSSLAQDESRSISENTTWGVRRRFEQGRVTVNEKKFLGYDKDEEGNLIINKQQAKIVRRIYTEYLNGKGPTRIAKELERDKVKGVTGTTKWYASTIDKILRNEKYKGDALLQKTYTVDFLTKKRVKNDEGKVTQYYVQESHPAIIEHEMWEAVQLEIERRKQYVEKHKLQKYDYGLEDTAFAGRIICGECGRGYYRKTWHSNSKPIKLWQCGAKYQEKGKIGCTNSHIYAQKLNEVFINAFNALVENKKAFLSKWKGELQGADVLKAYRLRQFIELIAEADMIEEVDKELVFKVLDKIAVIDKGQVIVKFLDGTELECKMES

SEQ ID NO: 13947 - protein, 664 aa, synthetic construct
MAEGPPVKPKKRKGRAVRVDSSPFLMQERMGIELMAKNKKAGFEPDMQDAVIYTRYSSHNQRDCSIEQQVADCEIFARQNNLRVVKVYADRHLSGTTDNRPQFQQMLKDATHGHWAYVICWKIDRFARNRYDSATYKFRLKKAGVRVLYAKESIPDGPEGILLESVLEGSAEYYSAALAQNIRRGMKYNAEQCKVNSGSIPFGYCKGPDGRFAIHEANAEVVREIFRKAAAGMPFVDIANDLNSRGLKTSRGGRWNKGSFRLLMNEAYIGVYHFSDTRIEGGMPALIDQGTFWAANERLKANSSVRGRHQDGGDYLLTGKLKCAHCGSYMIGFSGTGKSGELHYYYGCQKRRRERACKKANVPREWIERAVVKAALDYVLRPDVMEWIADAVMEYQEREAASAQLAALTAELEENQKATDNVMKAIEAGIITSTTKQRLLDLEAKAQDLKRAIELEKLSHVRLERDQVLFWLDRFRGGSLQSQEFRRKVIDAFVSVVYLSDDHLRIAFNYSGGSNAEADFDLVMDAEAAAGELSKKFAQGHVASTKREPDEPSVLHQREEPHRFAVRLFPFHLMAFLSHEIKQHVDVLTDGAEIVSSAAPAVIVPDAAAHLIQELFLPHQNGVSDPLVFLYKSFQLLIFFYDTDVGQVLREGTGIEPVRLRVKV

SEQ ID NO: 13948 - protein, 520 aa, synthetic construct
MKRVYCLYRVSTKGQVDKDDIPMQKTSCREFAERNGWTILKEFQEKGVSGFKVSASDRDAIQDLKSAAEKKEFDVLLVFMFDRIGRIDDETPFVVEWFIKHGIEVWSVNEGEQRMDNHVDKLMNYIRFWQANGESQKTSARVKTRLNQMTLDGKFTGGVAPFGYKLIKSGEINKKGKELMDIVIDDDEAPIVKKIFEMTVKEGYGSYRMADFLNSHGIRTHNNSKFQCNTVNRILKNRLYCGYLVSGGVESPYIERLHIIDENIFDQAQFILKQRSSKNEEKQQIARTTKGSTLLSGNIYCAHCGQKMVSTSYIDRYDRADGSQYRVRRQRYICTNKAMKRGACDGQSAYVAHRIDSAVLATLRDYLAKIKSTPKDIALEKRYKSEISEYRRKQTKLEKEIEKLKRQVVELSAEIGRSLLGESRFTPDILSTSIDNTNDLLHKKEIELSDIKFKLANQQNAMGRLDFYYSQFRTWADEFDNSTMEQKKMIACQLIREVKVSRGYELEIIFDLNYEQFLSL

SEQ ID NO: 13949 - protein, 521 aa, synthetic construct
MPTSKNTARKYAAGGSSDNSCGVEPLRAVIYARYSSSGQREESIEGQLRDCYEFAKKHGIIVIGEYIDKAMTGRVDRRPDFQRMMKDSEKGRFNCVLLWKMDRFARNRYDSAMYKYKLKKNGIRIFYAKETIPDGPEGIILESVMEGYAEYYSENLAQNVKRGNYDSALELKTLGKTCLGLKTGPDGRYMIDQAEAAIVRRIFEEYAEGERAKDIYERLNSEGYRTSRGGKFNKNSLRRILSNKKYIGVYEYEDIYVENGIPAIITDRDLFERVQKMLKINHDAPARGKAQNFLLTTKLFCGLCGSPMIGDGGTSHTGKAYAYYSCTKRKRGRSCKKESVPKDWIEDLVVGELVKIVHNDELIEQIADRVMEYQKREKDQSGLHALEIRQKENEKAISNMLAAIEAGIITPSTKTRLMELEADRADIEKGIAHELLAEPEFERDQIIYFLERFRSGDINDEAYRIMLVDTFLNSVYLYDDDHLVLVMNYSGENCKVDLKLVEGAVSGDGCKGSAFAPSSAF

SEQ ID NO: 13950 - protein, 543 aa, synthetic construct
MLKYLKNDNEIVAVYCRVSSDEQADKGTIENQKEYAEKYVRLNMLNVYDYYLDDGVTGTLPLQKRPEGKRLLEDAKAGKFNLVLFFKLDRLGRSVRVILNAVYDLMELNVDVRSMTEAFDTTTPSGRFTLNTFAGIAELERDTILTRMRMGTIRHAKLGKWLGGPVPYGYTLENGYLEISRTKIPGLTYSEADIVKLIFEKTVYEKMSAEAIADYLNNLCVPTKYKILNRKLITSGYWYPSRILSMLHNTVYYGVHIFGQMSKHQKPEIIKQTNPAIVDIDLWDAAQKQLTSNKLLAARCRKNDYLLSGLIKCGLCGRTYIGTGYAGSKKEKVLYYVCNDKNRYHPDKNQKICQSQNLRADWIENIVWNDCLSYIMQPDKLYLENKAQNLTDPKDELNALEQTAVKLERERSSILDLFRKKIITENDLKNQLDKIAKEQDKLNRAINDKKALISKIDKINSNMIKMVDLLKSFQKYISDNITFADKRKIVEALVENIIVYTDYDNGQRDIPIVTIAINYVFKNEKNPLKRNYQPSSKQNIHGF

SEQ ID NO: 13951 - protein, 514 aa, synthetic construct
MNTVIYARYSAGPRQTDQSIEGQLRVCTDFCKQRGLTVIDTYCDRHISGRTDERPEFQRLIADAKRKKFEAVVVYKTDRFARNKYDSAVYKRELKRNGIQIFYAAEAIPDGPEGIILESLMEGLAEYYSAELAQKIKRGMHESALKCQSTGSGRPLGYRVDEQKHFQIDPESAQTVQTIFEQYIKGESNAAICELLNSRGLRTAQGKLFNKNSINRIIKNRKYIGEYRYHDIVVEGGMPAIISKDTFNLAQAEMERRRTRKAPKSPKAEYLLAGRLFCGHCKGPMQGVSGTGKSGNKWYYYYCGNTRGKNKTCDKKQVSRDRLERAVVDFTVRYILQEDVLEELARKVHAAQERQNDTASEIAFYEKKLADNKKSIANVLRAIESGASTQTLPARLQELENEQAVILGELSFLKGKRLAFTEDQILFALMKHLEPYPGESEQDYRRRIISDFVSEVYLYDDRLLIYFNISSEDGKLKSADLSNIEGGEFDEGLISSTKKDIAFCSVFFLLYVQF

SEQ ID NO: 13952 - protein, 586 aa, synthetic construct
MAYRKITDIRDTIGMRAVFYARVSTAEEEQLNAIELQIEENRGCIKDHGWKLVGEYIDRSKSGTMVKGRDDYQRLYEDLYEDLFDIVVIKDQERLQRNTLDWYLFINRVVQTGKLLFMYMDGKFYSPDDALITGVRAIIAEEFSRNLSKKLHNYHDHRIEKARQGQEIALQGSGNVYGWDKKDGKYYINPEQAKVRRLMCEGIMARKGSTLIAKELNDAGYRNTVGKPWKPMDIPKFVYDCKNVGTMIINKERHDFESKQTIKLPKEEWVYVENALPPIVTQEEWDLICKIHEERVIATGSDRRGKKTSGYSFSGKLVCGICGAPYWRKQRVSKDEYWVCSTKQTKGRRTRKRDSTMGKAGEINPLGCDNENISYNSLMEIMGVVSERLQANTDTIKQDIINWLTKLRKQLLEANGGHTEADLQREISRKSKLLDAYLDGILNKQEYQKKAEELDERIIQLKAETEKNKANSGDIAEIDKVLANIDEEVSRYVDGNEKLKVEYLLEHLEQVQIFPDKVIVIVPILSEGIVVEKTQYVSREKRSRKKHNHENALRAYQPGPRNDCHRRKRNERHEPDFHFKAGGITD

SEQ ID NO: 13953 - protein, 509 aa, synthetic construct
MFENNLKTAAIYARVSTTRQAEEGFSLPSQIDACVRKAKELGISNIIKYVDNASGTTLDRPALTIMRKAIREKKIDIIICYDQDRLSRNLGQQLVLTEEIEKYCQKLIFICGDYHNSPNGRLFYAIKGAKGAIAEYEREKIIERCIRGKKEKYKKGKTSNSHLFGYQYNPITELYEINTDEAVIVRRIFKLYINGMSSRQILRQFQIENIPKYFQGKNVGWNDPSAIMRILKNDSYTGVFHAWKHNSHNSLKKAPKQRYKDTSEWINVPIPAIISEEEFILANQIIKENTDRSTRNEKRIHLLSKIAYCTCGRKIYVRPNNNKDYYYCSSKSYKKRNEIDIPFCPIAKYMPADKIDNIFWDTLTKICISEDTLQKYINRQQEDSNINEIQQQLLDLKTLLQKKQTEQVSILEWYSNQLIDEDVAKLKLLKLKNIITELKSQQQILSNKLNNKNKPQKIYDIFKQERKITLEEKRNLIRKIVDRVYLKRTDPAISSNKYDIEVDLFIIFK

SEQ ID NO: 13954 - protein, 519 aa, synthetic construct
MRNVAIYVRVSTMHQAEQGYSIDSQLVDCRKKAHDLGAITINEYVDKGKSGAFLDRPELQRMLNDIKTEKEYYDALIIYKLDRLSRDSMGLAYIIKILQQKNIKIISTDGAQYGTNPQDVLTMQIMGSIAQFDNALRKERSIRGKIEKRKQGKLDKITKYGYIFNDEKQNLDIKEDEAIVIRKIFKWFTEDNLSAFRISKKLNSEKIPAPQPKINRKIINKDNIWFESTIRTMLKDETYAGIRHTMIYKFEKISLNNMKKTKRPPEEWISVPVPSIISRETWDKANNIMNRKNTNPRRTQRTWILQGLVYCEKCGQIMNIKQTPKIGKIKENEEKYNFYFKCRTNILNWFGSDKKCPNRQVPIYALEDSVWETLLNIFYSKETLEKYLKETQVKDNVYTLLDKLIEDRNKLSKNKNKIVEWFADGKIDQEIADNKINDLNNKINDLDKKISNLQSTNRSKKSFSINNLYDIFHKIKNPNRKQKKEIIHSVVEKIFVERLDNKRSNAYTKPVLKIRIILR

SEQ ID NO: 13955 - protein, 489 aa, synthetic construct
MLKTVIYARYSSDKQNEQSIEGQIHECEQFAKTHDMVIIKHYIDRALSGKTDDRPSFLQMIKDSSSGLFDAILVYKTDRFARNRYDSAVYKAKLKKNGIKIFYAKENIPDGPEGIILESMLEGFAEYYSAELSQKVKRGIKENIRKGLSFGGACPFGYKIVNKKYVINDEQAPYVKKIFEDYAKGRRAIDIFNELNTLPNYAGKGRKWNRSSLNRMLTNKKYIGIYELEDVCVKDAIPPIIDEALFNKVQSRILFNRRHTTRAKVNYLLSGKLFCGLCEHSMTGKTGTSKTKVKYHYYVCSNRHCKQKKYRKELLEDIIIQYTVKDILNPKHFKMIAKKCLEIQQADNKINDILLMLKKQLTATKTKINNLMNAIEAGIITTSTKDRLEQLEQEKYKLELEISAQQLNSNRLLSEKQIIYMLNVFYNKRVDVSFYNQIIDCFIYKIYIYSDKICIVYNLNNSDKDVTYSDINELYKSSHLNSCGSPYVN

SEQ ID NO: 13956 - protein, 520 aa, synthetic construct
MKRITKIEENKALSLKKKIRVAAYCRVSTASDEQLISLEAQKAHYEDYIKSNDEWEYAGLYYDEGITGTKKECRDGLLSLVDACEKGMVDLVITKSISRFSRNTTDCLELVRKLLDLKVTVIFEKENINTGAMESELMLSILSSLAESESVSISENSKWSVQKRFQNGTFIISYPPYGYKNENGEMVIVPEQAEVVKQIFADTLAGKSTHAIAKELNERGVASKKGGNWTPGTINAIIRNEKFTGDAIFQKTYTDSSFNRHLNKGECDQYLCKGHHEAIVSHEVFEKANEVLDQRGKEKGNGVNTQRYQNRYGFSGRIRCGECGGVFKRRKHYKPSGNYVAWCCTRHIEDKNSCSMKYITDEGIKAAFLTMMNKLAFAHQIVLKPLLHNLQGLDDKDRLLQIQEYEDKLEKNTEQRQVLTSLMASGLLEPALFNSENNRLVQEEHRLQNEKSNLMNSVSGDRTKVDALKKLLKAVSGGRTFTVYDDDVFLAHVESITVVSRNEIIFVMKCGLKLKERLVG

SEQ ID NO: 13957 - protein, 584 aa, synthetic construct
MRCLPLQHSTLFGYGQAKAPALVRCSAGDNMECSTKPDKENFMLAGASIPRSLHMGNRPEGSVIMPRKKSTAADAPRLVAYYRYSSGSRQTEQSIEGQRRDCEAYARAHGMTILREYVDRHISGKTDDRPAFQQLVADSAAHAFDAVICWKTDRLARNRYDSAVYKKKLRDNGVEILYAAESNISGAEGIIIEGLMEALAEYYSAELAEKARRGMRESALKGKALGSSRPLGLTVDADKHYIIEPTGAEAVRYIFEQYAAGLSSSSIVERLNAMGLRTGHGGPFNKSSINRIIQNEMYRGVYVSKKFDVRIEGAIPAIIDNDLWERAQKMFERNRQSRTPHASRADYILSGKLYCGECGCLMKGVCGRSSGNGQMYHYYACPGRSIGRACTRKNIPQDELEAMVVNAVADLLLEPALLEQIADAIVELQQAEAARPDPEKQALEKSLSDVRNKIQNILSAIENGTSSAALSARLADLEQQESTLSYQLSSLDAKKPLTFTRDQILFLLQQFRVSPSERTKAYCRRLVDTFVDHIELTNTELILHFNLSDETVDKNKKAPRSNPSEESSTEKRLVRVARIELTAS

SEQ ID NO: 13958 - protein, 525 aa, synthetic construct
MNRAVVYARFSSDNQRDESIDAQLRAINEYADKNNIKIVKVFADRAKSATSDKRPEFQNMIKFCEADTTGISMVIVHKLDRFSRDKYDSAKYKHKLKCNGIRVVSVLERLDGSPESVIMESLLEGMAEYYSKNLGREVMKGLKESALKHQTHLGGTPPLGYDVAPDKTYIINEEEAQAVRIIFDRYVNGYSYSQIIDELNELGYRTKRENKKFGKNSLYSILTNEKYTGVYVFNKTQRKGVNGKRNGHKMKSEDEIIRINGAMPQIIDNDLFQQAQEMIKRRKKAPGAHKATTFYLLTSLIRCGECGYSYQGNKRKDKYGNDYISYRCGCRKQKRDCKNKEIKRDYLEEFVLTELEKHILNDEAIPVLSKALNERLKTKSNDNHEMLTNLRNKLEKVNKEIENILNAIMSGIVNNVLKNKLDELEKVKLNLELKINELSVESDDVVSVDITEDQIRSMFIKFKEFVLTRNLPECKKFISDYVKEVVVYRDHIEVIFNVVFSFVDNEITHNLHITIIRDKIREFVR

SEQ ID NO: 13959 - protein, 497 aa, synthetic construct
MNVVIYARFSSHSQTEQSIEGQLKVCYEYAESNHYTVVGEYIDRAISGTTDNRAEFQRMISDSDRHTFEGVLVYQLDRFARNRYDSAINKAKLKKNGVRVLSAKENIADDASGILVEGVLESMAEYYSVELSQKIHRGMEINAQKCLSNGSNPGLGFKVDAERRFYVDEEEAAIVREIYERYASGKTKAEIIRDLKRRRVKTSLGKEFSPNSLSRLLSNKRYIGVYLYKGKETPGGMPRILDDDLFYRVQSMMNKNKSAPARTHGEGEYLLTTKLFCGHCKEMMVGYGGTSKTGRQYHYYMCKNARRKKCGKKIVSKSYIEDRVVNECLKMLTEEKIRFIAKKVAEECTKSPDNLTAKALKKAIREADTAIENLWKAIEQGQAVEMLTDRLNKRMAEKAQLAIEENKKITLTEAQILAFLDYVCEMPADDVNKRRAIINIFVHSIYLYDDHFTLIINASKKPLSIDNIPLDDIETAFEGETGASEGCSSLSTPAPPL

SEQ ID NO: 13960 - protein, 546 aa, synthetic construct
MEETIKAVGYARFSSSMQREESITAQKRYMMMYAKRNNMEVIDWYCDEAKSAKTVNRPAFQKMINDAKNNPEFKAVLVHKTDRFSRNLSDSIQYKKILEEYGVQVIFVNERFEDNPESHLLYHIMGSVNQFYNENLAREVMKGLKENAYQCKFTGGRPPLGYDVDKDLKLVINEKEAEAVRLIFEMSAEGYGYGETIDKLNILGYKTKKGLPFVKNSLYEILRNEKYKGTYIFNRSCSANSLNKRNNHRRKPEEEIIRIENGCPAIVSSGLWHRANAVKKATRSSYTNAKNTYLLTGLIHCGECGGKFHGNVRYNKNNTNLVYRCSSKKNKRKCESKEIRFEYLDSFVIDKFVEFFFNDDNIKVITKQLNEQYNKSCISDLEYNEAKSTLKILEKSRNNLVEAIAKTGINDIMSDKIKEYEEQIKKTSEFIHKYEKQKIDRVITEDEVREQINHLKDYFYNPKNIIRTKFVLSQYIDRIDISNENVQVHFKVSMSPSGNTDGDYFFVHTETIKRKYLFDYVCEKVDFEQWNIEKLNKSETEHRKGA

SEQ ID NO: 13961 - protein, 507 aa, synthetic construct
MSESKAVIYARFSSDKQREESIDGQIRECTKFAEDQGLEVIGTYIDRAMSARSDNRPDFLRMIADSARGQFQYVIVYQLDRFSRSRYDSAVYKNKLKKNGVRVLSAKERIGDDPSSIILESMLEGYAEYYSAELSQKVKRGMTENVLEHKWTGGYVPLGYCLAPDKTLQIDPVGAEAVKIIYDKWLAGCRIMDIVRYLNDHNYVTSRKAKFRYSSLNRILTNPIYTGLYQWGSIEVSDYAPAIITQKQFAMAQEKIHHIKAHPRAKRRSANYALTGMIYCGVCGSPMTGQSGHSKSGALYHYYRCSTKNNYHDRGKKLNIKCTNRNISRDKLEDLVLQTTINILMNQEAVRMIAKQAVAVQQKDPAATEIDRIKEDKKIIQKKLNNSIKAVEAGIISTTLAANIAQYEKEIADLDIKMEKIKLSSTPVKIDEIAVEFFLKNLLLQKKEHDKYRLDMFQTFIRRVIVYPDKVEIQYNYTATPHILENPVTKMMTGNSGCSHCERLVTR

SEQ ID NO: 13962 - protein, 453 aa, synthetic construct
MECVAYIRVSTERQVEEGYGLESQKRDIEEYCKKNEMLITDWYIDAGLSGMDMSKRVELQRLISDISKINDIVVYKLDRLARDSVDALYMIEKLFTPKGVRVNSVHDFARYETPQDKFQTHIMAAVAEYDRNTMLLRMRGGMLERVKNGYWMGGGNTPYCYRYDKNLGYLVPIPERAEQANRAMDLFIDGMSDVKIQRLLGYKSEFVVRSIMTGIVNIGYIPYKGGVYKGLHEPIFDREKFYLAQELRKSRRKQHIYCYTEPHLLTGLCYCRECGCKMRYQKITGMGIHKIYCCSHNSYLDYLPNHNPDCNNPGAWASDVEKAFEQEILEISINLSKYKPKAKETKLQILTNQLEKQKAKLKRLYTLYAEGNDMVLDMIKTLETEIRETTEKISAERKNGQHEQKKEFVYENIKKLADIWDGISKSQKNSILKTIIDKVIVGKDDIEIQLKNF

SEQ ID NO: 13963 - protein, 499 aa, synthetic construct
MNVVLYMRYSSDRQTEQSIEGQKRVCMDFCERQGYNVVGEYIDRATSAYKETAKRTNFCRMIRDSSNGLWQGVVVYKLDRFARNRYDSATYKVRLKKNGVKVISATENISDSPEGVILESVLEGMAEFYSKELSQKVSRGLNESAYKCNSTGGAIPLGYKTVDKKLTVDEPSAQIVKEAFDLYAGGATISEICEKFNSQGYRTKKGTEFNKNSFKTMLRNEKYIGTYTYKDIRIEGGIPAIIDKETFETVQKRLSANAQAPARGKARVNYLLSQKLFCGHCGANMTGDSGRSKTGETYYYYSCSTRKRFHSCKKRTIRKDLIERIVAENAMRLITPEMINTIADMAIKCNREDIESDAIIPALTADLKEINTSIKNLLKMVERGVESETLDSRLKELEKRKKDTELRLDAAKSEYLTLDKTVIVGWLSQFLSGDIEDEDFRRHLIDTLINSVTVWDEPDGGYKITTVYNLKGNTQTYRVNADGSSDMKRNSPPKKRQFS

SEQ ID NO: 13964 - protein, 517 aa, synthetic construct
MLRAVIYARFSSDMQREESIDAQVRACKNYCQSKGYLVIGQYVDEAKSGRELTKRDAYNQMLADALEDKFDIIIFHKIDRNSRNELNYYTTKDKLEKLGIRYEYAVQHIDASPEGQMMEGLLVSMAAYYSRNLSKETKKGLNENAYKAQFNGGTAPLGFRIVDKHYEIEPIEAEAVRLIFKLYLAGYSYIRICRELELAGCKKRNGKPFDKTCLYDILGNEKYIGRYTFNKTPRAKNGQARNSHSKRRPDDFIAIDNALPAIISKEDFAAVQAKRETNQRRFSSYKAVEPYLLSGKVICGYCGSAMSGHRVAPRNGEPYGYYYCLKKERVAGERCPQKYIRAEKLEKIAIRALEEEIFSEASMKKIAALMREGYAAMTNEADESRKALLQAKAAAEKKLDNLYAFIENGEVDEYSLARMKKIKDELAKIKARLCETSVKFSKILTEEEIFATLAAFKKDLESNADNSAKRFVVNLLINKITVRDNCATVEILPNMLTVYLVPRTGIEPVRVSLPEGF

SEQ ID NO: 13965 - protein, 676 aa, synthetic construct
MAYTIGKNKTIKLWTSKKAALYVRVSTRYQVDKDSLPFQRKKLKEYCKFLEINDYVIFEDDGYSAKNTDRPRFQEMMSRIRSGEFSHVIVWKVDRVSRNLLDFAAMYQELKDHKVTFISMNEQFDTSTAIGEAMLKIILIFAELERNMTSERVTGIMLDRAEQGLWNGARMPIGYRWNEQTKFPEPDPEEVKIVQLIFDRYEEWRSSIKIARFLNNNNFKSKRGGEWTSRLIYDIIRNPFYIGTYRYNMRESGRGPLKPESEWVIRENNHPGIISKEQFDRCNKIMDENAARRDTSDMRARKFVHTFSGHLICSECGSNMIACKDHARANGWRPSIYRCAKRSRMMTCDNSKTVNEVYLGSFVFNYIANLARIQKNLKNLTSVKKLESELLKGNTFESVSGIDPEGLNLTFQAFLYSHPGKGTYLPDIALLNKSDDTKSRDQINLLSAEIEKSKNAIARLTDVYLYDPASMTKEEFAVKKKELIKKIEGMEHQLTELSAHSENTDLTDLSFIKKASAFLVAQRIISKSFIDYVQLAQELDNAILKNFVDQIIDQIVIKDGRIQSITFINGLTHEFFYNGPAELPVCKKCGGRIGSTCGCRTRTFSFNGKRFQRIKVGDPRDALYGQKNPVCPECYAKDGRWHHWMCGIERCPICGKPLQTCEHGVNGKSKFSFNQL

SEQ ID NO: 13966 - protein, 535 aa, synthetic construct
MAKKVVKKITKIEPVSSGSAANAVEVKRVCAYCRVSTNSADQKNSFEAQVDYYTRLIGEKEGWVLAGIYADEGRTGTKLYRRDDFQQMMEDCRQGKIDLILTKSVTRFARNTLDSIKAIRELKALGIGVYFEKERVNTLMEKSEQMITILSSIAQGESESISTNNKWSVVRRFRNGTFIISSPPYGYENNEYGELVIKKEEAEIVRWIFDEYLGGKGSYTIAAELETAGIPTIRGAKEWLDSVVKGILQNCAYEGDLLLQKTYTTDGVPFIRKNNRGELPQYLIADDHEPIITREEAAAIRQIYVYRRERQCVEDASVYQNRYAFSSRILCGECGTKFRRQKIYIGKPYEKIQWCCYQHIKDSKKCSQKAVREDVIQAAFLTLWNRLASNYEEILIPMLAALKAIQGNPEQDREMQEIEQNIQELKRQGYRLGRVLTEGSISSAIFIERQNQIEAQLEANRRRLRQLKGQKAFEWEISQTEYLISVFRNRPAILEAYDEELFLLLVERITVLPGRRLVFRLKNGLELEENEQEVS

SEQ ID NO: 13967 - protein, 507 aa, synthetic construct
MQEQQETSYEAQVNYYTEKINSNPEWVFAGIYADDGKSATMTRKRNDFQAMIDDCMAGKIDMVITKSISRFARNTVDSLTHIRKLKAKNIAVYFEKENINTLGDGGEMLITILSSQAQEESRNLSENVHWGYVRQFENGVVYVNHNKFLGYTKDEEGNLVIVPDEAKLVRRIFRLYLEGNSINKIAETLTKEGIRTVTGNTVWHATVISKMLMNEKYMGDALLQKTYTVDFLEKKRAVNKGIVPQYYIEGNHEAIIPRELFYQVQEERARRANVYRPAKKKGTTIRGKYSSKYVLADIMYCKECGQPYRRQVWVNGGAKKPVWRCYSRLKSGTKKCKHSPSLEEKALHEAIMEAVNSVVKDEGEFIDAFRDNVIRILGSYSDNVEPTEYDEKIDALQKQMLALIEDSAKTESADEEFDRVYREIADQIRAFKKKRTELIREKQLAEAYDQRVEGMGQYIQKTNYLKCQFDDELVRRLIKAIMVISEDKIEIQFHSGIVMSQRINEYD

SEQ ID NO: 13968 - protein, 462 aa, synthetic construct
MSFFTPNPQLFGLRVVKYIRCSHDDQVLHGDTLEAQDLILEDFIKVNRMILVDTFIDEALTARKKFNKRKEFVRLLDGVKAHSFDLIIFTKLDRWFRNIGDYHKIQEILEANGVQWKAVTENYDTTTTNGRLHINIRLSVAQDECDRDSDRIKDVFAYKLKNKTYVSGSLPRGLKLDAEKHVIIDPEWNCFALDMFDHFEATCSKRDTQLFLQDKYNIRVCYDTVARYLKNPLFKGQYRDDPDFCPATISPERFDRIQKLAIRNVRIRHTQQFYIFSGLLICSSCNHIMTGTVTYRRMADGTEKAYKSYRCNFKAQSKLCDRGKTYREEYVEEYMLNHIRPALSDYVAKYEVTAASAVQKNPVEEMSKIERKIKKLYDLFIDDLIDKDAYRSEYDKFKKQIEELQKCPAAPVRNLDSVRKLLNDDWEAVYNTFSNQEKNVFWKSFVESVLVHEDGSMDIHFL

SEQ ID NO: 13969 - protein, 523 aa, synthetic construct
MRFFSYGRKSVFSDKSDSIDNQFRMSREYCDTKFSGQVDSWQQFSDEDFTGANTQRPDLQRMLSFIKNGFCDVLVVYQLDRLSRDVRDFANIYSLLEEHGVMFVSIKENIDTTTPIGRAMMYVTVVFAQMERETIAARVTDNMLGLAKKGYWTGGNPPRGYVRKHIVVDGKKHCSIEPDPDGVRYVTRIFDTFLAMNCSLQGMETRFKNQGIRTESGKFFSTTQLHKILTMPYCVEATPEVYDFYAAKGCIMDPGSPREMWDGSVGVIIYGRSTEKNKKHQAQPPEKWTVCLGMHKPFMPAEKWLAVQARFGQNKCIKDAKWPVPLLKGVLRCKCGNLMQVSRKKKVDGTCSSWYYCRKRMRQGVDACDMGQIKCDLLDEEVLELFRGITADPALIQKFVKAEAPADVPDLKAAQARVSSCERKIGRLAASLALAEDSAASKYIIAEMERLDVELGALKREASLAEMESHRAAASAKDAKATAVEIAKLIHGLEGFDDKEKNAIARAVIQECTWDGERLFITL

SEQ ID NO: 13970 - protein, 523 aa, synthetic construct
MVSFDSIIIYLRKSRSDDPAQTVEEVLAKHERILQDYCMKEYGKAIPEKRIYREVVSGETIQDRPIMQQLLKELEAENISGVLIVEPQRLSRGDLQDCGQIINSFRYTNTAVITPGKTYDLSDEYDRKFFEMELTRGNDYLEYTKKILSRGRVASVRQGNYICSVRPYGYRKITLGSGKDKCHTLEIIPEEADVIRLMYHLYIDENMGFTNIARTLDSLHIKPLKSDNWSAATIRDMIDNPIYIGKVVWNSRKVVKKWENEQITKVRPRNKGDDVICVNGRHEAIIDERTFEAARNKRGLTPKVKKFKELRNPLAGLLFCGTCGHGMSMKKYVDKRSHTGKITTVMLCNQQAVCHTKSAQYEDILAKIKISLANAISDFKIKLKEQENNNIDMHELRIASLEEELNRLYNKDVRQKDAYEDGIYTKEEYIERNSKLQERILNVKEEIADEKNNVPVKIDYEDKIMTFKDCLSSLDDSDISAADKNILLKSCIDKIIYYNDMPSKPGIGRYIENSFRLEIFLKL

SEQ ID NO: 13971 - protein, 513 aa, synthetic construct
MPEVRLITPITRQSTKKMQVAAYCRVSSNSADQLNSYAAQIRAYKKCIGARDDWELVDIFADEGLTGMKSETRDEFQRMIRMCELKQIDLIITKSISRFARNTKDALAYVRKLKLLGVGVQFEKEGISTLSMGDEMLLNTFSALAQEESQSISMNQRLSIVKRMELGEYVDSNAPYGYRLVDKALAVYEPEAAVVRDIFDLYLRGFSISEIGRELKSRNIPTKAGKESWHPYRIAYMLKNERYIGDSFYQKTYRETTVPFNQHINRGQEDRFYAKGTHPGIIDKDVFNAVQQLIQKRKETFSRTTTQNIYPLTSRIQCSECGSFYRRRSVSGTVKWVCALHKDDSAACDSHYYSEERIYDGFITMVNKLRFSEDNILGQVISRLEMTLAAMKRNNLVARDLSNSIAELNAKLLMLEQLRSKGYLAPEVYQAQANEIGAELAKLKDVRQKKFNSKAASMLEEVKKLKMLIFELEEPLEAFDEKLFLEIVKSIQINKEDEMSVEFLGGLRFRERI

SEQ ID NO: 13972 - protein, 525 aa, synthetic construct
MAEVLCIPKTIPERTGYQIRSIRVCAYCRVSTDADGQYHSYDAQMEYYRGLIQKNPAWEFCGIYADEGISGTSRWGREDFQRMLEECEKGRIDLILTKSITRFARNTVDTLSTVRHLKEIGVSVYFEKERLNTMTEESEGILTIYGAVAQQESENISQNVHWSAVNRFRHGTFVISRRPYGYDKDEAKELAVKEDEAVWVRRMASMYMNGMSGVRIAEYLNGNRVPAPYGGLWSSEAVLRILFNEKTVGDCLHQKTYSTGTVPYRTEKNRGKKPQYFIRDDHEGILSRDEQMRLQQIKEHRLGRQARMNPRGSGETYILSGKVVCGECGRTFIRKKEQRRKGVSIKWRCPGHRSEECQCYTNEIWEVDIKNTFVNAFNTLVGHADELFGPIIQGVKRIQEANGLHEALGTLNQKKLELKEQRHILRQLKANECIDSALYFEESRKIERELSRCRSEEKQLHSRGTHQDTITGLQATLHQLQGYDGKMQAFDGDQFILLVREVSVGKERELGFHLRCGLNLYEPVL

SEQ ID NO: 13973 - protein, 523 aa, synthetic construct
MPTSKNMARKYAAGGGSDNSCDVEPLRAVIYARYSSSGQREESIEGQLRDCYDFAKKHGIIVIGEYIDKAMTGRVDRRPDFQRMMKDSEKGRFNCVLLWKMDRFARNRYDSAMYKYKLKKNGIRIFYAKETIPDGPEGIILESVMEGYAEYYSENLAQNVKRGNYDSALELKTLGKTCLGLKTGPDGRYMVDQAEAAIVRRIFEEYAEGERAKDIYERLNSEGYRTSRGGKFNKNSLRRILSNKKYIGVYEYEDIYVENGIPAIITDRDLFERVQKMLKINHDAPARGKAQNFLLTTKLFCGLCGSPMIGDGGTSHTGKAYAYYSCTKRKRGRSCKKESVPKDWIEDLVVGELVKIVHNDELIEQIADRVMEYQKREKDQSGLHALEIRQKENEKAISNMLAAIEAGIITPSTKTRLMELEADRADIEKGIAHELLAEPEFERDQIIYFLERFRSGDINDEAYRIMLVDTFLNSVYLYDDDHLVLVMNYSGENCKVDLKLVEGAVSGDGCKGSAFAPSSALTF

SEQ ID NO: 13974 - protein, 538 aa, synthetic construct
MVKKVTVIKAAKAQKHTQEERRLKVCGYARVSTGSQAQATSYTAQVEYYTEKIESNPLWEFAGVYADEGISGTNVKHRDEFQMMISDCEDGNIDLILTKSITRFARNTVECIQTIRKLKEIGVGIYFEKENINTLSEKSELFITILVSVAQGESENISSNNRWAIQKRFQDGTYIISTPAYGYGKDEDGNLVIIESEAETVRWIYESYLNGMGVYVIAKALNQKGIPTIRGAEKWQDGVIQDILKNPIYEGDMLQQRTYTETRFPFVRRVNNGQRNQYLIKDSHLPIVTHEEAEAVRNLMAYRVDVLHMNKSDYTKRYLFSGRIICGECGRTFRRQKIYIGKPYEKIIWTCSGHVEDKESCCMKAIREDVLHRAFTDMWNKLYTNQGTILEPLLKGLTELVAARQDSEEIRQLDKEIKDISGQSQILNQVMRKGYMDSALFMESSSKLGWQLTECRRKKTLLTRKLRRTKEIVRTEQLIQLIAEQDGLREEFDEQLFKMTAEKIVVSKEHDITFCLHNGLKLTERGGGQDAVAHANRL

SEQ ID NO: 13975 - protein, 544 aa, synthetic construct
MAETAKKISMIPAKVQYDRNVKLSEKKMKVAAYCRVSTELEEQDSSYEAQVEYYTSKISENENWKNAGIYADDGKSGTNTKKRADFNAMIQDALAGKIDMILTKSVSRFARNTVDSLVTIRKLKEKNVAVVFEKEGINTLEGTGEILITILSSLAQEESRNISENIRWGVVRKFEKGKVIVNCTKFMGYTKNEDGDLVIVPEEAEIVKLIFRLYLEGYSTGKIAKHLEEQGIKTATGQDKWHSTVIDKMLRNEKYMGDALLQKTYTVDFMTKKKVKNTGLVPQYYVEDDHEAIIPKELFYRVQEEMMRRASLCKAAVTRKKNQKSRYSSTYALTGMLICGKCGQEYRRVTWARNGKKKVVWRCSNRLTNGVKKCGESETLEENALNRAVMEAIHRITSDDMEFMEHFRQNIIHVIGSYGTAKESGEYEEKIKEKQEEMVALIAENAKTGSYTPEFDERYRIIAEEINALKEAQKTARNEKRMADSYEQRIQDIDHYLSTSTCQIQEFDNDLVRRLISTIKVESSEKLLIQFQSGIVMEQEIRYE

SEQ ID NO: 13976 - protein, 525 aa, synthetic construct
MATKKKTATQRADGVYNRAVIYARYSPGPNQRDESIEGQVRECKEIAQKHGLIVIHEYIDKRLSGTNDERPDFQRMLRDADRGLFDVVITWKNDRFARNRYDSAIYKQRLKRNGIKIIYAKEHIPEGPEGIILESMLEGMAEYYSANLSQNIRRGQRENALDGKFIGGTIPLGYKLDAEKRYILDPDSAPIVREIFERYVAGESVTDICNDLNARGYLTARKKKFNRSSLHRIFTNEKYIGVYRFKDIECPGAVPRIVSDELFKAASIRATRNKKSRRTMPEARVEFMLTGKIFCGHCGEPMGGSWGTSKNGTRYNYYLCNGNRNKKSSCTKKAERKEKLEKLIINIVVNNILRNEKVVNYIVDRCMVIQEREIDKSPADGLRRELAENEKALKNIMAAIEAGIFTTTTKDRLVELEERCAVLKQGIAAAEIQPPKLSREQLLFIFEKYQNRSLKDPEFIRDVIDTFVHAVYMYDDKMIITFNYSKNNTLEISQKEIEEAATGAASSVFDFCGVASTKINNNFLT

SEQ ID NO: 13977 - protein, 517 aa, synthetic construct
MARSKKTECLPLERIGVIYARYSSHNQKEESIEQQVEECTSFALLNGIKIVHVYADKALSGRTDKRPQFQRLMRDAEKRSFSVVVAYKSNRIARDMLNALKYEDRLGKYGIETLYAKEEFGNTAAGRFALRTMMNVNQFYSENMAEDIKRGMLDNAENCKVNGALPLGYVSGPDKRYAIEPKEAEIVRGIYDKVLEGVSFADIANDLNACGVRTKHGSLWNKCSFHRILTNDVYIGVYRHSGVVKEGGVPPILEREVFIAMQKYLETKKNPRGRHRENGDYLLTGKLRCGYCESFMVGVSGTSKTGDKHYYYTCNSRHAGSGCKKENVRRDTIEYTVAALTQQVVFKEDIIEWIATAAVKLAKEASGQNEIDAMEAELAEDRKATKNIMAAIEQGIFTATTKSRLLELEADIASLEQSIRDAKAISEGKLLEKERVVYFLTSLREGNLHSKTYQKRLIDTFVRAVYLWDDRIGIDYYYAGKDSMVKYSLSEIEADIGENIREVLKDSLTGHHDCRTL

SEQ ID NO: 13978 - protein, 433 aa, synthetic construct
MSKKITIVSKPPKLERKKRVAAYARVSSGKDAMLHSLSAQVSYYSDLIQSHGEWLYAGVYADEAKTGTKDSRAGFQNLVAECRASKIDMVITKSISRFARNTVTLLQTVREFKALGVDIYFEEQNIHTMSGDGELMMTILASYAQEESRSASENQKWRVKRNFEAGIPWDRTLLGYRMENDHYVIVPKEAEIVRHIYNEYLSGSGYNSIAKMLNDEGILSRFGGKWNQSAISRVLSNYTYTGNLLLQKTFSENHITKRKMFNTGELPKYHAEDAHEAIIDMETFQAVQKKKERRAAQFIKKPAPKKIYPFTGLLMCNNCGKNYRRKVTKAGALWVCGTFNSLGKAACASKQIPEFTLQQVTADVLGQNDFTHEWLCDRIQHIRVCNDNALIFCFNDGSEITRIWKDRSRSQSWTDEMKEAARQKTLERSNHNA

SEQ ID NO: 13979 - protein, 526 aa, synthetic construct
MPKVTMIPATVNPLTHLPKASVQKRRVAGYARVSTDSDEQFTSYEAQVDYYTRYIQSKPEWDFVRVYTDEGISGTNTKRREGFKEMIADALAGKIDLIVTKSVSRFARNTVDSLVTIRKLKEKGVECYFEKEGIYTFDSKGELLITIMSSLAQEESRSISENITWGQRKSFADGKIHLAYKHFLGYKKGEDGRPAIVEEEAVVVRLIYRLFLDGKTQAGICRYLEDLEIPSPSGKAKWSKTTVTSILTNEKYKGDALLQKSFTVDFLQKKTKQNEGEVPQYYVESSHPAIIEPDEWDHVQAEFARRKALGNAYSGKSIFSAKLVCEDCGGFFGSKVWHSTDCYRRTVWQCNNKFKGGERCLTPTVDTETVQQLFIKAYNQMMGNRKQIIEDCEIMRKKLTDFKSLDADIERQFEETQIVAELVKAAVKDNAVTAQSQEAYLKKYEALTKRYETAAAELERLQNLRTLRRQKDKAMALYIRTLKKQPTVLSEWNDTLWTVMVEKAIVHRNSEITFAFYNGTKVKVRQ

SEQ ID NO: 13980 - protein, 519 aa, synthetic construct
MKKVTKIAETANSKVKLKKIRVAAYCRVSTDSDAQLESLEAQKTHYENYITSRDDWEFAGLYFDEGITGTKKDKRPELLRLIDDCKAGKVDFVITKSISRFSRNTTDCLELVRKLLALHIPIYFEKENINTGSMESELFLAILSSMAEGESVSISENSKWSIQKRFESGTYKASYPPYGYDWDGEQMVINPEQAAVVKEIFAALLSGKGTHAIADDLNRRGIPTKRNGRWTATTIRGMLSNEKYVGDCLFQKTYSDSRFFRHNNHGEQTQYMVKDHHEAIISREDFEAAHAFIHQRATEKGVVKGSDKYQNRYTFSGKIICGECGDTFKRRIHSCTGYKYTAWCCSTHIRDKDKCHMLFVKDDDLKQAFVTMMNKLVYAHRIILKPYVDALKNTSSDDSLRRIQEIQTLLAQNTEKRETLTKLMTQGIIDPILFNKETNELLSQADSFRDEINTLKNAVSGDVTKVTAATALLHFTEKGGILQEFDDDLFNKYVNRIIVRSRNEVRFELKCGLTLRERI

SEQ ID NO: 13981 - protein, 526 aa, synthetic construct
MRRNVVTIPARVNRFTEQPINEPVKRRVAGYARVSTDDVEQLSSYQTQVKYYTEYIKSREDWEFAGMYTDEGISATNTRYRKGFNQMVADALAGKIDLIITKSVSRFARNTVDSLTTVRTLKEHGIEVYFEKENIWTLDSKGELLITIMSSLAQEESRNISENVKWGQRKRFAAGKVSVGYSHFLGYDKGPDGRLVINKEQAKTVRLIYQLFLEGLTYYSIASELMRRSRPSPTGGKRWHASTIGSILKNEKYKGDALLQKRFTVDFLSKRQKVNEGEVPQYYVENDHEAIISPSVFDMVQAEIKRRGMTKGRYSGINIFSSKIKCGECGSWFGSKVWHSTDKYRRTVYRCNHKFAGGKKCSTPHLTEEEIKALFVKAVNLFLKDKKKIVSNLETLEAIAGEDSTLQNKLRESEEEMRRLLSKVNSYVDLNSRVAMDQNEYRQNYQRLVEMYNTEKARHDEIANKLLLDYQRKQQLKQFIEALKQTENLIGFDESLWTILVDYVTVFKKDDVRFTFKNGMEIKVGL

SEQ ID NO: 13982 - protein, 517 aa, synthetic construct
MPKKETTAPVKAVLYARYSSDRQREESIEGQIRVCEDYARRNNMVIVHTYADRAMTGRSDQRPEFQMMIRDAATMAFDVVLVYKLNRFARNRYDSAKYKHKLKKYGIKVVSAMENIADDPSGILLESVIEGMAEYYSAELAENVMRGMTENALEGKWPGGVVPLGYKLDEQHHLVIDGPKAEVVRLIYQMALEGHNQKYIIDELNRRHYTNSAGGPFSYNTLRTILRNEKYIGVFTWGTVRRENACPAILDKATFEAVQEHLKFRIKHHIRSCNEDFLLTGKLFCGCCRNKMIGVSGTSKTGAIYYYYACAAHLKKKCKARNVRKDAIEDLVCEVTTRILSSKEAVGAIARQAIEMQKNKKDSLELQAIKNQIADINKKLQNCVKAVENGLISDTITNHINEYEKELTRLKDDAARVKLLDGDIGLTQQHIEFFFWSIAQKIKAADKYKSILLSSIVRSVIVNEDYIEIQYNYKNELPILQNPVKVESSYLNQMVTQEGFEPTTHRLEGGCSIQLSY

SEQ ID NO: 13983 - protein, 426 aa, synthetic construct
MRVKVINKRPASVLQKKRVCAYARVSTDSRRQEDSLENQMETYERLITGNPEYEFIGVFADQGISGYCENRPQFQRMMEKARAGEIDLIITKSISRFARNTVTVLKFARELKELGVGIFFEEQNINTLSGDGEMMLAVLASFAQEESRSMSENNKWSIRKKFERGEVMITTSRFLGYDKNEYGDLIVNRKEAEIVSLTFDLYLLNVGSSRIGELLDYLGVKTVTGTTWESGTINGMLCNEKYKGDFHLQKYYTPENKRNHTRKNNGEVQSYYISENHEPIVSPEVWEQVQKIREQRKRDRNIGQDNTMKFQNRYPLSGMLICPYCGKTLRRRQVYKKKIQWLCSTYIEKGVKACKGIRIDDAELQGLNITEQTVIEEVVKNGKKHYCYTSKADFDCGIRNSTVSAEIEDGSVLPSVNRPRRTVIKL

SEQ ID NO: 13984 - protein, 438 aa, synthetic construct
MSTDQEEQLLSYENQVNYYTNYISENPLYEYAGTYADEGISGTNTKKRDEFNRMIADCRAGKIDMIITKSISRFARNTLDCLNYVRELKDLGIGIIFEKENINTLDAKGEVLLTILSSLAQDESRSISENCTWGIRRRFETGKHKMSTKRFLGYDTDETGKLVINRTQEPIVVRLYQEFLDGKTTDYIKRIFEREGVKNWDGGTKWQSTTLMSMLENEKYKGDALLQKSYTVDFLTKKRTQNKGEIQMFYVEYDHDAIISKRIWECVQLEIKRRKKYLEEHGTNSYSHRPESNPFASKIICGDCNKVFARKGWRSSTGVDRKVWQCSERYKVKGVMGCANRHVEEETLIKAYLMAWNALVENREDFMEQWTEQLQSENLLEGYRAEKFIEYTDGAEPLTEMDTDFMLKTLDHIKVFEDGTLLVVFLDGTEIECKNEEE

SEQ ID NO: 13985 - protein, 531 aa, synthetic construct
MEQYCLYLRKSRSDVEAENHGEEETLARHEKILLELAKRREYNVTQIYREVVSGETIAARPVMQQLLSEVEHGIWSGVLVVEVERLARGDTIDQGIVAQTFKYSDTQIITPMKTYNPNNEYDEEYFEFGLFMSRREYKTINRRLQRGRLSSVKEGKCVCSIAPYGYDKVKLKGDKGFTLAPNPNEADVIKMIFELYTKGELQPDGTYKRIGVALIARKLNEMKIPARKSEYWVPASIKDMLRNPVYAGKIRWNWRSQNKRMQSGSISISRPRSEEDSCIIVNGLHPALITEETFDLVQEYLAKNPPRPTKRNAPTKNPLAGIVVCAFCGRKLVRRPYTSASCPPTLICSVPHCPNVSSFLHLVEERILKSLEEWLRNYKLQWNLSNNKPSELISESEILRQSLNDINSQITKLNKQMIKAHELLEQDIYTTEVFLERSRAITERLNQLSYDKAEIEKRLGVETIREKSMKEIIPKVEKLLDVYHELPSAKEKNDMLKDVLEKVVYKKTQNTRWSGSPDDFEITIYPKLPKS

SEQ ID NO: 13986 - protein, 523 aa, synthetic construct
MAVSRNVTVIPAIKRVGNNKNSESKPKIRVAAYCRVSTDSEEQASSYDIQIEHYTNYIKKNKEWELADIFADDGITGTNTKKRDEFNRMIEECMAGNIDMIITKSISRFARNTLDCLKYIRQLKDKNIAVFFEKENINTMDSKGEVLLTIMASLAQQESQSLSQNVKLGIQYRYQQGEVQVNHKRFLGYTKDENKQLVIDPEGAEVVKRIYREYLEGASLLQIARGLEADGILTAAGKAKWRPETLKKILQNEKYIGDALLQKTYTVDFLSKKRVKNNGIVPQYYVENSHEPIIPRDLFMQVQEEMVRRANLRGGKGCKKRVYSSKYALSSIVYCGHCGDIYRRVHWNNRGYKSIVWRCVSRLEEKGSECTAPTINEETLQKAVVKAINELLANKDPFLKVLQKNIATVFNGENDNATDDIDSKLEELQQQLLIQAKSKNDYEDVADEIYRLRELKQNALVENAEREGKRQRIAEMTDFLNKQSAELEEYDEQLVRRLIEKVTIYEDKLTVEFKSGIEIDEEI

SEQ ID NO: 13987 - protein, 519 aa, synthetic construct
MKKITKIGVNETLIQKKKLKVAAYCRVSTASDEQLISLEAQKAHYENYIRSNDEWEYVGLYYDEGITGTKKDVRAGLLSMIADCEDGKIEFIITKSISRFARNTTDCLEMVRKLIGLGVHIYFEKENINTGTMESELMLSILSGLAESESISISENTKWAIQRRFQNGTFKISYPPYGYQNMDGQMIVIPKQAEIVKYIFAEVLSGKGTQKVANDLNQKGIPSKRGGRWTATTIRGILTNEKYTGDVLLQKTYTDSHFNRHTNYGEKNMYLVENHHEAIISHEDFEAVDVVLNQRAKEKGIEKRNSKYQNRYSFSGKIICSECGSTFKRRIHSSGRKYVAWCCSKHIGNITECSMQFIRDEDIKTAFVTMMNKLIYGQKFILRPLLNRLRNQNNVASFRRIEELETKIENNMEQSQMLTGLMAKGYLEPALFNKEKNSLEAERERLLVEKDQLTRSVNGNFTKVEEVDRLLKFATKSQMLTAYEDELFENYVEKIMVFSREEVGFELKCGITLKERLVN

SEQ ID NO: 13988 - protein, 581 aa, synthetic construct
MYGLNSDFQKRDVAIYARVSTEHEAQLSALGNQLDWYKPILAARPDWTLTAQYIDEGITGTSAEKRPQFMKMVEDARQKKFNMIITREVSRFARNTVDTLQYTRLLKEYGVEVFFLNDNIKTFDGDGELRLTIMATLAQDESRKTSIRVKAGQETSMQNGVFYGNGNILGYDRVGKEMVINPEQAKTVRMIYDMYLSGMGVTTIQYELEKAGRLTALGKEQWFASYISKMLRNSFYCGIITYHKEYTPDFLKQKKIKNYGDLEYVQVQGTHEPIVTVEEYEQVQKLMDAKSAVLKNHNKGKRRTGRMQHTTVYGRLMICQCGNKFNLRFHSRDGRTDGVDYQCYTSVNRGSVAKRLNKGISIEHSCESPYIQGWKLEMMAEQVFDRYIENADKVMDLSYAMLEKHIADQEELPDNTDVIRRKQGEIEKLMNKRTNLIEMRAEGDIDKEMFRSKKQEIEDRVAKLTEEIKGLQPEKEQTSNEDYSVKLLELRERLKEYTGFDYSVIPESIVEAFIERIWVSKDEFRWYLRTGNNADGEFDPDDHIKIGAFTLTIDDAKKYIYSFSTRRRVYKWADLNVSVWI

SEQ ID NO: 13989 - protein, 457 aa, synthetic construct
MSEKNIISDGKVMRAALYPRVSTEEQAKYGLSIHDQQNDLERYAKEHGMKIVGVFADAGFSARKKIEKRPAMMALLDAIRRDEVDIVLVTKLDRWFRNIGEYYKVQDILDAHNVSWKAIYEDYETATASGRLKINIMLAVAQDEADRTSERIKKINEGKRLRREALTGDKPLGYTIINKKFVKDPQTALAVDAFFRKYMACGSVSATQDYIREEFGLTIPYQGANKMLRSTAYYGVYYGVDGMCPPYITKEQYDQIQTMRRKVIKRTDENRIYLFSGLIVCGDCSGRIGGKVNQDHKTFHYNCSNHFCRRKPCRNNRSISEKKLEKYLLDTVECKLESYKTEFSAVQENVVEKDYRSEINALRGKLSRLKDLYLNELLTMDEYKKDYASITEKIHELEIKQQPPRPSNLPQIQKLLSHNWRDMYGALSPMQKREFWRIIIKEIRWYPDRHIEFDINF

SEQ ID NO: 13990 - protein, 515 aa, synthetic construct
MNAVIYARYSSDSQREESIEGQLRECREYAERNNMTIVGTYIDRALSAKTADRPEFQRMIKDSAKELFEIVLVWKLDRFSRDRYDSAHYKHILKKNGVKVISAKEHISEGPEGIILEAMLEGYAEFYSAELSEKIHRGQKENALKGKNNGGGVPLGYLLDKKAQKLVIDPVTAPLVVEIFEKYADGKSVRSIVEDFNTRGLKTKKGQPFNINSFSSLLKNRKYIGEYRYQDVVIEGGVPAIVPEDLFNRVQERMEKNRHAPAMAKAKENYLLTTKLFCGKCERMMVGESGKSHTGAMHYYYKCSGAKRLKDCDKKAVRKDWIERVVVRLTMQRVMDEEKINRLIDAILVMQEQEDTTTPALRSQLAETESSIGNILKAIEQGIFTPSTKQRLDELEARKEEILVNIQTAELQKPKLTREQMTAWFEQFRHGDPANREFQKRLIDTFVNAVYVFDDKLVLTYNYQHGTQTISLDEIESALSSDFDGATPPERKKTRNHCGCGFFLYSCGFADFPEE

SEQ ID NO: 13991 - protein, 573 aa, synthetic construct
MAKVKLPDKPRVAIYTRVSTLHQIDKDSLPMQRQDLINYARLILNTEDYVVYEDAGYSGKNTDRPKFQEMMQQVRLGMFTHILVWKIDRISRNLLDFATMYSELKQLGVVFVSKNEQFDTSSAMGEAMLKIILIFAELERNMTSERVTAAMLSRAANGQWNGGRVPLGYDYDPEIKTFTINESEAAVVKIIHDKYEQERSLVSLARYLNGNGYRTRTGCTYSPSTLLIILRNIFYCGDYRYNVLKDGDRQKRKKESEWITVKDHHPAIISREQKEEIARILKENRRLECERRGIYSKKKNVHVFGGLVICGNCGHAMTSTIRPADQDGIRWSVYVCPTKRRSEYLCKGRATSEVVLGEFVFNYILNMLNVQKNFDSINSVEDMEKMLLSGSTFRDVDGIERAGLDDLYNMLASGLTEKAPFDSSVEVRKKPVVSDIELENLNTEKTRIERAAERLQNLYLYSDDSISQKDYIIQREKLMSQLAEVNEQIGMVMSNADEKDVSDEEFVHAASKFILTQKLEGRTYIYYKRLATTVSREVLRSFVMSIIENITIYDGRVQTIVFKNGLSHTFILK

SEQ ID NO: 13992 - protein, 578 aa, synthetic construct
MAKCILLVRVSTESKKQEISLREQETELFELALSKGYCEEDIIAICKQESALKRRYATSDEKDAIEIKQQGLQEMEDAIKNDSSINCVFAWEISRISRREKVLFDELEFLTDRKIQLVILKPYIELLNSDGSLNPSSKMQFSMFAALADAEMRNKSDRFRRTKESRRKEGKYVGGWLPFGYMVEPTTKKIIINEEEAAIVKYMFNEYLKGGTSIYKLANELQERGIISYDNKHSAFTFAYTILRNYSYAGLQGTVRQKDRKPSTNVYPAIVTKEMIDKAIEMSEQAKTKPKTNVKNIYYCKSLLKCADCERVYVARLNKAVYQCTNDNGKCNNAEISINLADTILWNVAMTLKISQMLHQTEEDKTAYQLQIEVLKQKIEKINIDIENNNKAYSILNKRIIMQKISEEDGELIEKELDSTKKELEKKLNEYNNKVAEIEQILFNMNTSIAFKHINIDDIADIEDDNLRYEIIHEIIDYCMVEKVANSIIKLELYAKHINTAYTYYVTTRNRKIYNKDFRIEEAYTSDNTHLVDFKILQRYKRQGKANKEYQKQYYQKNREKLIKQNVEAKRRRKSKPE

SEQ ID NO: 13993 - protein, 453 aa, synthetic construct
MECVAYMRVSTEKQAEEGNGLDSQKRDIELFCRKNELVVSDWYVDDGYTGANMDRPELQRLINDCIKKRVKCVVAFKLDRLSRSMIDGLYIIERVFQPNQVLFKCVHDSVSYDSPMEQAYTQMMAVFAQLDKNTMMLRMRGGMLERIKQGYWIGGANTPYCYNYSKEKGILVPIPERKEQANRALDMFIGGYSDLYIKESLGFHSEVLVRNVLTGVVNIGMIPYKGNVYQGLHEPIFDKERFELAQEIRKSRRKNKTACHTDANLLTGLCYCGVCGCKMRYQKWTHGKHKIYCCSRDKAMKYLPNFNPDCNNSLEWAADIEKQVESEILKISLNLSECKPIEKQSKLEIMQSQFEKEQVKLKRLYVLYSDGNDTVLEMIKNTEKSISEMKVKITEEEKNERNSQKKEVVYENIKKLADVWAHIDKKEKNNILKSIISRIVIVNGDVEIQLKNF

SEQ ID NO: 13994 - protein, 526 aa, synthetic construct
MPKVTMIPATVNPLTHLPKASVQKRRVAGYARVSTDSDEQFTSYEAQVDYYTRYIQSKPEWDFVRVYTDEGISGTNTKRREGFKEMIADALAGKIDLIVTKSVSRFARNTVDSLVTIRKLKEKGVECYFEKEGIYTFDSKGELLITIMSSLAQEESRSISENITWGQRKSFADGKIHLAYKHFLGYKKGEDGRPAIVEEEASVVRLIYRLFLDGKTQAGICRYLEDLEIPSPSGKAKWSKTTVTSILTNEKYKGDALLQKSFTVDFLQKKTKQNEGEVPQYYVESSHPAIIEPDEWDHVQAEFARRKALGNAYSGKSIFSAKLVCEDCGGFFGSKVWHSTDCYRRTVWQCNNKFKGGERCLTPTVDTETVQQLFIKAYNQMMGNRKQIIEDCEIMRKKLTDFKSLDADIERQFEETQIVAELVKAAVKDNAVTAQSQEAYLKKYEALTKRYETAAAELERLQNLRTLRSQKDKAMALYIRTLKKQPTVLSEWNDTLWTVMVEKAIVHRNSEITFEFYNGTKVKVRQ

SEQ ID NO: 13995 - protein, 433 aa, synthetic construct
MSKKITIVSKPPKLERKKRVAAYARVSSGKDAMLHSLPAQVSYYSDLIQSHGEWLYAGVYADEAKTGTKDSRAGFQNLVAECRASKIDMVITKSISRFARNTVTLLQTVREFKALGVDIYFEEQNIHTMSGDGELMMTILASYAQEESRSASENQKWRVKRNFEAGIPWDRTLLGYRMENDHYIIVPKEAEIVRRIYNEYLSGSGYNSIAKMLNDEGILSRFGGKWNQSAVSRVLSNYTYTGNLLLQKTFSENHITKRKMFNTGELPKYHAEDAHEAIIDMETFQAVQKEKERRASQFIKKPSTKKIYPFTGLLVCDNCGKNYRRKVTKTGAAWVCGTFNSLGKAVCASKQIPEFTLQQVTADVLGQNDFTHEWLCDQIQHIRVCNDNALIFCFNDGSEITRIWKDRSRSQSWTDEMKEAARQKILERSNHNA

SEQ ID NO: 13996 - protein, 517 aa, synthetic construct
MLRAVIYARFSSDMQREESIDAQVRACKSYCQSKGYLVIGQYVDEAKSGRELTKRDAYNQMLADALEDKFDIIIFHKIDRNSRNELNYYTTKDKLEKLGIRYEYAVQHIDASPEGQMMEGVLVSMAAYYSRNLSKETKKGLNENAYKAQFNGGTAPLGFRIVDKHYEIEPIEAEAVRLIFKWYLNGYSYIRICRELKLAGYTKRNGKPFDKTCLYDILGNEKYMGRYTFNKTPRAKNGQARNSHSKTRPDDYIVIDDALPAIISKEDFAAVQAKRETNQRRFSSYKAVEPYLLSGKVICGYCGSAMSGHRVAPRNGEPYGYYYCLKKERVAGERCPQKYIRAEKLERIAIRALEEEIFSESSMKKIAALMREGYAAMTNEADENRKALLQAKAAAEKKLDNLYSFVENGEVDEYSLARMKKIKDELAKIKARFCETSVKFSKTLTEEEIFATLAAFKKDLESNADNSAKRFVVNLLINKITVRDNCATVEILPNMLTVYLVPRTGIEPVRVSLPEGF

SEQ ID NO: 13997 - protein, 519 aa, synthetic construct
MKKVTKIDKIQPAKNAEDKLRVAAYCRVSTATDAQLESLEAQKSHYENYINSRDDWCFAGLYYDEGITGTKASKRPELMRLLADCKAKKIDFVITKSISRFSRNTMDCLEIVRTLLNLNIPVYFEKENINTGSMESELFLSVLSTMAEGESASISSNNRWSIKKRFGNGTYRLSSAPYGYKLESGGLQVVSEQADIVKRIFRELLSGKGMYSIAKELNAEQVPTQKGGRWTSTSVHNILTNEKYTGDCIFQKTYADSNFNRHTNNGELNRYLIQNHHEAIISHEDFNATAALIEQRAAEKGIESGSDKYQQRYAFSEKLICGECGNTFRRRIHKGKYNSYVAWVCNTHLSDTNRCSMLFVRDDALKLAFATMLNKLIFSYRLLLKPYLAAMQSNTADEALLRIQYLENQLDQNAEQRSTLHKLMAQGYIDQIIYTQESNELLLQARDFRSEIEALNNTVAGDTTKVYETERLINYCKRGEMLTDFNESLFELFVDHILIYSRQKIGFVLRCGLTFEEMI

SEQ ID NO: 13998 - protein, 467 aa, synthetic construct
MAREIVHIPARRGLSNRATVTDRKIRVAAYCRVSTDHEEQINSFENQVTYYTEYINRNPNYELADIYADEGISGTNTRRRDDFNRMIADCEAGKIDLIITKSISRFARNTQDCLNYSRKLKDLGIGIQFEKEGINTMDSSGELLFTILSSLAQDESRSISENCQWGIRSLFKQGVLHLNTNRFLGYDKDEKGNLVINEEQAVIVRRIYTEFMNGINPDVISRRLRDEGVPGCMGEAKWQASTIFGILRNEKYMGDAILQKTFTSDYLTKKTVKNEGQLEQYHVKGDHEAIIDPEYWNAVQLELERRQNYMTAHSLRTMGRYTDEQPFSNRVLCGECGKVFWRRTWYRLNNTYKVWQCGNRYREKGVVTCHSENLKESDLHGAFVMAWNGILESRAEFTETWKAQAENGNALERFRAKQMLELTKMKPMKEIDLLLVGKVLDYVIVQHGGELEFHFLDGTQLAVEVTE

SEQ ID NO: 13999 - protein, 612 aa, synthetic construct
MRAAFLIRCSTKKQDYERQVNDLTRLAKKFGYTSSDNMIFGEHITGKDDASKRDRQSIQRLKDAAINKEFDVVLVSEVSRMSRDPMSGRLYVRQLINMDIPVYFRDIDTWTIDPVTGKKVRDAETIIGAAFDAAWKYIKSMKTQIASGRRDELDNNQMSIGQPFFGYKRYGGRDKGKKNSWVINDDAAKVMVDVFEEYVKDGATLKSTALAITAKYGEQFNKKFSIGTIEHILTFEPYCTGIKVVSLTDPDTEDVDEFEVEIPTIITRAMFDKATTKRATNRTARTPYPKQATYILSKLLKCPICEHSLTPQKRGGDKGDKYRLMNGKVAIRWSCMSGINNATDCSSRITISNEKLEAIIWGLVKQELIGFANLNDEDRVAKVEELTDKITNLEMNIANFTSHISNMDRLIERAYSAYMDAPDSVMDIAKDKYYKTLTKCENERAECKDKIEALSAEKLRLENMRTFFNQPTLPKDAIEKAESDPIKMRNLVMELIDKIYPYRITTYVSPATNRIMRNGIVLLEVYTINGIYNVLYDGNQRNNKVAYYISSVYATFQNGRNKFDAYDTGEYFVISHATLVTETEDVDMLVTFNELIKICMQNGWEIDYTYKM

SEQ ID NO: 14000 - protein, 652 aa, synthetic construct
MIKVILFVRVSTISQHLESQEDVLRRLAHNDGYKDSEIHVIGNKESALKISEEHREGLNELRKYMAAGGIECVYISELSRLARNDTEALKMRDEFVASHIQLKCQNPTFTLLTSDLSRIEPYARTIFSLYSSMAAQEMIEKKERFARGKRRLAEEGCYNGGQIPYGYTIDKEHRNKIIIFEDEAAIVREIFDLYESGISQPKLAKEFKQRGNKKFTINFINNILTNERYTGRKAVYTGSSYERSYPVIISPEQFDRCREIANSNSTTFGKPRHIYYAERLIICTNCGCRWAANGSQSEYHCYDAFNKMRPYQNYNTPQCTLKTTISINIMDSLLWHLAQEAEVKYILHNAADDREKYRKELEIVEQKIAAIQPRISELEKKRSRIVEAYLDGDISKERESERLKAVDQEKRAIVQEKEDLNKERSHRIKLIHDLEARFDLESVPGVENELDRNEAVAKNVAAIDDDLMRQAIVKRHIKKITVKNSEIVYTFGIGTKTTKTRFITIEYYNGEVQYFQYLPSTGKGSITLRSRADGTPLEKITFEYLPRFFNSAKRRRNKGARQLKKERRERMYPPEKYVYAYSGLATFLNINISTAHRWVATLGILRPAVVAKERKEIIVDKEKCLAILREEAKTNFWAARILNGMNDGTQYN

SEQ ID NO: 14001 - protein, 526 aa, synthetic construct
MGKKQKTNGGDAVIYARYSSHNQRDVSIEQQVEACRKHAAELGLTVTATYEDRAISGKTDKRPSFQRMMRDAEQHKFAYVLAWKSNRIGRNMMQALVNESRLVDCGVKVFYAEEDFDDNAAGRFALRSMMNVNQFYIENMAEDVKRGLYDNAKKGLVNGSLPLGYKRGADGKPEIDEPKAAIVREIYTRVAAGELFASIAADLNARGIRTARGREWNKGSFHVLCHNDRYRGIYMYGDIRIPGGMPRIISDELFYDAQEAYGMKKDNRYGRARHGAENYLLTGKLYCGHCGSYMVGISGTSKTGEMHYYYACQKHRLEHTCEKKAIRRDVIENAVARVIMMCCLDDETIDFIVDSTIAYFKQKDHELHIEAMENELAAVQQAISNLMKAIEAGIITPTTRTRLLDLEEQQAKLSGKINTAKAERVEIDRDDLIAGLQLFRTGDIKNKKFLAKLFNTFLLAVYLYDDNRLKIVFSFTGNHNNIEIPLELDNDCPDSESGPYETEVRMSHLECRRRGSNPYSVSRKGF

SEQ ID NO: 14002 - protein, 519 aa, synthetic construct
MADFEHVIIYLRKSRSDDPATTVEEVLSRHENILQEYAVKEWGARIPEDRIYREVVSGETIKDRPVMQHVMKILETGLVSGVLVVEPQRLSRGDLQDCGHIINSLRYTNTAVITPPKTYDLSDEYDRKFFEMELTRGNDYLEYTKKILNRGRIASVKAGNFIGNSAPYGYRKICVGTGKEKYYTLEIVPEEAEAIRLMFDLYVNKDYGFRSIAHALDMAGYKPRRSAEWSPAAISCMIANETYIGRVVWNRRKTIKKWENDTIVRTRPRQSEYISVPGKHPAIISDELFYAAKAKRNRTPRIKRYVQLLNPLAGLLYCGTCGHAMSRKRTVDKKYGSVSVSFLCNNQSNCHTKSVMYDAVIDRVKETLRQSIEDFEVKVNNKDETDIAYHRAMIANLKSELRKLKEKDMRQKDAYEDGIYTKEEFVVRNAKLAEQISIAQMKLDEAESSTTQLVDYQERLVRFRECLEALDDDTISAADKNTLLKSCIDKIMYYNDSPSLPGVGRYVDNPFRLEIFLKL

SEQ ID NO: 14003 - protein, 415 aa, synthetic construct
MRTIRKIEQSIPIIKKRKKVAAYARVFMESERMQHSLSAQVSYYSSLIQKNPDWEYAGVYADYGISGTSIKKRQDFQRMLEDAEAGKIDIILTKSIQRFARNTVDLLQTVRRLKELGIEVWFEKENIHTMSGDGELMLTILASFAQEESRSLSDNIKWRFRKKFEQGIPHAKFFVYGYCWEKDNLVIKPEEAAIVREIFDAYLQGRTRKDILRELKQRGIRTMYGNYFKDASIRQILTNRIYTGVLEIQKTFVTDPITKRQAVNHGEKNKYVVERHHEAIISSDMFERVQQELKSRKEMGMQRGGYARDFLNTSCFTGIIKCGICGKSYVHVVRKYKGRIREYWTCDSHKGKGTNCGAYGSVPQSALKKACAAVLSTDEFDEELFVRRVKKIVVPSYKKLVFYLSDGSIVERQWD

SEQ ID NO: 14004 - protein, 520 aa, synthetic construct
MKRITKIEENRVLSVKKKTRVAAYCRVSTASDEQIISLDTQKAHYEDYIKSNNEWEYAGIFYDKGITGTKKECRDGLNSLINSCEKGLVDLVITKSISRFSRNTTDCLELVRKLIGLNVTVIFEKENINTGSMESELMFSVLSSLAESESVSISENTKWSIQKRFQNGTYIISYPPYGYENADGEMIVVPKQAEIVKKIFEDTLAWKSTHVIAGELNDGGVKSKKGGKWTPGAINAIIRNEKFTGDVIFQKTYTDSRFCRHINDGELNQYLYENHHEPIVSHEIFDKANEVLNQRGKEKGNGERTERYQNRYGFSGRIKCGECGSVFKRRMHYKPSGAYVAWCCTRHIERKEACSMKYITDAALKAAFLTMMNKLIFSHKVVLCPLLNALTSTSEKERILQIGKIEGQIEKNKEQKQVLMELMVNVKLSPAFFQKVTNDLNTEAEMLCKKKESLLYSVNGESSKLEKLKTLIQFTAKNDMITEFTDELFITFVDGITVLSRNEIVFTLKCGLNLRERLVN

SEQ ID NO: 14005 - protein, 523 aa, synthetic construct
MTATKNITVIPARRRIGNAVNKEVKPKLRVAAYCRVSTDSDEQATSYDAQVEHYTNFIQKNEEWAFAGIFADDGISGTNTKKREEFNRMIAECMEGHIDMIITKSISRFARNTLDCLRYIRQLKEKNIPVFFEKENINTMDSKGEVLLTIMASLAQQESESLSKNVKLGMQFRFQKGEVRVNHNRFMGYTKDEDGHLIIEPAGAEIVKRIYREYLQGASLKQIGDGLMKDGILTGAGKPKWRPESVKKILKNEKYIGDALLQKTYTVDVLTKKRVKNNGIVPQYYVENSHEPIIPRDLYMQVQEEMLRRSNLHSGVNRKKRIYSSKYALSSIVYCSKCGEIYRRVAWNNHGKRSTVWRCVNRVEHGPDCCNAPTVKEEKLQNTVVKAINMALGGKEDMLTALKENIAMVLALEDETSMESIDAKLEEQQQELLKRVNAGQDYQDIADEIDSLREKKQKVMADNAEREGQKQRNTEMQHFLAEQTGQIEEYDENMVRRMVEKIKVYEDKFTVEFKSGTSVDVEK

SEQ ID NO: 14006 - protein, 470 aa, synthetic construct
MRNIRIGKNTSNNKKTGLYIRVSTNFQFEEGYSVGAQTEKLEKYCNYQEIDNYDLYIDGGYSGSNLNRPEMKRLIKEIQEGKVESVVVVKLDRLSRSQKDTIYLLEDVFEANDVGFISLNENFDTTTPYGKAMVGILSVFAQYERENIRERTQMGITERIKTGKWRGTKPPFGYDYNNGDDVLVPNKDAETVRKIFELYKEGYSTYALAKMFDLKGDKQVSDMLSRVTYIGKLKYNKEIVDGLHEPIVDKKLFDEVQELRKTRTRATSHKSQYLLTGLIYCGLCGAKMRYQKWSGGRVMIYCYSLDHSKPHLVKNPNCQNGKLDAAEVEEVVVSDMLKLSKEYEVIEEKSEQQNQKGFEAMNQRKSVLEGKLKSLYNLYASDTNNSVLLETIGEINKELENLNTQIEQYTLKNTRAKDMTARAKAFKSVADSWEFMSFNERQKTVREYIKKIKISNDYVEIEYNDLLTLQ

SEQ ID NO: 14007 - protein, 576 aa, synthetic construct
MRGAIYSRVSTIDQDYNRQTNELKEYAKYMGIEITHVFEEKESGFNDDRPEFAKLKELTKDDIDIVLVWELSRLSRRSLYLQQQIEYFTKKGICVYAKKENLRTLDENGEEDRNTKFIIGIIAMIAEQEVATLKSRSISSKRNKIIKEGNSYTYKAPYGYDYSTETKKLSINEEEAKTVRRVIELSANDYSSARIALILNAENIPTRSKTKIWTMGTINTMLSNPVYKGEAEYMLKGTEPKKGKRYKRPIEVAIVKTPAIVSAELFDLSREKMKGRAFRSKSTGVKHFQLLRGLIYCPYCKIKYTYEGGRDLYVCHDKHKKAKNKPDCFSKAIKATRIEKIVWELVRLLFSQELATGKAQEQEEPLRQEIEAHKKLLIGIENKLNDLTAQANAIVNAAIDIKREMPNMPDLYINKLREAASLDKESKKYQFEKDRLNKLILSCEDKIKAINSLSNEKVLVDSITDDMERYELIHKVIDHMVIYGEDSIYSLVVVTFKTGQEVYIGYKSKGYQYYTIFHPSQSVWFDTEKRLGYITTMKSPDSLVLSLETVTKEYSVTNFIKVLDVSKNRRYYENQS

SEQ ID NO: 14008 - protein, 524 aa, synthetic construct
MAATKNVTVIPAKKRVGNTVTADDKPKLKVAAYCRVSTDSDEQATSYDAQVEHYTEYIRKNPEWEFAGIYADDGISGTNTKKREEFNRMIEDTMAGKIDMIITKSISRFARNTLDCLKYIRQLKEKNVPVFFEKENINTMDSKGEVLLTIMASLAQQESESLSKNVKMGLQFRYQNGEVQVNHNWFLGYTKDENGHLIIDEEQAVVVRRIFREYLQGASLKNIADGLMADGIPTATGNMKWRSDGIRKILTNEKYMGDALLQKTYTVDVLTKKRVSNNGIVPQYYVENNHEAIIPRQLFMQVQEELQRRAHLRTEDGKTKRVYSSKYALSSIVYCGKCGDLFRRVAWKARGASYNKWRCASRIEKGSKEGCNAEAISETEIQNAVVRAINKTLGGREQFLVQLQNNIEDVLNGDSTATLEYIDQRMAELQEKLVMRVNKNAEYEVIANEIDALREKKAAVVTRDAEQEMLRKRICEMRHFLQTQTNRITEYDEQLVRRLIEKITVYDDKLIFEFKSGMTIELKR

SEQ ID NO: 14009 - protein, 520 aa, synthetic construct
MKNVTKINQVDFSIFKKTRVAAYCRVSTDSDEQELSLDTQRNHYESYIKANSEWEYAGIYYDDGISGTKTAKRDGLLRLVEDCEKGLIDLVITKSISRFSRNTTDCLALVRKLLNYDVYIIFEKENIHTASMESELMLAILASMAESEVRSISENEKWSIKKRFQNGTYIFSYPPYGYANVDGEMVIVPEQAEIVKQIFADCLAGKSTHIIAKELNERGIPSRKGGKWTGGTINGILVNEKYIGAALYQKTYTDENFKRKRNYGEEEQYYCEDHHEPIIDKDTFEKAKEAIRQRGLEKGNCSEDTSKYQNRYAMSGKIKCGECGRSFKRRYHYISHGKSYNAWCCGGHLEDSKFCSMKYIREDDLNRVFLTMMNKLRFGNDLVLKPLLISITTSSSKKNANSVEDIEKEMKSNEEQRKQLNVLLTKGYLERPVFAEAHNKLVMEYEHLTAKRDLLFRMDDAGYTMEQALKELVDFLNSAEPFTEWDEFLFERFIEKVKVITREEVEFEFKCGLKLKERID

SEQ ID NO: 14010 - protein, 457 aa, synthetic construct
MKKKELCPAVIRVALYIRVSGEEQKIKGLSLEAQQERLETYAKERGWIITGTYIDAAKTARKNLHKRTEFQRMMESVKRNEVDILLFARLDRWFRSVADYYKVMEILQAHNCDWKTTDEEYDTTTANGRLYINVKLSIAQNEADIDGERIDVVFDSKIAHGTVVSGSCPYGFRVNEEKRLEIIPDDAAIVQDAFNYFESSASQRATTKYIREKYGVNWCYATFHRMLIEELYTGVYNRSNRYNANFCPAIIDREQFDRVQTLLKKNVHTAPSGRIYIFTSILTCDECGHKLNGCLSQGIYYYRCGQRLLRGRCTHNHSIREDYIERWLFDHLGEEFDRVKLDWEIQAAKRKRSSSSKDKAVLKRKLNKLKELYVNDLIDIEEYRKDYEIYTSALEQMPNDKEMEQPPNFKAVERLLQSDFKNLYNTLTREEKRTLWRSAIKEIRIDNDYNITGIIFE

SEQ ID NO: 14011 - protein, 453 aa, synthetic construct
MECVAYMRVSTEKQAVEGNGLDSQKRDIENYCRKNELVITDWYIDDGYTGTNMDRPELQRLVNDCSRKRVSCVVAFKLDRLSRNMIDGIYLIEKVFQKYNVVFKCVHDSVNYDSPMEQAYTQMMAVFAQLDKNTMMLRMRGGMLERIKQGYWMGGGNLPYCYSYSKEQGILIPIPERAEQARKGLELFISGYSDAKIKEICGFKSELVTRSILTGVVNIGMIPYKGKIYQGKHKPIFDKDRFNLGLELRKSRCSAKTYCITEPNLLTGLCYCGICGCKMRYQKWGSEKHKIYCCSRNKSLSYLPNYNASCNNSLEWADEIEKQVEEEILKISLDLSSYKPKEKATKLEIMQSQLEKEQIKLKRLYNLYADGNDTVLEMIKELEAQIKEMKLNIAAESKNAINTQKKEFVYENIKKLADIWDKVDKKQKNLILKTIIDKIVIVNGNIEIQLKNF

SEQ ID NO: 14012 - protein, 529 aa, synthetic construct
MVDVVAYCRFSSDNQRVESIEAQERAIKEYCLKNNFNLIAIYKDEAISGTSIKDRESFIKMINDSKKKIFKYVIVHKFDRFARNRYDHAIYEKKLEDNGVKLLSVLEQLNDNPESVILKSVLTGMNEYYSLNLSREVKKGQKENALKCIHNGGAMPLGYDLGEDRRYVLNEKEAEIVKKIYKLYLNGVGYTKIAEILNEEGYKNKAGREFRKTSIRDFLLNEKYTGVFVYGKKDANGRLTGKEIKIENGCPQIISKEEFQKVQNMMGKRKTGARMTAITPYYLSGYCYCGECGGSYTGGYRTRRRNGTIDYGYLCINRKTKVNQCKNKPIIKEKLEGMVFDTIKKEIFTGKRIDGIANGIYKKIMESQSGVEKELMTLEKEIEKVTNKAVNLLNKNLEGNISDEVFNVMNEKINLELTTLKNKKNSLKSPVKIEKEKIFNYLKNLKDNFKNPQIKKSIVEAFIDSVIIYPNHVEIRVRDIPVDMDRSGGDDGNRTRVRNYQRHRLLQCLVYYFISQQSLPQTGLTEAIL

SEQ ID NO: 14013 - protein, 498 aa, synthetic construct
MEIQIRKGNSIQKRKLKVCAYCRVSTDADEQENSLENQIRHYKEVITSNPDYEYAGVYSDFAISGFKEKRPGLQKMLADARKGKIDLILTKSVSRFARNTSIVLEATRKLKELNVGVFFELQNINTLSGEGELMLTILAAFAQAESESGSVGAKMVYQRKYEAGIPVQYLERSFGFKKDERGVYIADEEEAAWVRKIYEMAADGYTPASIKRYLNENGVKTAGGAEWIDSTVFRLIENEIYKGDYIMHKHFVNEERKLVRNRGEVDAWYIEDDHEAIVSPKLWQRAQDALEAKRDYLAEGSVIEEFTEENYPYMNKIYCARCGHPLYKRIYSNGNRLNWGCSGTKRYGKSFCEGINIPDGVLRGAWHFDENMYIGEKQTDKGKKEFTYLKEASWKRRHKKKVPEAIPKNTEEAYPYRKNIFCGLCGSRLVRHVNPKSHKVIWICNGAKRKGVAFCRGTRIPDSVIRGWGEIKKDIYIQRKDDKNGKKRYSYTSKKPTA

SEQ ID NO: 14014 - protein, 464 aa, synthetic construct
MARSVTVIPARNRQRETGRRAVQEKKIRVAAYCRVSTDQEDQIHSFEAQVDYYTKYINDHENYEMAGIYADEGISGTNTKKREQFKRMIADCEGGKIDLVITKSISRFARNTQDCLEYSRKLKNLGIGIIFEKENINTLDSTGELLFTILSSLAQDESRNISENCKWGIRTKFKNGEMHLNTFKFLGYDKDENGKLVINKEQAKTVRRIYRDFLIGINPAQIAKELTEEKVPGCLGQTKWYPSTVTGILKQEKHMGDALLQKTYTADFLTKRQVRNNGEIAQVYVKDSHKGIIDKQTWNAVQEEFDRREKFMESHGTDRYSYGADCMPFCEKVFCGECKSLFTRHSWRSRGIVQWQCKNHRKDGKVACTNAYVDNAYLEKGFVKAFNRLVTDRDKHMERWQQMKSDGTPLEKIRAGQMMEAVGNEPLTRFVPEIAQLVLCEVTVLGAKKYEFFFLEGSRVKVSV

SEQ ID NO: 14015 - protein, 520 aa, synthetic construct
MKNVTKINQVDFFIFKKTRVAAYCRVSTDSDEQELSLETQKNHYESYIKANSEWEYAGIYYDDGVSGTKTAKRDGLLRLMEDCEKGLIDLVITKSISRFSRNTTDCLTLVRKLLNYDVYVIFEKENINTGSMESELMLAVLTSMAESESRSISENEKWSIKKKFKNGTYVISYPPYGYANVDGEMVIVPEQAEVVKEIFAGCLAGKSTHIIAKELNEKGVPTKRGAKWTGATINGILTNEKYIGDALFQKTITDASFKRKRNYGEEEQYYCENHHEPIIDKDTFEKAKEAIRQRGLEKGNCSEDTAKYQNRYAMSGKIKCGECGRSFKRRYHYTSHGKSYNAWCCGGHIEDSSSCSMKFIRDDDLKRVFLTMMNKLRFGNDLVLKPLLISITTSNSKKNIHSMEDIEKDMQSNEEQRKQLNTLLTRGYLERPVFAEAHNKLIMEYEQLAAKRDLLYRMDNAGYTMEQALSDMVSFLNGAEPFTEWDDSLFERFVEKVKVLSREEVEFELKFGLRLKERID

SEQ ID NO: 14016 - protein, 524 aa, synthetic construct
MAGAKNITVIPAKKRVGNTVTAEDKPKLKVAAYCRVSTDSEEQATSYDAQVEHYTEYIRKNPEWEFAGIYADDGISGTNTKKREEFNRMIEDTMAGKIDMIITKSISRFARNTLDCLKYIRQLKEKNVPVFFEKENINTLDAKGEVLLTIMASLAQQESESLSKNVKMGLQFRYQNGEVQINHNWFLGYTKDENGHLIIDEEQAVVVRRIFREYLQGASLKNIADGLMADGIPTATGNKKWRGDGIRKILTNEKYMGDALLQKTYTVDVLTKKRVSNNGIVPQYYVENNHEAIIPRQLFMQVQEELFRRAHLKTEGGKTKRVYSSKYALSSIIYCGKCGDLFRRVAWKARGASYNKWRCASRIEKGPKNGCDAEAISESEIQKAVMRAINKTLGGREEFLVQLQHNIEDVLNGDSTATLEYIDQRMAELQEKLVMCVNKNAEYDAIAKEIDALREKKAAVVTKDAEQEMLRKRINEMRHFLQTQTSRITEYDEQLVRRLIEKITVYDDKLIFEFKSGMTVELKR

SEQ ID NO: 14017 - protein, 501 aa, synthetic construct
MEIQIREGSREQKRKLKVCAYCRVSTDADEQENSLENQIRHYETVIKANPDYEYAGVYSDFAISGFKEKRPGLQKMLADAEKGKIDLILTKSVSRFARNTSIVLEATRKLKELNVGVFFELQNINTLSGEGELMLTILAAFAQAESESGSAGAKMVYQRKYEAGIPVQYLERSFGYTKDERGVFVADEAEAVWVRKIYEMAADGYTPASIKRYLNENGVKTVGGVQWVDSTVFRLLENEIYKGDYIMHKHFVNEERKLVRNRGEVDAWYIEDDHEAIVSPELWQKAQDALAAKRDYLAEGSVIEEFTEENYPYMNKIYCAKCGYPLYKRIYSKGNRLNWGCSGTKRYGKSFCDGINIPDGVLRSAWHFEENTYIDEKASDKGVKEFTYLKERSWKRRHKKKQPSAIPENTETEYPYREKIFCALCGSRLVRYVNPQNYKVTWVCNRRKRKGKEVCDGTRVPDTVIKGWGEIKKDIYIQRKDDKNGKKRYSYTSKKPSGIRV

SEQ ID NO: 14018 - protein, 463 aa, synthetic construct
MARSVTVIPARNRQVSGYRAAPQKKIRVAAYCRVSTDQEDQLHSFEAQVDYYTKYINDHENYEMAGIYADEGISGTNTKKREQFKRMIADCGKGKIDLVITKSISRFARNTQDCLMYSRKLKNLGIGIIFEKENINTLDSTGELLFTILSSLAQDESRNISENCKWGIRTKFKNGEMHLNTFKFLGYDKDENGKLIINREQAKTVRRIYRDFLWGLNPAQIAKELEEEQVPGCLGQTKWYASTVIGILKQEKHMGDALLQKTYTADFLTKRQVKNNGEVAQVYVRDSHKGIVDKETWNAVQEEFERREKFMQKHGTDRYSYGSECYPFCEKIFCGECGSLFTRHSWKSRGIIQWQCKNHRKDGKVACTNAYVDNADLEKGFIKAFNRLVGEREKHIERWNSMKLDGTPLEKIRARQMMEATESGQLQQYVPEAAQLVLEEITIFGAKKYEFAFLEGSRVKVSV

SEQ ID NO: 14019 - protein, 546 aa, synthetic construct
MKAAIYSRKSKFTGKGDSIENQIQLCMDYSKSIGIKEFLVYEDEGFSGGNIDRPQFKKMMQDAKDKKFDCLVCYRLDRISRNVSDFSTLIEKLNKLEISFISIKEQFDTSTPMGRAMMFISSVFAQLERETIAERIKDNMYELARSGRWLGGKTPHGFTSKKISFLDENLKERSMYQLEVNDEQMEIVKLIFNKYLELRSLSQLYKYVYHNGIKGPRGGKFDPSSLSGILRNPAYVKANEDILDYLRSLGMEVVGVPDGQCGILTYAKNTSNSIAAIAKHHGVIEPDVWLEVQSILNENKDKIPRISTGKTALLSGLLKCGKCGANMRIMYKGKRNDEDLKYYYVCGTKRSLGVEGCNCKNLNGPLVENLVIDKIKNCNIESVINAFNSNKAKVDTVFSDVRSEIDLFKNSISEKEKLIGNLVMELAKNTGSVASEYIISQIESLNGEIDSLKSKVSELESSSVDINSASLNLDIIVSNLKKFNYEVDDASLDDKRLLLFTIVDSIVWDDASGNLSIVYMGAKMDDLVSLSDGSHFCSDGRSYIYE

SEQ ID NO: 14020 - protein, 598 aa, synthetic construct
MPRKKKLQEVGGLRLVAYYRYSNGGQQTEQSIEGQRRDCEAYAKAHGYKIVHEYIDRHISGKSDSRPAFQQMISDSDSHLFDAVICWKTDRLARSRYDSIIYKTRLRKNGVKILYAAETVVDGPEGIIIEGLMESLAEYYSAELAQKLRRGQRESALKCIALGGNRSFGYDIGPDKHYCINEKQAPAVRYIFEQYAAGATAADIVRELTARGYRTSRGNPFNKNSICRIITNEMYLGVYKYADIRIEGGVPAMIDRELFNRCQTQLAFNRAHGGGKGAPRADYVLVGKLDCGLCGHAMKGASATGHTGSKHYYYTCTQHVEKKCPKTSIEKNYLEQIIVDGVAKYVLTPEKISQIVDCMMELQAKEQEPKGNPEKDALEAELAECRRKQNNILEAIEEGGSARLAARLRTLEEQEAQLTFAMGEINNAPTPPQFSREALTFMFEQFRREEDEVDEEYRRRILDTFVSSILLYEDRAEVKFNITDQKTGDFERVILPISANKKPPEDDDITSNSGGSTALRLVEHQGVEPWHRSPGLSHFEFYPLRSTQWNIVEVIRLYRKIQTIEITLKISSKSERSRLHADLNPLEKSAKNPPKREN

SEQ ID NO: 14021 - protein, 540 aa, synthetic construct
MTAVIYARYSSDNQREESIEGQIRECTAYAEKKGITVVKHYIDRAISAKTDNRPEFQQMIKDSDKKLFDIVLVWKLDRFARNRYDSARYKTQLKKNGVKLMSATEIISEGPEGIILESVLEGYAEYYSADLAEKVVRGQTENILKGRCNGGRGTFGYTLDSERKFHIDPLTSPFVLESFKKYNEGSTMKEIRDWLNENGIKNPVGGAFTYNSVEHMLKNRWYIGELKFRDVVVPDAIPPIIPLELFEDVQEKIAKNKKAPARRKAEDDYLLTTKLFCGYCGALMFGESGTSRTGEVHCYYKCATAKKHKGCKKKTVRKQWLEDLVVNQTMQLVKDDAAMESIIAKVIELQNKENTNIPLYEKQLRDAESGIQNMLNAIQAGILTSSTKERLEQLEKTKRELEARIAEEKLAKPKIKEEFIRFWLLRFRKLDMSLKDQRQALVDTFINAIYLYDDKVLITFNYKEGTQTVTFGEASEVASEGNGSDLDCIPAPNYENPNLFSIGEGFGFFVLFLQGFHNKKGRCNAVICSYKTSFGLERRI

SEQ ID NO: 14022 - protein, 456 aa, synthetic construct
MRNKEIAPALVRVALYIRVSGEEQKIKGLSLEAQQERLEAYARERGWVIVGIYIDAAKTARKNIHKRTEFQRMMDSVKRDEVDILLFARLDRWFRSVADYYKVMEILQAHNCDWKTTDEEYDTTTANGRLYINVKLSIAQNEADIDGERIDVVFDSKIAHGTVVSGSAPFGFRVNEEKRLEVVPEDAAIVQDAFNYFESTVSQRATVRYVRETYGVNWCDATFRRMLKEKLYTGVYDRGGRYNDQFCPAIINRQQFDRVQALLTRNVRSAPSGKVYIFTSILTCAECGHKLVGYKSSDYFYYRCNQHFQRGRCSHNHSAREDVVEQWLFEHLGEELERCQLEWGVEAAKKKASIARTDKAALKRKLTKLKELYVNDLIDIEDYKKDYQIYVSALNQIPEPAQEAPPDFAAVRRLLDNSFRTIYDTLTREEKRTLWRSVIKEIRIDNDQNITGVVFG

SEQ ID NO: 14023 - protein, 631 aa, synthetic construct
MGKKQKTNGGDAVIYARYSSHNQRDVSIEQQVEACRKHAAELGLTVTATYEDRAISGKTDKRPSFQRMMRDAEQHKFAYVLAWKSNRIGRNMMQALVNESRLVDCGVKVFYAEEDFDDNAAGRFALRSMMNVNQFYIENMAEDVKRGLYDNAKKGLVNGSLPLGYKRGADGKPEIDEPKAAIVREIYTRVAAGELFASIAADLNARGIRTARGREWNKGSFHVLCHNDRYRGIYMYGDIRIPGGMPRIISDELFYDAQEAYGMKKDNRYGRARHGAENYLLTGKLYCGHCGSYMVGISGTSKTGEMHYYYACQKHRLEHTCEKKAIRRDVIENAVARVIMMYCLDDETIDFIVDSTIAYFKQKDHELHIEAMENELVAVQQAISNLMKAIEAGIITPTTRTRLLDLEEQQAKLSAKINTAKAERVEIDRDDLIAGLQLFRTGDIKNKKFLAKLFNTFLLAVYLYDDNRLKIVFSFTGNHNNIEIPLDLDNDCPDSESGPYETEVRMSHLECRKNSGTPPSSGGAEKGDGCSGGRFVRTAPLPPHKKWPQAQAWGHFLSCGEEASNSTAARRRQAISPVGCCLVRGSHESGMSTGTAAADDPKLRLGVIFYLAEKRGRTARPPDGSYHDMDK

SEQ ID NO: 14024 - protein, 497 aa, synthetic construct
MTAVIYARYSSDNQREESIEGQIRECTAYAEKNGITVIKHYIDRALSAKTDNRPDFQQMIKDSEKRLFDIVLVWKLDRFARNRYDSAHYEYLLERNHVKLVSATEPISDSPAGIMVKSMLTGMAEYYSAELSEKVVRGMTENVLKGKYNGGTIPIGFKVDEEKFFQIDPLKAPFVVEAFQRYNEGATMKELMNWLNDSGVTTNRNQKFTYNSVQTLLTNKRYIGENHFKDIVMPDSIPAIVDKDLFEEVQQKIKKNSRAPARHKAEDDYLLTTKLFCGMCGAMMFGECGTGRNKVVHHYYKCATAKRFKTCKKKTVRKEWLEDLVIAETMKLIQDDAVIDAIVAEVMELQDQENTTLPLLEKQMREVENGIENMLNAIQAGVLTNSTKSRLEKLEAQQKELEVRIAEEKIARPRLSENQVRFWLTRFRKLDPNVKSHRETLINTFVNAVYLYDEKVLITFNYKDGTKTITFDEIAAKDAPVGNGSDLGCFAPPKKNA

SEQ ID NO: 14025 - protein, 434 aa, synthetic construct
MKKTIVNIAPAVAETPRTKRVAAYARVSCGKDTMLHSLAAQIDYYRDYIMMNPEWRFAGVYADESKTGTKDNREQFQLLLTECRSGNIDMVITKSISRFARNTVTLLEAVRELKSLGIDVFFEEQNIYTLSAEGEVVLTLLASFAQAESLSCSDNCKWRIRKGFEEGRASTCTMLGYRLVDGEITLVEEEAETAKRIFDLYLVGYGLQKIANTLNEEGLYSIFGNEWHPTTVRKVLTNEKYCGDLLLQKVYRENHLTKRKCYNTGELPQYFVEDDHPAVVTRQIFMAVQDELKRRAKEKTQPVGSKSSFTGKIRCSCCGKNYRRKTTPYNIVWCCSTYNSKGKKYCPDSKVIPEETLKRAAAEILKTDGFSDEAFETQICTIEAHPGNLLRFIFTDDSTTDYVWKDRSRSESWTDEMKAAAGRKTKERNANHGK

SEQ ID NO: 14026 - protein, 548 aa, synthetic construct
MANKTVKKIEATKPTLSAQYSTFTRKRKVAAYARVSTAKEEQENSFDAQVSYYTQKIQANPEWVFVEVYSDEGITGTNTKKRDGFNRMIEDALAGKIDLILTKSVSRFARNTVDSLVTIRQLKEKGVEVFFEKENIYTLDAKGELLLTIMSSLAQEEARSISENTSWGRRKSFADGKVSLGYSNFLGYDKGPDGELVINEEQAKIVRRIYAEFLAGKTPGGIAKGLTADGIETPGHKKVWQASTVLNILKNEKYYGAAILQKKITVSYLTKEKRPNTGELPMYYIEKDHEPIVSPETYQMVQEEMRRRKEAGSNMQCVSIFSSRIICGDCGGYYGRKIWHSSTKYTAWHWHCNAKFQKRKYCETPTLKEESLEETFVEVFNGLIADRDEIMENYRLCIDTVTDDSEYRRQLEDLNNGCGEVQTLIRSLLMTYSRQDTADDIHEKLKEYEDRLDTMARLKQELDLKIAACAAKRVQITGFLNELMKHDAPLAKFDPLVWQAVINYATVNRDCTITFTFRDGTEKTVPIKNGVRPYTKRNKPQEVDGNDG

SEQ ID NO: 14027 - protein, 490 aa, synthetic construct
MTDKNLLVITPHRKEPGKQRIAAYCRVSSRSDEQLNSLTNQINFYRSLFENDDTVIFVGIYAEEGLSGTQAESRPQFMKMIESCRSGLIDCIWTKSVSRFGRNTVDTLIYTRELRSLGIDVFFEKENIHSTESSGELMLTLMAAFAESESETMSENIKWGKRRRYEQGITGSITLNGMYGFRQNKGIVTIVENEAELVRQIYKDFIDGYSYGEIADRLIAEGVPTRMPGASWAKTTVQHIIRNEKYCGDCLFQKAFIANPITHQQVRNNGELPKYLVEDCLPAIVDKETWKLAQAVAARHSSHRQAPNERYPFTGKLFCGVCGKPYYYYHYTTTNKQPLAAYRCMSRKTQSAVEVPGQTYTPPRKATFNLNASPELIAYRERYCKPPKERPMLCTDIRISIDLPQKAFCRAWNLIVAKKLRYQATLRSTVDNAEDILVRYRAEEMCLLIDEIGKINEFSYPLMLKTLDRVVVNANGKLTFIFQSGIKITV

SEQ ID NO: 14028 - protein, 527 aa, synthetic construct
MEERAKAVIYARFSSDKQREESIDGQIRECTAYAESQNLEVIDAYIDRALSARSDNRPDFLRMIADSARKNFRYVIVYQLDRFSRSRYDSAVYKNKLKKNGVRVLSAKEHIGDDPSSIILESMLEGYAEYYSAELSQKVKRGMTENILEGKWVGCRVPLGYKLTADKKLQIVSRDADAVRLIYTMYNANERIIDIVRYLNAHRYKTAAGRAFTRSSLTKILGNKIYIGTYEWDGHVVEQFAPPILDDDVWEAAQKRTQQHKLNPRPKRRSADYALTGLIYCGECGNPMTGQSGRSKNGSMYRYYRCSTKNNYHSRGKKQHIKCKSRNISREKVEDLVLDETVRILSNPKAVKIIAKQAANVQKIDPTAQEQARIAQERKTIQAKLENSIAAVENGLCSKTIAENIERYESRISELDQQIDELKFAYAPIRIDAIAVEFFLKSLLNKKKDHDKYRLDMFRTFIRQVIVYADKIEIRYNYTACPQILKNPVSIALTGLPECSGNDSVVRLEGFEPSHPVPETGALSPEL

SEQ ID NO: 14029 - protein, 548 aa, synthetic construct
MKFKYPAMGTTKNAVIYARYSSHSQREESIEGQLRICHEYAKVEGLAIVGEYIDRAISGTTDARPDFQRMIDDAKKSQFSYVIVYRLDRFARNRYDSVLYKHELKQCGVKVVSATEGIGTGDESILLEALIEASAEYYSMELSRKIKRGRQDSAMKGNFLGGAVPLGYKVVDSKFIIDDETAPIVRYVFERYAAGIGKKQIIDELTAKGYMRRTGKPFTYRAFDSVLRNRKYTGEFTQTGITVEGGCPAIVDTEMFEKVQARLEINRRAPAKAKAKTEYLLSGKMFCGYCGEPMIGISGTGRHEKTFYYYSCVGRRGKSGCKKQHEKKDFIEWYVCEQTVQYMQDPERLSHVAKRIIEINDAEFDGGKVKELERAVENCDNDIRKLVDALTTIPDAGRAALYDKIERIGAAKADMEIDLAKLRVLSEVRYKQEDVEAWIRSMCRGDLMDFEFRRQLIDVFINSVYLFDDRVVIVYNIKNGKQVSAIDVLNAVEELDGVELFPDSAEDSSAGGNGSFLVTDAPPYMKNPNLFPIGNGFGFLIFIKDIID

SEQ ID NO: 14030 - protein, 508 aa, synthetic construct
MKKAIAYMRFSSPGQMSGDSLNRQRRLITEWLKVNSDYYLDTVTYEDLGLSAFNGKHAQSGAFSEFLDAIEHGYILPGTTLLVESLDRLSREKVGEAIERLKLILNHGIDVITLCDNTVYNIDSLNEPYSLIKAILIAQRANEESEIKSSRVKLSWKKKRQDALESGTIMTASCPRWLSLDDKRTAFVPDPDRVKTIELIFKLRMERRSLNAIAKYLNDHAVKNFSGKESAWGPSVIEKLLANKALIGICVPSYRARGKGISEIAGYYPRVISDDLFYAVQEIRLAPFGISNSSKNPMLINLLRTVMKCEACGNTMIVHAVSGSLHGYYVCPMRRLHRCDRPSIKRDLVDYNIINELLFNCSKIQPVENKKDANETLELKIIELQMKINNLIAALSVAPEVTAIAEKIRVLDKELRRASVSLKTLKSKAVSSLGDFHAIDLISKNGRELCRTLAYKTFEKIIINTDNKTCDIYFMNGIVFKHYPLMKTISAQQAISTLKYMVDGEVYF

SEQ ID NO: 14031 - protein, 515 aa, synthetic construct
MKEAVIYARFSSSKQREESISAQLRECHAFAEEEGLTVIHEYIDRAMSARTDQRPSFLQMIQDSDKKLFSYVIVYQLDRFSRSRYDSAVYKHRLQKNGVRVLSAKEHITTDPTGILLEALIEANAELYSAELSQKVTRGMLQNVLEGKWPGGHLPLGYRLDGDHRLVPAPEDAPTIQLIYEWYLQGLNEARIIRKLNAEGYQTSVARPFTRTSIHRILRNPIYIGTFRYKGKLYPHFAPPLLTEPLFYQIQALLDRHEHKHVVPHGQDFALVGKAFCGLCGQHLVGTSGTSHVGVRYLYYMCSSRTHILDRKTHTPCKFRNIRADWLESQVYCVTLQILYDPVIRKDIAKNCAVQQKDLLTESPRLKQLKTVRKELQQKLDNSIQAIESGIFSKTISDNVCRYEKDIKKLDAKIRGEKLLSRPVSISEEFIEYYLEKVYKQKKDDGQMSEIFQTFIHRITVFTNYIAIQYAFCENLPIPETPVIMRGSNKSKMVRLEGFEPSHPVPETGALSPEL

SEQ ID NO: 14032 - protein, 520 aa, synthetic construct
MKNVTKINQVDFSVFKKTRVAAYCRVSTDSDEQELSLDTQKDHYERYIKANSEWEYAGIYYDDGISGTKTAKRDGLLRLMEDCEKGLIDLVITKSISRFSRNTTDCLALVRKLLNYEVYVIFEKENINTGSMESELMLAVLASMAESESRSISENEKWSIKKRFQNGTYVISYPPYGYANVDGEMVIIPEQAEVVKEIFAGCLAGKSTNIIAKELNEKGIPTKKGAKWTGGTINGILTNEKYIGDALFQKTITDANFKRKRNYGEEEQYYCEDHHEPIIDKDTFEKAKEAIRQRGLEKGNCTEDTSKYQNRYAMSGKIKCGECGRSFKRRYHYTSHGKSYNAWCCGGHLEDSKSCSMKFIRDDDLKRTFLTMMNKLVFGNDLVLKPLLISITTNNSKKNANSVEDIEKEMKSNEEQRKQLNIPFTRGYLERPVFAEAHNKLIMEYEQLAAKRDLHYRMDNAGYTMEQALSDMVSFLNGSEPFTEWDDSLFERFVEKVKVLSREEVEFELKFGLRLKERID

SEQ ID NO: 14033 - protein, 524 aa, synthetic construct
MAGAKNITVIPAKKRVGNTVTAEDKPKLKVAAYCRVSTDSEEQATSYDAQVEHYTEYIRKNPEWEFAGIYADDGISGTNTKKREEFNRMIEDTMAGKIDMIITKSISRFARNTLDCLKYIRQLKEKNVPVFFEKENINTLDAKGEVLLTIMASLAQQESESLSKNVKMGLQFRYQNGEVQINHNWFLGYTKDENGHLIIDEDQAVVVRRIFREYLQGASLRTIADGLMADGIPTATGNKKWRGDGIRKILTNEKYMGDALLQKTYTVDVLTKKRVSNNGIVPQYYVENNHEAIIPRQLFMQVQEELFRRAHLKTEGGKTKRVYSSKYALSSIVYCGKCGDLFRRVTWKARGASYNKWRCASRIEKGPKEGCDADAISETEIQNAVVRAINKTLGGREQFLVQLQHNIEDVLNGDSTATLEYIDQRMAELQEKLVLCVNKNAEYDVIANEIDALREKKAAVVTKDAEQEMLKKRIEEMRQFLQTQSSRVTEYDEQMVRRLIEKITVFDNKLIFEFKSGMTLELKR

SEQ ID NO: 14034 - protein, 525 aa, synthetic construct
MQENISINQIIMYLRKSRSDDPCMTVEEVLARHERQLQDYAVASFGSPVPEHHIFREVVSGETIADRPVMRQLMHLLESGSVRGVLVIEPQRLSRGDLEDCGRIINAFRYTNTLVLTPPKTYDLSDEYDRKFFEMELTRGNDYLEYTKKILNRGRLASVKQGNYIGSVAPYGYRKVKIGSGKDTAHTLEIVPEQADAVRMMFQLYLAGNGFTRIAAELDALGIKPLKSDHWSPAAISEMLSNPVYIGKIRWNHFKTVKTMQNGQITKTRPANSDYILVQGKHPAIIDQKTFDAVAARRGTAPKVKRGHELRNPFAGLVYCGTAGCGRSMTFKQFTNYRSKVPRRSESMICSNQRICHTKSVQYSAFVERVKEILSKTVDDFEIKLQNDDGNIVRIHENIIRNLEQDLVKLKDKDLRQKDAYEDGIYTKEEYASRNAKLQEQICEVQLSIQRAKDTMPPEVDYQERVSRFSDCLSKFEDTDISASEMNLLLKSCIEKIIYHNSSESKPGIGRFVSNPFELDIYLRL

SEQ ID NO: 14035 - protein, 545 aa, synthetic construct
MQAATQVMPPKVVHTIPATINLQEEVKNAHKQLRVAAYCRVSTKQEDQLNSYDVQRRAYTDKINGESGWTMVGIYADKGITGTSVKKRDDFNRLMRHCKQGKVDMIITKSVARFARNTLDCLKHTRMLKEHNVDVYFEEQGIHSIQPGAEFYITIYGSIAQSESENISANVRWGKSQSAKEGNVPFHYKRFLGYRRGSDGKPEIDPEQAAVVKRIYERFLAGDSLATIANDLNADGIPTPSGIGQWQRGTIESILTNEKYKGDAILNKTYIRDCLSKKVMINNGERPKYYVENNHPAIIDSCTFGRVQEEMARRSGKRKVKQVGTKTEQGRYSSKYALTELLICGECGTPYRRCTWAANGKKKVVWRCINRLDYGKKYCHDSPSIEESVLQEAIMKAVLQTAKQNADVLKTLKLHIGMGLSAETTEDNSLDLQIRIAEVEAEFQKMLKAIAADNVEAFDEEKAKALMDEKAKLQIQLDRIADTKQKRENAKSRLDEIFTIIEALANHPISYDDQIVRQVLESVIVESKEKIKVVFVGGLEVTQLM

SEQ ID NO: 14036 - protein, 511 aa, synthetic construct
MNVIEITAEKKPAQDTIRLAAYCRVSSDSEDQLHSFAAQIRYYKDYERRHPQYRLVDIYADEGITGTCMDKRDDLHRLIRDCKKGLIDRIIVKSVSRFARNTQELLATIRFLKDIGVSVYFEEQGIDTDKLNSEMIVTFPGMAAQQESESISGNMRWSYKKRMESGDFNCCAPAYGFDLIDGNLVINETEAVVVRRIFSMYLQGYGKQAIANKLNEESVPRRHGTKLWYAFGIDYMLNNERYMGDALLQKKYTTDTLPFKKVKNRGERPKYYVENANPAIVSRETYTAVQELQKSRQKNMGGKKTSYPLTGMLRCPDCGRSYRRQIVRGRAYWLCSGRASGATICSSQRMAESDVHEAFNKMLFKLKKHHHAILGALIRDIEVMQSKTSENHEKIAEIDKEIADLAARNLVIVRLHTSGILNGSDYSAQSSEINNRISALRSERKKKLAEDEGDEQLDKLKELQSILDEYEPTEAFDEDLFHQIIEKAVVMSKSGIAFYLIGGLKLTEAIA

SEQ ID NO: 14037 - protein, 528 aa, synthetic construct
MAKKQTDGNLALEQQRVIVIPAHDEIVARKLRVAAYARVSSSSEDQLNSYRVQNQYYSELISGNPDWEMVDIYADEGITGTSVEKREDFQRMMCDCRKGKIDRILVKSISRFARNTKDCLAAVRELKELGVSVLFEEQGIDTARVSSEMVTAIMASLAQKGSESISGNVQWGYQKRMESGKFNTCKAPYGFTLHEGKLSIIEDEAAVVRFIFQLYLNGLNGYEIANTLSQQEIPPGREMGTWKDSSIYYILKNERYAGNAVVGKSYSTTTFPHKKVRNHGEREMYLLSDSNPPIVSPEVFDKVQTLLQSRKNAHIGSTNQTFSRKLYCANCGRSLKRKFTNDKMYWVCNTHFQNAASCPTPPYHTPDIEQAFCRMYYKLKHHGSPIFTQMLSNLQKIRYSRMLWSEDVISLNKKISDILSQVQFLAQLQQAGGVDPDTFISSNNKLNEQLRRLKQEKARLLDTDSDDLADRTRDLMDVLEDGPDFLDSFDAELFDALVNKTIVDSNERLRFRLKNGLELTEQIERTRR

SEQ ID NO: 14038 - protein, 541 aa, synthetic construct
MTDEKPRVIIIPPKPELQQTTTVTKQLRVAAYCRVSTKEEEQASSYEAQCEYYTDKIMSNKEWTMAGIFADEGITGTSTKKRTEFLRMIRLCKQKKIDLILTKSIQRFARNTLDCINYTRILRQLGIGVLFEKENINSLPADSEFMITMYGAMAQSESESISGNIRRGKQMHAKVGTLKIPCYRLYGYEKDADGKFRVIPEQAEIVREIYKRYENGASLRNLQDWLEENQIKTVLGESKWTTTAIKGILTNEKYCGDVLLQKTFRTDVISKKVVKNIGQMTQYYMPDHHEAIVSREQYNAVKAEMARRSALRSPSKTAVTGRSCYTSKYALSDRLVCGECGTLYRRCTWTSLGRKYPVWRCTSRLNYGTKYCRDSPTIKEEPLQNAILSAINSAMSSKPALLDRIRNAVSVELLPVQGQTLSLADIERRLTQLDERFQSLLAEAIDAEDKEACNAQFAEILAEQTALKKQKEAILQSSTDASRVCTRMKQAEQAVENAAQTITEWNENAVRQIVERVTILSADEILVQIKGGAEVKQRLER

SEQ ID NO: 14039 - protein, 521 aa, synthetic construct
MAKKVRAIPATLNRFNSEPVAEVRKRRVAGYARVSTDHEEQATSYEAQMSYYKNYIESREDWEFVGMYSDEGISATNTKHRDGFNQMIEDALARKIDLIITKSVSRFARNTVDSLSNVRKLREKGVEIYFEKENIWTLDAKGELMITIMSSLAQEESRSISENTTWGKRKQFADGKGSVGFKCFLGYDKDFKINLEQANTVKLIYKLFVSGLSFYAITKELGERNIKAPAGGDKWHISTVRSILTNEKYRGDALLQKEYTADFLEKTRKKNHGEIPQYYVEEHHEAIIPPEQFDFVQAEIARRDKDGKYSGVSIFSNKIKCGCCGGWYGSKVWHSRDKYRKVIYRCNRKYGKGIEPCSSPHFTEDQIKEIFLKALNTLIGEKDEAIANLLELIDTVCDTGSLALERDGIEQELIMMAEHIENLIRENARVAQDQEEYAKKEEKLRILYGEKHSRFEELESAIQEKNDTREILMNFIKSLQGLDGEQTEFREELWGGLVDHIRAENEKTVTVVFRGGIEITV

SEQ ID NO: 14040 - protein, 500 aa, synthetic construct
MPRITQIAPSLPRIKPKLRVAAYARVSMETEMLHHSLSAQVSYYSSLIQKNPEWSFAGIYADEGITGTSTIHRDEFNRLLADCENGKIDMVIVKSISRFARDTVDCLNTTRHLKELGIAVYFEREKINSLSDDGELLLTLLASFAQEESRSISENVKWGIRKRFEKGIPNGHKAPYGYEWDGEMFRIISERGEVVKEIYQRYLAGEPAYSIAKVLAECGFTGQMGRPIEQTTVKEILSNRSYTGTMVLQKNFFTENKVRKQNKGELPMYLVEEMYEPLVTEADFEQAQVIRQQRADEMPNKNPVLTPFSGRVKCGNCGCGFSRRTSGKKKRWVCNTRERKGMDICECRPIDEQELIDATMKVMGDRILDEEKFKKEVKRITIHGDCIMFAFENGRTREVNRTYSGSRGQNAFTNKVRCGICGEKCERDNWGNKKVWSCSQPRTGCQLRRLAEPELLQAAEHILGDNFEGKVVQHIESVMIYDDRLGFIFKDGTVKTWQRK

SEQ ID NO: 14041 - protein, 524 aa, synthetic construct
MIFCCYGRKSVYSDRSDSVDNQFRMCRDYVNVKYSGQVDDFRAYSDEDFTGANTNRPDLQRLLEDIRSGAADVLIVYQLDRLSRDVRDFANIYATLEEHRVKFVSIKENIDTSTPIGRAMMYVTVVFAQMERETIAARVTDNMIGLAKKGYWVGGNPPVGYVRDQIIVDGKKHCAITPDPEGARYVTWIFDSFIQFGGSIQKMETQFKHKGIRTQRGGFFSASQLHKILTMPYCVEATPEVYDFYQAKGCIMDPGSPREKWDGSVGVMVYGRTTEKNKKHELQPPDQWRVCLGVHKPFMPADKWLAVQARFAQNQRFKSARWPSPLLKGVIRCKCGALMSIGRKQKVDGSVSSAYYCPKRTRQGADACDMRQIKCEILDVKVINILRAVEQDNTAILRYVQKDQDTAARPDPKKISGQIKSCEAKIEKLAASLALASGSAATKYIIAEMERLDLEIQALNREYTIAASEERKRSAAQVSTQERAKIISEKMRNFDGFTAAERNAIAREVIKKCVWDGETLYVEL

SEQ ID NO: 14042 - protein, 515 aa, synthetic construct
MRIGIYPRKSVYRDNSDSVSVQVKMCKDYAGIVFRDESLEFFVYDKDEGFSGKNTNRPSFQELMKDVKSNKLDVVMVYKLDRISRNVKEFSSMYETMQDHDVAFVSVKESFDTSTPIGRTVMYILAAFAQLERENTSERVGDNMKQLGASGKWTGGKLPSGMSSIRKKVDGKEHSYLVINPKTIGRVKLLFDLLNDGYSITKVERYCRDHGITSESGKFLTTSQIYGILTNPVYCQNDLQAYYYFKSKGCTLPDKRFFDGSKGLIGYGRTKGTENKKNMSIENWIIAVGIHEYAISADKWIAAQGRLGMNKQIRTLKYEVGILRGVLTCKCGRLMQNSVYKKNGILFAYYYCTNRQRKGIKYCDSEFVKIETIDNLFIEKLRQIRIDENFIHPHEEPHSINDIGSLQKEIRTTEAALENLTLQLQENVTSTAAKYIVTQIENQDKKLIALNSQLQYEEMRKNKEKSESEERKEIYKNIEFLLDNFDDMSYKEKNELIRRTVKKCVLNGKNLEISF

SEQ ID NO: 14043 - protein, 498 aa, synthetic construct
MEIQIREGNREQKRKLRVCAYCRVSTDADEQENSLENQIRHYETVIKANPAYEYAGVYSDFAISGFKEKRPGLQKMLADAQKGKIDLILTKSVSRFARNTSIVLEATRKLKELNVGVFFELQNINTLSGEGELMLTILAAFAQAESESGSTGAKMVYQRKYEAGIPVQYLERSFGYTKDERGVYIADESEAVWVRKIYEMAADGYTPAAIKRYLNENGVKTVGGTKWIDSTVFRLIENEIYKGDYIMHKHFVNEERKLVRNRGEVDAWYIEDDHEAIVSPELWQKAQDAIEAKRDYLAEGSVIEEFTEDNYPYMNRIFCAKCGHPLYKRIYSNGNRLNWGCSGTKRYGKSFCEGINIPDGVLRKAWHFDGNMYIDEKPSVKGTKEFTYLKESSWKRRHKKKVPEAIPENTEEAYPYRKKIFCGLCGSRLVRHVNPKSHKVIWICNGAKRKGVAFCRGTRIPDSVIRGWGEIKKDIYIQRKDDKNGKKRYSYTSKKPTA

SEQ ID NO: 14044 - protein, 661 aa, synthetic construct
MKKTKVYIYTRVSTSMQIDGYSLDAQKERLTKYAEGNDMVIAGEYSDEGKSGKNIAGRVDFQRMLNDIACKKDGVEYVLVFKLSRFGRNAADTLTSLQFMQDYGVNLISVEDGIDSSKEAGKLMVHVLSAVAEIERENILVQTMEGRKQKAREGKWNGGFAPYGYKLVDGELIIEEDEAEAIRIIFDKFVHTNLGYNGVVNYLNNNGIKKKARQNGYLTQFTTSTVKAILDNPVYYGKIAYGRRKTTKIEGTRNEYHVVAQKEFDLYDGRHKAIVDEQLWKDAQAKRRATASKLEKKHDLDHEHVLSGLVKCPVCGAGLYGNVKRAKRKDGTYYKTYFSYACKHRLNKDGHKCDYHRQWSEEKVDNAVSEIIRKLVNNPRFSEVMKTKINTSVDTSEAEKELANAKKVLKQLIGTKDKIILQIDTLDILDKNYDRKYDDLQKRLDTIYDKIGDAEDLVSETEDKLSNIQKDKITGDNIYNYLLMFDSVYDVLSDMEKKQFYNALLTDIQIYEEEQDKQIIKSIGFKFPVFYDGEFTKRIIRDKEKTVESIVLLSHKSPDSHIDVKVEFGEGEEKVPLDKIAERAKQYQPAPRVTYKMIQEYIEEKYGFKVHTAYIAEVKRNLGFPMYDAPNMVEELKQPRRHPTAEKVEAIKDALKHFGVI

SEQ ID NO: 14045 - protein, 544 aa, synthetic construct
MPAALAYCMASVNLVFAWADLRIYYTIISLVLERRTDYIMTKNAVIYARFSSDKQREESIDGQIRECRAFAEANEINIINIYIDRAMSARTDQRPSFLQMVKDSAKHLFDYVIVYQLDRFSRSRYDSAIYKHRLKKNGVKVLSAKENIKDDPSGILLESVIEGMAEYYSAELSQKVKRGMTENLLEGKWIGGIVPFGYELTSENKLAISPATGHLVSEIYDKYLSGVKTTDILSKLNSLGIKTQRGCNFTRNSLNRILKNQIYTGTFTWAGTSYPEYAPALITQEQYTAMQNLFESRKRKSNTARRVSPQYALTGKIYCGTCGLPMTGYCGKSHTGTTYYYYQCSSKNNKSEKAQRSRIKCDAKNINRDKLEKLVLDTTISILKDKAALKCIADQCMAIQEAEIAHKPAEQLRLESQIKDIEKRLKNSVKAIENGLISQTITNNIETYEKQLTELKAELDGVKLETHIIPITEEAVIYYLNQLIERANKKDGYSLDTFDDFIRRVVVTGKRVDIYYNYTAVPHVLENPAVKMLRGSSEDCLVTR

SEQ ID NO: 14046 - protein, 565 aa, synthetic construct
MEKNLKCALYIRVSTFHQIDKDSLPLQREDLINYAKYILGIDDYVIFEDAGYSGKDTDRPSYQNMMTRIRMGEFSHLLVWKIDRISRNLRDFSDMYDELKKYNVTFISKNEQFDTSTAMGEAMLKIILVFAELERKLTAERVFAVMMSRAEKGLWNGATVPLGFIWDEETKFPKIYEPEAKIVQYIFDLYEKKRSTTKVAEQLNQENVKTKRDGTWTPRTVGAILTNPFYIGTYRYNTKTQKTRRWKDKSEWIVIEDHHPAIISKEQFERVAKILKDNYRGDYNRQRASKNVHILSSIIKCFKCGSNMNAGNDRARKNGFTPSRYTCYQIHKTYTCNNYASDLTVLPFIINYIGNYMTLQDRITKNHSYRDMESILLRGKYFTDIEHINKDDIKCTYKLLVNNLPVINYKLQENQEDKKTTFKDRYDIYKNEKEKQENALKRLDDLFLYAEDSMPKKDFILKRQEITNKIEEINSKIQELRAEENNFVDNKEFSLNAKASFYLITQLIGNSKNIDVRYLLENVDKSIIKDFLSTILNEVSVDHQKVQYITFKNGLTHHFEYKENQ

SEQ ID NO: 14047 - protein, 461 aa, synthetic construct
MKYVACYCRVSHEEQVKYGYSINAQKDALIKYCKENGYKYEFYIDEGISASSMKKRKALLDMLSKLNVFDMILFTKLDRLSRNVLDANTINKMLIENNCTMKAIDEDDVDTTTADGTFIFNLKVSLAQREIGKTSERINFVFKNKRENGQVTSGSKKYGYNIVDKRYVINKDESENIINLYKYFISVNGNIQKTYKYFIEHFPGKGQDALYNYLRETAYIGKYKLYRKEIFLENYIPRIMEDNLFYNVQNLLKKKEKIVGYNKSFSIFSGLIYCNICQKRMSKKQDNRTKNKLMRYVCDNAYRLSSGSLDHKCSNNRLIRESVIEQYLLYNLCDVVAREKTAYNLKVQVESASNTSVDNSQKIKNIENKINKLKDLYLDDLIDKETYRKDYTELNKELNALKNTIVSEIPQKDFSAIEKILNSDYKKIYNKLTTENKRKFWLSIIDKIYVENGEIKEITFL

SEQ ID NO: 14048 - protein, 529 aa, synthetic construct
MALLPRKPAKHPAKPKRGKKLEIEEPGVLYGRYSSHNQKDISVEQQFEKGYELAAEYGIRIIDTYADRAVSGRTDKRRDFQRMMTDAAKGKFRYVIAWKSNRMGRNMLEALINEARLQDLGVRVLYVEEDFDDTAAGRFAARSMMNVNQFYSENMAEDIKRGLYDNAANCMVANGHLPYGYKADETLHYAIDEPKAAVIREIFTRVSCGEAFVDIMASLNARGIKTSYGRPWGRSSFQKILSNERYRGIYIYGDVRKEDGIPRIISDELYFKVQEVITTKKNPQGRHRVNGDYLLTGKLFCGHCKSPMTGISGTSRSGNLHYYYVCQKRRTEKTCEKKNLRRDDIELQVAKAIKRRTLDDDTINWIADSVVEYSQHQESASGIGLLEDQLKDTQRSIKNLMAAIEQGIITPTTKARLMELEKEQSDIDRKITMAKADVIPVNRDQLVGWLKKLQAGDVHDKKYQAELFDTFLIAVYVYDNPDGQDYMKVVFNYAGSKNTVEIPLDPSVIDNVENIETGAVRLSSAQVHQ

SEQ ID NO: 14049 - protein, 559 aa, synthetic construct
MRTIRKIERRIPNLKQRKKVAAYARVSMESERMHHSLSAQVSYYSSLIQKNPDWEYAGVYADYGISGTGMKKRQEFLRMLEDAEAGKIDIILTKSIQRFARNTVDLLRTVRHLKELGVEVWFEKENIHTMSGDGELMMTILASFAQEESRSISENVRWRVKKRFEQGNPNGRFRVYGYRWEGDTLVIVPKEAAVVRRIFQNFLDGKSRLETEREFAAEGITTRNGRRWMDSNIRVVLTNVTYTGNMLFQKEYVTDPILKKRKKNRGELPRYYVENTHEPIIDKETFDYVQQEMARRKELGALANKSLNTTCFTGKIKCGICGRSYMHNRRTDRGFEEFWDCGSHKLKGRNCGAKGSIPHAVLVKESTEVLGLDDFDEQAFLDQVEKIVVPEYHVMVFCMKNGQKLIRHWVSTAKKDCWTDEYKDRQRAWMKNYMANGKGTRFSAFTTRVRCALCGSSFRRCKTKHDRPVYWRCSKGGKCESVSIREDDLKRVAAEAMGLENFDEDRFREKVESIEAGKPDCLTVHFKSGRTEEISYTPTPSKRRPKARRKESGEKWQRQ

SEQ ID NO: 14050 - protein, 467 aa, synthetic construct
MAREIVHIPARRGLSNRATVTDRKIRVAAYCRVSTDHEEQINSFENQVTYYTEYINRNPNYELADIYADEGISGTNTRRRDDFNRMIADCEAGKIDLIITKSISRFARNTQDCLNYSRKLKDLGIGIQFEKEGINTMDSSGELLFTILSSLAQDESRSISENCQWGIRSLFKQGVLHLNTNRFLGYDKDEKGNLVINEEQAVIVRRIYTEFMNGINPDVISRRLRDEGVPGCMGEAKWQASTIFGILRNEKYMGDAILQKTFTSDYLTKKTVKNEGQLEQYYVKGDHEAIIDSEYWDAVQLELERRQNYMTAHSLRTMGRYTDEQPFSNRVLCGECGKVFWRRTWYRLNNTYKVWQCGNRYREKGVVTCHSENLKESDLHGAFVMAWNGILESRAEFTETWKAQAENGNALERFRAKQMLELTKMKPMKEIDLLLVGKVLDYVIVQHGGELEFHFLDGTQLAVEVTE

SEQ ID NO: 14051 - protein, 405 aa, synthetic construct
MRIKVIKPTKAVRQQKKKVCAYVRVSTDSLQQEDSLENQTTYFKGFITANPEWEFVGIYSDQGISGYKENRPGFQKMIEDARAGNIDLIVVKSVSRFARNTETVLKFSRELKSIGVGIFFQLQNINTLSGAGELMLTVLAAFAQAESEGASDNAKMTYKRKFESGIPAHGLECTFGYKASAQGDIVVDEEKAAVVRQIFDLAEQGIWPSKIKQYLNKNGVPGCAGGDWDDTAVFRVLHNVSYKGDAILQKTYTDSRRKRHKNEGQVDQWYIAENHQPIVPPDQWDKVQEILQKRSEHLQTPAPPKPDKPRSSRNTYPLSNLIYCPICGEKLIHKWGKGKNEYWACKTNLKVGKDACKGIWLPAEVANSWGEITEPIVVVQYEDEYGMRRFTAYPKDEYDAFKRED

SEQ ID NO: 14052 - protein, 559 aa, synthetic construct
MRTIRKIERSIPNLKQRKKVAAYARVSMESERMHHSLSAQVSYYSSLIQKNPDWEYAGVYADYGISGTGMKKRQEFLRMLEDAEAGKIDIILTKSIQRFARNTVDLLRTVRHLKELGIEVWFEKENIHTMSGDGELMMTILASFAQEESRSISENIRWRIKKQFEQGNPNGRFRVYGYRWEGDNLVVVPEEAAVVRRIFQNFLDGKSRLETEREFAAEGITTRNGCRWMDSNIRVVLTNVTYTGNMLFQKEYVTDPILKKRKKNRGELPRYYVENTHEPIIDKETFDYVQQEMARRKELGALANKSLNTTCFTGKIKCGICGRSYIHNRRTDRGFEEFWDCGSHKLKGRNCGAKGSIPHAVLVKESTEVLGLDDFDEQAFLDQVEKIVVPEYHVMVFCMKNGQKLIRHWVSTAKKDCWTDEYKDRQRAWMKNYMANGKGTRFSAFTTRIRCALCGSSFRRCKTKHDRPVYWRCSKGGKCESVSIREDDLKRMAAETMGLEDFDEDRFRGKVESIEAGKPDCLTVHFKSGRTEEISYTPTPSKRRPKARRKESGEKWQRQ

SEQ ID NO: 14053 - protein, 522 aa, synthetic construct
MANVTFIPAKHKIGNNVSGDEVTKLRVAAYCRVSTDSDEQETSYDAQVSHYTEYIQQNPQWTLAGIFADDGISGTNTKKRDEFNRMIDECMAGNIDMIITKSISRFARNTLDCLQYIRQLKDKNIPVYFEKESINTMDAKGEVLITIMASLAQQESQSLSQNVKLGLQYRYQQGKVTVNCNRFLGYTKGNDGKLIIDPEQAEVVKRIYREYLEGSSMDKISAGLEADGILTGAGKEKWHTSTINKILRNEKYMGDALLQKTYTTDFLTKKRIRNNGTVPQYYVEDDHEAIIPKELFMQVQEELVRRRVVHKSPSGRKRTYSCNHCFAQIIVCGECGELYRRIHWNNHGRKSIVWRCISRLEPTDADMNCTNRTVNETVLEEVTVKALNQILSSRKVFLKQLQENIARAVVMTDTLSPDGIQARLEELQNELVKAVGNQKNYNALTDEILRLQKMKKDSEVDDHRRTETMNRIKELQDFIGKQETNITEFKETDVRMLIQKITVYEDKFTVEFKSGVSIDIEE

SEQ ID NO: 14054 - protein, 519 aa, synthetic construct
MKKVTKIEENKNPQAAGKKLRVAAYCRVSTGSDAQAESLEAQISHYENYINSRSDWEYAGVYYDEGITGTKKEKRPELKHMLADCKAGKIDFIVSKSISRFSRNTADCLELVRKLLTLNIPVYFEKENINTGSMESELFLSILSSMAADESLSISENSKWSIQNRFEIGTFKISYPPYGYDWNGDQMVINPEQAKTIKQIFTYALSGQGTSAIARRLNEDQVPTKKGGHWNATTVKGILRNEKYTGDCLFQKTYTDSFFNRHHNHGEKNMYLARNHHEAIISHEDFEAAGRILEQHAKEKNISSDSKKYQQRYAFSGKIICGECGSTFKRRIHCTAGTSYVAWCCNTHLADKEACPMMFIRDDDLKLAFTIMMNKLIFSGKVILKPYVEGIRNGSTDDSFHRVQELTTQLAKNTEQRENLQKLAAQGFIDKILFNTETNKLLSNADDFRKEIEALNNTVSLDVSKVTAATDLLHFAEKGEMLHGFDEELFEKYVRQITVKNRTEFSFELKCGLCLTERI

SEQ ID NO: 14055 - protein, 531 aa, synthetic construct
MARKKKQASGDAVIYARYSSHNQRDVSIEQQIEACRKYAASLGLKITVTYEDRAISGRTDNRPAFQRMMNDAEDGKFCYVLAWKSNRMGRNMMQAMVNEARLVDCGVKVYYAEEDFDDSAAGRFALRSMMNVNQFYSDNLAEDVRRGLMDNASKCIANGKQPFGYKRGSDGKVVLDEPAAAVVREVFTRVASGETNTSIARDLNRRGIKTGSNGEWNKCSFHGLCTNERYRGIYIYGETRIEGGVPRIIDDRLWHKVQEAIRMRNRRKNGRHRPGEDDYLLTGKLRCGHCGGYMIGMSGTSKTGTIHHYYACQNRRVGRTCDKKNIRRDIIEPAVAQAIKQYCLTDDVIEWIADKTIEYWEDEDRKLQITSLENELADIKSSISNVMKAIEQGVITSTTRDRLIELEAQQSDLSAKLNSAKEDLVHVDRKNLISSLLLFRNGDVYDRQYQEDLFNTFLVAAYVYDDGNRLKLVFNCFGDSNTVDLDLCSDENNDNSSILNEANCGNLFAQALKQSTRLKPSEEAQVAFLFV

SEQ ID NO: 14056 - protein, 438 aa, synthetic construct
MSTDQEEQLLSYENQVNYYTNYISENPLYEYAGTYADEGISGTNTKKRDEFNRMIADCRAGKIDMIITKSISRFARNTLDCLNYVRELKDLGIGIIFEKENINTLDAKGEVLLTILSSLAQDESRSISENCTWGIRRRFETGKHKMSTKRFLGYDTDETGKLVINRTQEPIVIRLYQEFLDGKTTDHIKRIFEREGVKNWDGGTKWQSTTLMSMLENEKYKGDALLQKSYTVDFLTKKRTQNKGEIQMFYVEDDHDAIISKRIWECVQLEIKRRKKYLEEHGTNSYSHRPESNPFASKIICGDCNKVFARKGWRSSTGVDRKVWQCSERYKVKGVMGCVNRHVEEETLIKAYLMAWNALVENREDFMEQWTEQLQSENLLEGYRAEKFIEYTDGAEPLTEMDTDFMLKTLDHIKVFEDGTLLVVFLDGTEIECKNEEE

SEQ ID NO: 14057 - protein, 434 aa, synthetic construct
MERVVERVDALIPAQPKALRVCAYARVSTGKDAMLHSLSAQVSYYSKMIQSHNGWMYCGVYSDEAVTGTKRERAGFQHMIEECRQGNIDLVITKSISRFARNTVTLLQTVRELKNLGVDVFFEEQHIHTMSADGELMMTILASYAQEESLSASENQKWRVRKAFENGEIINLRFLFGYDITPDGIRVNEVDAAIVREIFERFNGGESMSSICRDLDARGHKGVLGGTWCAERMRNTLSNEKYLGNALLQKRYRNNHIEKKLLPNRGELPMYYAEGTHEPIIDQATFDKAQERLRMLAQQAANRKKPTRSVFSGLIHCGLCGNTYKRVTYRKKHYWNCTTFQTKGKSECAAKRIPEETLEVLTCEVLGAVSFDPDMVRSKITAIRAEKSNMVVFCMDDGSEIVKRWTDRSRAESWTPEMKEKARQRALQARRHKV

SEQ ID NO: 14058 - protein, 529 aa, synthetic construct
MSRTAARSVTVIPPTINPLTHLSKVAVQKRRVAGYARVSTDSDEQFTSYEAQVDYYTQYIKRNPEWEFVKVYTDEGISGTNTKHRIGFNEMIADAMSGKIDLIVTKSVSRFARNTVDSLVTIRKLKEKGVEVYFEKENIYTFDGKGELLLTIMSSLAQEESRSISENVTWGQRKRFADGKVNLPYKQFLGYRKGADGFPEVVPEEAIVVHRIYTRFMEGLTPGAIAKELTADGIPTPSRKQRWQTSTVESILQNEKYKGAALLQKCFTVDFLTKKRKVNEGEVSQYYVEHSHEPIITPEEFDKVQTELARRKQISRQYSGKSIFSSRIVCGDCGSYFGSKVWNSTSKYRRVIWQCNGKFKGEHKCETPHLDEETIKARFVTALNAIIESKDNILEDCRLMQATLTDCTGIDTEIESLLEEIDVVTELTKRCIAENSQMAQNQEEYAARYNGFVERYEKAKARLEQLRTTKATREAQAEAIGAFMFEVQELDALTEFDEKLWLTIIDTITVHADGRMTFKFQGGKTLTSY

SEQ ID NO: 14059 - protein, 464 aa, synthetic construct
MARSVTVIPARSPKVRTGHKAVQEKKIRVAAYCRVSTDQEDQLHSFEAQVEYYTKYINEHENYEMAGIYADEGISGTNTKKREQFKKMIADCEDGKIDLVITKSISRFARNTQDCLAYSRKLKNLGIGIIFEKENINTLDSTGELLFTILSSLAQDESRNISENCKWGIRTKFKNGEMHLNTFKFLGYDKDENGKLVINKEQAKTVRRIYRDFLIGINPAQIAKELTEEKVPGCLGQTKWYPSTVTGILKQEKHMGDALLQKTYTADFLTKRQVRNNGEIAQVYVKDSHKGIIDKQTWNAVQEEFDRREKFMESHGTDRYSYGADCMPFCEKVFCGECKSLFTRHSWSSRGIVQWQCKNHRKDGKVACTNAYVDNADLEKGFVKAFNRLVTDRDKHMERWQQMKSDGTPLEKIRAGQMMEAVGNEPLTRFVPEIAQLVLCEVTVLGAKKYEFFFLEGSRVKVSV

SEQ ID NO: 14060 - protein, 550 aa, synthetic construct
MYYQPKIDFKPEEVIDYLRKSRSDDPLLTVEEVLSKHEAMLDEWAEKHLGGVVPEENKYREVVSGETIAERPEINRVLRLIESPRYKAVAVVEPQRLTRGDLEDIGRLMKLLKHTNTLVITPQRIYDLRDEYDWDAFERELKRGNDYLEYTKKILNRGRLLSVSQGNYVGNTAPYGYDKTFVTEGKRKCPILVPNKEEADVVRMMFDLYVNKDMGCTNICKKFDAMGIKPPKGEYWSANAVTKMLQNIHYIGKVKWNHRKTMTIVEEGEFKKTRPVAKVGEYLIYDGKHEAIIPEELFNAAQAKKGKNTRQKPNTKIRNPFAGLLWCKCGRAMSLRTYKNRDAAPRLLCDGQTHCRTGSCLYTEIEDRVKVILSDCIKDFEVRLKNNEGDSVKLHMRLIKNLETKQKELEEKELAQWEAQADPDPAKRMPQHIFQQLNEKLLKEKEDVRQALCRAYESMPEPVNYEEKIAQFTEALNALNSHDVDAETKNRLLKACIDRIEYHREAPQRIRSQQVRYYDKEQKRTRHKSPLNTGGNWTSPEIVLDVILKA

SEQ ID NO: 14061 - protein, 516 aa, synthetic construct
MQKNTTVETTTKAVIYARYSSDRQREESIEGQLRVCEDFAKRNGMTILHVYADRALSGRSDQRPEFQMMIQAAATQTFDTVLVYKLNRFARNRYDSAKYKHKLKKYGVKVVSAMENIADDPSGILLESVIEGMAEYYSAELAENVMRGMTENALEGKWPGGIVPLGYKLDTEHRLIIDEPAAKTVRWIYQQYLDGKQPTRIIRELNAAGCLTALGKPFRKNSLRTILKNERYIGTFIWNGIKKPNVIPAIIDSADWHKVQEIMKVKKKCVSKAKDNDYYLTGRLFCGHCGENMVGTSGTSKLQRIYRYYICSGHQKKKGCTAKAVRMDKLEDIVCNATTRLLSNRDAIRAIAKQAISAQETQGPSLVLQSLQNQKADISRKLQNCVKAVEEGLISQTVTNHIHDYEKQLQTLTDAIQKEELMNQIPHLTEKHIEFFFWSISQQIKKADKYKSILLSSIVRSVIVCEDFIEIQYNYKKELPILQNPVRIGGSDMPVMVEHRGIEPLTSRLRTLRSPS

SEQ ID NO: 14062 - protein, 463 aa, synthetic construct
MSFFTPNPQLFGLRVVKYIRCSHDDQVLHGDTLEAQDLILEDFIKVNRMILVDTFIDEALTARKKFNKRKEFVRLLDGVKAHSFDLIIFTKLDRWFRNIGDYHKIQEILEANGVQWKAVTENYDTTTTNGRLHINIRLSVAQDECDRDSDRIKDVFAYKLKNKTYVSGSLPRGLKLDAEKHVIIDPEWNCFALDMFDRFEATCSKRDTQLFLQDKYNIRVCYDTVARYLKNPLFKGQYRDDPDFCPATISPERFERIQKLAIRNVRIRHTQQFYIFSGLLICSSCNHYMCGTVTYRRMADGSEKMYKNYRCNFKAQSKLCDRSKTYREADLEEYMLAHIRPALSDYIAKYEVTAASTVQKNPVTEIAKIERKMKKLYDLFMDDLIDKEAYRSEYDKFKAQIEELQKCSTATPMRSLDSVKKLLSEDWEVVYRTFSDQEKNTFWKSFVESVLVYEDGSMDIRFL

SEQ ID NO: 14063 - protein, 520 aa, synthetic construct
MVKCMKSVAERAVPAVIYARYSSSHQREESIEGQVRECREYAEREGYSVLQVYADRAITGRTDERPEFQRMLADASKGVFQAILIYKYDRFSRNRYSFAVWETKLKKHGVKVISARENVAEGAAGIVLKSVLQGMAEWYSVDLYEKVTRGMKENALKAKWTSGTVPFGYTRDAEQRLIIDPERGEFVRQIFEKVLAGEKYVDIASWLNMLGVRTARGAAWNKSSFTWMLKNVVYTGLFRWKDIEIKNAVPPIVSKELFEAVQRKLKTYGRRGINVQKSDKYLLTPNIICGECGGPMHGMSGKSRSGELYYYYACANKRAKRTSCSISPLNRDELEQAVYNCAREVLLHEENIKLIAEQAEAVAEAQVDNELAEMKAERSRVKKSIANYAAAIANGATSGTIIELINAAEAKAAALDEAIAERELVTAPPKVSKEAIEYFLRNIAAAPDDKMKEKVISTMVNSVVVERAADEGTKKDSDEKYSITVRFNFTDTPQLSALQSFDVREKSKMVTSAGLEPATF

SEQ ID NO: 14064 - protein, 403 aa, synthetic construct
MSRKITIVSKPPKLERKKRVAAYARVSSGKDAMLHSLSAQVSYYSDLIQSHGEWLYAGVYADEAKTGTKDSRAGFQSLVADCRAGEIDMVITKSISRFARNTVTLLQTVREFKALGVDIYFEEQNIHTMSGDGELMMTILASYAQEESRSASENQKWRVKRNFEAGIPWDRTLLGYRMENNHYVIVPKEAEIVRRIYNEYLSGSGYQLIAKRLNEEGVPSRFGGKWNQSAVSRILSNHTYTGNLLLQKTFRENHITKRKIFNNGELPKYLAEESHEAIVDEETFQAVQEEKSRRSARFNKKSVSKKTYPFSSFMVCDNCGKNYRRKVTKSGPVWVCNTFNSLGKSACASKQIPEPILQQVTAEVLGKADFTGEQLRSRIQKIVVCNENVLIFRFRDGSEVARK

SEQ ID NO: 14065 - protein, 581 aa, synthetic construct
MARKRTNLIGNTPSVRETKVAIYIRVSTIHQVDKDSIPMQKKDLIAYCQLILGTDNYEIFEDAGYSGKNTDRPAFQNMMGRIRKGEFTHVLVWKIDRVSRNLLDFAEMYEELRSLRVTFVSKNEQFDTSTAIGEAMLKIILVFAELERNMTSERVTATMISRANSGQWNGGRIPFGYSYDPKEKVFSIREDEASICRELKDLYLLNRSLAYVSRALNEKGYKTRAGVSWSPHSVWIIASSPFYAGIYRYNRYKGVESRTINPEEEWVMIQNHHPAIFTLEEHQTMRSIMKSNQRNMDNLPGRVHLSTKTHIFQGIMYCDKCGSKMVSTPGRLHVDGYRTSNYGCPLRRNTKKCNNPTVNDIVIGEFVINYILNMLNAKKTFSTINTPDELNAALLSGSVFSEVSSVEENGLNSFFNLLSRYGSDRSYIFSVKNPRKKKAAVDPELSKLRKEKEKQERALQRLQDLYLYSETSMSEKDFIIRKSEISSHLDNINRQLGLMTQDQASFLSDEEFIKQASHLLIQKELKNKKYIYFKKLVSTVDPDILKAYMETILDSIYTADGKITAITFKNGLTHRFIYKDK

SEQ ID NO: 14066 - protein, 509 aa, synthetic construct
MPKVTVIPPSINRTTRQSTTTPTRRKVAAYARVSTDFEEQLTSYEAQISYYTNYIQRNPDWEFVKIYTDEGISATSTKHREGFNSMITDALDGKIDLIITKSVSRFARNTVDSLTTIRKLKEYHVECFFEKENIWTFDSKGELLITIMSSLAQEESRSISENVTWGQRKRFADGKVSLPYAHFLGYRKGADGLPEIVPEEAETVRYIYQRFIDGLTPYKIANELTAQGIPTPCGKEKWSASTVKSILTNEKYKGDALLQKKFTVDFLTKKQQINEGQVPQYYVENSHPAIITPEEFNFVQSEFQKRCMKPYSSTSIYATKIICGDCGSYFGAKVWHSNSKYRRVIYQCNSKFKGSHFCTTPHLYEPEIQEKFLQAFAQYFSQKDVVIKNCQFALTRLKKQESKKAELQDELVAVNEKLKDYIQHGGEDFDALNAKYEELSAKLDAEETAESDRKRRIAKMQKILQTLKKTDSVLETFDESVWNAVLENLTVFHDGSLVFLFRDGTEIKV

SEQ ID NO: 14067 - protein, 430 aa, synthetic construct
MERKVHQVQQRPPKPKLLKVAAYARVSSGKDAMLHSLAAQVDYFQNLIRQHPDWEFCGVFADEAKTGTKDERPEYQKMLEKCRNREVDLVITKSISRFARNTVTLLETVRELKSLGIDVWFEKENLHSTSGDGELMLSILASFAQEESKSVSDNMKWRIRNDFQQGKIGSITIFGYRRNADGVLEIEPNEAKIVQMIFADYCSGMGQCAIAKKINAMGISTRQGNRWTGQRVKEILVNEKYVGNMLLQKYYRQDPIGKRKMKNQGELPKYFVEQSHEAIISAELFEKVQDLVKKRTEQFSHPGATNRYPLSGMVQCAACGKSYQRKIYKQGAVWMCATYLRQGKLHCPTAKQISERILYEKICSVLQIKEFDVGIVKSKVKNILVSPNRLTFLFKDNTENNVPWENHSRSESWTSEMRQAATERSRKCQK

SEQ ID NO: 14068 - protein, 562 aa, synthetic construct
MKNKIAVYIRVSTTHQIDKESLPFQRRELENYAKYVLNIDDMEFFEDAGYSGKNIMRPAFQSMMSRIRLGEFSHILVWKIDRISRNIIDFANMFEELKKLNVTFVSKNEQFDTSSAIGEAILKIILVFAELERNLTAERVSDVMISRASTGQWNGGRVPLGYNYDKENHTFTVNQQEAEIVKFIFDYYIDNGSMVSLVNALKDKEIKTRTNGVFSLSAVATVLNNIFYTGKYRYNYRKQGDRQQVKPKSEWIVIDNHHPAIISEEVFKRAEEIKQTNLRLKNEKGKIVKKNNIHLFANLLECDVCHNNFSSSLDRPRVNQGGYRHSMYNCYGRRIGACKSKYVSDVYLGKFVFNYIANLYKAYCSFGKSTTFETFKKKMLRGNIFSDIKEVTNLEGIYNIFCSKYNDKATANIINYKNTQQDLGNELRIALSEKGKYERALARLKDAYLFSDDAMTQNEYISQKHSIEVKLSATNKKLDKLQSKDDTPFDDVEFLNILSYFILNQNLQDKREIDFVDFITSVDKKIISDFVHKMFVKFIISKGKIKSMTFRNGITNTFVYDD

SEQ ID NO: 14069 - protein, 532 aa, synthetic construct
MRLSLRGTRERWQDTIRLYPALVLYHLKEVENMEEKTAVIYARYSSDRQREESIEGQVRVCEDFAKRNHYRVIKVYTDSAMTGRTDQRPQFQLMIHDAASKAFSAVIVYKLNRFSRNRYDSAKYKHKLKKQGVKVVSAMENIADDPSGILLESVIEGMAEYYSAELAENVKRGMTENALEGKWPGGVVPLGYKLDAEHHLQVDAKTAPAVQYIFRAYTAGATKKSIAEALNERAVLTSAGKKFTSSSFNKILKNDVYIGVFTWGNVKKENAIPPIIDEDTFRMAQLLNERRKRHIIRNPEAYELSGKVFCGRDGARMDGKSGKSHQGFTYYYYVCSERLKKHCTSRPIRADWLDTTVAQTTTQLLSTPRAIDLIAKQAVKLQSHQKKSPIVEALETEIAENKKKVENCIKAIEQGLMSESLTNHIHEAEGRIRDLTERLQREKILHSHRPVTEEEIRFFFYSIREQVQTKEAKEYRKILFTSLVQSVIVHDHSVEIRYNYKSELPVLQNPLEVESSHCVTMVDHQGFEPRTP

SEQ ID NO: 14070 - protein, 484 aa, synthetic construct
MNAVGYARYSTDKQTDNSIAYQFNAITQYCNKNNITLTSFYSDEACSGTNTDRAGFQSMLADAERHKFDAVVIYDISRGSRDVVDWLNFRKEMASLNIKVISCTQELGDIYDPNNFLTELISVGLGQHAVLDTRKKSIAGVATKAKEGIFLGGTPPLGYNIVDGKYIINELEASIVRQIFELYASDNSYDKILVALQGKSTKKGNPFTKSSIKAILSNERYIGVYTWNKKIFKQMRKWAGGKPNPNVVRIEDCIPKIISKEVFNMCQERMNNKERNASYKAKREYLLSGLIECTECGSNYVGYCSTNTKGYTTRYYACGNKYRSKTCHAKNINANNIETFVVQSLKEYLKSANFDEIATQICIMVNNASKDLTQEKKEISEIDTKIKNAMKAFMSGIVFPEMQEEVDRLRVRKNELEDIIARNSKASSPVRKDRIIKLLEYSLEHIDDNPKQAIKALVTKIYANTDGSFTVNVGVDIKSCGGRI

SEQ ID NO: 14071 - protein, 517 aa, synthetic construct
MLRAVIYARFSSDMQREESIDAQVRACKSYCQSKGYLVVGQYVDEAKSGRELTKRDAYNQMLADALEDKFDIIIFHKIDRNSRNELNYYTTKDKLEKLGIRYEYAVQHIDASPEGQMMEGVLVSMAAYYSRNLSKETKKGLNENAYKAQFNGGTAPLGFRIVDKHYEIEPIEAEAVRLIFKWYLNGYSYIRICRELKLAGYTKRNGKPFDKTCLYDILGNEKYMGRYTFNKTPRAKNGQARNSHSKTRPDDYIVIDDALPAIISKEDFAAVQAKRESNQRRFSSYKAVEPYLLSGKVICGYCGSAMSGHRVAPRNGEPYGYYYCLKKERVAGERCPQKYIRAEKLERIAIRALEEEIFSEASMKKIAALMREGYAAMTNEADESRKALLQAKAAAEKKLDNLYSFVENGEVDEYSLARMKKIKDELAKIKARLCETSVKFSKTLTEEEIFATLAAFKKDLESNADNSAKRFVVNLLINKITVRDNCATVEILPNMLTVYLVPRTGIEPVRVSLPEGF

SEQ ID NO: 14072 - protein, 500 aa, synthetic construct
MNTVIYARYSAGPRQTDQSIEGQLRVCTDFCKQRGLTVIDTYCDRHISGRTDERPEFQRLIADAKRKKFEAVVVYKTDRFARNKYDSAVYKRELKRNGIQIFYAAEAIPDGPEGIILESLMEGLAEYYSAELAQKIKRGMHESALKCQSTGSGRPLGYRVDEQKRFQIDPESAQTVQTIFEQYIKGESNAAICELLNSRGLRTAQGKPFNKNSINRIIKNRKYIGEYRYHDIVVEGGMPAIIPKGTFNLAQAEMERRRTRKAPKSPKAEYLLAGRLFCGHCKGPMQGVSGTGKSGNKWYYYYCGNTRGKNKTCDKKQVSRDRLERAVVDFTVRYILQEEVLEELARKVHAAQERQNDTASEIAFYEKKLADNKKSIANVLRAIESGAATQTLPARLQELENEQAVILGEISFLKGKRLAFTEDQILFALMKHLEPYPGESEQDYRRRIISDFVSEVYLYDDRLLIYFNISSEDGKLKSADLSNIEGGEFDEGLVSSMQKP

SEQ ID NO: 14073 - protein, 563 aa, synthetic construct
MNQSNQIRKTALYCRLSQDDGIEGDSNSIQNQKAILQKFAEDHHFPSPCFYVDDGFSGGTFQRPAFQQMISDMENGEIGIIVTKDLSRLGRNQLHTGLYIEERFPMFGVRYIAINDNVDTDSSESNDLMPFKNLFNEWFIRDTSRKIRAVLKAKAERGERLGTRTPYGYRKDPDTKKLIVDEETAAIVRRIFAMCAGGSGPSQIARILKKEQILTPTMYAYTRYGITHTCLDTAHPYNWSDSAIANLLENEIYLGNTVNMKYSTKSYKDKRRVEHPREECMVFENTHPALITREVWDMVQRVRKNKRRLTKMEEQSKYSGLVFCADCGSNMVLHRAHTMSASYNHFTCRTYKKDGEACTGHYIRECVLDEIVLEDLRRVTSAAREHPEKFAAYIGSKQSTELQREIRRQEKELAAMRKRKMELDTIFKKLYEDSVLGRITTEQFQMLSGSYTEEQSRITAGIPQKESEIQCLRETVSGTDSFLDKAKRYTDITELTPELLRLFIEKIVVHEKEVKWSKHAPQTVEIYYNGIGYVGSGQQDVEEALEAPESLQTQDTEKPRQAS

SEQ ID NO: 14074 - protein, 433 aa, synthetic construct
MSKKITIVSKPPKLERKKRVAAYARVSSGKDAMLHSLSAQVSYYSDLIQSHGEWLYAGVYADEAKTGTKDSRAGFQNLVAECRASKIDMVITKSISRFARNTVTLLQTVREFKALGVDIYFEEQNIHTMSGDGELMMTILASYAQEESRSASENQKWRVKRNFEAGIPWDRTLLGYRMENDHYIIVPKEAEIVRRIYNEYLSGSGYNSIAKMLNDEGILSRFGGKWNQSAVSRVLSNYTYTGNLLLQKTFSENHITKRKMFNTGELPKYHAEDAHEAIIDMETFQAVQKEKERRASQFIKKPSTKKIYPFTGLLVCDNCGKNYRRKVTKTGAAWVCGTFNSLGKAVCASKQIPEFTLQQVTADVLGQNDFTHEWLCDQIQHIRVCNDNALIFCFNDGSEITRIWKDRSRSQSWTDEMKEAARQKILERSNHNA

SEQ ID NO: 14075 - protein, 526 aa, synthetic construct
MPKVTMIPATVNPLTHLPKASVQKRRVAGYARVSTDSDEQFTSYEAQVDYYTRYIQSKPEWDFVRVYTDEGISGTNTKRREGFKEMIADALAGKIDLIVTKSVSRFARNTVDSLVTIRKLKEKGVECYFKKEGIYTFDSKGELLITIMSSLAQEESRSISENITWGQRKSFADGKIHLAYKHFLGYKKGEDGRPAIVEEEASVVRLIYRLFLDGKTQAGICRYLEDLEIPSPSGKAKWSKTTVTSILTNEKYKGDALLQKSFTVDFLQKKTKQNEGEVPQYYVESSHPAIIEPDEWDHVQAEFARRKALGNAYSGKSIFSAKLVCEDCGGFFGSKVWHSTDCYRRTVWQCNNKFKGGERCLTPTVDTETVQQLFIKAYNQMMGNRKQIIEDCEIMRKKLTDFKSLDADIERQFEETQIVAELVKAAVKDNAVTAQSQEAYLKKYEALTKRYETAAAELERLQNLRTLRSQKDKAMALYIRTLKKQPTVLSEWNDTLWTVMVEKAIVHRNSEITFEFYNGTKVKVRQ

SEQ ID NO: 14076 - protein, 585 aa, synthetic construct
MAQVEIITANLKCEDNTTVANKKKRVCAYGRVSTDDEEQLTSYNSQIKYYTEKIKSNPDWEFVGIYADEGISGTQVKNRTEFQRMIDDAMNGKIDIILAKSISRFARNTVDTLKYVRDLRDRKVDIYFEKENIHTLDLDSEVFLTVYSAFAQAESESTSQNVKLGLKAMMKRGEYVGSPDCYGFDWNKETKQLDINEEQAEVVRMIFNWYVSGMGCRRIANKLEEMKIPSYTGARWSTSSVSNMIHQEKYVGDLLQQKSYTVSPITHKSVLNKGEKDKYYIKDHHEAIISRDIWDKAQEIASKRSKSMTMKGYTSRETSKYAFSSKIKCAFCGTNFCRRHSSYSKKNPKYNIYWTCIKKREHSDACPDSVGLSETKLEQVFVMLYNNIVKNKHKTKEVLLQAIKEVVNDNDYQDKLNDLNNQKTTIEQRLSKIIDMELDNTDIDRKELFMKKEKELLDELNNIKNKIRYYEELLAENKGLSKQLKSIDDYFNEPRELKQFKREVFEKMIECISVGDYDEDGNKLPRVARFVLKTGKEYKFTIPPKNNSKNDKNELVTFDTGNVSFFNSTSKTYFSSFTCSFYFIL

SEQ ID NO: 14077 - protein, 530 aa, synthetic construct
MTAKKAAIYCRVSTTYQVDKDSLPVQEESLIAYTKQVLGIDEYELFTDAGYSGKNTERPAYQDMMSRCRNHEFTHILVYKIDRISRNLLDFATMYDELKKLHIVFVSRNEQFDTSSAIGEAMLKIILIFAELERKMTSERVKGVMNARARKGLWNGARMPFGYDWDKEKEIPAINPTEAAVVRKMFDMLLAGDGVFRVSVYLNENKIPTKRGGRWTSTTVRHIATNPMFAGTLRYNYRSAGRGEIKPESEWIILEDALPAIISKEEFNQVQTRFKKPGPHEHRRKNYHPFSTLLYCSCGQHFISRKDRVRKRTGLCPSVYTCAGVRHHWGCHELQPSDVTLLPFVITYIQNMMRVQIAAPASATAMKGILLHNLPGVSDIKDIKAIYRAYTRSHPTAYEIPNSSPTIDLAAAERHKIKRALARLKDLYLYGDGALSPSDYVDEKKKLENKLRSTPVPINTTEDVVADAISHASLQALLSADSMSYPEIMSYVDDKTIHNFLLRIINRITVAGRRVQSITFANGVTHTFTY

SEQ ID NO: 14078 - protein, 505 aa, synthetic construct
MAQRCVIYARYSSDRQREESIEGQIRVCEDFAQRNDLEVIQTYVDRALTARTDRRPAFQQMISDCKKRQFEYILVYKLNRFSRNRYDSAVYKHKIAQYGVKVLSAMERITDDPSGILLESLIEGIAEYYSAELAENVHRGMTENALEGKANGRAPLGYKKGPDGKLVIDERSAKAVRFIFQSVLEGRTLKKIAGDLNAMGYKNSFGRPFASSNFGNLLRNKKYIGIYHWGNEDVEGVVPPIIERAVFDKVQELIESRKHKSTRKRVENYLLTGRMTCGLCGAAYIGKSGTSHTGAPYAYYCCSNRVHRKGCKGKNYRQDKLEEWIAMETLKALNRPETIRQLAKQIIRIQEAAAGEPDPVVDNLEAELKDYKKRVANSIKAIEAGVISETISRNITEYEEKIKALEKELSRAKLKRQPFTLTQDHIEFFLTSLLAGDPADAKYRSQLIDTLIAGVVIYPDKIEVYYKYQKELPSLRNPLTISEEGSSNGKKLVGPQGFEPWTNRL

SEQ ID NO: 14079 - protein, 594 aa, synthetic construct
MAYAAMRKAGLVPEAAPDLRTVALYVRVSTGYQVDKDSLPFQKKELKNYCEHVLHIDKNRIEVFEDAGKSGKNTNRPGFERMMKKVRAGQISHVIVYKIDRISRNLVDFSLMYDDFKYNRVTFISLNEQFDTSSAIGEAVLKIILVFAELERKLTSERVKDVMIGRALSGQWNGARVPFGWEWDEETKFPKHSETESVFARLMYDLYEETRSTCKVRDYCNTHDVPTKRGGEWTSKTVADFIRNPMNRGDYRYNYRESARGRKKPEEEVVYIEGVFPPLVPVEQWDRCSAIMDRNAAVRCAPGVPHKKKHVHPFAGLLVCGACGAPYQVIKQDKPRENGFSPSLYRCGNRYRKRSCTAAGCSDVVLGPFVFNYVSSMVRAVNLRTKIKTPEELERLLLSGPEFQNVAGIASEGLNATFALLSGRPAASGPSYAPDLLTAPADSVNAGEVEEIKQQITRLERAAERLKKAYLFDENAMNEKEYLETKIALDTERVQAENRLKDLSEAAFSTDAGELSFIKSASSFLLAHRIQSGDHIVYSDFAPLVGNETMRDFLNLIIEKVVIRNGRPEEITFKNGLTHIFLYRDETAKNVAKS

SEQ ID NO: 14080 - protein, 526 aa, synthetic construct
MAKRVTTIPATLNRFDSKPIQNARKRKVAGYARVSTDTEEQATSYSAQVDYYTRYIKANPEWEFVGIYTDEGITATNTSHRDGFNQMIEDARAGKIDLIITKSVSRFARNTVDSLTTVRELKEKGIEIYFEKENIWTLDAKGELLITIMSSLAQEESRSISENTTWGKRKSFADGKASVSFSTFLGYDRGPNGEFVINEEQAVTVRYIYKRCLEGLSAYQIAKELTEKRVKTPAGKERWYTSSVLSILKNEKYKGDALLQKCFTKDFLTHKRVMNNGEVPQYYVEGHHEGIVTAEQYEQVQAELHRRKEMGRYSGVGVFSSKIKCGECGSWYGAKVWHSNDKYRRTVYRCNHKYGKSYKCKTPHITETEVKKLFVRAVNRLFAEKGEIIANTKEMMKVVCNTGILEKELDHTIAELNIIAEQMQTAISQNSRVALDQDEYEQRYSQLTARYNSIKPRYDELSEQLERKKAQKELFKGFIRMLQKQDSVVKEFDEGLWSGLVQEVVVHASNDIRFLFKNGFEVRESK

SEQ ID NO: 14081 - protein, 503 aa, synthetic construct
MANIRKIEPIIPRLKEKKKVAAYARVSMQTELLHHSLSAQVSHYSALIQGNPEWEYVGVYADEGITGTATKNRDNFNRLMKDCDAGKIDLVLVKSVSRFARDTVDTLNATRHLKNLGIDIYFERENIHSVSKEGELLLTLLAGFAQAESRSISENVKWGIRKRFKQGIPNGIKAPYGYRWNGDGFSIIPEQGKVVKEIYKRYLAGEPAYSIAKNLAGRGINGQSGSPISDTTVKNILSSVSYTGTMILQKNFFTEGHKRRRNMGELPMYAVEEMFEPLVSEDNFEKAQQIMKDRAESMPNKRPKLTAFSGIVRCGNCGCSISRRTGQNGKKWICNTKERKSKAVCDLRTIYESELEDAAATALESDSFDADVVKSKVELITIDNAYVIFRLKNGTTKKILRTYKKGFSGFSSKLFCGHCGRMLEADTWNMGPAGKKTKYKVWICRNCSAQREFDSMFRKAAQELFHEKQCEGLFAQNIEKAINYDDRIDFCYKEGKVISWRKE

SEQ ID NO: 14082 - protein, 505 aa, synthetic construct
MSQKCVIYARYSSDRQREESIEGQIRVCEEFALRNDLEVIQTYTDRALTARTDRRPAFQQMIADCKKRQFSYILVYKLNRFSRNRYDSAVYKHKIAQYGVKVLSAMERITDDPSGILLESLIEGIAEYYSAELAENVHRGMTENALEGKANGRAPLGYKKGPDGKLVVDERNAKAVRFIFQSVLEGRALKKIAGKLNAMGYKNSFGRPFASGNFGNLLRNKKYIGIYHWGNEDVEGVVPPIVERSVFDKVQELIESRKHKSTRKRVENYLLTGRMTCGLCGAAYIGKSGTSHTGVPYAYYCCSNRVHRKGCKGKNYRQDKLEEWIALETLKALNRPETIRQLAKQIIRIQEEAAGEPDPVVDNLEAELKDYKKRVANSIKAIEAGVISETISRNITEYEEKIKALEKELSRAKLKRQPFTLTQDHIEFFLTSLLAGDPADAKYRSQLIDTLIAGVVIYPDKIEVYYKYQKELPSLRNPLTISEEGSSNGKKLVGPLGFEPRTNRL

SEQ ID NO: 14083 - protein, 652 aa, synthetic construct
MSILSEYTKEELNELTKHQFFIQANYYDILQHLPFTVEVATLVRESTKHKDQEKAFEIQKDMMLDLIENNSKFRLQENNIFEEKISGLKGSARDAFQLMKRRAGEHKFDILIVDAVSRLARNQRDLWNVIEDFKELGIGIMIVKGNYWTYNMTYSQVMCLAVEGGLAQAESMQTGARVKAHMAEIAKSGQLLGGNMFGYRLDKQVDRKDNTLRQEPTEAYTVKCIFERFASDIPDEVLTSSSMCNYLIDKKMLTYKGDLAWTPSKIIRILDNTKYMGYQLPGKSRIEDTVRKKKVNTHVEPIRDEYDEKGVLIKKGNLVKGNWEPIVSEELWWKVYNRKRSRSTKDSENVKGRKSGLRVSADAYARKTYCSCGYALSREYTHTAEDNKSAQHRYKCRWQIMYANKYTIGATKLEKGIICDTAAVGEMKLWLSSKYVFSYLFKNGKEAVIKTLELIERCKQLENDASDGGNIQELEDEKVRLQNRLKALVFMKADGDIDSNEYKNFKEEVEKRLNEIESQITEIHINKGKQEKKVFDFDAIKERLETFIDLKCEKISSEMIDMFVERIIYRGDDEFLWVMNLSGEIVDTSAKYRINGYDEEYSKFLKDDKNFNIVARFIIPLEECENYCKKVIGRKFVAKFWKPITIKIAIQE

SEQ ID NO: 14084 - protein, 567 aa, synthetic construct
MTENPEKIVALYVRVSTGYQVDKDSLPFQKKELKAYCEHVLHIDKKRIEIFEDAGKSGKNTKRPAFERMMNKIKAGQVSHVIVYKIDRISRNLVDFSLMYDDFKYNNVTFISLNEQFDTSSAIGEAILKIILVFAELERKLTSERVKDVMIGRAKNVQWNGARVPYGWDWDEKNKCPVHSDKEAPYVRTMYQMYLDGGSTITIRNYNNSHNIPTKRGGEWTSKTVADLLRNPMNRGDYRYNYRESSRGRKKPAEEVIYIKDAFPPIVDPKIWDAVNKKMDENAALRNTSGLHTIRNRCNVFAGLIVCGKCGHNYQVKGKDSRKGNGFRPSSYACTGKFQKNNCDNMNISDVNIGPFIINYIAAMVDASKKRKNIRNIDDLEQLILSHINFSDVIGISEESLRNTMDLFSAQTSSLGISSLSTQDQDGSVISQKNKLEEELQKTNRALERLKKAFLFDDDGISEKEFLEMKSKLEIDRIQIENSLKKISQDSISANVNHIEFIKTASQFLMIHEINSGNFVDYKKLASADEKTMKDFISSVVSGITVLDKRIVKIVFRNGLSHTLLYR

SEQ ID NO: 14085 - protein, 522 aa, synthetic construct
MNAVIYARYSSEGQREESIDGQIRECMEYCKQNGMTVVKEYIDRALSAKTDNRPDFQRMIKDSVKGLFDVVVVWKLDRFARNRYDSAHYKAALKKNGVRVVSATENIADGPEGIILESMLEGMAEYYSAELSVKVIRGHTENALKCKYNGGTPTFGFAIDTNKQYQPDPVNAPIVLDIFKMYDTGSTMKQIMDHLNALGVTTVRGKPADLNFISGILHNRKYIGEYKYRDIVVPDGIPALVPTDLFERVQEQMKKNKKAPARHKAEDDYLLTTKLFCGSCKAMMVGESGTSSSKGQVYHYYRCVNSKRKKTCKAKHRSVRKDPLERAVVASVMRNIMDDAFVEYFTDQAMALQGQESNELPALRRQLADTEKAIDNMLNAIQAGIFNTSTKRRLDELEATKEKLELSIIKEEMKKPQFTREQIQFYILQFRKVDTNTLEGRRRLIDGFVNSVVVYDDYILVTFNYKEGAERITFEQIERSDLSSLGGPWVSPIRAHPFFNNLQISFESGTEMYYFFLFAAYM

SEQ ID NO: 14086 - protein, 521 aa, synthetic construct
MEGNYCAYLRKSRKDLEAEARGEGETLARHEHILLDLAHRMNISLEAIYKEVVSGETISARPVMQQLLREVEEGVWTGVLVVEIERLARGDTRDQGYVAEAFTYSDTKIITPLKTYDPADPSDQEYFEFNLFMSRREYKTINRRLETGRHQSFLEGKFLGNVAPYGWERYKLDRQKGFSLRPHPQEGKYLVMMYNLIAYGSDGTPLGPDQVASLLNNMGVPSRTGSGWTGATIRGIIENEHNIGLVRRGRRKTVKKMQNGNIVKLRPHQKSYELADGLHDGQVSEEVFRLANENIHSPAPPVNRDYTVKNPLAGLVICSCCGHAMRRRPTHVKAAYDFLYCPYGCETIGAPLYLVENAVLDMLKGWTEKYQLQRTAHDDRGSQELIQAKLLILSEKEDALEKLKKQRGSLYDLLEQGIYTTEVFLTRQKDLSEREKTLMEELSRLRDEIEYERKIESERMNFIPKCKKLVDNYEFLSVQEKNRFLKELIDRIVYTKTERNQRGRGSTANFTLEIYPRVPRS

SEQ ID NO: 14087 - protein, 444 aa, synthetic construct
MLRCAIYIRVSTEEQKINGLSIEAQSAALTEYAVRNNLLITDYYIDAGLTARKKLQHRKELLRLLEDISNNKIDIIIFTKLDRWFRNIADYYKVQEILDLHKVNWKTIFEDYDTSTANGRLHINIMLSIAQDEADRTSERIKIVFENKRAKGEVPGWKAPLGYKIKDSKLLLDDDTKRIAIDIFEHYDLHHSIMGCVRMAKERYDYKIYDYSIRRMLENKTYIGEFRGYKNFCEALITSDLFYRIKNYREVKEYKNQRKAGRVYLFSSLILCKDCNHSMTCCFTKQHQKAGVKEYHYYRCKEAILGCCIHKKRLREDNLEEYLLQNICAGLGNYIIQINRSEKQEKTPILNIEKLSKKLEKLKDLYLDDLIDKESYRKEYDALQKHIKLSSIKPNKIKVEQMPLQYNLKELYYSLSIEERKIFWLGILDCITVDSQNRIQIFYR

SEQ ID NO: 14088 - protein, 465 aa, synthetic construct
MARSITVIPASQPYRVGGRTQQKTRNLRVAAYCRVSTDQEEQLNSFENQVEYYTKYIQDNPLYQMAGIYADEGISGTNTKKREEFKRMIRDCEEGKIDLVITKSISRFARNTQDCLEYSRRLKNLGIGIFFEKEHINTLDASGELLFTILSSLAQDESRNISENCKWGIRSKFKKGIPQVDCTKFLGYDKGDGGKLIVNKEQAKIVKRIYREFLNGYNPAAIAKMLMEDHIKTGTGREEWRSASVRAILKNEKYMGDALLQKTYTADFLTKKVKKNHGEVEQFYVKESHEAIIPKEQWEAAQLELERRDSYMQKLGLTFYGYGSEINPFSCRVVCGKCGAVCGKKSWKSRGVEFWQCNNRSKNHGVKGCASENLPHENLLKGFITAWNQIVVEREQYLPKWEKKKKEGNPLEKLRAEQMIELTLQPPLTKMLPELGQMVLERVIVQGKEIMVIRFLDGTEIKVRI

SEQ ID NO: 14089 - protein, 545 aa, synthetic construct
MRTIRKIEQKISGLKQRKKVAAYARVSMESERMYHSLSAQVSYYSKLIQKNPNWEYAGVYADYGISGTGIKKRQEFRRMLEDAEAGKIDIILTKSIQRFARNTVDLLQTVRHLKELGIEVWFEKENIHTMSGDGELMLTILASFAQEENRSISDNIKWRFRKKFEQGIPHAKFFVYGYCWEKDNLVIQPEEAAIVREIFDAYLQGRTRKDILRELKRREIRTMYGNYFKDASIRQILTNRIYTGVLEIQKTFVTDPITKRQAVNHGERNRYVVEWHHEAIISSDMFERVQQELKNRKEMGMQRGGYARDFLNTSCFTGIIKCGICGKSYVHLVRKYKGRIREYWTCDSHKGKGTNCGAYGSIPQPALKKACAAVLGTDEFDEELFVQRVKKIVVPSYHTLVFHFKDGNVITQEWKSTALKDMWTDEQTKKQRQWMETYHQNDTSGRYTAFSERIVCPACQTKFIRCLEKRKNRQVAYWRCRGENRCIHVRSIKEEWLQRMAAETMGKLEFDDTAFRTQVQRIEVQDNETLLFQFSDGHMKEVKLP

SEQ ID NO: 14090 - protein, 519 aa, synthetic construct
MKKVQVIPATLQNYTEKSFHNQKKRKVAGYARVSTDRDEQLTSYEAQVEYYTHYIKGRSDWEFAGIYTDEGISGTNTKHREGFKRMIADALAGKIDLIITKSVSRFARNTVDSLTTVRKLKDKGIEIYFEKENIWTLDAKGELLITIMSSLAQEESRSISENVTWGHRKRFADGKVSLAFSHFLGYDRGMDGNLIVNKKQAEIVKLIYRLYLSGYTFHSIAKELTERKIPTPAGCKIWRANTIRSILMNEKYKGDALLQKKITVDFLTKETKKNEGEVPQYYVEHNHEAIISPQVFDWIQEEIKRRRKGGKRYSGVSIFSSKIKCGQCGSWYGAKVWHSNDKYRRTIYQCNDRFKSHCKTPHLTEEEIKEAFIRAANQIIKNKAEILDNITLLKERLTDTESLEKERDRLGTDLNLLAERVQQLIAENARVVQNQDDYERNYCELVSRYEAVKEQYDKTCEVIQYRKAQIRQMESFIKELQGQELIKEFDTRLWCSLVDVVTIYSKDDIRVTFKNGTEC

SEQ ID NO: 14091 - protein, 484 aa, synthetic construct
MNAVIYARYSCDRQTEQSIEGQLRECKAFAASEGINIIGEYIDRAISGTTANRPEFQRMIADSKYKTFQAVIVYKLDRFARNRYDSAMYKSKLKANGVRVLSAKEHITDSPEGIILEGLLEAMNEYYSAELSQKIKRGMRENAIKGKTTGGNVALGYRIGADKQMEIDPAGAALVRRIFTSYDNGMTFTEICDDLNHAGYTTSRGKQFRIDTISRILANQRYTGTFQCAGEDAHCPPIIEPELFRSVQERLTESRHKHRHTQSPHEYVLTGKAICGTCGRRLTGRAGTSKTDKRYYYYCCPNKCCGWLPAAELEHAVLDAIAQYTTPEACEQIANATYALYQQSTHENADLTAAQRRLQETEKKLENAVNAVLNGITSAALQATMQQLEQQKAALETEVRLLQTDAPELKLEHFQYFAHRLLEVQAEGTEKILQLLVNQVIVYKEQITVLVNLTDKTKTPPLEQVTAALRESSCSVACGGGDEN

SEQ ID NO: 14092 - protein, 581 aa, synthetic construct
MARKRTNLIGNTPSVRETKVAIYIRVSTIHQVDKDSIPMQKKDLIAYCQLILGTDNYEIFEDAGYSGKNTDRPAFQNMMGRIRKGEFTHVLVWKIDRVSRNLLDFAEMYEELRSLRVTFVSKNEQFDTSTAIGEAMLKIILVFAELERNMTSERVTATMISRANSGQWNGGRIPFGYSYDPKEKVFSIREDEASICRELKDLYLLNRSLVYVSRALNEKGYKTRAGVSWSPHSVWIIASSPFYAGIYRYNRYKGVESRTINPEEEWVMIQNHHPAIFTLEEHQAMRSIMKSNQRNMDNLPGRVHLSTKTHIFQGIMYCDKCGSKMVSTPGRLHVDGYRTSNYGCPLRRNTKKCNNPTVNDIIIGEFVINYILNMLNAKKTFSTINTPDELNAALLSGSVFSEISSVEENGLNSFFNLLSRYGSDRSYIFSVKSPRKKKAAVDPELSKLRKEKEKQERALQRLQDLYLYSETSMSEKDFIIRKSEISSHLDNINRQLGLMTQDQASFLSDEEFIKQASHLLIQKELKNKKYIYFKKLVSTVDPDILKAYMETILDSIYTADGKITAITFKNGLTHRFIYKDK

SEQ ID NO: 14093 - protein, 527 aa, synthetic construct
MYELTQSMESLSVDEIIVYLRKSRSDSPEMSVEDVLKKHEEMIQDYANTHFGSPIPEKNIYREVVSGETIDSRPQVKIVLQKIESPQIKAVLIVEPQRLSRGDLEDCGRLINLLRYTNTMVLTLTHSFNLQEEYERKFFEMEITRGNDYLEYTKRILRRGRESSAAKGHYIGSVDPYGYRKIVIKKDGVNCHTLEIVPEEANVVRLIHELYAYTPGGIGFTNIAHKLDSMNLKPKKAAHWTPAIISSILCNPLYLGLIRWDTRKVVKYINDGRLEKSRPRSSDAKYYKGLHEPIISQELYDACMARCGTNPSLRRNKELCNPFAGLLYCGTCDHAMSLKIYKNHNSVSQIMLCNHQSYCHTKSVLYSAFLERFISSMENTIHDFELALLADDGNAQAVNQSIVANLETRLKKLQEKDMRQKDAYEDGIYSKEEFLERNIKTQQEIASTITALTAAKETKENYVDYGEKIRRFRDCINALNDPELSATEKNQFLKSCVSKIIYYNNMESKAGVGRYVENVFSLEIQYI

SEQ ID NO: 14094 - protein, 521 aa, synthetic construct
MNKSITVIPARRRVGNTVNKEVKPKLRVAAYCRVSTDSDEQATSYDAQVEHYSNFIQKNEEWEFAGIFADDGISGTNTKKREEFNRMISECMEGHIDMIITKSISRFARNTLDCLRYIRQLKEKNIPVFFEKENINTMDSKGEVLLTIMASLAQQESESLSKNVKMGMQFRFQKGEVQVNHNRFMGYTKDEEGHLIIEPAEAEIVKRIYREYLHGASLKQIGNGLMKDGILTGAGKPKWRPESVKKILKNEKYIGDALLQKTYTVDVLTKKRVKNNGIVPQYYVENSHEPIIPRDLYMQVQEEMLRRSNLHSGTNRKKRVYSSKYALSSIVCCSKCGEIYRRVAWNNHGKRSTVWRCVNRVEHGPDCCDAPTVKEEELQNAVVKAINVALGGKDDMIAALEENIAMVLALEDDTSMESIDAKLEELQQELLKRANAGQDYDDLADEIDSLREKKQEVMADNAEREGQKQRIAEMQQFLVGQTEQIEEYDENLVRRMVEKITVYEDKFTVEFKSGTSVDVER

SEQ ID NO: 14095 - protein, 520 aa, synthetic construct
MKRITKIEENNALSVKTKTRVAAYCRVSTASDEQLISLDTQKAHYEDYIKSNSEWEYAGVFFDEGITGTKKECRDGLNSLIDSCEKGLVDLVITKSISRFSRNTTDCLELVRKLMALNVTVIFEKENINTDTMESELMLSILSSLAESESVSISENNKWSIQKRFQNGTYIISYPPYGYENAGGEMIVVPEQAEVVKKIFEDTLAGKSTHAVAKELNDSGVRSKKGGKWTPGAINAVIRNEKFTGDVIFQKTYTDSQFGRHTNDGELNQYLCENHHEPIVSHEIFDKANEVLNQRGREKGNGERTERYQNRYGFSGRIKCGECGGVFKRRIHYKPSGSYIAWCCTHHIEDRHSCSMKYITDDGIKAAFLTMMNKLIFAHQSILRPLLYSLQGFDDKNRLLQIQEYETKLEKNMEERQVLTSVMASGLLEPALFSKKITALTLEEKRLQEEKKQMINSVSGDRTKIEALEKLMKFALGSRMLTEYSDETFLSHVEGIIVFSREEIIFELKCGLKLKERLVG

SEQ ID NO: 14096 - protein, 599 aa, synthetic construct
MQVKVIKKIDGKLDRRTGKVITDRLRVCAYCRVSTGDEEQINSYESQKKYYDEKINSNSLWVFAGIYADEAITGTLDYKRNEFMRMITDAMEGKFDVIITKSISRFARNTLDTLKYVRKLKERKIAVIFEKENINTLEMSGEFLLTILSSIAQQESESISGNVKLGLKMKKERGEIVGFKHCLGYDYDKDSHEIKIQQDEAEIVRQIFNRYCEGAGSTIIARELTEAGFIPPKGGEKWAESTIRGIIKNEKYKGDVLQGKTFTIDPITHKRMVNKGEEDKYYIENNHEAIVSAETYEKAQKILEKRSGAVETGRRKGNYSRKYTFSSRIFCGFCGSVFVRRNLYKNTKHETKVWQCMNYVKNGKKFCPETKAIREKVIEDCFIEAYELLCQDNKEVINNFLNRIDGFLRENNTKSILQKLEVKKQGIENKINSLINLMIDGTIDKETFNKKKIELNKKIKKIEKDQELFKCQLDDENSFDFGVEKIRKVFDKEAKDIRVFDKDIFEALIYKIVIGDYDSNGNKDPYVIRFIVKSGIENVKDKIESKVIENILNKENLILDFYSWQNYVSFEKQADGSLRKKLETKIRVKVELNSDNTTQ

SEQ ID NO: 14097 - protein, 527 aa, synthetic construct
MEERAKAVIYARFSSDKQREESIDGQIRECTAYAESQNLEVIGAYIDRALSARSDNRPDFLRMIADSVRKGFQYVIVYQLDRFSRSRYDSAIYKNKLKKNGVRVLSAKEHIGDDPSSIILESMLEGYAEYYSAELSQKVKRGMTENILEGKWVGCRVPLGYKLTADKKLQIVPRDADAVRLIYKMYNSNERIIDIVRYLNAHRYKTAAGRAFTRSSLTKILGNKIYIGTYEWDGHVVEQFAPPILDDDVWEAAQKRTQQHKLNPRPKRRSADYALTGLIYCGECGNPMTGQSGRSKNGSMYRYYRCSTKNNYHSRGKKQHIKCKSRNISREKVEDLVLDETVRILSNPKAVKIIAKQAANVQKIDPTAQEQARIAQERKTIQSKLENSIAAVENGLCSKTIAENIERYESRISELDQQIDELKFAYAPIRIDAVAVEFFLKSLLNKKKDHDKYRLDMFRTFIRQVIVYADKIEIRYNYTACPQILKNPVSIALTGLPECSGNDSVVRLEGFEPSHPVPETGALSPEL

SEQ ID NO: 14098 - protein, 448 aa, synthetic construct
MERIIQKVTPPARKKAPKLKRVAAYARVSSGREAPLHSLSAQISQYSGMIQKTPGWQYAGVYADEALTGTKDSRGEFQRLLADCRAGKIDMIITKSVSRFARNTVTTLRTIRELRLMGVDVFFEEQNIHTMGEDGELLLTLLAAYAEEEARSVSENQKWRIKSNYEQGLPWSITMYGYRQVNGRLEVVPEEAEIIRLAADLYLEGYGRYKLEDAFAAVNIKGRHGANMGGNSIVDLICNEKIVGDMLLQKTFVVDPITKEVRKNNGEKPQYFVEGSHEGILDRETYEKVLAERARRAAAYKPRSGSYERNHFPFSGKIHCGKCGKSFTRKVLNGNTPYEKRGWLCRTFNQKGKAHCDAKQIPEEILKRVSAEAMGLPEFDEAAFAAKVEEIQVPENGVLVFVFYDGHTVTKTWDNPSRRHSWNPENRQRARELALRQAAERRLAKCQQ

SEQ ID NO: 14099 - protein, 537 aa, synthetic construct
MPAVTAARVTVIPAKKDRLPINVLSNEARKLRVAAYARVSTNNEEQLTSYEAQVDYYTRYIQSKDEWQFVEVYTDEGISATNTKKRDGFNRMVADALAGKIDLIITKSISRFARNTVDTLTTVRKLKEKGIEVFFEKENIRTLDGKGELLITIMSSLAQEESRSISENVTWGQRKRFADGKVSLPYRRFLGYEKGPDGLPVIVESEAVIIRLIYRLFLYGKSPSAIATYLTDEGIPTPGGKKVWRAKVVESILTNEKYKGDALLQKKFTVDFLTKKQKVNEGEVPQYYVTNSHPAIIEPELFDLVQYELKTRKTDGRFTSCLHPFSGRIICGECGGIYGSKVWHSNTENRSLVWQCNEKYRGQHCSTPHLTEDEIKAAFLAAFNIVLGNRDEIIEAYEEVIAALTDTADLDAEQETLENESEVVLGLIQKIISENAQTAMDQEEYNRRYDAYSERFEAARKRLAEIAELRQERNAKKTRIRLFMENMNNHQELVQSFDEELWYSTVDYVTVYEDKRLVFTFRDGRQIEITAELWRAA

SEQ ID NO: 14100 - protein, 569 aa, synthetic construct
MKQSSNKKSREATAFLYERLSRDDNLEGESYSIGNQKKLLTKVAKEKGYTNLVHFLDDGISGVTMNRPGFVEMMQQLEQGKASAVFVKDLSRLGRNYIEVGRLTEEFFPDHDIRLVAVSDNIDTAEGENELAPIRNLFNEWYARDISKKRRISNKIKGNSGEPMGLPPYGYIKDPNNPKHWVIDEEAAQVVRRIFDMTLEGFGTEQIATQFEKEGILTPQAYWIQKGIGRPGKTKTRPATKWNGSTITHLLYQQEYCGDVLNFKTYSKSYKNKKRIHNDPENWVVFQNIHEPIIERAVFEQVQQKRGKMRKRRTSNGEHNMFSGLLVCADCGCNLHFHFNQGNPEIKYFNCSNYKGNRGTCQSTHYIRVDFLEEVVLGEIRRLTKFASLYEDDFLKAIIGHSQQADEADRKLKEKELKALLARDEELDGLFERIYEDNVSGKISDERFSRMSRRYEDEQKELTEKIKQLRSEIEKQSSRTMTTDMFISLVRKYTRAKKLTPRMLNELVEKIEVFNAEKVNGVWEQRLRIHYNCVGTIEIPSALPLPTPDVSVNTRKGVVVNYAPCDVAI

SEQ ID NO: 14101 - protein, 591 aa, synthetic construct
MAKITRVEQAVPTIKTKKKVAAYARISMESERMNHSLSAQISYYSSLIQKNPDWQYAGVFADDGISGTGIAKRDEFKRMIEAADNGEIDIILTKSIQRFARNTVDLLETVRHLKDIGVEVRFEKEHINSMSGDGELMLTILASFAQEESRSLSENCKWGIRKRFEKGIPNGHFRVYGYRWEDDELVIVQEEAEVVRRIFQNFLDGKSRLETEREFAAEGITTREGCRWVDSNIKVVLTNVTYTGNLLLQKEFISDPISKQRKKNKGQLPQYYVEDTHPAIIDKATFDYVQSEIARRKELGPRANKSLNLTCFSGKLKCPFCGISYAHNKRTDRGFMEYWACGSRKKKGGRCPVGGSINHENLKKACAEVLGLDEFDEDAFSDMVDYINVPEREMLEFHLKSGEVITKDCPNTGHKDCWTAEYRAKTSEKRRKKPNCKGSSVMTGKIKCVGCGCNFRRATQPSSTAESGKAYYWRCAERDGCGTVGLREDVLKPFIAETLGIDEFDDAEFEKQIDHIDVLSATEMVFHFKDGRTVSRTWEQPKRVGRPWTDEQRAKFKESIKGRYTPEVRQRMSEHMKQLRKERGKAWRKEK

SEQ ID NO: 14102 - protein, 526 aa, synthetic construct
MAQRKVTAIPATISRYTATPINSTKKRRVAGYARVSTDHEDQTTSYEAQVDYYTNYIRSRDDWEFVAIYTDEGISATNTKKREGFKTMIADALAGKIDLIVTKSVSRFARNTVDSLTTVRKLKDKGIEIYFEKENIWTLDSKGELLITIMSSLAQEESRSISENVTWGQRKRMADGKVSFAYSRFLGLDKDKETGKIVVNPEQAETVRLIFHLFLEGMTPHSIAAELTSRGIKTPAGKDVWNQQTVRRMLSNEKYKGDALLQKEFTVDFLQKKMKKNEGEVPQYYVEGNHEAIISPAVFDLVQAELAKRTKGGSRYSGVSIFSNKIKCGDCGGWYGSKVWHSTDRYRKVIYRCNRKYNGEKCGTPHVTEDEVKAAFISAYNQLVTEKKEIIANAELIRRTLCVTDSLQEEKSKLEEEIAVLVEMTQNIVAENARVAQDQDEYQKRYDSLVERYDTAKARYDEVVEAIAAKEAQSERLSNFIKVLKSQDGTIREFDGKLWGSVVEFVTVGRDKAITVTFRDGSEIQA

SEQ ID NO: 14103 - protein, 489 aa, synthetic construct
METYCIYLRKSRADAEAEARGEGETLARHEHTLLELAKRQRLTIAHIYREIVSGDSIAARPQMQQMLQDITDGKYTGVLVMEIERLARGDTIDQGVVAQAFRESETKIITPVKTYDPNNEFDEEYFEFSLFMSRREYKTIKRRMQAGRIAAVKEGNYIGTNPPYGYRKIHPQPKVNTLEIVPEEAEYIRCVFEWYLSGMGARAIAARLNQLQVPPRKAAAWEPISIRKILGNPTYAGKVEWHTKKDGTILADGLHPGIISWEQFQQVQERRKQKAPPVPTGYTTQNYYHNVLYCANCGHQMKRRPTADGGAHMLCRRNECRGKVVSASVTKVDEAVLESIRYRIQELELRKDKMEQMAKTESETREKQRARIERALEKLHKQKEKLHTLLETDVYSVETFLERSKALEKQKAELEAQLQACSTDAAAKALDPEQALLWLQYVLDHFETADAEQKNKMLCRVIRRIEYSKTERMCCNKRHSDMQLHVVFL

SEQ ID NO: 14104 - protein, 594 aa, synthetic construct
MPTAVIYARYSSHAQRDASIDQQLAVCRAFAARGGIDVVDVYTDRALTGTNDNRPGFRRMIADAQKGRWNYVIVYALDRFSRDRYDAATNKHKLRQAGVKVISATEPISDEPAGILMESMLEGWAEYYSRELSVKTRRGMSDNAQKCMVNGPVPYGYRRGVDGKYEIVPEEAAVVREIFRRVAAGEPFRAISNDLNARGIRRRKNALWDSSSYNWMLSNVRYVGVYVYRDVRIPGGVPAIVTQAEFDSVQHTVAHKRNPRRSAMADAPISRRRDDGLYLLTGKLFCGGCRSPMVGTSGTARSGSLHHYYACRGRTSKTAPGCTLKNVRQGDIEYDIAAAIRTKFLNPETIRAIAEASYAYQLQASANPELPLLEQQLADTNRALKNIMAAIEQGIFTASTRDRLQELEAEKLDLSTRLAIAREHAKKLPTKQEITAALTYYATGDLNDPLYQEALIDAFLVRAYVYPDHYTIYFSPDATTAVDVPSSVFFSPDPPPLSPTGSHSAPDGSPNRKRADAKASASFFYAMRRRKPGGVESYFSASKWDFASWKKYFSYRDRCFFSRCMKAISCRDSRDVVFTRKNRMFSGTWLRMWA

SEQ ID NO: 14105 - protein, 581 aa, synthetic construct
MSRTTNKRPGKAKSGLSRKQKVAIYIRVSTLYQVDRDSLPMQRKDLIAYASLILGIEEYEIFEDAGYSGKNTDRPAFQEMMQRIRKGEFTHVLVWKIDRISRNLLDFAEMYEELQDLRVTFVSKNEQFDTSTAIGEAMLKIILVFAELERNMTSERVTATMISRANSGLWNGGRIPFGYDYDPDKTAFSIREDEEKVCQMIKNDYMEHKSLVHTSRMLNASGYKTRSGVEWSPTAVWIIVSSPFYAGIYRYNRYKGTERRVENPEDEWIMIQNHHPAIFSLEEHEKMLSILDENSRNRRSVGQRHQTERVHIFGGIAYCGKCGSKMVSTPGRLHVNGYRPTNYSCPKHRKTKECDNPTVSDTQVGEFVINYILNMLGAKKKFSTIENPEDLERCLLYGNTFSEVEHIDSNGLNEYFNLLSRYSSDDSYTFSVKKSRKKKAEVDPEVAALRKEKEKQERAMKRLQDLYLYSDTSMSEKDFIIRKTEISKRLEEINAMLGMVARNSEPSLSDEEFVRQASHLLISRELQNRQYIYFKNLAQNVSPEILKAYMETVLDSVLLVDGRVSSIVFRNGLTHKFKYKS

SEQ ID NO: 14106 - protein, 519 aa, synthetic construct
MKTVTKIGGQLVFPTQKHKLRVAAYCRVSTDSEEQLVSLATQRKHYEAYITANPDCEFAGIYYDEGITGTKKEKRPALLRLIDDCEHKKIDFIVTKSISRFARNTTDCLELVRKLLELTVYIYFEKENLNTGSMESELMLSILSGLAENESVSIAENSTWSIQSRFQNGTFKLAYAPYGYDVIEGKLVLQPEQATIVKAMFDQTLAGIGTDAIAKKLNAKEIPAKRGTHWTATTIRGILKNENYTGDAIFQKTYTDSHFNRHHNHGEKDKYRVEHHHEAIITKDMFEATQQVIRQRGKEKGALPQDKKYQNCYPFSGIIRCHQCGATFKRRIQGGHNSYVAWCCATHVADTTKCSLKYIKEAALEYAFVTMMNKLIFGHAFVLKPLLASLRTLHSNDSITVIQDLDTKLAENAEHQKTLAYLLTKKYLEPAMYQKENNELLQEAEQWQHQKDSLVDFLNDDNKTVRETRKLLQYTCKAKMLMGFDGAIFQQFVEQILVYSRTEISFKLKCGITLRERLV

SEQ ID NO: 14107 - protein, 492 aa, synthetic construct
MAAYCRVSTDSDEQATSYETQIEHYTTYIHNHPDWELAGIYADDGISGTNTKKRDEFNRMIEDCMAGTIDMIITKSISRFARNTLDCLKYIRQLKDKHIPVFFEKENINTMDSKGEVLLTIMASLAQQESQSLSQNVKLGLQYRYQRGEVQINCNHFLGYAKDENKHMVIVPEEAEIVKRIYREYLEGASMLKIARNLTADGLKNGAGHTKWRDSNIRQILQNEKYMGDALLQKTYTVDFLTKKRVKNTGIMPQYYVKDNHEAIIPRDIFLQVQEEMVRRSSIHLKNGRKLTYSSNHCFSQRIRCGKCGEIFRRIHWNNRGKKSIVWRCVNRVDHTCKCDARTISEPALAQVFLTAINQVLCEKKDFLTMLQHNIETVLNHNNDETLAAIDTRLEELQTQLVKLASSKAGYDDVAEEIYHLREQKQQALAKSANQDEIRSRIEDMAAFLKTQSTAITQFDDHLVQQLIETITVFEDSCTVEFKSGVTVDVEK

SEQ ID NO: 14108 - protein, 465 aa, synthetic construct
MKGNAGDTIVKKIDLSPELVRVALYIRVSGEEQKIKGLSLEAQQERLEAYARERGWVIVGIYIDAAKTARKNIHKRTDFQRMMDSVKRDEVDILLFCRLDRWFRSVADYYKIMEVLEAHNCDWKTTDEEYDTTTANGRLYINVKLSIAQNEADIDGERIDVVFDSKIAHGTVVSGSAPFGFRVNEGKRLEVVPEDASIVQDAFNYFETSISQRATVRYIRETYGVNWCDATFRRMLKEKLYTGVYDRGGRFNDHFCPAIISKQQFDRVQALLERNARSVPSGKVYIFTSILTCAECGHKLVGYKSSDYYYYRCNQHFQRGRCSHNHSAREDVVEKWLFEHLAEELERCQLEWEVAAAKKKASVARTDKAALKRKLTKLKELYVNDLIDIEDYKRDYQIYTAALKQIPEPSIEPPPDFAAVRRLLDNDFKTIYENLTREEKRTLWRSVIKEIRIDNDQNITGVVFG

SEQ ID NO: 14109 - protein, 574 aa, synthetic construct
MDDQSRVVTEYVKSKPEVFDVSKMTLLKDEGLSAYKGEHLQGDGALRGFVDDVESGVIPSGSALIVYSLDRLSRLNPWVGSHLISTLISKGIEIHSVSENSVLKSDDPIGSIISGIYLLRANNESVLKSERAKDGYKARLQKSILNKTILTKQMPRWLFDDNGSYGVKKDMKDAIDYIFESYIDGLSSGHIAKELNTKGLKNNNTSWTGSYVAKLIRDRRLIGEHIRLSAQIKGVKREIIEKIPEFYPVVVDKDRFNLANNMLDNVAKNIRGRTRLTYGDTSVLKNLFSGVIKCGLCNGMTTVVKNSKPVKLPDGSRKYVAGTTFIRCRTKYEYKSCKQGDVKYQTIEKAILEHLMGLDIPALLAKPVDNKLDIWKSELNLCISDRNDYKRLIDERKALGKRASVESLEALQEVTDRIEELTSLIESHVDEDFVPVFDAIDLEQITDVTNVEERALIKKSINSLVEKITYKTVSGFVMLEFTYLYRSIKHVVIINKTESKVVVNFSVESRDDVVEFVCNQFMMRYYKYNNEFDVMGSSLIDYSHMVNFVDYLEDDVSRLAKEFLVKNMDRMVLL

SEQ ID NO: 14110 - protein, 445 aa, synthetic construct
MNNQQIQGVLKQNPTTVIEPTKYCLYARKSTEQDERQALSIDSQLKEMLELANRDGLNVVDIRKESHSAKASSQRPVFNSLIEDIRAGKFNGLLTWAPDRLSRNAGDLGSLVDLMDQKLLHEIRTNGQKFTNNPNEKFLLMILCSQAKLENDNKSINVKRGLKAKIEMGLRPGMAPTGYLNEHRTDRKGYVQVDAQRAPTIIKMFEKVAYEGWTGRQIYHWLKHELRFTTKNNKPLALSNVYSILKNSFYYGEVEYPKGSGRWHKGQHKALISKELFQKVNGQLSRDQIVRQVTKEFAFTKLMVCALCGSGISAEEKYKPLKDGTVNRYIYYGCSRGRDLYCKSGYIREEELIDQLTKIIDQIDINELGMRARLEEEVKRYKFFQSKVLGEKQTDDNVANNVNIRNYAKYILKQGSISEKRELLGCLKSKIKVANKKVSLSVVTT

SEQ ID NO: 14111 - protein, 528 aa, synthetic construct
MLDNSNVAPGKNKTLRCAIYTRKSHEEGLEQEFNSLDAQRESAEHYIEAQRMRGWTALPDRYDDGGFSGGNMERPGLRRLLADIDAGKIDVIVVYKVDRLSRSLLDFMKMIDLFNEKGVSFVSVTQHFSTTDPTGRMFLGILITFAQYEREVIAERIRDKVAAAKRRGKYCGGVPILGYDVDRDNKKLLVNPDEARTVQYIFRRFIQIGSAKKLGQELNEQGYRTKAWTTKKGKVREGSEWNTAHIYRLLNNRIYIGEIAHKDRSYPGEHEGIIDRATWDKVQAILEDNKPVKVSMARTKMVAPLKGVIRCGHCGCSMGPTYARKNGRHYTYYICQKDSKRTVSRCPLKRIPAGDIEQAVIEQLSAVFRTPTLVAKTYFAARDIEQAERERLFKQKAQLEMELSQAREQALELMKPGSDQPGKTEMLTTVNRQAVELSKQLTHVSERCRAYQGNSITEQDVSEAFQNVEGFWEDLFPVERNRLIRLLVDKVEIRETGIDMELRTNGLTTLIAELAGLACEVTERRASR

SEQ ID NO: 14112 - protein, 570 aa, synthetic construct
MNQQKAILYIRVSTDEQAEKGYSLKHQEERLRQYCQHQQIEVVAVYKEDHSAKTFERPEFTKLLAFLKKNKGCADLLLFLKWDRFSRNAGDAYAMINQLNKLGVEPQGIEQPLDLNVPENKIMLAFYLAAPEVENDRRSLNTIAGMRRAMKEGRHVTLAPRGYRNARNELNRPIIEPNKDAVHVRWSFEEVAKGIDTVMDCWKAVTKRGFKVSKNQFWNMLRNPIYCGKIFIPAYKDEAESTIPATHEALISEELFYEVQDVLNGRKRKFPAKNTLKEELPLRGFLECRKCSSRLTGSASKGNGGRYFYYHCSKGCNERFKADEANELFVKELERISFSKGGIKVFRKILTDYSKKTGKDQSVSKQQIDIEIEKNQQRIQNAQQLMLDGQLEPSDYRDIKNRFEKTVMELEKKKREISSLDFNLSEYMTSALEIVENLPKYFTRADLKAKQQLIGSVCPEKLIFENKAYRTNRINEVLALICTADKASSGSKKRLAPVFGSQSNQVPGTGFEPAQPFGCCHLKTVRLPISPPGHSFDRGANVTCKLKTIKLISAAYHLLNWLLLNVHSGV

SEQ ID NO: 14113 - protein, 422 aa, synthetic construct
METNIKYCLYARKSTESEEKQILSIDSQIKEMTQIAEREKLNIVEIRKESHSAKESGQRPVFEEIVKDIDAGIFNAIITWAPDRLSRNAGDLGKLVDRIDQNKLVQIKTFGQTFSNSPSDKFLLMILCSQAKLENDNKSINVKRGMRTRCEMGLWPAQPPTGYRKVNDRTAKCEVEIDPERADIVRQIFEKIAYDKWSVSRVYAWLKFEINFKTFRNHNLSLGNVFRIIDNTFYYGKFEYPRGGGIWYEGKHKPIITKELFDETRNSIKSQVIKSQGKEFAFTKIMKCGLCGSGITADEKFKKIQNGGVNRYVYYRCTKAKDRNCKNTAINEAELIESLLKMLDSLDIDKVKLTTKLNLEIQKFKKLQAMFLGKKRTEKIETIDLRDYAKFVLKDGSVLEQRSVLECISSELVLKNGNIKIK

SEQ ID NO: 14114 - protein, 555 aa, synthetic construct
MSNRAVIYVRTSSEHQGEKSSPAEQEADCRQLAADKGLVIVNVYRDIEKYRVRTKLVEPSGTRSDRPGLVEMLNSAARDEFDIILAWREDRLYRGMRAMLLVLETIQDHKVTVMLARETFDPKIAPLRAWVAQMELDGMKERMTMGVKARLKSGKANTGQDRYGYQRQGDQIVLVEEEAFWVRKIFEWYLDGCRLMEIRDRLIAGGAPQKGSSVPRRIHWARSSIQAILKSAKEYAYGLKIQSRKGELFEIPVEPIIDIATYDSFREMRARKKTYPARRVHHDYLLGGVLKCDCGNKWGARTQKTRKNRKGVLVERKTTTGVYFCRQNHKDLVSPDCPRHIGAKKADDEAWEKICRALDKPEYLLSQAMDLVDQLRANASNLHEERGRIEKQLQRINHNRQWVITQAREGRFTNNDMEQQLATLTLQEISYKRDLYALGQTININALNNWEEKFEEYLADLQVGVVELKEAAPQTEEERHRVFLLKKKVVDTLVEEVTINRNRELNVVIRLDLQKILDQDAGLENLSPAAYSRRGEIYTHTQSSPAHPRHPASCA

SEQ ID NO: 14115 - protein, 598 aa, synthetic construct
MIANAKPAVGYIRMSTDKQEDSPARQRRDIEALAQRQNFRIVGWYEDHGLTGTESLNRPEFQRLLKNAQSGKFEAILLSEQSRMSREDVFDAMMHWKILRDAGVRVVTCQRGELDFTNLGGVITAIVDQYGAREESVKLAQRVASGQRLKAMNGQRIGGFVFGYDREIYDDKGKAVKRVHFQERFRRPATWSSRLVISNDRKAVDGVRWAFKACAEGRSLPAIATELNRRGLKTTYGNAFTVSSVKGLLENPTYAGVLRVGTWSRSKFCSVAENGLIEIDDAHPAIIDRDLYDATQVSLANRNHPRSAFARYLLSGIVTCHHCGRNLHGVRRLQPSRNEKDAYYDCDKSKRNGCPHPSVRCEKLEAFVLAAIQDNLLADKMEQRVRDAITKAKRQAAKGASREHRKLQDLRRKIERGTENLALADKNEFKAISALLARWQAEETELAMRIERPCDDLEPLPEALKILKRLPEIRKNIGKADSGLLNNAIAKTITSLTIGVRDAQVGEIRYREFFGELAFHAAFEIPPIPIPDTAIGHRHIWMELAELVHQSNRPLHLRDFYKLIGSTDPSHAAYHVRRAEQAGLIKKVGLQGGWVSQS

SEQ ID NO: 14116 - protein, 520 aa, synthetic construct
MKRSGKSLTPRIRCAIYTRKSCEEGLDLEFNSLDAQRESAEAFISSQQLEGWECLPDRYDDGGFSGGSLERPALNRLLEDIKLGKIDCVVVYKVDRLSRSLLDFTRIMETFDKNGVSFVSVTQQFNTTHSMGRLTLNILLSFAQFEREIIGERIRDKIAAQRRKGKWSGGIPVLGYDVDRSNPSPKLVVNAEEAIQVRRIFSLYLELGSLLPVVQEVEARGWRNKVWRTKKGLERGGRSFDKCSVYAMLTNPLYMGMIKHKEDIFSGEHEAIIEPGIFEEVQRQLNKNGRGKGNHLINKYGAILKGLLYCKSCGRAMVHTFTGRGTKRYRYYTCCKAIKQGWKNCPTKSVPAGEIESVIVEQIRAIADDQDLINEVYVQACSETNAELDELSTQRQQLERQLARDHADISRLAITPDPTSVTSSRIADLHERVSRNEQQLVQIVSRVKSLQSQQVTHQDVIEAFKDFDNIWNVLSTRERTKVISLLVARIEFDVTDCTIAISFHPSAIKSLATGISEDAA

SEQ ID NO: 14117 - protein, 534 aa, synthetic construct
MEQVRNGMWDSSILVVESIDRFSRQNPFDVMGYINALMAHNVAIHDVMANIVISRSNSKDLPFVMMNAQRAYDESKYKSDRIRKGWAKKREQAFNKGTIVTNKRPQWIEVENDKYVLNHKAAVVKEIFALYQTGMGCPTIAKQLQTKEGEQYKFNRPWTGELVHKILTNRRVTGKIFISEIIRNHDDIENPVTQKKYDMDVYPVVINEEEFELVQELLKSRRPNAGRVTVKKDGQEEVLIKSNLFSGIARCTECGGPMYHNVVRAKRTPKKGDPKIEEYRYIRCLNERDGLCENKAMTYETVERFVVEHLLSMDLNTVIKEQEFNPEIEVIRIQIDQVKDQITNYENGIERRKSAGKAVSFEMREELDDAKLELEQLLARQASLATVQVDLPVLQDVNVTELYNVNNVDIRTRYENELNKIVSNIRLKRNGNFYTIDIIYKQNELKRHVLFIENKKKEQKLISEVIIENVDGAKFYYTPSFVISVKDGEIRFQQTKEDLTIIDYSLLLNYVDAVDRCDAVGVWMRNNMSFLFTK

SEQ ID NO: 14118 - protein, 506 aa, synthetic construct
MRHVITYLRYSSATQGAEGADSTRRQNELFKQWLRKNSDAQVVASFNDEGLSGYKGKHLSGQFGDMLSRIESGEFSKGTILLVEAIDRIGRLEHLETEALMNRIIAHGIEIHTLQDGLIYTRDALSDDLGISIIQRVKSYLAHQESKQKSFRVSEKWKQRAKLALAGEQRLTKMVPGWIDPETFKLNEHAETVRLIFKLLLDGESLHNIARHLQANNISSFSRRKDANGFSVHSVRTILRSETTRGTLPASQRNDRPAIPNYYEAAIDAATFNKAQEILDKNRKGRTPASDNPLTINIFKGLFRCQCGASVHPTGTKNKYQGVYRCNNHLDGRCDVPPLKRKPFDKWMIDNFLGMIDVGNDGEAEGKIASLQHEVEIVTARIKKATALLLEMDDIDELKIQLKELNQKRTELQTTIDNMRRKASLTDKELPQLKDIDLTTKAGRVECQLILSKHLKGLTLGKDSVTVTLQNDTEITIPTNPLPLNDGSPIFEIADKELLDIDAYQL

SEQ ID NO: 14119 - protein, 449 aa, synthetic construct
MLKRAALYIRVSTDQQAKHGDSLDAQIATLKDYVSTQDNLTIIDTYIDDGISGQKLYRDEFQRLLEDIKKNRIDIILFTKLDRWFRNLRHYLNIQEILDNSGVTWLAVSQPFFNTDTAYGRSFVNQSMSFAELEAQMASERIKAVFENKIRKGEVVTGSVPFGYKICDKKLIPNENAPIAKDIFKHYSIHNSIRLTVEYLFNEYDITRSSRTIKHMLRNRKYIGEVSGNKNYCPPIVDKETFEKVQNLLDKNISSIAKRTYIFSGLVVCSCCGKKMTGRYRKRKYIKKDGTVMYYTKKVYRCNGNTYKRNKCPNKINIPEEILEEYLLNNIKADAENFEAKQKKIAVSAPEKNNNSKILKKIERLKKAYLNEVISLDEYKKDRKELEQMIVQVKPKETIVFKSNWFNKNIESTYRDFDEEEKRFVWRSVLKNLIVDPHGKITINFLTKN

SEQ ID NO: 14120 - protein, 637 aa, synthetic construct
MKKAALYVRVSTLHQIDKDSLPFQRQELENYAKYALNIEEVVIFEDAGYSAKNTDRPKYQEMMKRIRSGEFTHLLVWKIDRISRNLKDFSEMYEELKDCKVTFVSKNEQFDTSTAMGEAMLKIILVFAELERKLTAERVFSIMLSRAEKGLWNGATVPFGYVWSEEEKFPVIDPDESKIIQYIYNSYESLRSTLKVAYRLHEEKIATKRNGQWTAKTVRDILRNPFYIGTYRYNMRESGGSRRLKNKEEWVVVENNHPGIIEKEQFERVNKLLSDNYRGLTDVQRADIHKHIFSKMLYCGKCNSLLTAGLDAARKDGYRPSRYTCVTSGGAKRCSNYVSDIIIGPFIFNYVSNLIRLQERITPKHSLRDMERALLRGNSFIDVVGVDNESLKETHFALTGNMSGQEYSLNTKDEIEIPNIEIERLQREKTKFVRALKRLEDLYYFGEEEDAISQKEYIFKKRDLQERLEELDDEINILKQKNDDKTSDVFIDYAQHFLITKEMQQARQVDYRELSKIVGREALSDFMQTIIDNIVVIDKRVQSITFKNGITHTFAYKSLLQSKSSAPTKKQYKNYEGPVIEYLKENGPASRSDLQKATNITRDGIFTLLSELIEREIIVKTGQSTATRYHYNDKQNN

SEQ ID NO: 14121 - protein, 477 aa, synthetic construct
MRCAIYARVSTEEQAVEGYSISAQKKKLKAYCDAQDWDVVGYYVDEGISAKNTNRPELKRMIEHIKKGLIDCVLVHRLDRLTRSVLDLYTLLDVFEEYDCKFKSATEVYDTTTAIGRLFITIIAALAQWERENIGERVRVGQQEKVRQGKYTSPRKPYGYNADHKKGVLTIIEEEAKIVRSIFNDYLKGHSAMRISKKLNTIGTPGRDYWNEKAVMYIIENPLYIGTLRWRKETEHYFEIPDSVPAIIEKELFDNVQKLRESRRESHPRSQYGSYIFSGIIKCPHCGRSLVGNYVTSKKRDGTVTKYKQYFCRGRKLNVCTMGSMSERKLEKIIIPHILSFHIDATDADVTTGTSNMEDEIIQIKNELKTIEKRRKKWQYAWANDHLKDEEFTELMQEENDREKVLTEELYKLKPTENKKLKNEELKEILKDMKLNWNNLNDEEKKMFMQIILKKIVVERSDELQAYELKVVEMEFN

SEQ ID NO: 14122 - protein, 474 aa, synthetic construct
MKCVIYVRVSTYEQAKHGFSIPAQIERLEAFCVSQGWEVAFTFIDDGYSAKDLNRPQFEEMMKMIKAGGIDVLLVYRLDRLTRSVLDLYQILKDLDEYGCKFKSATEIYDTTNAMGRLFITLVAAIAQWERENTAERVLMAVEKKTKLGQWKGGTPPFGYKVVEGELQVFEEEAKVVREIFQMSRTVGFLTIAKELTSKRYPTRRGGEWHVDTVRDIANNATYAGYLSFSEKSKDSKKPPRERNLFEGIHERIIDRNEFWELQDVLDKRRTFGGKRETSNYYFSTLLKCARCGHSLAGHRGSNRQKTYRCSGKKVGKSCTSHIFLEDSLTKAIFSYLENFGSFTNNQREADQNFEKYDSLKNELKEIQKLLQKKKQMFENDIISIDELIATTGELREKEKNIQQEIHAIESNIKSQSNEEIKEIIQNIDSLWSYADDFERKQLMQTIFSQIIVDTKDDYRGSKYPREVIIVSAK

SEQ ID NO: 14123 - protein, 650 aa, synthetic construct
MAKADEAPARKVLYKYIRFSSIQQAKGSSFARQNERLEKYAAENGFEVDDSLDLKDFAKSGFHGINKEVDQGLGRFMLAIEKGLIPTDGSAYLAVEQFDRLSREDIFKAQKTLNDILEKNVNVITLMDGRIYTQKSLSNFMEVLYSLFLMEQAHQESLKKSDRIKGAYTNKVKNLKALAKEQRQAMIEWEKHKTGDKPVLEPLINQIQFSSQVPYWIDQKVEVVSGRKFRRFVINEEKAGIIRYALSLLNDDNGYMNVAATLNKEGVPRLDFVSNKKRSTRKDIWTNRAVNEFVNSDAIFGDLSLYDNFYADKEFEYDGVKVSKKVGKRTHVENIPNYYPAVIDKKLVMGLRARANAKKKGRVAGRTTNTNLFQNLLFCGKCGDSMHLIQSKRTTNKGTYQRFYLVCYAARHKACDAKMIAYQELERELVKYLVMPINEAHLGDTSKVINEARNEKILELEGEIKGVEDQIDAYRQEMKNNKNLKPSIALTFLSELESDKEFKIHQLKELQLQKDKTIEYLESENVSSFDINTEEGRIAFKVAVKQRYAGFFVFTEDHAVMVFERTGAAEIFKVEIQNRRGKVMEPNRTADTITLFQEKLKYLKKLSENYKEGKLYELVKAYKVNDIDVFEEEYINRGLPQPLSYQRDFD

SEQ ID NO: 14124 - protein, 594 aa, synthetic construct
MYEKAVGYIRVSTDKQDFERQRQEIMDYSKKNDFLITKVFEDKQSGSDYADRTGFQDLLLYLKETPEVKIVIFDEVSRMGRDTAQQVTTYKALSKMGVRVFTRGKGEFGANKEDSLLFTVLSAIADYERQTIIDRTSSGRRKVVKDGATQISQQLYGYDLILTKKKNRQVIRRQSIKVNKDEAAAVKTMFQMVDKNGSVNDVIRWLKESRIPSPKGGKVWGKSTVLRILHNTTYHGEWRFGKFYKDGRTKFSMSRRPDKEHIVVKVPKIISKKLFTSVQDKLESNQVKFNPRNQKYTYLLKGLARCQCGTTIQCLYESKSDRRTYRCPQRNINGLQKRTCPIRVLQADFIEKILLHELKAKIEDPDFFKDLKLQKLKQYKTPHIKLQKQIDKMGDEIDKNESLIKKYYEKSVGLIQKNPDKAEFFEALADDKLKENRERKTEVTKLRSALEKLKGQKVNLDMFKDIKRGLDFITSQEVDKFNKASQEKKLEFVRTYIKGVDIKVLQPETKKLLEKIGQLRDMGLYKQGNEAYKGLYYSAFDRQGNPKEKLGLSVMRIEVEFTNNYKVHIDLPYFYSNPEIAVSYLTNGVLQLTK

SEQ ID NO: 14125 - protein, 640 aa, synthetic construct
MNGSGVAGLLELLKEARTVTNRRFAVGLARCSTDMQDHSIADQESEIRAFAAASSVELLEVFGDEGISGSELNRPGLNALLAFIEDPARAHGGVVVVWKRNRLARPQDPRDGLLLERRIENAGWALHYLHGSKQTGDALMDTIMGVIEHHQSGEYLTTLSTDTWRGLIGRILDGDVPGGKIPYGFQKVLIEPDGSEQRVSRRQKHRKLKEQRTRLEPGDTGERDIVRDIFLRYASGTTSLASIAKDLNDRHIPSPSGGVWVGGTIRDILTNPVYVGDLVWNRETTSKLYRRAGGTTVKKEPAHKSIRPSKTRDTTHYAANKPEDWVRIPDHHQGIIDRDLFDQAQEVRKRRGIAQGGQRRVHNVYALTGILYCACCGKRMSGMSNSTLIKRKGGLRVRKHYKRYMCQSRGQNGGCEPYQVLAPALEGTILKKLRDTYVPALPEDKTRRRLTGILRRKLGSEVSGPSIDRLREQRTRLDGKIAKAIDNLGLVDGESAKQLAERIRKWRAELATLDQTLGGAKAQTMEESNLHEAVDEIMSMLSGLVEVGRDAAPENLKKLLQRTVVRVDLQFETLPPKPGRKLQRHRLTGGRIVANSLLGALAGAVHKSNDRPEPIVASGESSSGVIRTRDQVVNSHLLYR

SEQ ID NO: 14126 - protein, 553 aa, synthetic construct
MNVEPLKAAIYARYSTDLQNERSTEDQIDLCKAFAKREGFTVAGTYADKAMSGASMHGRLDLARMVQDAKDGQFKVIVVEALDRLSRDIADMATLHKTMDFIGVRIVSVNDGEANTINVALRGLVAQLFREDNVHKVRRGMSGLIKQGLSAGGKAYGYRPDPTNPGKPQIVEDEAAIVLRIFEDYAKGTSPKAICRQLNAEHVKPPRGKLWAPSALYGSASRGTGMLRNPIYVGRIVWNKVHMIKDPSTGKRVSRPNPENDWKTADVPDLRIIPDELFDAVQAQIIGRAQTAKGGPIRGNNRPKRLLSGLLKCGACGAGMAVAGVDKSGRTRLRCSAHTNSGACPDPKTFYLADVEELVIHSLTKELASPEQIEVYARRYIEARHAQGAHEHRRRAEIEARLAAIAKDNDQLLGLLMKGIGDQDAIDARMKAQGAERDDLKQELASLPKGNNVVLHPTAIKAFANRLMGKAIDPLRPPRARLEMTLILLDDMGELAPIVRELIRSITLDRDDDGRLTIEVEATLVPFLQEDGQPVGAAPLVAEEGFEPPTQGL

SEQ ID NO: 14127 - protein, 561 aa, synthetic construct
MSQEIILPDINKLTRKQRREKGVKVAVGYTRVSTQGQVDDGLSLVTQAEKIEEKAASLSLIYHMTYTDSGISGGDIAHRSGMIQLLEDAKNGLFDAVIIYSVSRASRDLDDFLTIVRTLERYDIELISISELIDASNPAGTMSRNLMAVVAQFERERTSELVAESMKTVAKEGRFTGGRMLGYYCGLDEEGRKTLLIEPKGAAIVRTIFTKYASGEGYRAIANYLNRQGDTTITGKSFTAGGIKTILSNQKYGGIIEYGKYQQWKKKRRRGLNPTPIVQKGIHEPIIDEALFLKVRERLEMEKRQPNWNHRGENVLTGLLTCPVCHGPMAASNVTNTLKDGTKKRIRYYSCANFRNKGASVCGANSIRADYAEQFVSDRLRELVTIPEFLPVLVKEMNKKIEEELQPLEQELAVLLVNMTDIEKKVEVYHQFEELTDEHQEDISSQKEKLKEQLIYSKQREHEILSVLNHQHEKITVDNVSQIFTALDHFLNKADKAMIKSVYRTFIQKITFDPLTKDAIQLTMTFNEEIIHQLNQLYQETLSNQTDGVFFELKRPFTLVL

SEQ ID NO: 14128 - protein, 518 aa, synthetic construct
MPKAISYIRFSTKIQLVGDSTKRQSKYINDWLKRNPDYYLDESLRFQDLGISGFSGANAKSGAFGEFLAAVESGYIASGSVLLVESLDRVSRQDIDTAGEQLRKILRSGVEVVTLVDNEWYTKESLKDSLSMIKAMLVMERAHEESAMKSTRLRSVWAAKRERAAKGEIMSKRCAAWLKVSEDRSHFEFIPENVKAVQRVFQLRLEGLSHVKIAKQMNDEGFSTLNQFKSVTGGWSQSSVTELLSNRSVIGFKVPSKSMAVKGVAEIPNYYPSIISEQQFYAVQQLKQGSGRKPSSDLPLLTNLFKGVLRCSECGFIVVVAGVSAKRSGIYKCSMKSEGRCNSVGFSRLQTDRALVQGLLYNTNRLSLNRDNGSAIGTLQSELEQLQKQRERLIKLAMLADDTESMAKDLKALNSQIKDAEKAVSEVHQREQSSQLETISHLDLTLKKDRIEAQIIIKRIVKEIRLNTAQKKCDVFLHNGLKLLNFPLDRVVDGEIFLEVLPLLEADEFDFDTYRVIE

SEQ ID NO: 14129 - protein, 547 aa, synthetic construct
MKLLVTYIRWSTREQDSGDSLRRQTNLIDAFYAKHKDDYYLLPAHRYVDKGKSGFHQQHKAQGSDFRRMFENVMSGAIPEGSLIVVENFDRFSRADIDTAIDDVRQILRKGVSILTLGDGELYDKSALTDPVKLIKHIIIAERAHQESLVKQKRIAQVWNHKTQLARELKKPMGKQAPGWLELSEDGSHYIVDEDKASLVNIIYDKRLSGMSMFAICKWLNEQGYPTINQRKVRISKTKKPDGNWSALSVKHILTSRSVLGYLPAKISTEDRKTVLREEIESFYPQIVTDSKFYAVQQLLEETGKGKTSSGEHWLYVNILKGLIRCKCGLVMTPTGIRKPVYQGTYRCNGNKESRCSYGTVSRKLLDTQLCSRLFSKLSQLHDEATDTAKLDELQRRLNTVDSELEKLTETLIQLPNITQIQEALRVKQEEKDELIVQLSREKARVKSVSSLDLSGLDMESVEGRTEAQIIIKRLVKEIVVSGNEKLVDIYLHNGNMIRGFPLDGKDDHTLTLEEATDEMQPLDDMLIFGEPVTRIYPAGDMEEVDA

SEQ ID NO: 14130 - protein, 557 aa, synthetic construct
MAARSTVYSYVRFSDQKQAAGSSAERQAEYAARWAAERGMELDATLSLRDEGLSAFHQKHVKQGALGTFLRAVEDGRIPAGSVLVVEGLDRLSRAEPILAQAQLAQIVNAGITVVTASDGREYNRESLKAQPMDLVYSLLVMIRAHEESDTKSKRVKAAIRRQCQNWIAGTRRGVIRNGKDPHWTRLADGRFEIDPERAGAVRLAIEMFKQGHGAVRTVRTLTERGLSLSNDGNNNSTQLYKIIRNRALIGEKTLAVDGEEYRLEGYYPPLLNVDEFAELQHFADQRGRRKGKGEIPGIITGLGITYCGYCGTAVVAQNLMGRKRKENGHPQDGHRRLICVGYSHNQGCRVGGSCSVVPIERAVTRFCSDQINMTRLLEGDGGAGALAGRLSVSRQRAKELDAQITRITDAMLADIEAAPQAFARKARELETQLKECQKEIESLEHELALASSRSTPAAAEAWAALVSGVEALDYDARMKARQLVADTFSRIVVFRQGFELGNNDDSSIDLLLIAKHGNTRMLHIDRRTGEWKAAEDLDMSGLPSHSLPLPPGTEAI

SEQ ID NO: 14131 - protein, 539 aa, synthetic construct
MNRVANSLDTRAAVYVRVSTTKESQKDSPEHQVGICREKARLLNIIQPDDLVYEDRDTGTSIVDRPAIKKLVADAQKGFFQVVIFASLSRFSRDTMDSLMLKRTLVDSLKIRLISIDENYDSYIDNDEFKFQIFAAVNQKQSELISLSSRRGIRQSALKGNFTGSIAPYGYRKAIIGNRKTLVPDEQEKEIVKLIFQLYTANKMGEKAIVTYLNGKNIPSPKGGNWGVTSVQRILQNEVYTGANVFSKYEVVKVHSIDDLHNRKKVLVQRDKSLWERSIQEPTHEPIIDKDLFLQAQQIREMRGGGKRGGVRNKVNVFAGFIKCKHCGSAMVSMKSNNSNRKRDGKEYRYLICSKRRRQGDAGCHNNYWLPYYEFRDELINDIADKLQSITSAQQLFETHKGLIQINTTTSEREIAEQENKINKYREALYSLRKAVLDGEIDEKQFHYEKAQFEKEIKQYESRLNELQKTLNKRDNLMELYDEVMESLEELLTLTYDEEDEFDELRLILMKLIQQILVEKDGNITIKTTFGDSLNDIFC

SEQ ID NO: 14132 - protein, 489 aa, synthetic construct
MTIALYIRVSTEEQAREGFSIPEQQERLRAFCTAHGWTDYAFYIDDGYSAKDTNRPAFRRMTDDIRAGRIHMVITTKIDRLTRRLIDLLTFVDELDMYECTYKSASETFDTGTAVGRMVLQLLGVFAEFERERIAERVRENMYHAAKQGRPVTAPCFGYDVADGQFVINEEEAHWVRKMVDMTLNGHGTWSVAKMLNENGVRTKRGREWTLKAVRVFLWKNEMLRGNTVWNQHARKNGRLIQRPPDEWLLVEGTHEPILDQETYRKLQDVLDRSQRAAPRSKGSRYLLSGLVFCGHCGAKMYGMDTTCKKNGREYRPPARYLCAGYTKKGQCFYHYIPCSALDQQVIREIVSLSQTDLDVPLHAVSVQENHIRGELSQSKRQLAFMDERFQRQIRAFELGILDEADLLEAKTRLNEEKRALREKIRTLEERVEAEVSPEAVQAKIRNRITTLQEAVENDDRERLKNGIREIVHQVTVYDGSRIEISFWV

SEQ ID NO: 14133 - protein, 518 aa, synthetic construct
MKKITKIESVTTQRKKKLRVAAYCRVSTASDEQLVSLETQKAHYEEYIASNPEWEFAGLYYDEGLSGTKKEKRPALMQMITDCENGKIDFIVTKSLSRFARNTTDCLELVRRLLKLHISIYFEKENLNTGSMETELFLSVMSSLAESESVSISENNKWGARHRFENGTFRLSYAPYGYSLTDGKLVINEDEAEQVRFIFNETLSGKSARQIATALNDKKVPSKRNGMWTSASVLNIMRNERYVGDCLYQKTYTDFRLRRHINRGEVDQFYEENHHDAIVSREVFDAVSKVINQEHKEKNRSEGNLKYQNRYAFSGKLLCGECGSVFKRRINITGKLKYPAWVCSVHHKDRTRCSMKYVRESVLETAFTTVMNKLIFGRKEVLQTLLDNLTTQSHKSRLRRIDEVERTLEEMQDRKRNLTSIMTKGYLDLAAFTRENNEITAETEKLMEERDQLKSEITGDLNRTESLRDIIKFTGKSAMLSSFDAELFERFVDHIAVVSRTELEFHLKCGMKVKEMVE

SEQ ID NO: 14134 - protein, 521 aa, synthetic construct
MGTIRMIPAKRRIGSRVIQDETPKTRVAAYCRVSTDTDEQATSYEAQVEHYTEYIKKNPAWECAGIYADDGISGTSTKKREEFNRLIDDCMNGRVDMVITKSISRFARNTLDCLNYIRKLKDKNIAVYFEKEGINTLDAKGEVMLTIMASLAQQESESLSQNVRLGLQYRYQQGKVQVNHNRFLGYDKDEEGNLIINKEEAEVVKRIFREYLEGQSFYGIGKGLEADGIKTAAGSERWLNSSIKLILTNEKYMGDALLQKTVTTDFLSKKRVANRGIVPQYYVENNHEAIIPKELFMRVQEEMAKRSNLKTTTGKRRQYSGKFALSNLVSCCHCGGFYQRTHWNIHGRKSVVWRCLSRLKKKYSEVECNSRTVKESELQSVAVKAINEVFAKQDSYMSQLKTNIEKVLSSTNTDEVAGIDSKIALLQKDLLKRIKHRQNCDKLGQEITELHERKYQLQLDDAQKAGVRQRISDLKSFLDEQKTQIAEYDENLVRRLIERITVHDDHFTVEFKSGLEIEVNG

SEQ ID NO: 14135 - protein, 519 aa, synthetic construct
MTTSAKIDSGAIRCAIYTRKSTDEGLEQEFNTLDAQRESAEAYIASQRHEGWTCLPDRYDDGGFSGGNLERPALKRLMADIEAGGIDCVVVYKVDRLSRSLLDFSRLMEIFDRHGVSFVSVTQQFNTTHSMGRLTLNILLSFAQFEREIIAERTKDKMWAARRKGKWVGGMPVLGYDVAEGGGRLEVNEDEAARVRAIFQLYLELESLLPSAQELERRGWNNKRWVTRKGKERGGKPFNKSTLFRLLTNPIYTGKVVFQGTTYEGEHEAIVDMETWKRVQAILRRNRLNGGTLVRNKYGALLKGLIFCTPCGTGMTHSCANKKNGKSYRYYVCQTAQQRGWAKCPTKSVNAYDIENAVVQHIKGLGTNPAVLSTTLTKATEQAEVRLHELEMERKAAERELKRLHAQVRKLLGGKLPAGASEIATDRLADLQERIRTTEQRMTAIQEEIIVLGKTTVKENDLTQALADFDEVWNSLSSKEQAKIIHILVERVGFDGRDQSVTVTFRSEGLKQLCQRTAA

SEQ ID NO: 14136 - protein, 516 aa, synthetic construct
MSTRIPVVEVIRVSTAEQAKEGRAGIARQEAACRRAVENHGLEVVRAVRLIDVSGTCVQNAPEMDEIMGLIRAGRARGIVAADFDRLLRPDDFRSLAVLQDIKETGALIYLPDQAVDLNTQGGWLISGMQSMIAGNELAQIKKRLNGAKEAMRRRGEHPGADNLLPLGVSYDRKAKRYYYNDDAPLVARIFEAFYRGEQNISELGRMFGIERARAGKLLRNQLYIGWRVYDRRRGGDRYARMDGRMGEMRKVPRPPDEVFRVHVIEEPLVPEVLFWAVQDILDGRSRRTIQARMKGRSEALFAGFVRCGICGERIYTSGRGEVRRGARYYVCRRLSSWCKKRGMSCTLPRLQVPKVDAMLVEFVASRLADEEYVLAQAEGLVSRAESAARAQEIEQGERQIAAIKRKRARLLDVYLNGDIEREDLDRKAEDLRREQERTEARVARLRTEASETDSAQYADAVRQLAEAFAEFPFWTRKEQRALLEDIRPEFWITPDGVTKASIPIRTIPSSTTKIT

SEQ ID NO: 14137 - protein, 542 aa, synthetic construct
MKATTSQKAVIYCRVSSKKQVREGDGLRSQETRCREYAAYKGYEIVGVFCDSVTGSKKKRLGLSAVVKHLKAHRKDGCVVIIDHIDRFARDVRWHWDLRDLLREAGGKLESPSIEFGEDADSILRENLLASVSQHQRQKNAEQTRNRMRARAMNGYWVFQAPMGYRYERVAGHGKMLVPQEPLASIIGEALEGYASGRFEGLTEVKRFLESQPAFPRNSNDEVHIERISEIFSRPVYAGHITIEDWGLRLVPGKHKQLVSLATWQAVQDRRSGTAKAPARADISEDFPLRGFVSCGCCGKPLTACWSKGRSARYPYYLCDTRGCPESRKSIRRDAIEGEFETLLTSLKPTEGLFNVAFAMFRDLWEAKLASQHSQGGTLKKEIALIERKVDALLDRIVDADSDSIVRAYEKRIRDLETQKALMRDRIANCGRPLTSFSEAYRTAFDFLANPCKLWHSEKIEDRRAVLKLAFAERLIYVRGEGYRTAQFSMPFKLIGGAEMNEKEMVPLAGIEPALLAELDFESSASTSSATGAFASHIRMRP

SEQ ID NO: 14138 - protein, 588 aa, synthetic construct
MSTDIQLKGDSLRRQQQSSKAYADQNGLELVEDFKLEDIGVSAFKGANVSSGALGKFLALVKGGEIARGSYLLVESLDRISRQQVLDSIPVFFDIIKSGINVVTLADAHLYRAGETNFADIMYSVMILGRAYEESKTKSMRVGEAWRNKRNKASEKKLTKVAPAWLTLREDRSVFDIIKERADVVQQIFDFADAGHGSFVITRRLNQSDVPTFTKSDGWHESYVTKILNNRAVLGEFQPHRYDELGERIASGDPIRSYFPRIVDEDQFLRVQAARRRRLVEGAGRKGPEYRNLFSKIAKCDYCGAPMRFVHKGRPPKGTQALKCTNAVRNLGCESVSWKYSDFETSFLYFVKEVDLTAILQAAAQDSGQAMLQQRMAALEEKVHQLQVKRERIFEMLDDPGSSTTFIKGKLEECESEISKEQQQIEQLQGQLLASQPMPSITALELKSLIDAIQDMTASDIFDRRAVVANRLRSMIRSLRVASDGSQPKAKRIEHFLSSTGVDPEERRRLLDQIQWSNEHAQRFQRTFSVVLADGISRHVVVKSDDPTDFIAEVLVGKDGAISGSDRGMPIGWSDGLDDVFDEPASAQ

SEQ ID NO: 14139 - protein, 520 aa, synthetic construct
MEIADLYVRVSTDEQASKGYSQRNQEEVLRNYCGLKNITVRKVYYEDHSAKTFNRPSWTKLISHLKKYKYKSNLVLFTKWDRFSRNTGDAYGMIEVLRKLGVEPQAIEQPLDLTVPENKMMLAFYLAAPEVENDRRSINVFNGMRTAKKEGRWISSAPLGYDNFTRLDGTKYIAPVEPAASAMKWIFQELVKGHYNLNQIHLRAVAKGLPCGVNNLYSAIRNPVYCGKIVVPRYKDEEEQLVPGQHEPLITEGLFYKAMDILDKRKVSPRIDATAIDAADQIHLRGFLICPECGKLLSGSASKGRNAYYHYYHCYRGCPVRFKAEEVNKTLEIELEDYFIGKDYNNFYIQCILKAYRNLHQGDPDARHDIVTQVRELNAKLSHSRNLLASGTFDAEDYKIIKKDTEEKIRRLEAQIPDLISAEASLEKDLNVCFSNLKYGYRKYRAGDSIAKRAIIGAVYPANLTYFSEGVRTAKVNDLNACIALINKELRGQKKWTTPELSRLSIMVGDTGFEPVTPCL

SEQ ID NO: 14140 - protein, 644 aa, synthetic construct
MFNFDKSKYKGICVPYARFSTDVQDEIGRKSLERQIEEAKRFSNEYGLFFDEDIAFVDRGVSGFALSGDTAKTFQKGQMQLMLELLEEIDVAEREFIYITFHNFDRFSRMSPDVASRYFEQILDKGFNIVTTIDNEVYKRNSGNLEQMIISIIHMSTAYYESEVKSIYISDSRQRKRDVIEYLYNDETQKGKHRHVGIKACCPRWIKTKDIIYEYVGKDGSVKKEALKRFEIDEERAKIINYIFDLKIQGLGNGKICQVLNEQNIPVFHSGNYTKAKYWNLSTISNYLKNENVIGHSYLYHKAKEEVFNEKTQTFSTKRVRKIATDKLYNYYPPIMSEEKFNQAKEAVKANSVKVDRSKSSEKPHMFSNLMRCSCGTRLHYKLTKKNNVKKVDDYFEYLKCERSALNDGCTGENINYKNFEAQFINFIRYIDVNEILDHANGVEGETQGLTELEEREAAINLKITGLTKTYQGLINAGVDGSDVLVELEKAKGELQEVEFEKSKLLNSMKSQTSSSSESIRQKKNALKSKVFAEKVEARKAVNELLKQKIRWMEVYATAYAKFVIVCFVDNVIRTYAYQDEFATDLMFNTIKINTDGLKGYEADELMVLMIKTVRESLAGMNEVITNTDLKIKLAAVKSEYMNK

SEQ ID NO: 14141 - protein, 664 aa, synthetic construct
MFSFDKSKFKGICVPYARFSTKGQSKIGKKSLERQIEEARRYAKSNNLYINEDLIFADKGISGFAQQGNIAKAFKKGQMQVMLALLEEVPYQEREFIYVTFHNFDRFSRMSPKQARTYFDLILQKGFNVVTTIDNQLYTRHDKDLGKMLISTIKMTTAWEESQVKSIYIKDALARKKKVVEYLYTHPSQKGKYKHIGVVQPNMPRWIDHEKIELTYTDESGSKRTDSFKKFTLNKEKAKIVNYIFDLKIQGLGYARICRRLNEEGIPTFDQGKHRIAKKWHVFAVQNLICNEMVLGHITLHTHNEEEYMCEIDKVFKKRKIKQTATEKLYNYYPAAVSEAKYLEAHKNTIQQDKPKKLGRIGERTNIFAQILLCECGGTLQYRRTKKNKKKSESVSVNEYLQCNNAFVNHKCNSQTINYTMLETAFFRYVNNIDFKKICSTTNSKHALKIIDLDTDIKELTDEIESLKLREAGLAKTYMSLASAGLDGSTALIDREKTKKEIAEKVLELENLELKKKGLEIEADKDNREFVDINDYMLNKDNYSSDEKIIIRKKINDFLHSKIEWMEVVSTERQKFVIIAFHDTVIRTFSFDDRYANDLMFNEIDVDLSGLNRVQASNLMFTLIKAIRNSLKGVEAVITKADLISYLQHIKQDYLKNIGEQASV

SEQ ID NO: 14142 - protein, 566 aa, synthetic construct
MSANDNTKTQSGTRAVIYARVSSPRQVAEGHGLESQAMRCREYAERKGYEIVETFFDKAISGSLSDRPGVMAMLSYLKHHSRSGEIVVIIDDISRLARDTRVHTDLRLAINLAGGRLESPSITFGEDSDSIFVENVLASASQHQRQKNGEQTKNRMRARVMNGYWVFHAPTGYAYKKVAGHGLLLVRNEPLASIVQEALEGFASGRFQTQADVKRFLESQPEYPCKTKQGTVRYEEVLRLLTRPHYAGYIEVPHWGVSLRKGHHEGLIDLSTFEKIQQRIKGGARVFSSTDIGEDFPLRGYAVCAECGGPLTAGWSTSKTGKRHPYYLCFTKGCACRGKSIKRDMIEEQFGTLLQGLCPSSQTAALFRELFFEAWRQDASRTEEIAKALRNDLRKTEQQIEQLLDRIVEASTASVIAAYERRIAGLEKDKLIIIEKLQGNAAPKRSAAEQFEPAFRFLENPHELWVSERLADKRLVLKLTFADRLAYCRISGFRTPKTTLPFKALEAVHGGKCKMAEREGFEPPVRLPVLRISSAARSTTLPPLRPPGMRGESGHLAAHLDAGAAE

SEQ ID NO: 14143 - protein, 567 aa, synthetic construct
MLILKGDQKLNTEQIMSLIGKVNALIYARVSTTDQAKKGFSIESQLDRCKERAMSKFGYKASELIALVEPGGMGDDPNRPALNHALYLLQKGLGKKFLVLHPDRLTRDNTLQGVISRRIWGMGVDIEFIEFEVNPNDPESMLMYNIQGSIAQYNKAKIHANSKRGRLAKAKKGEFPSFKRLYGYKFNTVTDLPEYNEEEKEILLEMKDMLLNKKLSSNEIAKELSRRGVAAPNGKTWFQSTVSRMLQNEDYTGDFYYGKSKVVQVNGKKKQIATPKDEWILIKIPPMWDHETRDQIIKQLKANFKGRSRSTRDYLLKGKAVCGRCGGSCGSGITSKTKSGIYKYYSCCNKSTKAYQNGKELFKCKGKNWRVDIVDEVFWKWFKKLIKNPKKFLDQFLEEASNEKSIEDIKIKINRLQKQHEEIDSEIANYVILFGKGKIKESMFDELTRPLELNKEHVENELEILQSQLNANKKVEDRNEQTIKYMNSFAEMVDKDLSMSEKRNFLDFFIEKVTLYDDDHMEVVWKNKTLNEDRSQTVDFTEGEPEEASDNQHKRLNRIQAYGRQTA

SEQ ID NO: 14144 - protein, 571 aa, synthetic construct
MKTTDQPQVKQYVIYSRKSKFTGKGESIENQIELCRQYIAMHFGEDEAEHALVYEDEGFSGGNLERPQFKQMMKDSQKIEFAAIVVYRLDRISRNIGDFAKLIEDLGDRHIDFISIREQFDTSSPMGRAMMYIASVFSQLERETIAERIRDNMHELSKTGRWLGGTTPTGYASESLSSVTVDGKVKKACKLKPIPEEIQLVKTIFSVFTESGSLSKTDQYLLEHRCVTKRGKQFTRFAIRGILTNPVYMIADDTAYQYLKENNVDLFAEPSEFDGEHGIMAYNRTLQRPGKATQIRPMEDWIVAVGKHPGIISAANWVRVQSMLDVNKSKSYRKPRSNVALLSGLLRCDECGDYMRPKLTGRTNANGELIYTYMCSTKERSHGTVCSMKNCNGNTLDAKIVEEIRKVATDKKDFGQLLSKTKKVINDNKASYEAELTLLVKNHAETEARIKRLVESLSVASETSAKYVMEQIDELHRQSEQEQTRIAELEKLARQSNALSQNLFFYRDMIESFADTVDSTTIEERRRLLRTIVKKVVWDGKNVYVYLFAEDGELNLPPIGQLMCPSGEDSE

SEQ ID NO: 14145 - protein, 455 aa, synthetic construct
MANEIKQVALYIRVSTDQQAKHGDSLDEQQHTLNEYVRQQGNMRVFKTYIDDGISGQKLYRDEFQKLLDDVKKGRIDTILFTKLDRWFRNLRHYLNIQEILDKNNVTWLAVTQPFFNTETAMGRSFVNQSMGFAELEAQMTSERIRAVFDNKIRKGEVVSGKVPLGYDIKDKHLVPNEKAKIVKEIFQYYLETGSMRATVRHLENHFSMTRDYQSVRQMLTNRKYIGELRDNKNFCEPIIDRDVFERVQLQLSKNIRMNKKRDYMFTGLLVCSECGCNYSATAVISRYVRKDGTTNPNERHLYRCTKNRNNVKKCSNKKGIYETTLENFLLENIEKQAEELSVKMQQEPEVKKTKNTNDKIKKKIDRLKKAYLNEVITLEEYKKDREELEALLIPERDNKIAKIDLNSLHNYSTAEFRDGYKQLTISEKSSLWRQVIKNIVVYPDGNLKINFLGY

SEQ ID NO: 14146 - protein, 570 aa, synthetic construct
MRRAAVYARFSTELQNEKSTEDQIALCRAYAARNGLAIVAVYEDKARSGSSILGRDALMRLMEAAGQNAFDIVVVEALDRLSRDMADLAGLHKRLSFLDIEIQAVHDGIADAVLIGIRGLVGQMQREDGAKKVRRGMAGVVRDGRHAGGRAYGYRPVLGHPGELEIVQEEADVIRRIFAAYSAGRAPRDLAGDLNRDGIAPPRGIRWNGSTINGNAQRGVGLLFNELYVGRIVWNKVRMVKNPDTGKRVSRPNPKDQWQTKEVAHLRIIEDETWHKAQARKAVRLNATSHVKRRPAHLLSGLLRCGVCGSGLSVHDRDKTGKTRIRCSAVRESGSCSNRRIIYLPEIEKAVLDGMRDQLKAPDLIEAYIRRYNQERRELSAQANAMRTALQGKRDRIEGERQRTIDLVIRSVIAEEDAKQRIAELKTQLSEVEAQLSGLDEPPSPVALHPATLQRYIETVDGLSKALADHATAADDRGPLIQNLRGLVHSVTVHPKRAREGFEIEVKGKLAALIGGVAFPNARYSEKPTGLGSRFNAAVTYDSGLEVVAGERYRLSPHSETMRYFLQCRA

SEQ ID NO: 14147 - protein, 546 aa, synthetic construct
MSLKREYLIELGIENIINYLRRSRQDEERERRTGEDVLKEQKEIMDRILEPLGIPFTQKAEVGSGDKISTRPVFQNVIEELRVKKYQAIAVKEISRMGRGSYTDMGIIYDLIVDNRIFIITPYKTYDPRNSSDLRQIRFELFMSREEFETTRERLFGGRVNNAMAGRWVAGAAPFGFNYNKTTKKLEINEEQAAVVRMIFNYYVNGVPQENGTRRDVSFRALATYFSKKTPIKTPQGKREWTFMQLKQLITNERYIGTMKFRVHQTINGKRVVRPEEEHIIVPNAIPAIIDMETWELAQKKVKDSSHKPRTKMDFSPCELAGLCICNQCGKRMVRQYSTQNYKTKAGTINTYHKEFLWCTTSGCTFVKYRAIEEDLLETLRHFHDMEDDLLKEEISTKLTEDKETNNADLIEDLTGYFEQRTKELKNRLSFIYDKYENGIYTDEMFLERKAEIDREMEKLNDIKENQSTENNEQKFDPQIIKKNIGSILEAYKTNTNKTQRNKILRSVFDHAYITIIEKGRGRKPAKHVIYPVLKHNILQDDFLVP

SEQ ID NO: 14148 - protein, 550 aa, synthetic construct
MGDSAKNGLVYSYLRFSDPKQSAGGSTDRQLAYAAKWAAEHDLKLDTHLSLRDEGLSAYHQQHIKSGALGVFLRAVEEGRVPFGSVLIVEGLDRLSRAEPIQAQAQLAQIVNAGITVVTASDGKTYSRQRLKDNPMDLVYSLLVMIRAHEESDTKSKRVKASVRRLCEKWIDGSYRGRVEQGHDPAWLTRNDTDGWDFKPETVKAILRTIEMYKQGLGGKRIIEKLNAEGLRIYPTSKENQTLQVYRVTKMPQLAGHKPISVDGDEYLLKGYYPPLLSELEWEDLQRVVKSSGRRRVKGDLPHVITGIGITFCGYCGHPMAGQHLASKKRLPDGRIRDGYRRLLCSAAATFSEVCPVRGSTSVAPIERAIMSYCSDMMNLQGLFEADTSSESRKELLKAQKNVEAIKAQLDKLTDAMLASADEGIPLTFARRARQLEEDLAIAEKTLSAQERDIAMLARRDISGADEKWRALAAGVEAQDIETRLQARQLVADTFSRISVYHHGLRPNHTPKSRDYYIDLMLVAKGGSSRWLRIDRDGNWVHGENYEAAD

SEQ ID NO: 14149 - protein, 570 aa, synthetic construct
MRRAAVYTRFSTELQNEKSTEDQIALCRAYAARNGLAIVAVYEDKARSGSSILGRDALMRLMEAAGQNAFDIVVVEALDRLSRDMADLAGLHKRLSFLDIEIQAVHDGIADAVLIGIRGLVGQMQREDGAKKVRRGMAGVVRDGRHAGGRAYGYRPVLGHPGELEIVQEEADVIRRIFAAYSVGRAPRDLAGDLNRDGIAPPRGIRWNGSTINGNAQRGVGLLFNELYVGRIVWNKVRMVKNPDTGKRVSRPNPKDQWQTKEVAHLRIIEDETWHKAQARKAVRVHATSHVKRRPAHLLSGLLRCGVCGSGLSVHDRDKTGKTRIRCSAVRESGSCSNRRIIYLPEIEKAVLDGMRDQLKAPDLIEAYIRRYNQERRELSAQANAMRTALQGKRDRIEGERQRTIDLVIRSVIAEEDAKQRIAELKTQLSEVEAQLSGLDEPPSPVAIHPATLQRYIETVDGLSKALADHATAADDRGPLIQNLRGLVHSVTVHPKRAREGFEIEVKGKLAALIGGAAFPNARYTEKPTGLGSRFNAAVTYDSGLEVVAGERYRLSPHSSNYRFLLRCCG

SEQ ID NO: 14150 - protein, 578 aa, synthetic construct
MSTDIQLKGDSLRRQTERSKKYAEDHDLQLVEDFRLEDIGVSAFKGDNVSSGELGKFLGAVKAGRIPKGSYLLVESFDRLSRQKLNASVALFFDITSNGINLVTLSDNQLYKAGEAEFTQLIMSIVVMARANEESEIKSQRLSAAWGAKRKAIGDKKLTGLCPAWLELLEDRKSFGVLEDRAQIVRRIFEDSASGQGSFVITRRLNDLGTPAFGRSNGWVQSYVTKILQTRAVLGEFQPHTKQNGKRIPFGDPIPGYYPQIVDEELFLRAQFARGKRRIEGGGRKGEALRNLFTHLARCGYCGAPMHFLNKGFGPGGGTYLKCSQALRGLDCVSTTWRYPDFERSFFLYVKEIDLGEILAASATKSDAIALDDRLTSLKEKRKQLEVQRERTYALINQAISIDFVSAKLKECENELAEVDVQMADVELLLSTIREQQSISPDELHRLIDQLQVTEGPDAFAQRTMLAGRLREIVSDLRLDVEGTKPRLKKAEALFDQAGTDPIERQRSLEVIERTNIEAKRYNRSFSVVLADGVSRRVVLNNDDPTDFVAEVTVDAAGKPVGTDRGLNLQTLFGRASE

SEQ ID NO: 14151 - protein, 528 aa, synthetic construct
MLDNSNVAPGKNKTLRCAIYTRKSHEEGLEQEFNSLDAQRESAEHYIESQRMRGWTALPDRYDDGGFSGGNMERPGLRRLLEDIDAGKIDVIVVYKVDRLSRSLLDFMKMIDLFNEKGVSFVSVTQHFSTTDPTGRMFLGILITFAQYEREVIAERIRDKVAAAKRRGKYCGGVPIIGYDVDRENKKLLVNPDEARTVQYIFRRFIQIGSAKKLGQELNEQGYRTKAWTTKKGKVREGSEWNTAHIYRLLNNRIYIGEIAHKDRSYPGEHDGIIDRATWDKVQVILEDNKPVKISMARTKMVAPLKGVIRCGHCGCSMGPTYARKNGRHYTYYICQKDSKRTVSRCPLKRIPAGDIEQAVVEQLSAVFRTPTLVAKTFFAARDIEQVERERLFKQKAQLEMELSQAREQALELMRPGNDQPGKAEMLTTVNRQAVELSKQLTHVNERCRAYQGNSITEQDVSEAFQNVEGFWEDLFPVERNRLIRLLVDKVEIRETGIDMELRTNGLTTLIAELAGLACEVTERRAIR

SEQ ID NO: 14152 - protein, 475 aa, synthetic construct
MPDSDKLRSAAAYLRVSSEAQSGDDRFGLQVQAGLISAYAARHGLQIMQTYSDTISGTRHRREQLDALLDAAPRYEAVVISSVDRLGRRNRVIYTVLDELLETGLEVHSTDMGAIDPEDEGSMLSFGVRSLFADSDHRSLTKKLARARVAKVAGNPLSGRPGEPANPLNGYGWRQGVRDDVEAAWLIHIYTRFQHVGAHALATELDALGVRTRAGKLWTASTLRDLVRNPMYKGEYQYGRRKRGKGIVKAACEVPALVSPELWEAVNHRLDQRNARAGTSNPLRAAMYPLSGHLRCGECGRVMRGLSLSGRKYGYYACRSVGSTAYDGGRPCPHHRHYPPEQLHALVRQALDSVATDDAALLDMARLPERPAPDHGPALAELKRREDKLEAAYMADAYTPQEYAERRADLKRQREAVLNAPAPTPPPGPDLEALQARLARWKDAPLDELADRLGLTVRVSMDGAVRVELDPPVEL

SEQ ID NO: 14153 - protein, 485 aa, synthetic construct
MTPPTIGGIRVSTDMQADRYGPDRQREDITREAERAGLVITDWVEESITGTDHARAAENRYYQLARQHQGVNVVFSHPNRVGRHVEVTVGIARTIHQLGGTVWIAGTGNLRDRRNWKNFLRDAAEAESDHADIVDRLQRGKSSKAARNLWPHGQPPYGYRIVRDDRGKSLTIEPHPETGPVVREIFDRALAGQGSPTIAAYLIQAGVTVPRPHKSSQGLWTQRHVLYILNNEAYTGRRVFTGPGGETSTVTFEGLVTPAEFRQVRQLVSGRRTNRAARTRFPALWAGHLRCGLCGGSMSVFSNYNTNKAGEQTHYINYRCRNTYNTGVSALLAGAKNCNHRRVHNHTKVDEAGWQLFVQAMTDPAVLVASLPAEASGPDHSARLAELRTQMAETVRRAVAHHLPDDVLTSALEPLRDEMRRLERDSLPPPAQPAPDMTGLAAQMTGHLAGLSGLEERREALDTWAARLVLGPEGIERVEVTVYRR

SEQ ID NO: 14154 - protein, 507 aa, synthetic construct
MKKVAIYSRKSVYIEGSVSIETQINMCKEYILKKFTNSTFEVFEDEGFSGGNTNRPAFQKLLRLAELKQIDIVVCYKIDRIARNTLDFLNILEMFKENNVELISITEGFDPNTQMGKVMLTLLASFAEMERSNIQQRVKDNLLSIAKKGKWTGGSPPTGFKNNPNGGIEWDNKDMILDVFNMKYEKSKNTDLIQFIQHKYNHKFLGGTLATTLRKPIYVKSSSSVSLYLKSKGYIVQGTEDNIHSYLTYTDKDTKYAIVSNIVGLIEPSIWISVNKDMDKNISREGNRFSEKFWLTKTIRCKCCGQTYCGQTKTTKTKYYNKKGEEKIYVSTYSYYSCRDAVRGKLKTCTNTKRVKQDVLEAKVSALIYSLKDEKIFNSSYSINKVDNSFKIASLNKKVIEIDKTISNLTDKIALLSNDASLIFIDKIENLIKEKSSIKSNIVELELQELNSKIKTDKALIYNNIKAFNNNLSVDDKRKITMSIFKKIVYDPETNDLDVTFMWHLFV

SEQ ID NO: 14155 - protein, 659 aa, synthetic construct
MTRTDEARSMAKADEAPARKVLYKYIRFSSIQQAKGSSFARQNERLEKYAAENGFEVDDSLDLKDFAKSGFHGINKEVDQGLGRFMLAIEKGLIPTDGSAYLAVEQFDRLSREDIFKAQKTLNDILEKNVNVITLMDGRIYTQKSLSNFMEVLYSLFLMEQAHQESLKKSDRIKGAYTNKVKNLKALAKEQRQAMIEWEKHKTGDKPVLEPLINQIQFSSQVPYWIDQKVEVVSGRKFRRFVINEEKAGIIRYALSLLNDDNGYMNVAATLNKEGVPRLDFVSNKKRSTRKDIWTNRAVNEFVNSDAIFGDLSLYDNFYADKEFEYDGVKVSKKVGKRTHVENIPNYYPAVIDKKLVMGLRARANAKKKGRVAGRTTNTNLFQNLLFCGKCGDSMHLIQSKRTTNKGTYQRFYLVCYAARHKACDAKMIAYQELERELVKYLVMPINEAHLGDTSKVINEARNEKILELEGEIKGVEDQIDAYRQEMKNNKNLKPSIALTFLSELESDKEFKIHQLKELQLQKDKTIEYLESENVSSFDINTEEGRIAFKVAVKQRYAGFFVFTEDHAVMVFERTGAAEIFKVEIQNRRGKVMEPNRTADTITLFQEKLKYLKKLSENYKEGKLYELVKAYKVNDIDVFEEEYINRGLPQPLSYQRDFD

SEQ ID NO: 14156 - protein, 525 aa, synthetic construct
MSPKSKQPPKRVARPKAYSYLRFSTPEQLKGDSYRRQTTMALEYAARHGLALDQDLTFEDLGVSAYRGANAEAGRLGEFLEAVRVGLVPRGSYLLVEALDRLSRLVPRKAVRVLEDIVEEGITVVTLNDGREYTSENLDADPTSLLIAIVLFMRANEESATKSRRLKAAWEGKRQNIKARPLTAVTPAWVSLNDETGRLELIPDRAKVVRRIFKMYVAGVGYASIAETFNREGIPCFGRAQHWHRTYIRKILVNEAVIGTFTPHRIVHEGGKKVRVSLEKVPGYFPAVVSEEVFARAQAQLSGGAGPAPKHRGAVVSNLIAGLGRCPRCGSTMTRVTKGAGPRGGKPKLVCTKAKAGAGCQYHAVALDNVETAIVENASYITGNVPSGREGLDDDLDAAEVRIAATQDEIENLLSVLASAPSAAVAQRVQDLEVALEALRTERDSLADQLIAANGPLLGKRADDLRVALEASPLDRAKANAALRLLLSSVTVDYEHGKLVLEWKHGGVSEIVYAMPREERPQAAA

SEQ ID NO: 14157 - protein, 532 aa, synthetic construct
MKLIDKRLAPKAKPGSLVKALLYARVSSKEQEKEGFSIPAQCKLLREYALQRQFGIVEEYVDVETAKNTGRTNFGEMVKYLRKHPGVRVILVEKTDRLYRNLKDWVTLDELDVEIHLAKEGVVLSRDSRSSEKFMHGIKVLMAKNYIDNLSEEARKGQMEKAEQGIWPSKAPLGYLNVTAKNGKKVIEPDPVVAPVVTKLFERYATGLYSLKALTKAAHCDGLIHPKSGNPVPVSTVHTILRNRLYTGLFQWNGRLHQGKHEPLVSIDLWERVQGVLAGRHATPIHSYGYEFAFSGLMTCADCGCAVVAEVKKGKYIYYHCTGHADKGRGGYADCRRKYVREEVLDKTFAGLLDQLHFDEEVLEWVRDALKASHADERREQEQAIERCQTQYKRLEDRLNAMYLDKLDGRIDNAFYDRMSAQWRVEQTRLMREIERHGEAQESYMDDGIQLLELARNASQMFTHQAPNEKKRLLNLVLSNCEWNRGEVRAMFRQPFDLLAETAASAAAAQAGGDVSLTRHPIWLGNLDSNQD

SEQ ID NO: 14158 - protein, 542 aa, synthetic construct
MAAKARVYSYLRFSDPKQAAGGSVDRQLEYAARWAADNEMELDASLSLRDEGLSAYHQRHVRQGALGVFLRAVEDGQVPAGSVLIVEGLDRLSRAEPLQAQAQLAQIVNAGITVVTASDGREYNRERLKAQPMDLVYSLLVMIRAHEESDTKSKRVKAAIRRQCQGWIAGTWRAPIRVGKDPHWVTETEAGGFELADDRATAVRLVIEMFKQGHGAVRIVRELADRGLKITDSGRSASSHIYRLLANRMLIGEKSVEVDGETFRLEGYYPALLTPTEFADLRYLAEQRGRRKGKGEIPGVVTGLGITYCGYCGAAIVAQNIMGRRRAADGRPYPGHRRLHCVTYSQSAGCKVSGSCSVVPVERALMLYCSDQINLTRLLEGDSGTVSLAAQLASARQRVAELEAQVQRVTDALLFDDGEAPVAVLRRVRELESQLASERRDVDSFEHQLTASASNVAPAAAEAWRELVHGVEQLDYDARMLARQLVADTFSRIVIYQSGFQPDANDGTIGVVLVAKRGGSRLLNVDRRTGNWRTAEDYTHVD

SEQ ID NO: 14159 - protein, 544 aa, synthetic construct
MRRAAVYARFSTELQNEKSTEDQIALCRAYAARNGLAIVAVYEDKARSGSSILGRDALMRLMEAAGQNAFDIVVVEALDRLSRDMADLAGLHKRLSFLDIEIQAVHDGIADAVLIGIRGLVGQMQREDGAKKVRRGMAGVVRDGRHAGGRAYGYRPVLGHPGELEIVQEEADVIRRIFAAYSAGRAPRDLAGDLNRDGIAPPRGIRWNGSTINGNAQRGVGLLFNELYVGRIVWNKVRMVKNPDTGKRVSRPNPKDQWQTKEVAHLRIIEDETWHKAQARKAVRLNATSHVKRRPAHLLSGLLRCGVCGSGLSVHDRDKTGKTRIRCSAVRESGSCSNRRIIYLPEIEKAVLDGMRDQLKAPDLIEAYIRRYNQERRELSAQANAMRTALQGKRDRIEGERQRTIDLVIRSVIAEEDAKQRIAELKTQLSEVEAQLSGLDEPPSPVALHPATLQRYIETVDGLSKALADHATAADDRGPLIQNLRGLVHSVTVHPKRAREGFEIEVKGKLAALIGGVAFPNARYSEKPTGLGSRFNAAVTYDSG

SEQ ID NO: 14160 - protein, 515 aa, synthetic construct
MKTAIYLRKSRADLEAEARGEGETLAKHRSTLLKIAKEKNLNVLAVREEIVSGESLVKRPEMLALLEEIEDNKYDIVLCMDMDRLGRGGMKEQGIILETFKRSNTKIMTPRKTYDLNDEWDEEYSEFEAFMARKELKIITRRMQRGRIASVEAGNYLGTHAPYGYDIHRLNKRERTLTINLEEASVVRMIFEWYANEDMGANAIMRKLNELGYKSKLGNDWNPYSILDMLKNNVYIGKVTWQKRKEVKRPDATKRSCTRQDKSEWIIADGKHDPIIPESLFEKAQEKLNTRYHVPYNTNGLKNPLAGIIRCGKCGYSMVQRYPKNRKHTMDCKHRGCENKSSYTELIEKRLLEALKEWYINYKADFEKNKQDESTKETQIIQMNETALRKLEKELVDVQKQKNNLHDLLERGVYTVDMFLERSNVVSNRINEITETMENLRKEIKTEITKEKVKKDTIPQVEHVLDLYFKTDDPQKKNSLLKSVLEKAVYTKEKWQRLDDFKLVLYPKLPQDDDK

SEQ ID NO: 14161 - protein, 530 aa, synthetic construct
MTYQEGGERMKKITKIEGNTANSFIKPKTRVVAYCRVSTGSDEQLVSLQAQKAHYESYIKANPEWEYAGLYYDEGISGTKKENRSDLLRMLSDCETGRIDLIITKSISRFARNTTDCLEMVRKLIDLGVHIYFEKENINTSSMESELMLSILSGLAESESISISENTKWAIQRRFQNGTFKISYPPYGYQNIDGQMIINPKQAEIVKYIFAEVLSGKGTQKVANDLNQKGIPSKRGGRWTATTIRGILTNEKYTGDVILQKTYTDSHFNRHTNYGEKNMYLVENHHEAIISPEDFEAVDAILNQRAKEKGIEKRNSKYLNRYSFSSKIICSECGSTFKRRIHSSGTRKYIAWCCSKHISNITECSMQFIRDEDIKTAFVTMMNKLIFGQKFILRPLFHGLRNQNNAASFRRIEELETKIENNMEQSQVLTGLMAKGYLEPALFNKEKNALEAERERLLAEKDQLTRSVNGNFAKVDEVDRLLKFATKSKMLTAYEDELFEDYVERIIVFSREEVGFELKCGITLKERLVN

SEQ ID NO: 14162 - protein, 557 aa, synthetic construct
MDGSQVLKVAIYARYSSDNQRDASIADQFRMCRLHAEKQGWHIVEEYSDHAISGASLIRPGIQALMADAMGGRFDLILAEAMDRLSRDQEDIAGIFKRMSYADVKMFTLSEGEVTHLHVGLKGTMNALFLKDLADKTRRGQRGRVEAGKSGGGNAYGYDVVKKFDANGEPIRGDRTINEFQAEVVRRIFRDYAAGKSAKTIAFALNKEGIPAPSGGDWGFSTINGNPKRGNGILNNEMYVGKIVWNRQRFVKDPSTGKRQARPNPEEEWVIQEAPELRILDDDLWSAVKARQEKNKIARKENGEADLSRINTRRRPKYLFSGLTKCSCCGGGYSAISATLIGCATARNKGTCNNRVNIRRDELESRVLNALRTKLVDPELFAHFCEVFTQEMNRLRMEGRAGIASAEAELAKVNRELEKILDLYLSDALSVDMVKERSKKLEARKTELEQFLAEADEPPPLLHPSMALQYRKRVQQLYDALQDEDEGKRIEAADTLRSLVDQIVLTPVDGKVEIDVQGDLAGILTISTQSKNPAAGATGSQVKMVAGAGFEPAAFRL

SEQ ID NO: 14163 - protein, 685 aa, synthetic construct
MSKIGAEHLSRRAYVYVRQSTLDQVHHNRESQLRQYGLADRARGLGWPDATVIDDDLGRSGSGNHRPGFERLLVALCSGEVGAVFCIEASRLARNGRDWHTLLEFCRLVGCLLIDEDGIYDPRQPNDRLLLGMKGTLSEMELSTFRQRSQAALDQKAKRGELFTSVPIGYVRAQGNRIEKDPDTRVREALDLAFRKFREFGSVRQVLLWIRQECIELPAVNYGLDGRHIVWKLPVYNTLLHILTNPIYGGAYAFGKTRTIARIVNGRKRVFAGTPLQREEWQALIIEHHAGYISWDEYEANRKLITNNANMKGSMVRGAVKRGSSLLAGLLRCGHCGRKLHVAYSGTKGTVARYNCQGSMINHGGPRCISFGAVRVDQRVTEEVLRQLQPLGIRASLEAIERARTEQDERVRHKELALEQARYEAARARRQYDAIDPENRLVAAELERRWNETLKTQVQIQTELDLLREQSSRALSAGARDELLRLGEDLPRLWHHPASSVEIKKRILRTVVKEIVATKQDDTIRALVHWQGGDHTEIVFEKNHTGEHRWATDVATIDIVRALARTLADQGVAAVINRLGKRTAKGHTWTAARICTLRKDHRIPAYREGERQERHELTVTEVATLLGISAPTVIRLIRVGRLPASQACLGAPWIIQQVDVDNYLARRAADRPQSDNSNQLSIDLQ

SEQ ID NO: 14164 - protein, 598 aa, synthetic construct
MRAAIYARYSSDNQRDASIEDQIRICKERAVREGWHVVEVYSDHAISGASLLRPGIQKLMQDGVSGKFDIVVSEAMDRLSRDQEDIAGFYKRMQFANVTVFTLSEGEISSLHIGLKGTMNALFLKDLAAKTHRGMRGRVEKGKSGGGLTYGYDVVRGVDATGDYTHGERRINDAEANIVRRIFSEHLKGLSPTAIAKQLNSEGIAGPLGGTWGPSTINGNRRRGTGIINNELYVGKIIWNRLRYVKDPSTGKRISRLNEPSEWVVTEAPELRIVDQAVWDELKSRQTLIERAPLHSHNRPRYLLTGLMRCGCCGGGYTVEGRKRVRCANRMNKGTCDNALAMNVEELEASVLSALQVHLMDEALCDLFCKEYTRRMNELRSAHNAARDGYRAELNKLEREREKIISAIAEGIDVSLIKDRANALQKRREELQKILEVTSDEPVIFHPNMAKRYHNAIRELVTTLQDPAERMQASRILRSLIEKVVLTPAPDGDRLVVDLVGDLAGILSIASNRDKAAVKADLSDLNLVPDSNANGQFDETGLEGPSDQNAMFADERNHSDGARNEKSPREGAFISSPSRYRQVVLVAGAGFEPATFRL

SEQ ID NO: 14165 - protein, 558 aa, synthetic construct
MKGKIALYSRVSTSEQSEHGYSVKEQEQVLIKEVVKNFPGYDYETYTDSGISGKNIEDRPAMKRLLQDVKDNKIEMVLSWKLNRISRSMRDVFNIIHEFKEHDVGYKSISENIDTSNASGEVLVTMFGLIGSIERQTLISNVKLSMNAKARSGEAITGRVLGYKLSLNPLTQKNDLVIDENEAHIVREIFDLYLNHNKGLKAITTVLNQKGYRTINQKPFSVYGVKYILNNPVYKGYVRFNNHQNWAVQRRSGKSDKNDVILVKGKHEAIISEDVFDQVHEKLASKSFKPGRPIGGDFYLRGLIKCPECGNNMVCRRTYYKTKKSKERTIKRYYICSLFNRSGSSACHSNSINAEVVERVINVHLNRILSQPDIIKQIASNVIEELKQKHSNQTEIKYDIDSLEKQKAKLKRQQERLLELFLDDQMDSGMLKAKQSEMNQQLEVLDQQIKEAKQANQSQDEIPNFDKLKGRLILMITRFSVYLRKATPEAKNQLMKMLIDSIEITTDKQVKLVRYKIDESLIPQSLKKDWGSFFMPKFQFEIYGQNDYFIDQITTFTT

SEQ ID NO: 14166 - protein, 618 aa, synthetic construct
MKRILKMSKLAIPYRRYSSDMQTGNSSLERQQQMINQWLVSEEGKEYTTSIAYTYLDEGVSGYSGSHIEKGDFGRFLEDMRSGVFKRYDSPTLLIENVDRFGRQKATKTVGLLDEIVNDYGINIRFLNSTKTITSPIGDTELLIFVVESMRSHGESLRKSEMVGKAWDLKRGRILSEGKTLTRNVPWWVNPADRYDVTSDEFKRRQDLIREIFNLKKKGTSCGKIATLLNERGEIIPTNRTQKPEKEYKRSRVRGKWDGALISQTLANRAVMGYLAPQAHTSSNSTVTRTTDPVTGKITKTFKLKEGKTLRPEIADYFPEIINHTLFSAVSLLKEDQAGRKRSSGLPNSVMLFKKLMYCSGCGLPLSVYGSRESYPGVYQCSGTRFKACDEISISRRDVDSALLNHLLPNLSKLNVNDSLAEQIAKLENHRDRLVSEAVNIYDIVKVAGMNPQTAQMIAENTKAQADANTQIDALTTKRNASEYESLSHLNLELYEDRVEAQIIIKRMIKKIIIDTDTRKMNITLVNGSEMHGFEVDSKINQRAGLNSALNPSEVDKEINETFGVHKVIHHVALRGASEEPEPHEPPEYDDKGNRLRDIQWRNEDNSEPECNPADEEE

SEQ ID NO: 14167 - protein, 597 aa, synthetic construct
MPLLYSYIRWSSDRQAKGTTLERQLASAKAFALSKGLELVEITDPGVSAFRGKNQQHGKLGDFIDAVKNGVIPSDTWLYVENLDRLTRQDITTAQKLFIELLDLGLTLVTGMDKRIYTLDSVNKNPTELMISILLFSRAYEESKTKQTRTVGNVEALVDRHKQGLPVNIKSCGKHPFWIDDTGSQYESVRQHPKYWTIAREAIEMFLEGHGIYKVKRHLDEKYPNGLNEKEWDYQVIKRMRESRALIGERTITIGAQTHKLHDYYPALCKNETEFLKLQELKTQNGHKSKKDPSKENIKLLSGLSILRCSKCGGTMSSFMNREKPRYICLNGRHLQKGCVGWSVAAPLVEHCVMVALLMGYMDANRKEGHDTTELSATIVAKEEAITELNISISNIAHAIESGANILELVSRLKVLSANRETLLKEVDRLKERKALVERKGSFEINMMEFINLIQWGVFADLANESRNKIRSTIDNIIEHVVIDKTDGCITIKIKCRGSDQWLVFGGHTRKPKWRFDIELYDEDDWGFVNGDLPTHSSVDTDDTRFSPFLESELFAETMEHFHSLKSTYHQYFDKVNQILMAVGYPAIDGSAFWPNR

SEQ ID NO: 14168 - protein, 550 aa, synthetic construct
MNRSLKIEYSEITDEKNLTVLYARLSKDDGKSGDSDSILNQKLLLENFAREQKLAPYVFLADDGVSGTTFNRPAFQQAIELVNRGQVKTFVVKDLSRFGRDYLKVGAFTEVAFPEKGVRFIAINDNVDSDRPDDNSLAPFRNLFNEWYARDCSKKIKAVKHSKGNAGIPMTANVPYGYLKGENYKETHEWIVDEEAAIVIRRIFHDYASGKSMTMIAKELETERVNTPAAHKVSIGLKSNKMPSFRYGWNAQTIRQVLAHREYCGHTVNFKTYKKSYKTKKHLPTPLEEQKIFKNTHEAIIDEDLFELVQEKRGAYRPRRTMHHHVGLFSGITCCMDCGSLHHYDHNGGDCSPFYYCSGASKRIKICKSRHSIMEKRLEPIVLEDVRRITQLVKNNESELVTFLEKKFRAQKSRTFQKDKQMLEKAKHRFLELDQIIQHLYEDNLSGKLSDARYAKMSQNYEQEQEKLGKDLACLEQRVAEVEDVTSDINRFIQVAKKYLEPDQLEADMVRELIEKIEIGEKGRVDGKNEQKIRIIYRFVGEIDEKNGLI

SEQ ID NO: 14169 - protein, 589 aa, synthetic construct
MKIIQKIEPTIPKLAKRKKVAAYARVSVEKGRTMHSLSAQVSYYSKLIQKNAEWEYAGVYSDGGISGASTKKREGFKQMVEDAENGEIDIILTKSISRFARNTVDLLETVRHLKAIGVEVWFEKENIHSLSGDGELMLSILASFAQEEITSLSNNIKWSIQKKYMQGKANARFRIYGYRWEGDNLVIQPDEAKVVKLIYDNYLNNFSAEETAAQLREMGVKGLNGGKFSAVSVRQMLKNITYTGNLVLQKYMVTDPFTKKLKRNHGELSKYYVENNHEAIIPMEVWQKVQDEIARRRRVGQRANISHKIYPFTSKVRCSKCGKNYIRGTRLDKRNNRRRHYWTCWTKRSKGRDACFTKEVPEYVLNEKTAEVLGLDNFDEKIFESKIERIDVIGDNRLDFVFFDGQIKTVNWESKFNYKGKPWTEERMQWQKEGYVRDENHPPKRRFKTFSRYIQCGYCGKYYISTLGKLSGGKKVQKWSCYTKKAFCPNPHDRRYIPETVLEELVCDVLNLETFDVKVMEDKIEKLVAYSDEIKFIFKDGHDESRKLVIPRAKNPEYSQETLQKMSEKRKEWWRRKHEESNNNSSNNQ

SEQ ID NO: 14170 - protein, 522 aa, synthetic construct
MKKVTTIPATISKFSQTPINKVTKRRVAAYARVSTEQEEQQTSYEAQIDYYTNYIQSREDWEFAGMYSDEGITATNTKKRVGFQNMVTDALAGKIDLIVTKSVSRFARNTVDSLTTVRQLKEKGVEIYFEKENIWTLDSKGELLITIMSSLAQEESRSISENVVWGQRKRFADGKVTVPFKQFLGYDMGPDRNLVVNPEQAKIVKRIYAMFLKGKSPYNIATILSKEGVPTPSGKSNWWVGTIQSILTNEKYKGDALLQKTYTVDFLTKEKKVNEGEVPQYYVKNNHEAIIEPEIFDMVQKQMALRTRGKNRIRSTSIFSCKLKCMDCGSYYGSKVWHSNSKYRRVIWRCNHKYDEDEKCQTPHLYEDEIKELFIKATKQLVGMKDEVMSNYAEMKEMLFGTAELEAEQENLETEINEIAGLIEDCVNENARVALNQTEYEERYNALVARFDKANARLEEVKQEVVERQAKGMQVERFLHELEKIGIIDEFDDDLFMGLVDVIEIWHDKKVVRFKDGSEVEV

SEQ ID NO: 14171 - protein, 520 aa, synthetic construct
MKNKSVTVIPATKRVGTLKVDAEEKPKLRVAAYCRVSTDTDEQASSYEVQVEHYTNFINNNSEWELAGIYADDGISGTSTKDREEFNRLIQDCMENKVDRIITKSISRFARNTLDYLKYIRQLKEKNIPVFFEKENIDTMDSKGEIMLTIMASLAQQESQSLSQNVKLGLQYRYQQGEITINHNRFLGYTKDEDGHLIIEPTEAEVVKRIFKEYLEGSSLIQIARNLEADRILTGAGNKNWAGTTVKGILVNEKYMGDALLAKTHTVDFLTKKRVKNNGIVPQYYVENSHEPIIPKTLFLQVQEEITRRANLKNKKGSITYSSKYALSGIAHCGKCGEIYRRLHWNNRGKKSIVWRCYSRLDKNKDCDARTILEDDLKQAVVDGINRVFAGEGRIKEILNSSIRKLLKVDNTSEIKTIDLQLQSLQQQLLEQSSRSQDITNIGEQIIQLKEQKQNILLGKAVNDNSKQRMDEMLEFIDKNELDGLEYDEVLVRRLVEQVIVYDDYITIKLKSGIDMKVQS

SEQ ID NO: 14172 - protein, 519 aa, synthetic construct
MKKITKIDTVAQVKPAKLKVAAYARVSTSSEEQLLSLENQKLHYEQRILANSNWEFVEMYFDEGISGTKIDKRNGLKRLLQDCETGKVDFILTKSISRFSRNALDCLEIVRRLIDLNIFIEFEKENINTQTMDGELMLSILSSLAESESRSLSQNTKWGIEKRFQNGTYKIGYPPFGYDWLDGAMVINKEQAVVVKDIFADILKGTSTGDIAEKLNQQGVTTKRRKTWHGTTIRGIIKNEKYIGDALFGKTFTDDSFKRKVNRGDKNQYFMEGHHSAIIDKETFEQAQQMLVQNAKSKNIVQEDDKYQNRYSFSGILKCGECGGTFKRRIQTKNKNEKYVAWACTTHLKDKHSCSMKFIKDEQIKLAFITMMNKLVFSHQILLKPLLADVRSTTYTVDNTQIVVLDDELEKLKQQQDNLVQFVANGYIDRPTFVKEQNQLTKQMDDLENKRKMLTGSISKGFDNLESLEELVKLTKQGQMLTAFEDSQFDSFVDEVVILSRTELVFKLKCGLKLKERLV

SEQ ID NO: 14173 - protein, 520 aa, synthetic construct
MKKITKIEANQKEESILRVAAYARVSTDEDAQLVSLKTQKAHYEKMIAENKSYTFAGLYFDEGITGTKKECRDGLLKMLKDCENGKIDFILTKSISRLARNTTDCLEIVRRLLDINIGIYFEKENIDTRTMESELMLSILSSLAESESRSISENNKWSIKKRFQSGTFIISSPPYGYENIDGKMVVNEEEGKIIKEIFEQYLSGKGTHKIADDLNKRKIKGQKGASWHGSTINGILKNEKYIGDVIYQKTYTDENYNRHKNKGEEDQYKIIDNHEAIISREDFEKVQELIRLRAIAKGNGENTKKYQNRYSLSGKIKCGECGSSFKRRHHYNGKDKYIAWTCSEHLRDIHKCSMKFIKDKDIKLAFVTLINKLIFGKDSILTPLLESLNRVDSKEEVEKINKIEESLQKIKERKEVLNKLITSGVLDASIYTKESSAISSEESYLLKEKERSKKAILGNDEEIRELEKLIGILDKSKMLDHFEGDLFEEIIDHIQVVNRETLDFNLKCGLVLREEVKEDV

SEQ ID NO: 14174 - protein, 520 aa, synthetic construct
MNSKVIVIPAKKKKGNSIKESEKKKLRVAAYARVSTDSDEQATSYDTQVDHYTNYIKRNPDWEFAGVFSDEGISGTYTKKRAGFNKMIEEAMEGNIDYIITKSISRFARNTLDCLKYIRKLKENNIPVYFEKENINTMDAKGEVLLTIMASLAQQESQSLSQNVKLGFQYRFQQGQVQVNHNRFLGYTKDEDGKLVIVPEEAKIIKRIYREYLEGASLRDIKEGLEKDKIVNGAGNKKWHVSNLNQILTNEKYMGDALLQKTYTVDFLNKKRVKNDGIAPQYYVENNHEAIIPKEIFMRVGEEMYRRANMVSGKGKRRIYSSKYALSSIVYCSKCGDIYRRIAWNNRGKKYTVWRCCTRVTHGPDACHARTIKEEDLQEAVVEAINKLISESNELKEIIKENIEKAITGDGSSGIEEIDKEMLKVQEELLKVANAKKDYTDLAGRVEELRNEKEKILLDLAEEKNEQSRLKELEEFLDNQELEIESYDEDLVRKLVDKVVVYDEELKIVLKSGVEVNVCV

SEQ ID NO: 14175 - protein, 565 aa, synthetic construct
MARRKAVEEPIAGKPRLFIYGRFSSKKQASGDSYNRQMTYAREWAEKHGFEVDDKLTMFDHGLSAFNGDHVKKGALGAFLIAIQKGVVRPGEVLLVESLDRLSRAEELDALGQFATIVQAGITIISMQDGIYNQERIRETQGGILHAALAVMTRAHNESERKSYLVSKAAHAACIAWSAGKGVKPISVGNDPSWVRWNDDLKRFEHIPDQVASLRKLLDLYRIGNGAVRIFERMRATGIALPKGVSNVARVTRLVKHRALVGEKTVKVGDAPAYTIPNYYPSILTEDEFTALQHIRKQRGRRVGKAEVISFMTGMRLTFCANCGSSMGNQNIMNRSRREDGLPQDGHRRLKCSGEQKSVNRCWAGSCSIVPIERALMEFCSDQMNLASLFIDGNEKAEALGSALTRTRQDAEKAQAALDTFMEVGALDSKAAGAKVIRAQIAKLSIELEEKNAEVGHLEYELASLHQHSTPAVAEVWAALREGVRLLDNDARTKARQLVADTFARIEVGLAHDDLIELRLVSRRDVVRVLRVDRKTGERLDQETVDNTQHEALKRRPRKQVRKAA

SEQ ID NO: 14176 - protein, 577 aa, synthetic construct
MSKYFLYHRVSKKIQSTDGQGMERQTEATEKWIEIHNESRISEGLKPYIYGRRYEDKGRSGYTEENIKKGQLGKLFCDIENGRIEPGDIIVFELIDRFSRAEPGIVREHLEKIMKAGVKVAITKWNIVFSSEMQGPLGLSARIMLEIGLYLANEESRIKSERIQATIRQLERQGIKSVAKTPIWLHRTKDRRDYRLIDENVKVIQKIFELRKLGLGAKRIINEIGPVELPRYRYDENGDLITTTSNKPLCESAVNRYLRDEAVLGYRDGKKIYDAIVDEKTFNSCQQKISKTKGGKVTVVKNVLSGIVYCDHCNKKMAFGGEQVSKFGKVRSYIKCNGKTKANGCNAKDIKYAPLESSVYNLLKHIEDKQETTVDINALESEMHAASLKAKRAMTFMLDYDYDSQWKDVYEEQHKIINELKSKLSQAKAERAGKLTELDLDLSQHKEKAKFNQILKDYDVKAYLGHDPVTKAPYVRLIIGAWNDFEARTTIGKDVNAKRVKAGMRLGAKGINFDIRERGHIEFHEPEVIADEDLAMQLRIERGANLMLKVLTDEQKKDLVNRVKSQSKDADIKSESD

SEQ ID NO: 14177 - protein, 558 aa, synthetic construct
MKGKIALYSRVSTSEQSEHGYSEKEQEQVLIKEVVKNFPGYDYETYTDSGISGKNIEGRPAMKRLLQDVKDNKIEMVLSWKLNRISRSMRDVFNIIHEFKEHGVGYKSISENIDTSNASGEVLVTMFGLIGSIERQTLISNVKLSMNAKARSGEAITGRVLGYKLSLNPLTQKNDLVIDENEAHIVREIFDLYLNHNKGLKAITTVLNQKGYRTINKKPFSVFGVKYILNNPVYKGYVRFNNHQNWAVQRRSGKSDKNDVILVKGKHEAIISEDVFDQVHEKLASKSFKPGRPIGGDFYLRGLIKCPECGNNMVCRRTYYKTKRSKERTIKRYYICSLFNRSGSSACHSNAINAEVVERVINVHLNRILSQPNVIKQIASSVIEELKQKHSKQTEIKYDIDSLEKQKAKVKTQQERLLELFLDDEMDSEMLKAKQSEMNQQLEVLDQQIKEAKQANQSQDDIPNFDKLKARLILMITRFSVYLRKATPEAKNQLMKMLIDSIEITTDKQVKLVRYKIDESLIPQSLKKDWGSFFMPKIHFVIDGSQKYSIDQISTFAT

SEQ ID NO: 14178 - protein, 496 aa, synthetic construct
MHTQHPFSILNYERNECNMNMKVACYVRVSTIDQAEEGYSIGQQIDRLKKFCEAKDYSIYKVYKDPGFSGSNLERPAMQQLINDCQNNKFEAVLVYKLDRLSRSQKDTLHLIEDVFNANEIAFVSLNENFDTSTAFGKASIGILSVFAQLEREQIKERMQMGKIGRAKNGLPMSWRNAPFGYRYKNRKFEIDEFQANVVKRIYNDYLSGISITKLRNTLNQEGHLGKSVPWSYRTVRQILEHRVYTGFNEYKGKVYPGIHQAIISKDVFEKVQKELKVRQIEAYKKNNNPRPFQSKYMLSGLLKCGYCSANLGLHIYVPRKDGSQSKFYKCPSSIKKKTFTNRQYSFCSQPFLNKKDLEEHVIREIRKLQLNPQSIVHEQNNISGNIKLLKQQLKKIDVKSERLMNLYINSDSFDLKMLDKKRKQIQQERAQINEQIKDIKNKTPELSPDGATAILKECGNIEKLSYEKQKLVVRKLIKEIIVKGHDISVSWRFEL

SEQ ID NO: 14179 - protein, 543 aa, synthetic construct
MKDLNKKRIGLYARVSTEMQTDGYSIQGQLNQLKDYCQFQGYEVVDEYTDRGISGKTTQRPELQRMLKDANDGKLDCIMVYKTNRLARNTSDLLTIVEELYKINVEFFSLTEKIEIASSTGKLMLQILASFSEFERNTIVENVYNGQRQRAIEGYYQGNLPLGYDKVPDSKKELMINQHEANIVKYIFESYAKGHGYRKIANALNHKGYVTKKGKPFSISSITYIISNPFYIGKIQFAKYRHWSDKRRKGLNEEPIIADGKHAPIIDKALWDKVQFKRQESRKKPQVHGKGTNLLTGIVKCPSPKCGAAMAASNTTNTLKDGTKKRIRYYSCSNFRNKGSKVCSANSVRADVLEKYVMDQILEIIKSKKVLKQLVEKVNEKSQIDVSSLNHDIAYKQSQYEEIKAKMHTLTKTIEDSPDLDSVLKPTILSYQDELNQINNQIHQLEQDKQAEAPHYDADMIANILQTIFKDINKLEKSQLKSLYLTVIDRIDIRRDEQHKKQFYVTLKLNNDIIKQLFNNHPLDEVLLSTSSLFLSQTLYLTI

SEQ ID NO: 14180 - protein, 452 aa, synthetic construct
MEEVIAYVRQSTLKQQSLATQKSLILNTAKQYGWSNVTFYDDKKTGRHTKRSGYQRMVEMITSGKCKVLCCYRLNRLHRNLKNAIQLFEICKTHHITIISVNDGYFNLAKEFDCFRLNILMSLAEMESNNISEQIRNGIREKAKQGKLITTHAPFGYRYRQSHFIVHEEEAHTVKVVYRWYLQGLGYKKISQHLDNNPNLIPRKPYQVRNILLNPNYCGRVINKYGTFNDLVPSIVDIDTFEEAQQCRVNKHHKQHISENKLKKLLRCPYCQATLTNLTIKKANHSLRYYVCPRNMNEAYHTCPFKGINALELESKVLDTCKKYFEEQSFHNRLNNTILKVLKQQQMKHKETHLTQAQLIEKLAQNQIDIETFKRLSTSSESEERYSNYSHKQITETIRHIIKDKLTLETIAPLIDDITITQTKQLQGIYFKNSPLNIVEQSHLISDERNDV

SEQ ID NO: 14181 - protein, 451 aa, synthetic construct
MVMVQLRRISPPPEVKKAKRVVAYARISFETERTPRSLSLQVSYYSKLIQSTPGWRYAGVFSDSGVSGTTTNRAGFQEMLAKARAGGIDLIITKSISRFARNTVDLLEVCRELKGIGVEVFFEKENISTFSDDGELMLTLLASFAQAESEQISANAKWRVAKKFEQGLANGFHLYGYSPSADAADVQIVPEEADVIRWVFKSYMEQVSCEAMARELTKQGVRLPNQPTDNVAPESLRFILKNPTYTGDLLLGRWFVPEGKIGRTIKNTGEKPKYLVENAIPAIIPREQFDQVQQEIARRRALGARANWSIKTSCFTSLIKCGICGRSFSRSGKRNTQGVVNYVWICRTKRDGPKRTKGRRCTNKTIPEVILQETTTKILGIEQFSTQAVEARIERIDVPEANKLIYTLKNGTQITTEWLSDLKKRCWDDAARAKKSRDLKRYWASKQHKTK

SEQ ID NO: 14182 - protein, 528 aa, synthetic construct
MARTVTAIPATKRLHTLAPINQPTIRRVAGYARVSTDHEDQVSSYQAQVDYYTSYIQNHAGWQLAGIYTDEGITGTSVRKREGFKQMLTDALSGRIDLIITKSVSRFARNTVDSLTTVRRLKDGGVEVFFEKENIWTFDAKGELLITIMSSLAQEEARSISENVTWGHRKRFADGKVTIPFSRFLGYDRGPDGNLVINPTEAVIVRRIYDLFLDGQSYTGICKTLTDEHLANPTGSPWSVTRIKAVLTNEKYKGDALLQKSYIADFLTKKQVKNQGEVPQYYVNANHEPIISPAVFDFVQTMIAEISKKGRSYSRHRIFSGKIRCGACGGWYGPKTWHAGTKYEKRIWRCNHKYNHDTPCTTPTLGEDDIKTAYLKALQQIAADGMNANQAMLDEALQAELDTSALETEADKLFAEVEAASAAIDKLIDRNASTALNQDEYTRQFQSLTTRHSHLAEQHQAVAAQIVDKQNRLKAYEYYKQEISELNEQPLEFTPYLWHALLDQATAKDYDTLAFVFRNGSKINIFAK

SEQ ID NO: 14183 - protein, 506 aa, synthetic construct
MRTVITYLRFSSAIQGAEGADSTRRQNDLFKQWLKKNSDAQVVASFSDEGLSGYKGKHLTGQFGDMLARIESGEFPEGTILLVEAIDRIGRLEHLETEALMNRIIAHGIEIHTLQDGLIYTRDALSDDLGISIIQRVKSYVAHQESKQKSFRVSQKWKQRAKLALAGEQRLTKMVPGWIDPDTFKCNEHAETVRLIFKLLLDGESLHNIARHLQANNISSFSRRKDANGFSVHSVRTILRSETTRGTLPASQRNDRPAIPNYYEAAIDAATFNKAQEILDKNRKGRTPASDNPLTINIFKGLFRCQCGASVHPTGTKNKYQGVYRCNNHLDGRCDVPPLKRKPFDKWMIDNFLGMIDVGNDGEAEGKIAALQHEVEIVTARIKKATALLLEMDDITELKTQVKGLNQKRTELQTTIDNMRRKASLTDKELPQLKDIDLTTKAGRVECQLILSKHLKGLTLGKDSVTVTLQNDTEITIPTNPLPLNDGTSIFEIAEKNLLNIDTFQL

SEQ ID NO: 14184 - protein, 552 aa, synthetic construct
MKQAISYVRFSSFRQYSSNSVERQQREIAKWLEKNPDYRLSDLRFEDLAKSGFKGEHVGKGGGFGKLLDTVKAGVIREGDVVLVEAIDRTGRLDTVDMLDLLTPILKAGVSIVTLDDGNVYNRANANGSYIHLLIGKIQAANLYSVNLSRVTIQSYDIRRARALALSDQSTESTGPKVKRHTPVWLTVEGVVIERIAKHVKAAFELYAAGVGKATISVRMRETGEPELAKCSGPTVEGWLRNRTVIGYWNDIPNVYEAIIEPDLFVRAQQRGKEAKTTRPAKTAKHFLVGLVKCGHCGGNYIMQNKDGHPHSMRCLNRQRLKDAGCDNTRTIPKPVLDYIRVNTSLGAVETAFQRQQLTVNQKRILAIQGELEDVARKLSDLAKAIETVGAIPEVISQLTARQAEREALNAELVVLERTESPLDTFGAVRVEGELLEDDSIKLAALLKGVGYSITVRSDARMTVNWPGEEGLEWAYKGTERSTGYYLLRHYETTVQDEPAANPLGLKFKPLDELIKVFPKPHLVPKPERTADQLDQLNPLQQLLRRHNQHQP

SEQ ID NO: 14185 - protein, 479 aa, synthetic construct
MKTAIYLRVSTEEQAKEGFSIRAQRERLDMFARSQDWDVVDFYIDEGRSAKDTERPELQRMLDDIANNRIEVVLVYKLDRLTRSVMDLYQLLEQFEKHGCMFKSATEVFDTTTPTGRLFITLVAAVAQWERENLADRVKFGMEQMVEEGRWPGGPAPFGYILGENSKLKADPDEAELYRYMYDLYENFKGDNAISIILNHELKKKTRLGNQFSAKTVRDILKNPISYGALKWGGKVYEGFCEGIITKERYDRHLALRAARSTVSPKAVTSTYIFTGTIKCARCGAPMKGRMSKSVNNSTYAYLACTNKREKKCDMPMVSEQNVEKHFLNELQLLLASQFDAANEIAASSHNEDRLINQRVQQIQKQIQTIKDRKKKWQMAYADDVISLEELREHTNQDRKRQEELETELADLSSQTESHSPEKVVAILSNFLDNWDQLEPMEKKQAVMLLLERFDVNAEDGKRVLHSKRNLVLSNFKFR

SEQ ID NO: 14186 - protein, 515 aa, synthetic construct
MKTAIYLRKSRADLEAEARGEGETLAKHRSTLLKIAKEMNLNILSVREEIVSGESLVKRPEMLALLEEIEDNKYDVVLCMDMDRLGRGGMKEQGIILETFKRSNTKIMTPRKTYDLNDEWDEEYSEFEAFMARKELKIITRRMQRGRVASVEAGNYLGTHAPYGYDIHRLNKRERTLMINSEEASVVRMIFDWYANEDMGASAIRSKLNDLGYKSKLGNEWNPYSILDILKNNVYIGKVTWQKRKEVKRPDAVKRSCARQDKSEWIIANGKHEPILSESLFETVQEKLNSRYHVPYNTNGIKNPLAGIIKCGKCGYSMVQRYPKNRKEAMDCKHRGCENKSSYTELIEKRLLEALKEWYINYKADFEKHKQDDKLKETQVIQMNEASLRKLEKELVDVQKQKNNLHDLLERGVYTVDMFLERSNVVSDRINEITSTMEKLKKGIKTEIKKEKVKKDTIPQVEHVLDLYFKTDDPKKKNSLLKSVLEKAVYKKEKWQRLDDFELVLYPKLPQDGDI

SEQ ID NO: 14187 - protein, 475 aa, synthetic construct
MKIGIYIRVSTEEQSQHGFSIDGQKERLIAFCKSQGWEDYTLYIDDGFTGTNIERPALKRLIRNIEEKKINIVLVYKLDRLGRRQLDVLHLLEDVFEKNGVSFKSATEPFDTSTPLGKAMLGILAVFAQLERDMIIERTTFGRRQRFNQGLWYGGRIPYGYSWNKEEKRLEIIPEEALVVKEIFKRYIRGDSLSAISDWAVTRTKSRYFDHTKINNVLFRITYTGKLQNAGVVVEGKHEPIIDYETWEAARRENAKRRGGLPPVGEYLLTGLLECSQCGGPIVHVRRKKSLDNREAFYEFYACKHQHVRARDRRLTEKCSLGYQHRKNVEKFVIEQIKATALNPMLLEDFSTSKEDYLENEEAIKSLEDKLIKVHEGLENLYDAIQAGEIKASAVRGRIRSLEEEQEAILAHLEDLKDTSPNYKDSGEVQDLIKQIGEAWDYLTFEEQKTMIRSIIKKVVLNKKAEPTVYWNVFD

SEQ ID NO: 14188 - protein, 510 aa, synthetic construct
MNRPLIKCAIYTRVSTDHQADSTINQEAQGREYISRLGPEYDKTDIIVYRDEVVSGYYTSVFDRAEMKRAIQDAKENKFKLLIFKEVSRVGRDKQENPAIIGVFEQYGVRVIAINDNYDSLNKDNITFDILSVLSEQESKKISSRVSSARRQKARRGQWGGEAPIGYKVNRETKKLEIDPENCYIPKLIFDLYVNHGLGTFKVAEHLNGHGIRTKNRNLWGRVSINRVIKNQAYIGNVVYGTRRNALQREYDDTGKMSKKKIQIKIDKTEWEVVEDVHEPIIDKETFYKAQKILLSKSHGRAPRRAYHPLTGILFCAKCGQGMVCQKRMYKGKEYRYYICKTYHKYGRSVCSQANVNADVLEQDVINIVKNELNSIPADKIEITGSKTNDIERLGQEIKKNNFKKEKLKKDQIDIFNQRELFDESTYQQQMLEIKSQINRIDEEIQIIENQIKVLMEQVEASSALDYLIEEVKKISLNDQEKLRVLLHDIIKRIELKEKHLQIEFNYDFR

SEQ ID NO: 14189 - protein, 531 aa, synthetic construct
MIAVYCRVSTEDQQERKTIENQISFAEKYCDLHELKIFKIYREDGVSGTIPLEDRPQGKQLIKDAKNNKFDTLLLYKLDRLGRSARITLNSIHMLEELNVQIKSMTEPFDTSSPSGRFMITMLAGVADLERSTILERMWLGANRAAKEGKWLGGIVPYGYFVNEDKYLEVNNNIIPEINLSEADVVKLIFSLATENNMSCIKIADYLNSLNIPPSYKKDNRKILKGKRKVSVSGSWSPSSILRMLHNTTYKGVHEYGKRSKKKREIITREVPAIITEDIWNKAQEVIKDNIIEATRNRKRNYLLKGLIKCGKCGCNYVGAKYKHRNYYYVCGGKIKYNGPFGKCTSKNLNGEYIENMIWNDITEFINNPGETINILKENLKTKDSNKQDLINQKELLETNLRAKETEKQSILDLFRKGIITANDVEIQLSKIQKEFNAIQDNLNAINHKLNEMYDIPDYTKVDEMLKSMKLIINQDNISFEDKRQIVKTLLDKITVNTIEENNTKSASLDIKYSFIKVENHTFKDSYWKQA

SEQ ID NO: 14190 - protein, 531 aa, synthetic construct
MIAVYCRVSTEDQQERKTIENQISFAEKYCDLHELKIFKIYKEDGVSGTIPLEDRPQGKQLIKDAKNNKFDTLLLYKLDRLGRSARITLNSIHLLEQLNVQIKSMTEPFDTSTPSGRFMITMLAGVADLERSTILERMQLGTNRAAKEGKWLGGIVPYGYYVDDDKYLQINNNIINGLNLSEADVVRLIFNLATENNMSCIKIADYLNSLNIPPSYKKDNRKISKGKRKVNVSGIWSPSSILRMLHNKTYMGIHEYGKRSTKKREIITREVPAIIPENIWNKAQGVIKDNIIEATRNHKRNYLLKGLIKCGKCGCNYVGAKYKHRNYYYVCGGKIKYNGPFGKCTSKNLNGEYIENMIWNDISEFINNPGETINILKENLKTKNSNKQDLINQKELLENNLKTTETEKQSILDLFRKGIITANDVEIQLSKIQKEFNAIQDNLNAINHKLNEMYDIPDYTKVDEMLKSMKLIINQDNISFEDKRQIVKTLLDKITVNTIEENNTKSASLDIKYSFIKVENHTFKDSYWKQA

SEQ ID NO: 14191 - protein, 533 aa, synthetic construct
MKRAVIYARYSTDLQNDQSVEDQIRLCKAHAERLGLIVVGEFSDRAKSGASMFGRPGLAKLMQKADSDTFDVLVAEHPDRISRDIADLAHIHKTLRFRRIEMNCVNGGAMDTVQIGMYGVVGQMQREEGAKKVKRGMVGVVRSGRNAGGKAYGYRPVPGRKGELEIVEEEAAIVRRIFSLYASGIAPRAIAATLNDENVPAPRGKRWNASTLNGNGQRGNGLLLNPMYAGKLIWNRVHMVKDPSTGRRISRINPGTEHEEIEAPHLRIIDDAVFEAVQQRKSSRGGPHSRSTPKYKRLLSGLLRCGACGGGMAINGSDRSGPRIICSTHKESGSCTNGGRYYVEKIEQQVIDTLRAQFADTRIIDIYVKEYEAERRREAAEKRRNRSTLERQLEETKTAITRIVERLAKGLIEDDDAAAILPGLRADRDRFQRELEEVEPVSNVIEIQPRAVRAFKANIERLAETISKRGETPPVELAQAFREMIAGVIVEPRKAGEPYRIEIKGYLSGLVSPELSSVLMVAEEGFEPPTQGL

SEQ ID NO: 14192 - protein, 510 aa, synthetic construct
MALHENSRIAVYSRKSREDRDSEDTLAKHRNELEYLIKRENFKNVQWFEEVVSGETIDERPMFSMLLPRIENGEFDAVCAVAMDRLSRGSQIDSGRILEAFKQSGTLFITPKKTYDLSIEGDEMLSEFESIIARSEYRAIKRRTINGKKNATREGRLHSGSVPYGYKWDKNLKAAVVVEEKKKIYRMMIKWFLEEEYSCTVIAEMLNELKVPSPSGRSIWYGEVVSEILSNDFHRGYVWFGKYKKSKSNNSIVQNKNLDEVLIAKGHHETMKTDEEHALILNRIEKLRTYKVAGRRLNMNTHRLSGIVRCPYCHKAQAIEQPKGRKKHVRKCLRKSAERTKECEQTKGIHEEVLFQSIMKEIKKYNEALFSPTEQDVNDDTYTTQLIGLREKAVKKAKGRIERIKEMYLDGDISKTEYKEKLKISQEILQKAENDLAELIASTEFQNALSAETKKEKWSHHKVQEMIESTDGMSNSEINLILKMLISHVTYTVEDLGDGTKNLNIKVYYN

SEQ ID NO: 14193 - protein, 446 aa, synthetic construct
MKQKLGYGRVSTNEQADCTHAAAQQINRLERAGCQEIFFDIQSGSDDDRPEFEKLMALVRSRQVSCVCITRDDRITRRGITTLQILETFFRCEVQLEILDAGGLIDLANPYQWLQRSQAGLNAEFESRMLSMRIKKGFEYFREKVKANPKPPYGYIRVDEKYQLDPKVNARGQIEAFLAVRSLQGACRLIDEKYGKQWTANGLRRWLLNPTLRGHTPYNRTYEQWETIIHNTHSDQAVMTEIEYRVICEIFQNNKQYWGQNRIARQYPLGGLMFCGECQIKMTVAHGGTAPNERIYVYCRRRKQRIQSQTCSQRRTPRIEIVEDAVISMLVKKSREIVNFAGITATTIEPQELMQLRSRLTALSQLGYDPDIEDAKTKLQRRINEFVYSLGDRQVETDSRIDMLKSFPDPLYWHTLPDDEKRVIFRALIEKVIIKDGVVSSVLFKI

SEQ ID NO: 14194 - protein, 481 aa, synthetic construct
MKYAVYVRVSTDRDEQISSVQNQIDICRYWLEKNGYEWDSNAVYFDDGISGTAWLERHAMQLILEKARRNELDTVVFKSIHRLARDLRDALEIKEILIGHGIRLVTIEENYDSLYEGGNDIKFEMFAMFAAQLPKTLSVSISAAMQAKARRGEAIGKPGLGYDVIDKRLVINEKEAEVVRGIFDLSKKGFGYKKIASILNDKGIYTKFGKLWSDTTIAKVLKNQKYKGDLVSNRYKTVKMDGRKKRIHTPKDRLTIIEDHYPAIVSKELWNAVNNNRISQKKTKQDMRNEFRGMIFCNHCGGSITVKYSGRYSKKNKKEWVYLKCSNFLRYNQCVNFNPIYYDEIREVIIYRLKQKEKELEIHFNPKIHEKREAKSMEIKKHIKLLKAKKEKLIDLYVDGLIDKDVFSKRDLNFENEIKEQELELLKLMDQNKRMKEDQQIKKAFSMLDEEKDMHEIFKILIKKITLSKDKYIEIEYTFSL

SEQ ID NO: 14195 - protein, 483 aa, synthetic construct
MKAAVYVRVSTTEQASEGYSIRAQTDRLKAYCVSQGWDIFEIYIDDGYSAKDTNRPNLERMMKHIEQNLIDCVLVYRLDRLTRSVRDLYNILETFDKNDCKFKSATEVYDTTTAMGRMFITIVAALAQWERENTGERIRMGMEQKAREGNWVINQAPYGYDLDKENKSLKINEEEALTVQRIFNYYIEGKGARSIAVELNRLQIRTKTNSPWSDFKIKYVLTNPTYIGTMRYNFRVNKENYFEIENTHPPIVTKEIFNNVQSIFKSRRVIHPRAATSKFIFSGTAKCARCGSPLTGKYGNYKRGSTEYKIRSYYCSKSRVGECDQRQMSERYLETQFIKYLDTFEINPEIINDLTKMDVIDESKDKLNLLKKELKEIEKRRKKWQYAWVNEMISDEDFSIRMDEENTKEEDVNKQLSSLQPSGEKMSSVDLTEILLDIKTNWNQLDALEKKMLLQMFAKRIIVDRVSDQLKPDCLEIKEVEFY

SEQ ID NO: 14196 - protein, 569 aa, synthetic construct
MKGMLNVKKSAIYIRVSTHHQIDKDSLPLQKNDLINYSKFILSINDYEIFEDAGYSGKNTDRPAFQEMMNRIRNGEFTHLLVWKIDRISRNLLDFCDMYEEIKKNNCIFVSKNEQFDTSSAMGEAMLKIILVFAELERKLTGERVTSVMLDRATKGLWNGAPVPLGYKWCEETKFPIIDENERLTVEFIYNKYLETESTSAVRNALNAESIKTKRGGAWTTKTISDIIRNPFYKGTYRYNYRESARGKKKNEKEWIIVDDNHSSIINKELWSKCNTIMDENAERNSARFRSNSKTHVFARLLECGECNRNLYAKQDKPSLDGFIPSLYICSGRYNGLGCSQKTISDKIIGTFILNYVSNIIRLHKTLKLSQLKVDELEKLLLKGKPFENVVGIKNKSLNELYFALTQYTKGDKRIFMPKENKILEIEDDSSVEKLLRERNKFERALSRLEDLFLFDENEMSEKDYILKKNKIKEKLNEINKKMNELNSIKNIGSVYELDFLISSSKNAILFEELTQSKSIDYNNLIKETDRKVIKSFINAIITKIVVKDKNILSVKFKNGLVTEFIYNN

SEQ ID NO: 14197 - protein, 531 aa, synthetic construct
MKSNLKTLKQFAKGKREELQTGKRYCVVYTRVSTKEQAETQSLEWQKKFCNDYAAKNNLEVLGYFGGTYESAKNDERKEFGRMMRQLNLYKEKISFILVYSLDRFSRSGENAIYISSELKKKGVNIIAVTQPIDASTNTGTLQQNIQFIFSKYDNDQRRQKSVDGMREKLKRGEWLGNCPTGYSYDRTHGTKEQRIVINQNGELVRKAFYWRMEGISNPEITDRLKALGLKIPMQTLSDIFRNPFYCGLISHNFLDGELVKGKHPALITEEVFLLVNKMNKKDGYHVDNENPALPLKQFLRCAKCGTTITGYIVAKKNLYYYKCNKRKCKCNKSTNLLHDMFIDLLSKFQIVPNLIEACTRQMLYTYENLTERMTEDTGGLIKKLNEVTTKLDNVMERYATGEIDKTVYDKVAGKLDTEKKQIEENLEKTRIRVSNPKEVFEYVYMLSSKLASTWVSSAYNEKRILQKMLFPKGLSYHRENDEYLTTRPNRVFQLIAQLTGDSEKNKSRISSFFLAISGSVPGVGLEPTCP

SEQ ID NO: 14198 - protein, 519 aa, synthetic construct
MKKITKIDGNKGTSIIKPKLRVAAYCRVSTDSDEQLVSLEAQKSHYETYIKANPEWEYVGLYYDEGISGTKKENRSELLRMLSDCESKKIDLIITKSISRFARNTTDCLEMVRKLLDLGIYIYFEKENINTQSMESELMLSILSGLAESESISISENNKWAVQRRFQNGTFKISYPPFGYDNIDGQMVVNPEQAEIVKYIFAEVLSGKGTQKVADDLNQMGIPTKRGARWTATTIRGILKNEKYTGDAILQKTYTDSRFNKRTNYGEKNKYLIENHHEAIISHEVFEAVEAALNQRAKEKGIEKRNNKYQNRYSFSGKIICSECGSTFKRRIHSSGARKYVAWCCSKHLKQITECSMQFIRDEDIKTAFVTMMNKLIFGRKLILQPLLEALRGMNKSDNLSRIQELEKQIEKNAEQRELLVKLMAKGYLEPALFNRENNELQMEANNYMEQKEALIHALNGELSKVQEVSNLIKFTNKAEMLSDFNDQLFNDYVEKIIVFSRVEIGFILKCGITLRERM

SEQ ID NO: 14199 - protein, 523 aa, synthetic construct
MAVSKNVMIIPAIKRMGNNRKEDETPKLRVAAYCRVSTDSDEQASSYEVQIEHYTEFIKKNSEWEFAGIFADDGISGTNTKNRDEFNRMIDECMAGKIDMVITKSISRFARNTLDCLQYIRKLKDKNVAVYFEKENINTLDAKGEIMLTIMASLAQQESQSLSQNVKLGYQYRYQQGEVMVNCSRFLGYTKDENKRLVIVPEEAEIVKRIYREYLEGSSMDKIKKGLETDGILTGAGKKRWHTSTIRKILSNEKYIGDALLQKTYTVDFLTKKRVVNNGIVPQYYVENNHEAIIPREIFMQVQEELVRRSRGHISTSGKKRNFSSNHVFSQIIFCGECGEIYRRVHWNNRGKKSIVWRCVSRLENTGLTCHSRTVLEDMIGIATVEAINKLIGQKDGFLTILKENIETVISETGNNVVSEIDKKLEELQKDLLRLANSKEDYNDIADEIYRLREERHKALAEEAGKKGSKQRLEDMEKFLNEQSTLLEEYDEQLVRRLIEKITVYDDKLTIEFKSGVEIDIEK

SEQ ID NO: 14200 - protein, 504 aa, synthetic construct
MRICMYLRKSRADEELEKTLGEGETLSKHRKALLKFAKEKNLNIVEIKEEIVSGESLFFRPKMLELLKEIENKQYSGVLVMDMQRLGRGNMQDQGIILETFKKSNTKIITPMKTYDLSNDFDEEYSEFEAFMSRKELKMINRRMQGGRVRSVEDGNYIATNAPYGYDIHWINKARTLKPNQKESEIVKLIFKLYIEGNGAGTIAKHLNSLGYKTKFGNSFNNSSIIFILKNPIYIGKITWKKKDIRKSKDPNKVKDTRTRDKSEWIVVDGKHDPIIDQITWKQAQEILNNRYHVPYKLVNGPANPLAGLIICATCKSKMVMRKLRGTDRILCKNNKCNNISNRFDAVEKSVVESLENYLKAYKVNLPELNKTSNLKLYEQQISTLKKELKILNEQKLKLFDFLERGIYDEDTFLKRSKNLDERIEITNESLSNLNQIIAKENKAIKEEDIIKFEKVLDSYKSTADIRLKNELMKTLIFKIEYTKNKKGNDFKIKVFPKLKPLNI

SEQ ID NO: 14201 - protein, 509 aa, synthetic construct
MELTPIEFKKDTEKIIPYSEYPYAVYVRISTDKEEQMTSPENQIEICRNWLEKNNYEWNDGSVLYDEQSGTVLIDRAAMQLILEKARRREIKMVVFKSISRLARDLKDALDIKETLISHGVRLVTIEEGYDSLYEGKNDMKFEIFSLFAAQYPKTLSVSISAALAAKVRRGEAIGPAPFGYKIEGENLVINEEEAPTIRQIFKWYVEDGYGFKSITKMLNEEMIKGNVSRPRKKDKWQVTSVQRIIKNPTYAGYFVHGRYTTVKQNGRKKFIENPREKWMVYENHHPAIIPKEMWEAANNKRMKKVKTKVTPWNEFRGIAKCSECGSNMVIIQTGNKKNKGGHWNYIKCSSYRRAGQYGCVNHAPILYEDFRELIIKRLKRKGKNIKLKLESGIVQKRKNEIAALEKEKLSLEQKRKRLIDLYLEDGLISKEEFQEKRKQYEDRIREIEDRIFLLSQEQNTTKEIKTIEDAFQQLENIDQDLYHVFKTLIDQIIVHPDGKIEILYKFKV

SEQ ID NO: 14202 - protein, 598 aa, synthetic construct
MKKVEVIKGGGLLSACRNGIEINLKRVAAYCRVSTDSEDQLQSYHSQVKYYTGLINENSDWTMAGIYADEAITGTQVDKRLDFQRLINDCMNGDIDMVITKSISRFARNTLDTLKYVRRLKEMNVAVFFEEENINTLTMDGELLLVILSSVAQQEVENISANVKKGLKMKMQRGELVGFHGCLGYDYDKETKSISINEDEAEIVRYIFKRYLEGAGGSVIGRELENLGYKSPRDSSKWSATTVLGIIKNEKYKGDLLMGKTFTVDPITKRRLDNFGEEDKFYVKEHHEPIISEDDFDKAQAIRLRRAKNRNTVKSKDGKREKFSRKYAFSCLLECGFCGSNLSRRSWHSNTEYNKVIWQCVTGTKKGKRYCPNSKGIEEVAIEKAFLESYRQLTSNNKDIVNKFLELIESTLNDNTLEKSIKKLEREILKISSKQNSLVDLRLEEKIDGELYEEKYISLQKQYSQKSKEKEDLEFNLKNNNEIKSRMKTFKTMLEVKEVLKEFDRYVFESIVEKVIVGEVDKSGNVDPYKLTFVYKTGSKDDLDGEKFKSSRKNASSKNKIRVKGSAELSSYTNNYVNKSCSHSSDTACGVRGIDVKG

SEQ ID NO: 14203 - protein, 687 aa, synthetic construct
MMHEKIGPHHLERKAILYVRQSSAHQVLHNRESSTLQYAMRDRLTALGWSRIETVDDDLGRSAAGGVTRAGFDRMVAEVCLGKVGAVAAREVSRFARNSRDWQQLIEMCRVVDTVLIDQEAVYAPRQGNDRLLLGLKGSLNEYELDLLRQRSLSARYEKARRGELVVTVPVGFLKVGDRIEKDPDRRIQDAIALVFNKVAELGSARQALLWFLEHGLDLPVRRADGDVIWRRPNYATIHRMIANPIYGGAYAYGKSRSVPGYGGRSGIRRKARDEWLALIPDAHEGYISWERAEEIRKMVSDNVPASRHHGAPKHGDALLAGLFRCKRCGRKLTVRYTGANHNIPRYSCWRGLLDNGEPRCIAFGGLRVDDAIEEAVLGVVEPGAIAAAIEAERRMASQRDQVQDALLRDLEAARYAADRAFRQYDAADPENRLVTSELEARWNTALARAGEIEAKIAKHRTVAPQPIPMSASQVAALAGNLRAVWTAPTTDARLKKRIVRTLINEVVADLDDGTSEIVLVIHWVGGVHTELRLPKRRRGQRNATPDDIVDAVRQLVLIANDDVIAGVLNRNGLTTGNGNRWTRERVTALRSYRKIPVFRPRVDGVEPWLNLGGAAKLLGITPKTLRLAAEAGQIEGAHPLPDGPWIFSRSKLATPQAHQILDRARQNPRHPTGSHPDQENLFPSTT

SEQ ID NO: 14204 - protein, 690 aa, synthetic construct
MTSAEIIPAVILKRKAVVYVRQSTQSQVMTNLEGKRRQYDLVDVARQHGFVDVEIIDDDLGRSASGTVARPGFDRLVAWLCAGKVGAVLCFDASRLARNGRDWHHLLELCGLVEARVIDGEGVYNPCRPNDRLLLGMKGSISEFELGVLRTRMLDAARSKAGRGELRLSVPFGYIWHREAGLGLDPDQRLQEVIRVIFVRFQKLGSARQVLLSMKADQIHFPRPSDEGRMTSFDWTPIRYRNVIAVLKNPFYAGVYVYGKSEKRTSIVDGRARRSYGHGKPIGTWEVMIKDHHEGYIDWAEYERNQKQLALNNYGSAGGVKSGRGGKALLSGVMTCRRCGRRLSVAYTGNPQSRPVYRCDKPNLMMGLPRCMTFGGPRVDAAVSRELLLAVEPMAIEAAFEAERMHREQQEDQQRILDMEMQQARYEASLAERRYAACDPDNRMIAAQLEKNWETALRRVRDLEIRQPAERTSNIEVDPSAFSNLADNLSAAWHAPNVTMRARQKLLRTLIADIIVDVDDDAREVVLTIHWRGGQHSELRVRKPRAGEHGCATTEDALAVMRSMAGRWSDEHIAASLNRMGMPTGQGKTWTAHRVASVRRVRGIHAYRSAEKDGEWLTMREAAKLLDVTHHTIRRLIKTGVLPAVQVVAGAPHQIRADDLASDPVKTAVARKGRPCRAVDADTLPMFPDT

SEQ ID NO: 14205 - protein, 539 aa, synthetic construct
MKAAIYSRKSMFTGKGDSVENQVQMCKDYGNRLNVDEYLIYEDEGYSGGNINRPKFQELLQDVKKKKFDVLICYRLDRISRNVADFSSTLELLQDNNISFVSIKEQFDTSTPMGKAMVYIASVFAQLERETIAERVRDNMLELAKSGRWLGGQTPLGFESEKISYFDAEMKERTMYKLSPESKELELVKLIYNKYLETGSIHLTLKYLLSNNIKGKNGGEFASMSINDILRNPVYAKSNEMVLNYLKDKGMNVCGTANGNGILIYNKRNSKYKRKDINEWVAAVSKHKGIIPANVWIEVQKTLDKNSKKDTPRQGTSKKALLSGVLKCSRCGAPMRVTYGRKRKDGTSIYYYTCTMKAHSGKTRCDNPNVRGDYLEKNIITELKNLNSDVVIKGLEEHKKQLVATTENSIIKNISKEIEEKKKEMDSLINKLSKIESDIASEFILSKVDSLGKEIKELEVNLLKRTDKRKENSDIELNIEIVLQAIKEFNDFFNSVESFKDDELTIQRKRYLLERAVDEIRIDGETNGIDIDLWRAKKK

SEQ ID NO: 14206 - protein, 506 aa, synthetic construct
MRSVITYLRFSSAIQGAEGADSTRRQNDLFKQWLKKNSDAQVVASFSDEGLSGYKGKHLTGQFGDMLARIESGEFPEGTLLLVEAIDRIGRLEHLETEALMNRIIAHGIEIHTLQDGLIYTRDALSDDLGISIIQRVKSYVAHQESKQKSFRVSQKWKQRAKLALAGEQRLTKMVPGWIDPDTFKLNEHAETVRLIFKLLLSGESLHNIARHLQANNISSFSRRKDANGFSVHSVRTVLRSESVIGTLPASQRNDRPAIPNYYEAAIDASTFNKAQEILDKNRKGRTPASDNPLTINIFKGLFRCQCGASVHPTGTKNKYAGVYRCNNNPDGRCDVPPLKRKPFDKWMIDNFLGMIDVGNDGEAEGKIASLQHEVEIVTTRIKKATALLLEMDDITELKAQVKELNQKRTELQTTIDSMRRKTSLSDKGLPQLKDIDLMTKAGRVECQLILSKHLKGLTLGKDSVTVTLQNDTEIIVPTDPLPLNDGTSIFEIAEKELLEIDAYQL

SEQ ID NO: 14207 - protein, 600 aa, synthetic construct
MAQKLYSYQRWSSALQADGTTKARQTKAAEEYAQRNGLEIEEIVDAGVSGFKSANSDESGALGQFLRAVDEGLIARNAVLFVESLDRITRDEIDTALELFLGILRRGITIVTGMDNKVYTREAIKGNPVDLLTSILMFSRAHEESKTKQNRTNGNALALIDRFIKQGLPVNIKSVGSHPWWIDDSGSMYEAVKPHPVLWACAQLAMDKFMEGISVFKVTQMLNDRFPHYYKGKAWAMANVRKLRLNKAVYGVREISVGGKTYVLTDYYPALISEGQFLRLQQIRTTTKYIGKVGEGRVVTDSEGNSKVIAERNNINLLSGMKLFRCGHCGGTMMAMRHGDTIRYLCEKGRGYHHDCKTWSLPGILVEHTLMLVTTIAYIELQQKGQGAKADYTQQINAMESTINGYSTQINKATKLAIALDDVDVDELAETIKELKAKRDNAIIELEVLQRKQLLANDSTFETIMMDFFTYAQYGVLQDPVHEYRSKLRDVVYSAISDVRAWKHDRRLFISFQIKGNDEYYNFSAGNTPYEWGCYVGALPFSQQELEVADGDVPEEVLERFRERYAVLHAANMMMLHQAKELLSHVGYPELDSKMFWPRK

SEQ ID NO: 14208 - protein, 529 aa, synthetic construct
MKKNKTAIIYARVSTARQADEGISIDSQIEQAEKKALEMGAVVMKVFRDDGISGRTANRPAFQNAIKFCESYDIDYFIVWNTSRFARNKLDAASHKKLLEGGGTKVVYVSVNIDNETDEGWFSESIFEIMDEHYSRQVSRDTRRSMLKNARDGYWNGGHVPYGYLVVTTDGKRKQLQIQPDEAVIVKEMFRMYITGLGCKLIAMDMNDRGFTYRGLKWTKGHITNLLKNPVYAGFIAFNRMDKQKREKPESEWIMTKSHDAIVSEEDYALVREEFRRRSPTSEGGSPHSTFVFTGILRCGECGAAMQTESATGRTKIYHYYNCSRSQKGGGCRSRRIAAGDFDTWMMNTIIQRVLTPERMREVVAEVHELTSRDQEDRERRANAVLRQIKDANKRRQNLFDILELHGKDAPNLGDLTVRLREINATIKKLEAELAAIEAEESPVFDVTDEQIQNATDTMIGVLNNTPDAKKLRLLMGHFIDRIVLNEADVEMEYRPERIIGTNEKSREPVVHSSNSWLPEQGSNLRPAD

SEQ ID NO: 14209 - protein, 516 aa, synthetic construct
MRAAIYLRVSTEDQAKHGYSLPDQRTACREKAAALGAGEVMEFADEGISGELLDRPGLSALREAVKAGQLDLVVCFDPDRLARKLAHQLIITDEIEKAGVRLEFVNFEWQNTPDGRLFYALRGAIAEYEKEKIRERTVRGKLQKARLGGLPVQADSYGYIYDNGTVKPHPVESEVVKMIFRWFTTEDIGVNGVAARLSEQGIPTRKGRPAWQRCVVKTILTNPMYVGTFYYNRRDCRGTCYNKHLPPEKRVKVKEKPGEEWIAVPVPAIIDRETWEKAQEKIKAARRLWSGWSREEYLLSGLISCADCGNTMHGAVKTKSGGSRERGYTCVKTAAGASNQGCRPIKRVPAEIVEKAVWDRVCEWLNDPDALAREIRERSREKDLRADLERIEKHLADVEKGRDNIRSALAAGLLDLDEKTSKLLRDLKGREKQLLSRKKEVEAALRRSAAVEVRAREIRREAESFLSRLDFLSFEQKRALIRALVKQVTVAGRGESLRVTVYAAFMPEAAARPGEL

SEQ ID NO: 14210 - protein, 549 aa, synthetic construct
MIIIKAAIYSRKSLFTGKGESIENQIQLCKEYGEKNLNLKNDNFIIYEDEGFSGGNTNRPKFQELLKDVKKRKFDVLMCYRLDRISRNVADFSTTLELLQQHNISFVSIKEQFDTSTPMGKAMVYISSVFAQLERETIAERIRDNMIQLAKTGRWLGGQTPLGFDSQKILYYNSEMKEKSMYKLSPVKEELKKVKLIYNKYIEFGSISLVLKYLLSNNIRGKNGGDFASMSINDILRNPVYVKSDDGVFKYLSDSGIITCGTPNGNGIMTYNKRNSKYVPKKKTEWIAAIGKHEGVIDSNTWLEVQFRLNKNKKKANPRQGTSKKSLLSGVLKCALCGAPMRVCYGRPKKDGSERIYYYMCTMKAHSAKSRCDNPNVKGPELEKAIIENIKQLNTTKILKELQVAKNEAAVSIENNFTETITKEIKDKSDQINTLLEQLAHTNANNSIASEFITSKIESLGNEIKKLNLKLEKSKDTKQENIQKKLNFEIIEKSLHEFNSSFDMIKDTSKKRLILENIIDKVYWNGNTGDVDIQLWGSKKKHTLRPVVR

SEQ ID NO: 14211 - protein, 548 aa, synthetic construct
MKPRREKSLSTNRRAAIYARFSTDLQNERSVEDQIAVCRALAEREGIEVVSVHHDAARSGASIFGRNGLITLIAQSELLPCPFDTVLVEHADRLSRDMEDLSGLHKRFAFRGIEIRAVNSGTMDTAMVGLFGLVGQMQREEGAKKTKRGLSGVVRSGRSAGGRLYGYSPVPGKPGELAIAEDEAAIVRRIFAAYLAGQTPREIAHALNRDGVAAPRGARWNASTINGNTKRGNGLLQTELFAGRRVWNKVSMLRDPSTGKRVSRPNPPDQWQSAEVPDLAIVDAETFAAAQARKAARAVHWTNPLLRKPRHLLSGLLRCRCGSGMSSHGKDRTGRTRLRCTAATESGSCPDPRMFYLDNVEEKVLGALRAEMNDPAVMTEFIAEYQAERMRLAARRNKNRSRLERNLAQAARELQRVINLMVASEGDVPELMAQAKDLSARKKIAEDALASAPGEVKVITLHPTALARYEQMLTRLQDGLSKGMGANDTEAAAALRDLVTHIIVGPGTNKGEVEVQIFGRLNALMGGNDGGSLRVGSGGNGPSLPSER

SEQ ID NO: 14212 - protein, 533 aa, synthetic construct
MVKQMEIKRFAKGVEIAKAKSTNNCVIYTRVSTKEQADTNMSLETQKKGCEAYVLKYGYNVLAYFGGTYESAQTDERKEFKRMIEFCKKQKTKVSYIVVYSLERFSRTGDNAIWLSRQLRGLGISIISVSQPIDTSNPSGVLQQNILFLFSQYDNDLRKQKSMDGTKEKLINGIWCTRPPRGYDTVKRNGERFIEINDTGKLLRKAFLWKAQEQLTHSEIVKRLAASGLKITIKTLHAVFTNPFYCGMLSHSALGGELVKGKHEPLVSQEIFLKVNDIKPRNYGKLKNEKYTNTPLKGLLKCETCGELMRGYIVKKKGLYYYKCNSDKKCGCNKSAKDLHNQFQGILEELTLEEKYVDVFKDQLRLIYTELNANKDKANAEFQQQINEVETKLERLEERFINEEIKPDLYEKFAKKFRQEKQAIEENMKGCPVSGSNLDYFINRSVEISTELPSLWASSDYSNKQKLQNLIFPEGIYYNKKKDESRTTKVNSVFLQIARLKQVSGENEKGLQAEKPLKSLWVVPTGIEPVSKV

SEQ ID NO: 14213 - protein, 529 aa, synthetic construct
MAKKVRKIEPVKQKVILELQPKKRVCAYCRVSTDSREQQNSFSAQVEYYKTFIGKRDDWEYTGIYADEAKSGTQVKKRDEFLRMIKDCEDGKIDMIITKSVTRFARNTVDSIEAIRKLKALGIGVYFEKEHINTLSEKSEQMITILSSLAQGEAESISTNNKWAVKKRFQDGTFKLSDPAYGYTKDEDGNLIIKEDEAKIVRRIFHEYLNGKGSYVIARYLNDDNVPTIRSAEEWQDSVVKEILQNPIYEGDLLLQKTYTTEVLPFERKTNKGELPQYFIENNHEPIITRKEGRMVRDIYEYRRNQMGVDDSGKYQNRYEFSSKIICKECGNIFRRQKIYIGKPYEKIQWCCVQHIRDISKCSMKAVREDIIKETFLTMWNKLLSNHTDILYPLLESLKNLRTDHEQEEEIKKLNNRIMELTEQSHILSRVVSKGYIDSAIFIERQNALTVELEAIKKMRNQCLDDNGYEKEIVGTVRLLEIIRYNPEIIEKYDENLFIHTVENIIIGENSEITFKLINNLELTEYYGK

SEQ ID NO: 14214 - protein, 515 aa, synthetic construct
MKTAIYLRKSRADLEAEARGEGETLAKHRTTLLKIAKEMNLNVLAVREEIVSGESLVKRPEMLALLEDIEDNKYDVVLCMDMDRLGRGGMKEQGIILETFKRSNTKIMTPRKTYDLNDEWDEEYSEFEAFMARKELKIITRRMQRGRIASVEAGNYLGTHAPFGYDIHRLNKRERTLTINSEEASVVRLIFDWYANEDMGASAIRNKLNDLGYKSKLGNDWNPYSILDILKNNVYIGKVTWQKRKEVKHPDAVKRSCARQDKSDWIIADGKHEPIIPESLFEQVQEKLNSRYHVPYNTNGIKNPLAGIIKCGKCGYSMVQRYPKNRKEAMDCKHRGCENKSSYTELIEKRLLEALKEWYINYKADFEKHKQDDKLKETQVIQMNEVALRKLEKELVDVQKQKNNLHDLLERGVYTVDMFLERSNVISDRINEITSTMENLKKEIKTEIKKEKVKKDTIPQVEHVLDLYFKTDDPKKKNSLLNSVLEKAVYKKEKWQRLDDFELVLYPKLPQDGDI

SEQ ID NO: 14215 - protein, 515 aa, synthetic construct
MKTAIYLRKSRADLEAEARGEGETLAKHRTTLLKIAKEMNLNVLAVREEIVSGESLVKRPEMLALLEEIEDNKYDIVLCMDMDRLGRGGMKEQGIILETFKRSNTKIMTPRKTYDLNDEWDEEYSEFEAFMARKELKIITRRMQRGRIASVEAGNYLGTHAPFGYDIHRLNKRERTLMINSEEASVVRMIFDWYANEDMGASAIRNKLNDLGYKSKLGNDWNPYSILDILKNNIYIGKVTWQKRKEVKRPDAVKRSCARQDKSDWIIADGKHEPIIPESLFEQVQEKLNSRYHIPYNTNGIKNPLAGIIKCAKCGYSMVQRYPKNRKETMDCKHRGCENKSSYTELIEKRLLEALKEWYINYKADFEKHKQDDKLKETQVIQMNEAALRKLEKELVDVQKQKNNLHDLLERGVYTVDMFLERSNVVSVRITEITSTMENLKKEIKTEIKKEKVKKDTIPQVEHVLDLYFKTDDPKKKNSLLKSVLEKAVYKKEKWQRLDDFELVLYPKLPQDGDI

SEQ ID NO: 14216 - protein, 494 aa, synthetic construct
MKPCFGYIRVSTERQGDGASLEAQKDAITGFASQNNLEIVRWFEERETASKTGRPIFGEMMNALVSGAAEGLILHKVDRTARNFSDWSRLHEVAKLGIDVYFAADSLDFGTRGGQLLADIQMALAADYSRNLSQEVKKGIYGRIKNGVYPFRAPLGYLDTGGGNVKAIDPIKAPLVSQVFELYCSGDYSITSLTEEMQRRGLKGVGERPVVRRNIESILRNPFYCGKMLVRGKLYDGAHEPLISTAQYRRVAAIKAQRFVKKSTKHELLFRGLFTCGACGQVLTGERQKAHVYYRCHTPRCGRGAIREDRLEETLREKLARLEISPEDQVTLESDIRAWLNKDGVKDIEKSLRLRISDATARLDRLTDLLVDGAIDKPAYELRKQNVEFEKQQLREELDALERSRAEEKDLKALLALAADLSSLYDAAPPPKKRELIRNCLVAPCVMDGQLVSHPADWLVSLRKSPKTDEKSHSAPQAILEGVRVMHAVVDVMP

SEQ ID NO: 14217 - protein, 550 aa, synthetic construct
MRTAAVKKNISVIPPQPEYDRSIKPQFKALRVAAYCRVSTTMEQQETSYEAQISYYTEKIKSNPNWKFAGIYADDGKSATNTKKRDDFKAMIGDCLAGKIDMVITKSVSRFARNTVDSLQNIRKLKEKNIAVFFEKEGVNTLEGSGELLITILSSQAQEESRNLSENTRWGLVRRFEKGIVSINHNKFLGYTKDENGELVIVPKEAELVRRIFRLYLEGKSLAKICKILESEGIRTVTGLKKWRSGVIYKMLSNEKYMGDVLQQKSYTIDYLNKKRVKNNGIVPQYYIEDDHEAIIPKELFYRVQEEKARRAGLRKTAATRRAKQEKEKSKYSSIYALSDIMVCKECGQPYRRQIWSKYGRKSAVWRCENRLKNGTKHCRHSPTLKEEVLQGAVMTAINSVVENRGEFVGAFRENVIRVIGSYSTKNVSTQYDGEIEKLQSQMLALIEENARKGSVTEEFDQQYQGIAMQIKDLKQKKLELARERKQAEDFQQRVVDMDAYLKRTTCEVREFDDDLVRRLLQNIRVINDELLEIQFRSGIVMKQRVSYFD

SEQ ID NO: 14218 - protein, 537 aa, synthetic construct
MAKKITKIDPVKQQITLQLQPKKRVCAYCRVSSDSWEQQNSFTAQLEYYQPLIKGREDWQFAGIYADEARSGMKLQKRDDFLRMMKDCEKGRIDMIITKSVTRFARNTVDSIQAIRRLKELGIAVFFEKENINSLSEKSEQMLTILSSLAQGEAESVSSNNKWGILKRFQDGTYIISTPAYGYTKNENGEMIIQEVEAAVVRRIFWDYLNGKGTHIIAKELSEEGVPTIRGAETWQDAVIKEILVNPVYTGNLLQQKSLTTEVIPFKRKRNRGQLPQYLIEDNHAAIIPREAADTVVDIFAYRRKQMGLDDPAKCRNRYAFSSKILCGECGGIFHRQKIYVGRPYETVQWGCIRHIKNGEQCGQKAIREDFIQGAFTVMWNKLISHSDRILVPLLEMLKKLRIDEEQEQEIGACHNRIMELTEQVHILSRLAAKGYMDPAVLIERQNTLALELAAVKKKRNQLLDNNGFDREITGTEWMLELIRKSPHVIEEYREDLFLQVIDKVIVQKNGQITFRLINQLELSESYRKGGAQDGTR

SEQ ID NO: 14219 - protein, 484 aa, synthetic construct
MKDTFQERSIALYCRVSTDEQAREGISLDEQQERLKAYCRAMGWSEEPLLFIDDGYSAKNLDRPELNRLLKEVKKGTISKILVTKLDRLSRRLLDLLKLIDMFQEHNVSFISISESFDTNTPSGRLTLQVLGAVAEFERERIRERVFENMLHAARQGKWLTQSPYGYRLQNKELVIYEPEAQIVRNVYDWYLNKGLGYYAIAKKLNEEGIPSRQKKEWSIRAIKLMLTNPVYKGTLFWNRMDSSKSKRVKKDDADWVVLEDACPAIIDQATWEQVQKRVNKKQMAPRAQTSPHLLGGLLKCGRCGSGMSIGWSGSAKNRYRVYRCSANKNKGTCTSKQYRADDVESWFKHGLLKLADSINSQMIPHLIQKAAENEESTIEQKIRTAKNRYKRKVEAYTAGLIELEDLNEEKKRMEQIIAEVQKTENASSVDVKKLEAMVKEKMNNVIDAIDVLPVPEAKSLIKTIVEKVILLDEKDIEIVLNIQ

SEQ ID NO: 14220 - protein, 506 aa, synthetic construct
MDLSKILTPGMKGVFYGRHSTHKQTMETQRRSAYDLAEKYQCTIVEEILDEGVSSRKKDREGYKRLIAAAYEKKFDFVIIYSHSRIARIPEEHDLIRATMHILDIPIIESETESLYDFGDTIFRAIKDGIAKYELDKIRINTKNAIETLAKNGRWTGGRAPFGYQYTSKKEGGTEKFDIVEAEIELVKKVFELYKNHHGFSSIARQLPENSYRGKAWTKDRVKNIITNPFYAGYIAIRRKHEKKHNALKDRSEWIMKKSPLIPAVLTIEEWEYCWNLYKTKNERKIPPKHFKTSFLLTGLLKCQNCNGGLIGKDQRTTSNQGKVYGKKVYLCKSCNYKIDADDAHQTVLKVFRSYQGVDTEKLISAVQEKVETEISNIKKSIEDLKVSWQTEKRKLQLCDIEIEKAFKRKEEKEPHIKILIITKDRILNKVHQIERWIEEKEAKIKFLEEVQKNENLIRDHLKQFQAPVSSCNEDMRALFLYLFEEIMVNKKGHLQCKLRFNLDDK

SEQ ID NO: 14221 - protein, 542 aa, synthetic construct
MKVALYARVSSEAQDVELSIAAQLRALRDYAGKNNYQITYEFIDEAESGRTAARPEFKRMIAMSKSSIPPFEAILVWKLNRFARNRADSITYKLLLQKKGIKVISINEPLDDSPTGKLMEGIIESLDEFYSANLGQDIKRGMKENALRGFYNGSQPPLGYELVKVKDGPKQRNKLAPEADTSPGVKTVRYIFALADKGKGCKEIANILNREEYITKAGKPWGRTTVHKILCNEAYTGTLVWGARPSQGLAKNEEAVRLENAWPGIIDKETFQRIQQSMVSRQPKNTHPRTVPSQYLLSGMAFCSCGAALTGHSAKSGQYAYYQCNRKFKQGNGVCNCQAIPKTKLESAVIKQIKSKVLTEENLEELVKQVNEELESTSSHHKEKLAVLDAELDDIRQRLNRLYEAIESGKLNYDDLAPRIRELRERQSKLEKSRVLAEAEMVADSDDNFNLGMVKAYANDLKQLLNESEITDCKTFLKTFVKKIETDSRNVSLKYTLPLPGTNRRREVLPIDTFGGAGGIRTLYLLTASQTFSQVNYGPSNR

SEQ ID NO: 14222 - protein, 522 aa, synthetic construct
MGNVMVIPAKRQVGNTVKQSEQKKLRVAAYCRVSTDSDEQESSYEAQVTHYTEYIQKNPDWELAGIFADDGISGTNTKKRDEFNRMIDECMSGNIDMIITKSISRFARNTLDCLQYIRQLKDKNIPVYFEKESINTLDAKGEVLLTIMASLAQQESQSMSENIKLGLQYRYQQGKVQVNHNRFLGYTKDENGNLVIDPEQAEIVKRIYREYLEGSSMDKIASGLMADGILTGAGKEKWHTSTINKILRNEKYMGDALLQKTYTTDFLTKKRIKNNGTVPQYYVEGDHEAIIPKDLFMQVQAELVRRRVVHVSPTGKKRSFSCNHCFAQMVFCGDCGELYRRVHWNNHGCKSIVWRCISRLEPGSADTNCTNRTVNELLLQEVTVTVINQILTERGTFLKQLQANIAKAVVSADTLSPDGIQARLEELQKELIKKANNKQDYDAIADEILRLREQKEQSEVDSHHREEAMNRIKELQDFIFKQKTDITEFDEALVKKLIEKITVFADHFTVEFKSGITIDIEA

SEQ ID NO: 14223 - protein, 519 aa, synthetic construct
MKKVTKIAEAANTKVKLKKIRVAAYCRVSTDSDAQLESLEAQKTHYETYITSRDDWEFAGLYYDEGITGTKKDKRPELMRLIGDCKAGRIDFIVTKSISRFSRNTTDCLELVRKLLDLNIPIFFEKENINTGSMESELFLAILSGMAESESVSISENSKWSIQKRFENGTFKCSYPPYGYDWDGEQMVINPEQAAVVKEIFAALLSGKGTHAIADDLNRRGVSSKRGGRWTATTIRGMLSNEKYVGDCLFQKTYSDSQFVRHNNHGEQTQYMVTEHHEPIISREDFEAARIFISQRASEKGVTKGTDKYQNRYAFSGKIICGECGDTFKRRIHSCTDHKYIAWCCNTHIKDKDRCHMLFVKDDALKQAFTTMLNKLIFSHRQILKPYLESLKTSSSDDSLHRIQQIQTLLAQNTEKRETLTMLMTQGIIDPVLYSQETNELLSQADSFRDEIEALKNEVSGDVNKVTETTALIHFAEKSAMLQEFDKDLFDRYVKRIIVHSRNDIRFELKCGLTLRERK

SEQ ID NO: 14224 - protein, 443 aa, synthetic construct
MTPIRKVRCAIYTRKSSEEGLEMEFNSLDAQRESCEAYITSQKAEGWVPVPDHYDDGGFSGGNLERPALKRLLADIESGLIDVVVVYKIDRLSRSLMDFSKLVEVFDRNAVTFVSVTQSFNTTTSMGRLTLNILLSFAQFEREVIGERIRDKFAASRRKGMWMGGVPPLGYDVVARKLVVNQPEADLVRHIFERFLKVGSATLLVKELNAAGHHTKSWTTQDGKIRDGAPITKNFLYKLLDNRVYLGEAVHKGEAHAGEHPAIIDRATWDKVVAVKTDNAPRKRANAVRSSTPAPLKGLIHCAHCGRAMTPSHTRKKGRLYRYYTCMKAIHSGHESCPVRSIAAGEIEAAVIGQVRALLRAPEIRARAERMAPTMSPADLHAALDRFEALWDELFPAEQARILQLLVEKVAIAPDGAEVRLRAEGLASVIADITAQTGDRSAA

SEQ ID NO: 14225 - protein, 447 aa, synthetic construct
MSAPNKPIRKVRCAVYTRKSSEEGLEMEFNSLDAQRESCEAYIASQRAEGWVPVPNRYDDGGFSGGNLERPALKRLLNDIEAGLVDVVVVYKIDRLSRSLMDFSKLVEAFDRNDVTFVSVTQSFNTTTSMGRLTLNILLSFAQFEREVIGERIRDKFAASRRKGMWMGGVPPLGYDVVARKLVVNEAEADLVRHIFRRFLQVGSATLLIKELNAAGHRTKSWVTQDGKERQGVPFTKNFLYKMLGNRVYLGEAVHKGESHAGEHAAIIDLTTWERIEAVKADNAPMKRAAAARATTPAPLKGLVICAHCGRAMTPSHTRKKGRLYRYYTCMKAITAGHESCPVRSVAAGEIETAVIGQVRALLRAPEIRARAERMAPHVAATDLHAALDRFDEVWDELFPAEQARILHLMVEQVAISTDGADLRLRAEGLSSVVADITALQNARSAA

SEQ ID NO: 14226 - protein, 515 aa, synthetic construct
MRKSKAPLTEEKRCAVYTRKSTAAGLEMEFNSLDAQRESCVAYVQRQPGWVLVEESYDDGGFTGANMERPAFQRLLQDVDARRVDVVVVYKVDRLSRSLLDFAKVMERFNAAGASFVSVTQNFSTADAMGRLTLNMLMSFAEFEREMISERTRDKVAAARRKGKWTGGRAPLGYEVKDKRLVVNEYEAVVVREAFELYLQHQQASAVARLLNETGRTTKRYEAQSGATRAARKWTTQDVLRLLRSPLYAGFVPYGDETHPGEHPALVDRATFHRVQDMLESPGIQYHGRNPDYVLRGLLRCGLCGEAMTPGSTRKGEREYRYYRCVTRDKQGKEGCRAAPLPAAALEDFVVAQLREVSVGDGFAAQVHARLTARLEEKHQALRAERAQLPRDLAKRAGESAKWVDSLSKLEGPARRLVEEKLTAAEEEVAGMRKRLAEVERALDAIEGERVEAAWVAQALGNFDAVWDALTSTNRGRLLRALVGRVVVNEATGKVDVHMAHVGEAAVTGREEVAA

SEQ ID NO: 14227 - protein, 520 aa, synthetic construct
MKKITKIEGNLANSFIKPKTRVVAYCRVSTDSNEQLVSLQAQKAHYETYIKANPEWEYAGLYYDEGISGTKKENRSDLLRMLSDCETGRIDLIITKSISRFARNTTDCLEMVRKLIDLGVHIYFEKENINTGSMESELMLSILSGLAESESISISENTKWAIQRRFQNGTFKISYPPYGYQNIDGQMIVNPKQAEVVKYIFAEVLSGKGTQKVANDLNQKGIPSKRRGRWTATTIRGILTNEKYTGDVILQKTYTDSHFNRHTNYGEKNMYLVENHHEAIISHEDFQAVDAILNQRAKEKSIEKRNSKYLNRYSFSSKIICSECGSTFKRRIHSSGRKYIAWCCSKHISNITECSMQFIRDDDIKTAFVTMMNKLIFGQKFILRPLLEGLRNQNNAASFHRIEELEIKIENNMEQSQVLTGLMAKGYLEPALYNKEKNSLVQERERLLAEKDQLTRFVNGNLAKVEEVNHLLRFATKSKMLTAYEDELFENYVEKIIVFSREEVGFELKCGITLKERLVN

SEQ ID NO: 14228 - protein, 502 aa, synthetic construct
MNKICIYLRKSRADEELEKTLGEGETLSKHRKALLKFAKEKKLNIVEIKEEIVSGESLFFRPKMLELLKEVENKQYTGVLVMDMQRLGRGNMQDQGIILETFKKSNTKIITPMKTYDLSDDFDEEYTEFEAFMSRKELKMINRRMQGGRVRSVEDGNYIATNPPLGYDIHWIKKSRTLKINPHECEIIKLIFKLYTEGNGAGSIAEHLNNLGYKTKFNNNFSRSSVLFILKNPIYIGKVTWKKKEIKKSKNPNKVKDTRTRDKSEWIVVDGKHEPMISMKMWNKAQEILNNKYHIPYQLVNGPANPLAGIVICSKCKFKMVMRKLKGVDRLLCRNNKCDNISNRYDSTEKAIIQALERYLKEYRINISNQNKTSDIKPYERQVNILEKELAALNEQKLKLFDFLERGIYDENTFLERSKNIEERITKTSSGIEKINDIINKEKKVVKEEDVIKFQKLLDGYKNTDDIKLKNELMKKLVNKVEYTKNKRGDTFGIDIFPKLKP

SEQ ID NO: 14229 - protein, 483 aa, synthetic construct
MRVAAYIRVSTDEQADKGNSLPEQKERLEAYCKAMGWNHPTFFPDEGQSAKDMRRPYVQKLIDRVKQKEFDIVLTSKLDRMSRNLLDMLQFVKLLDEYDCHYVSATESFDTSTAVGRMVLQLLATFAEFERERNSERVKDNMLSLARNTNKALTRPCFGLDIYNGMYEINDNESQFVLLMADLAEAGDGYRMIAKKLNERGSCTKAGKPWDQTNIKRVLRNPVIAGNTIYNMRENKNGKTVIRDKEQWIVKENTHPAIIPPERQQRILAILDSRIPANKHADSETYLLTGLVKCGHCGRNMRGNTARYKRPNNKNYDYFRYICSGYAIGYECKHHAVHREDLESLIISEVNKLIESKSDTLDLQITAPRSNASEIDEIKSQLAKVDKRIQKQIEAYENELISAQDLKAASERTEKDRNELLRRLEQGDRRKVSAEELQKSVRALYVDISGADRVRAKNALRQIINRIELLNGEIVNVVWQTHV

SEQ ID NO: 14230 - protein, 522 aa, synthetic construct
MKKIRAALYSRVSTDEQRREGYSLTAQVEILEQYCQRNNIEVYDLYEDGGYSGKDFNRPGIQRLLRDLREDKFDVVLAIAVDRISRNNLDVLTFIDRELHPKGKKLLISTCDIDSSTETGKMFISLLGTFAEYERRLIVGRVKNGMEKRAEEGDWNGGQMLGYNTLNKKLVVDEEEAALVKEIFELRSQGKGYKTIANQLNKRGKKTKMKAPFSTNSIKTILENEKYVGNMTWGKQRDWSEKRRKGTAIPTMVDGKHEAIIDRELWQKVQAVKKAKEESNVSQSNFKGEFILSGLLRCPMCGAGTVMSKKKKRDGLGYHLYYMCQNFHSKGSTVCKSNLMKKEMIEDQIIKAIQLILGSEYVVDEVLGKLNKDQDGSITDLSHDLNIQMMKMKELLDRRKILDTDYYKGEIKVQTYDRLSGNLDEEIFELETVIKGIEREIGKSQTAININKEIIIEALKNFDDLFEVASNEEKRKLMRSIIKEIHVEPDRKKVKDIVFWFTEGDAPLQSALPVSEVGRTVS

SEQ ID NO: 14231 - protein, 519 aa, synthetic construct
MKTRVALYIRVSTEEQAKEGFSLEAQEATLSQHCENLGYIVVGKYIDDGKSGKDMNRPALQELLKDCSQKKFDIVLVWKLSRLSRKLKDTLQLIEDFEKDDVSFLSYSEQFYNSKNNSTNKLMLSMVGGFAEFERSTIVENVKLGMNQRAKQGKWNGGRILGYDIVNKELILNEDEANIIRMIFNMYVNGKGCIYIRDKLNELNLKTKYGKAFTHIAILTILDNPTYKGFIRHGRTTGENKKRIKQENIIIVKGIHEAIIDEESFDKAQQITAHNRRTTPRMPSNPHLLSGILKCPDCGGRMNFQPAGKRNNKNHGGYYTCSNYKNFRTCRPRLFRAKHLERSVLNRIKSIASSTRIIEDIINEMNSNQGIDTEIIKKQITDVEKQIRKYESRMDAIKQQFISGDLTIDEYREFKSELEMVLTDLGCSKETISLEYAKACNTAVDANDVLFVLENFDALMENADVQMKKQLVESLIERIEINLDSTINEFVFNFEVPNPLHPNNQSKSDILICDTVHRD

SEQ ID NO: 14232 - protein, 404 aa, synthetic construct
MKRTTKTIGVSTAKKAVAYARVSTKEQDREGFSIDAQKKLLANYAQANGLVIAKEFVAIETAKLSGRTYFGQMILHLKKHPDIRAILVEKTDRLYRNVKDWVTLDEFDIEIHLVKEGLVLSRDSRSSEKFMHGIKVLMAKNYIDNLSEEARKGMQEKAEQGLWPTIAPLGYRNVLGPDGKKIIEIEPVIGPVVAKMFAWYSDGTLSLRDVAEKARSAGLASRVTGGIVPISKVHTILRNPIYTGEVHWKGRSYPGRHRPLVTRDLFERVQSVLDRRNATKLRRGPRDFAFSGLMNCGHCGCALVGEIKKGRYVYYHCTGYKGKCHEPYVREEVIADKFSELMGRLRFSEKVHEWIVAGLHQSHADERKEHDAAVSRLQAEYDRLTQRLSAMYVDKLDGRIDNAM

SEQ ID NO: 14233 - protein, 431 aa, synthetic construct
MKHKQAEQAPVAPLKYCLYSRKSTEAEDKQALSIESQVKEMQALAERDHLHIVEIKREAHSSKEVGQRPIYNEMLSEIKQGKFNAILTWAPDRLSRNAGDLGSVVDLMDQGKLIEIKTYGQKFTNNPNEKFLLMILGSQAKLENDNKAVNVKRGLRTRCEMGWRPGVAPTGYLNEKHVDKKCQCRIDPRRAPVIKQMFEKVASEQWSGRKVYRWLREINFKTHRGKPLVLANIYIILRNPFYYGDFEYPVNGGQWYTGKHTPIIDKILYDKVQMTLNQNYIPKTESKEFAFTKLIHCGYCGSGISADEKFKKLKDGGTNRHVYYFCTKARNIDCKNPAINEPNLITELIEVMDKVDLDELGIKSRIEDEISRFNKFRTGVLGHKQEKMSLDIDVRNYTKYLLRDGTLMEKRELLSCMKSKLILREKKVCFI

SEQ ID NO: 14234 - protein, 614 aa, synthetic construct
METVGIYSRKSKFTGKGESIENQVQMCKEYINQRLGKNIKIVIYEDEGFSGSTTDRPKFKEMIKDIKLKKINILICYRLDRISRNVADFSNTLEILQENNCSFISIREQFDTSTPMGRAMIYIASVFAQLERETIAERVKDNMLELAKTGRWTGGKIPLGFISERVKYTDDAGLQREYSILKIDKEEIKFVEFLYEKYLELGSLHKLEVYITQNQLKSRNGIMFEKSSLKLILQNPIYVKANYEVITYLKENNWIVYGEPDNKHSLLSYNKTEQSFKNGKHTKVKKSENERFVAISNIEGFIDPNLWLQVQRQFDKNRSKFPRLGKTHNALLVGKLICGQCKEYMLVQHGRVSKTTGKKLFYYTCSLKRKSHKKLCDNNNAKADYVENLVINSLKLLSKSKKKFINQLKISYKNKLKSTKASIEKLSLEKSLSEKKNQIDNLVLALSKSSEIEDILLGKIKSLKNDCIQIENKIKYINSSAEEQKLNNINLDLIDSIIDECSIIDKLTRDKQKRIIDTLIDTIYWYGSGNGKGKIKIKFIGADEDTKEIVLSEEELQPKMLQFYSHSTCKINDFLLSFRKTKKNKGIRKCKIYRSLCRWKRKFYKIFVCSSKNG

SEQ ID NO: 14235 - protein, 470 aa, synthetic construct
MTNNRAAIYARISRDADGRAMGVGRQEEDCRALADRLGLSVVEVFTDNDIGASTRSRKRRRPGYEALLDGAREGRFGTILAYSNSRLTRRTLELEDLIVLHERHGVRIRTVVSGDDDLGTADGRMIARIKASVDAAEAERVSERARRAKDQRALSGTPLGGRRPYGYEPGGLIIREDEAARVREATAEILAGGSVRGLVARWNREGVPTSTGGQWGQSSLRAMLLRPRNAGLMVHRGAIVGAAAWPAIVPEEQWRALVDLLSDPGRRTSPGPERKYLGSGLFRCAVCGGTVVGGHANQLLVYRCRPGCVSRGMLEVDDLVTGVIIERLRRPDFADALAVAAAPGVDVPALELRTTVLRDRLNRLAKGYAAGVIDSLQLAAGSKVLRAELEGVRERIAAAYQGSALSGIADAPDPGERFMDADLARRRAVLDALVVVTLDKSGRGRPKGWAPGDSYFRPETVQIEWRGVTS

SEQ ID NO: 14236 - protein, 502 aa, synthetic construct
MIQAFSYVRFSTKSQATGTSLERQLNASKLFCQQHNLELSSKGYNDLGISGFKNVKRPELDQMLEAIQSGVIPSGSYILIEAIDRLSRKGISHTQDVLKSILLHDIKVAFVGEDAKTLAGQILNKNSLNDLSSVILVALAADLAHKESLRKSKLIKAAKAIIREKAQQGKKIRGHTMFWIDWSESNNKFVLNDKKSIIKEIVKLRLAGNGPRKIATVLNEQQIPSPSGKQWNHMTVKVALRSPTLYGAYQTHQIIEGKAVPDILIKDHYPAITNYETYLQLQSDSSKANKGKPSKANPFSGILKCSCGHGMNFSKKVMVYKDKPHEYEYHFCSASTEGRCPNKKRIRDLVPLLTSLMDKLTIKQTTKKNLNLEEIKLKEQKIEKLNLMLLEMDNPPLSVLKTIQKLEEELNLLLKTTDSPDVSQNDVESLSSINDAQEYNMHLKRIVRKIEVHQLDTTGKNLRIKVLKTDGHSQNFLIKSGEVLFKSDTEQMKNLLKTMKEA

SEQ ID NO: 14237 - protein, 544 aa, synthetic construct
MGKRVALYLRVSTARQAEKDLSIPDQRRQLERYCEQNGWSVVADYVEPGASATSDQRPAFQRMIDDATSPDQPFDVVLVHSYSRFFRDAYQFEFFRRRLEKASVSVVSISQQLGDDPMAQMLRQMLNLFDEYQSKENAKHVLRAMKENARQGFWNGSRPPYGYRTYVVETRGDTAKKRLQIDESEAGIVQQIFEVYLGGNGVRAVADRLNGKGLRYRRGRLFGVSLVHAILTRTAYKGEHVFNKKCSKTKRTKDPSEWVMFETPTVIEPEQFDRVQALLEKRRPSQTPPRVVNGPTLLTGLAKCGDCGGGMTLRTGKGGRYRYYTCNTRATEGTSGCKGRNIPMGTLDAIILEQLENRLFKPNRLKALLATLMDRNRSHLEGLQEQAKTFRKELRATEEKIGRLYDALADGTVENTDGFKSSLGRLDQRREDLLRQVSQLDRRRDMPSLKLTQGHLKRFAEAARAKLHDPDSKFRKDYVRLFVDRVEVDDAEIRIFGSKSALAGAALGMTEPDTDPVPSSVPKWWAQQDSNLQPDRYERPALTS

SEQ ID NO: 14238 - protein, 452 aa, synthetic construct
MMSKIKMFDVVACYKIDRIARNIVDFVNVYDELNKLGIKLISVTEGFDPSTPLGKLIMMILASFAEMERENIRQRVKDNMKGLAKAGRWTGGNVPFGFTSERIEEGGKKATYLKLDESKKQLIKEIFQMYISTNSMHKVQKQIYNTKNIKWSLSTIKNILTSPVYVKADKDVVKYLNNFGEVFGEHNGHNGIITYNRRPYTNGKHRWNDKGMFYSISRHEGVIDSTVWLKVQSIQEKTKVSPRPKNSRVSYLTGILKCTKCGSPMTISYNHKNKDGSITYVYLCTGRKAWGKEYCNCKQVKQTILDKEIENALNSYIELNIEEFKKVVGSPTDTENFNKKILCIEKKIETNKVKINNLVDKIAVLSNTASVPLLSKIEELTKLNEDLKKELLFIQQEHINSSFVSPEEKYERLKQFSTTLSTNNIDLKRELLNFSVQEIKWDSDAECIDIII

SEQ ID NO: 14239 - protein, 528 aa, synthetic construct
MIKRKVTQIPATIDKFTAIPVGSKQKRKVAGYARVSTDHEDQTTSYEAQVDYYTNYIKSREDWVFAGLYSDEGITATNTKHRDGFNQMIADALEGKIDLIITKSVSRFARNTVDSLSTIRKLKEHNVECYFEKENIWTFDSKGELLLTIMSSLAQEESRSISENVTWGHRKRFADGKVSFAYSQVLGLEKDADGNIVVNQEQAVIVKLIFKLFLEGMTPHSIAVRLTNQGIKSPKGKDRWNSGTVRRMLSNEKYKGDVLLQKTFTIDYLSKRTKKNEGEVPQYYIEGNHEAIIEPAVFDLVQLELEKRSRKDTSKYSGVSIFSNKIKCAECGSWYGAKVWHSTDKYRRIIYQCNHKFSGNKKCQTPHVVEYEIKKAFVQALNQLISEKEEVIANIELIRNTVTKVDALEEKLENLRNEIEVIVEMTNACMSENARIIQNQEEYQKRYDGLVERYNKLKVSYDKVEGEIEKKKALSEKLNLFIKVLNDSGDLVTEFDTGMWGSLLDFVTVDKSKMMKFTFKDGTEIEVE

SEQ ID NO: 14240 - protein, 541 aa, synthetic construct
MKTVIYARYSSNLQDARSIDDQIRLCRERSLREGWEVVDVYTDYAISGAVRERPGLNAMLARVAAGGIDQVMAEALDRIARHQADSATIFETIRFHGARVFTVADGEVNELHIGMKGTMDALFRKDQANKIRRGQAGRVAAGRIPGNICYGYRKVVRLNDRGDPELGLREIEPEQAEIIRRIYREFLAGQSALAIATRLNAEGIPSPTGRVWRSTMINGDRVRGNGILQNEIYVGVLVYGRTMMVRDPVSRRRVPKVQPRDKWQRQPVPELRIVDQADWDAVQARRAGTEGWNYRLQRRPKRMLSGLCTCGVCGGAFIITKPDRWGCGEVRSSGNCTIGRRTIHNDQLEARVLHGLQQRLLAPELVSAYVKEYHEQHARQRAQQASEADRLRRKLRDTQGRVDRLVDAIGRGADVEEVVEALKSAKDERQRLEAQLQEIDALPVIALHPNVAGDYRRNVEKLGAALNGGDAARIDAIPAVRSLIHSITLTPEPDGTGFLVDLEGRLANLIGLAMGKKPTTETAGMFLMVAEEGLEPPTPGL

SEQ ID NO: 14241 - protein, 550 aa, synthetic construct
MDTKVAIYVRVSTHHQIDKDSLPLQKQDLINYANYVLNTNNYEIFEDAGYSAKNTDRPGFQNMMSRIRNNEFTHLLVWKIDRISRNLLDFCDMYNELKKINVTFVSKNEQFDTSSAMGEAMLKIILVFAELERKLTGERVTAVMLDRATKGLWNGAPIPLGYIWDKIKKFPVIDDAEKNTIELIYNTYLKVKSTTAIRSLLNANNIKTKRNGTWTTKTISDIIRNPFYKGTYRYNYREPGRGKVKSENEWVVIEDNHKGIISKELWRKCNAIMDENAKRNNAAGFRANGKVHVFAGLLECGECHNNLYSKQDKPNLDGFIPSVYVCSGRYNHLGCNQKTISDNYVGTFIFNFISNILKTQNKIKKLDSKLLEKALLNGNVFKDIIGIENIEDLQNKSYASNVLKNKKNANEDNSFGLEVNKKEKAKYERALERLEDLYLFDDNAMSEKDYIIRKKKIAEKLNEVNEKLKELNTFADEQEINLLSKISSFTLSKELLNAYNIHYKELILNIGRNQLKDFANTIIDKIIIKDKKILNIKFKNNLKISFVHRG

SEQ ID NO: 14242 - protein, 503 aa, synthetic construct
MKRVAAYARVSTDNEEQLSSFDAQMDYYTRHIKSNPAWTFIEVYTDEGISATSTKKREGFKRMISDALNGKIDLIITKSVSRFARNTVDTLTTVRKLKEKGVEVYFEKENIYTLDSKGELLITIMSSLAQEESRSISENVTWGQRKRFADGKVSLPYKRFLGYEKGEGGLPKIVEKEAVIVRLIYKLFLEGKTPSWVAKYLTTNKIPTPGGKEIWRQSTVLSILQNEKYKGDAILQKSFTVDFLTKKKKTNEGEVPQYYVENSHPAIISHEVYDLTQSEIKKRKKVKGYKTSGDCFSGKIVCGNCGSFYGRKVWHSTSKYRRVIWQCNSKFKNDKKCDTPHIYEDTLKEAFLQAFNSILKNKAKILKGYEEIIQALTDTTKLDKESAKLQNELEVVSELLKKCVEENAYTVLDQAEYEERYNSLSERYKAIENKITEINDKCIERNAKQERIEEFIKILEKNSTVLTEFDDELWNAVIEIVKVNSEIDIIFVFKDGFELQWNI

SEQ ID NO: 14243 - protein, 434 aa, synthetic construct
MIRKIRKIQPLIQNLPTKKRVAAYARVSSGKDEMLHSLSAQVSYYSNFIQKHAGWEYAGVYADEAITGTKELRPGFQKLLDQCRNGKIDMVITKSISRLARNTVTMLETVRELKDLNIDVYFEKENIHSVSGDGELMLTILASFAQEESRSVSENCKWRIRKGFANGELLNLRFMYGYRIKKDKIEIEESEAEIVRMIFKDYINGLGSTSIAKKLRKLDVKKLLGGIWNSERVLGILENEKYTGNALLQKKYVVDHLTKKLVLNKGNLPKYYAEGTHPPIIDLESFQKAQEILRENGKRNLGIDTRVKYAFTGKVVCSRCGKNYRHKNIKGRAKWFCYTYFKYGKESCSSKEIPEDILISLTIQTLGIKEFDKNIFEEKIRQIKVLNSRTLEFIFYNGTTVEKQWNYSSRSESWSEEDRQKARERSLEKLDGRS

SEQ ID NO: 14244 - protein, 542 aa, synthetic construct
MAERVYCLYRVSTNKQVDHDENNQADIPMQRKACHDFAAKMGWVIVGEEQETGVSGYKVSADDRDKLQLIKKYAEQGKFDILLVFMFDRLGRKSDETPFVVEWFTKKGVRVWSVQEGEQRFESHTDRLTNYIRFWQADGESQKTSMRTKTAIGQMVEEGRFRGGNAPYGYRLEKSGILNKRKHEVYMLVIDEDEARVVRMMFDLCISSGYGRWRLANFLNDHGIKNRKGQNWHDASVGGILHNPLYKGILRSGETYAGPFEALQIIAPDQFDLAQKLMLERTNERKERRTVPLNTAGQSLLSGNIFCGHCGGRLVLTTNGTTTRLADGTPVHKKRIRYVCYNKTRRRQECTGQTGYTIHILDGIVTEVLHQVFDKMQGASNDMIVGSAVQKQMAMIRSELQRARAENTKANKEYESLKAEVLKAIQGKSALPQDVLTEMLEDTRQKVLSTSERITTLTEELNDGNSKIEEMKAEFNRIVSWSKIFDESPMEVKKMICGYIIKKVSVFRDYRVKIEFNINVEQFLNGIDSINECATYELPMAQ

SEQ ID NO: 14245 - protein, 546 aa, synthetic construct
MTETAPNIIVIPAHPETAKGRAAQRQLRVAAYCRVSTKDEEQLTSYEAQQAYYTDMIMKNPNWTMAGIFADEGITGTSTAKRPEFLKMIRKCRQRKIDLILVKSISRFARNTVDCLGYVRALKELGIAVVFEKENINTMDTESEMLLTLMGAFAQAESESMSANIKWGRRQAMREGKVTFQYKCLYAYERGEDGEPCVIPEQAEVVRQIFDSFLMGHSIRMIKAELEGDKIPAAAGGKSWSESAIRNILKNEIYCGDVLLQKTYVSDCISKRTIKNTGQLTMYLIQNHHEGIVSRDKFNAVQAEFARRNAGRTPNKRYTSTGRSCYSGKYALTERLVCGCCGTLYRRCMWNKRGQKWAVWRCASRVDYGTKYCKHSPTIYEKPLQRAILAVLNSVMSKKEELAGQITDAMRIELLSLPGGTMSMADIDRRLAELEQEFQAMFQRSREKPDGFMEYAESFQRINEEAARLKEQRKYLLDQQQSDSATNGRIAHAMDVLSTGAAEITEWDESIIRQLVDTVTVLSEDRIRVRLYGGIELEQELDKERN

SEQ ID NO: 14246 - protein, 555 aa, synthetic construct
MTRHTRKAHFVPAIEGPLRICSYLRVSTGRQAEGDLSIPDQRRQIQAFCANKGWSVMAEFVDPGASATDDNRPEFQRMIERATDDDHPFDAIVVHSYSRFFRDSFVMEMYERRLRKGGVRLISITQEFGDEPGQVMTRRLYGLFDEYQSHENAKHVLRAMKENARQGFYNGAPVPLGYMLVEVEKRGTKIKKRLTVDAVEAETIKQIFRLYREGDGTSGPLGVKGITCWLNERGYRTRKDARFGVATIHGILTNRVYVGEWVFNRRCSRTLAEKPKSEQVSISVPAIIDLAEFEAVQATLKAHNPRVTPARVVTGPILLTGLATCTTCNGPMTLRTGTSKSGQVHKYYRCSTHGRMGKTGCTGRSIRMDTLDDLVTDRLVAELLQPDRLRETLASLWSQRDEKAAQVDGRVAALRGEVAGAEDKLRRLYRMVEEGMTDLDDILKDRLKTLKEERDRAAAALDRIRVVERPPREIAPELVERFGRLMRENVTAGEIPFRKAWLQAIVDKVEVGADVIRIIGDKANLEAAIVGAGSSTTPGVRSSVRKWRTRHDSNV

SEQ ID NO: 14247 - protein, 515 aa, synthetic construct
MKIGIYPRKSVYRDNSDSVAVQIKMCKDYAGIIFRGEELEFFIYDQDEGFSGKNTNRPSFQQLMQDVKANKLDVVMVYKLDRISRNVKEFSAMYDTMQDHDVSFVSVKESFDTSTPIGRTVMYILAAFAQLERENTSERVGDNMKQLGASGKWTGGHLPSGMTSIRKKVDGKEHSYLIVNQETIGRVKLLYQLILEGYPITRVERYCRDHSITSETGKFLNTSQIYGILTNPVYCQADLQAFYYLHGKGCTLPDKRLFDGTKGLIGYGRTQGTENKKKLDMDRWIIALGIHDYVIPANDWIAVQERLGQNKQVRTLKHEVGILRGILKCRCGRTMQNRVYIKNQRMFAYYFCPARDREGINYCDADFVKIDTIDNLFIDKLKAIRIDEEFVHPQHNQHSVTDINALKKDIRSTESALENLTRQLQENVTSTAAKYIVQQIENLDKKLNTLKNQLQLEELRDNKERSETEEREEIYKNICYLLDNFDDMAYKEKNELIRRTVKRCVLNDKNLEISF

SEQ ID NO: 14248 - protein, 542 aa, synthetic construct
MPSPQPRTAIYARFSTELQHDRSIDDQVALCRAYAQREGLAVVAVHADRARSGGSTMGRDGLQALLAQAREGAIDVVLVEALDRLSRDMEDLAGIHKRLTFQGVQIRAVHEGAVNTVLVGLRGLIGQLYREDNAHKIRRGQEGRARAGLSPGGLPYGYAPVPGEPGKRRIVEDQAAVIRRICADFVAGHNARAIAGALNAEGVPAPGGGKWNASTINGSPARGIGILNNEIYAGRLVWNRVRMVRDPDSGRRLSRPNADGQRSTTALPDMAIVPEPLWQQVRDRLSARAATKPWQSRRPRRPLSGLLRCGACGAGMAAMGSDKSGRTRIRCSGHRERGDCPDPRSYYLDTVERAVLDGLKREMRDPRLIAEYARAYHAERQRLAADTIAHRADLERRLAAIGKEADRVTDWLIKGVGDPARLDARAKQLMTEEVDLRARLADAEQPANVVTLHPQALARYAQQLERLSESLGKAIDLGEHDAAAAIRELVETVTLRRGADGGIEIEVQGRLNSLLLPPPALRAVSGGLPVAEEGLEPPTPGL

SEQ ID NO: 14249 - protein, 503 aa, synthetic construct
MNNRIDAIYARQSVDKKDSISIESQIEFCKYELKGGNCKEYTDKGYSGKNTDRPNFQELVRDIKRGLIAKVVVYKLDRISRSILDFANMMELFQQYNVEFVSSTEKFDTSTPMGRAMLNICIVFAQLERETIQKRVTDAYYSRSQRGFKMGGKAPYGFHTEPIKMDGINTKKLVVNPEEAANIRLMFEMYAQPTTSYGDITRYFAEQGILFNGKELIRPTLAQMLRNPVYVQADLDVYEFFKSQGTVIVNDAADFTGMNGCYLYQGRDVKPSKKNDLKDQMLVLAPHEGIVPSDIWLTCRKKLMNNMKIQSARKATHTWLAGKIKCGNCGYALMSIFNPSGKQYLRCTKRLDNKSCPGCGKIITSELEAVVYQQMVKKLASYKTLTGRKKAAKANPKIAALQVELAHVDGEIEKLVDSLTGANNVLLSYVNVKIAELDGRKQELLARIAELTVEAISPEQVSQISGYLDTWENVSFDDKRRVVDLMITTIAATSDSLNITWKI

SEQ ID NO: 14250 - protein, 511 aa, synthetic construct
MSMKKAIAYLRFSSSVQQYGDSLKRQNRLVTEWLEANPDYLLDDLTYKDLGISAYHGTHATRGAFSDFMVAVEGGYIEYGTVLLVESLDRLSREKIGEATERLKSILKAGIDVVTLSDHTHYTKDSLDDPYSLIKAILIAQRANEESEIKSRRMKSAWKKKREEAEASGKIITRSCPRWLKVSQSGDSFELIPEHVRTIKEIYRLRLKGQSLNGIVKILNDKKVITLTGEIGVWNPSTIEKLLVNKALIGINVPSYRTIANGIQEIADYFPRVISDTTFYAVREFRKPPFGKDKHTDNPYLINLFRSVMKCKACGHSIILNSIDGKGMGYYVCPMRRLHRCNTPSIRRDIADVNLICTVVIHADKFQTNSTIRESTHSLQDRNIEVLKSIDKLIEALQIAPEVTALAEKIKALHKEFKSNEATIRAVKNKQRMAVSEDVTKLDLTLKEDREKCRRFIFKTFKEIVLDTENKTCDICFSNGFKLINFPLSKSISSEQLISALAYSDDSTLIL

SEQ ID NO: 14251 - protein, 481 aa, synthetic construct
MKYAVYVRVSTDRDEQVSSVENQIDICRYWLEKNGYEWDPNAVYFDDGISGTAWLERHAMQLILEKARRNELDTVVFKSIHRLARDLRDALEIKEILIGHGIRLVTIEENYDSLYEGGNDIKFEMFAMFAAQLPKTISVSVSAAMQAKARRGEFIGKPGLGYDVIDKKLVINEKEAEVVREIFDLSYKGYGFKKIANILNDKGTYTKFGQLWSHTTVGKVLKNQTYKGNLVLNSYKTVKVDGKKKRVYTPKERLTIIEDHYPAIVSKELWNAVNRDRESKKKTKQDTRNEFRGMMFCKHCGEPITAKYSGRYAKGSKKEWVYMKCSNYIRFNRCVNFDPVHYDDVREAIIYGLKQQEKQLEIHFNPKMHQKRNDKSTEIKKQIKLLKVKKEKLIDLYVEGLIDKEMFSKRDLNFENEIKEQELALLKLTDQNKRNKEEKKIKEAFSMLDEEKDMHEVFKTLIKKITLSKDKYIDIEYTFSL

SEQ ID NO: 14252 - protein, 523 aa, synthetic construct
MQLDASLTLRDEGLSAFHQRHIKQGALGVFLRAVEDGRILPGSVLVVEGLDRLSRAEPIQAQAQLAQIVNAGITVVTASDGRKYNRERLKAQPMDLVYSLLVMIRAHEESDTKSKRVKAAIRRQCEGWVAGTWRGIVRNGKDPHWVRQAENGAFEFLPERELAIRTMIDLFLAGHGAIEIARILSERELYVSNAGNYSTHMYRIVRNRALVGEKSLTVDGEEFRLAGYYPALLTPDAFATLQEAMSERGRRKGKGEIPNILTGLSISSCGYCGLALVSQNTAIRPAKGRAFTRRLGCSGATFNTGCPVGGTCDSRIVERALMHYCSDQFNLARLLEGDDGAARRVAQLAVARQRAREIETQIQRVTDALLSDDGVAPVAFMRRARELESELEQQHREIEMLEHKIAASNAHEIPAAAEAWAQLVDGVLALDYGARMKARQLVADTFRKIVLFQRGFTPFGNAPADRWKRSGTIGLLLVTKRGGMRLLNIDRKTGQWEAEDNLDLAPHHADEIPLPPTVQRMEC

SEQ ID NO: 14253 - protein, 450 aa, synthetic construct
MKRVALYMRVSTEQQAKHGDSLREQKETLYEYIEQHKDLKVVNEYVDGGISGQKINRDEFQKLLQDVKENKIDIILFTKLDRWFRNLRHYLNTQEILEKHNVSWNAVSQQYYDTTTAYGRTFIAQVMSFAELEAQIDSERIKAVMANKIAQGEVVSGKTPLGYSIENKKLVINDDAPIVIDIFNYFLSSGSLRKTVYYLGSQYGIVRDYQSVKNMLTNKKYIGELRNNKNYCPPIIDKKLFYAVQKALPKNLKTNAKRDYIFKGLLKCSDCQGSVAGQTIKARYKKKDGTESIYERTCYRCVKRRNNKLRCTNKRAFYEKNLERYIFEATKQKFEQIQINYSKKQPKIIKKKNSKKNIENKLDRLKKAYLNEVIDLEEYKKDREALMKELNEIEVEPAKIDIKNVEFILSKEFDEIYKESSKEEKNALWRSIIDNIIVFPDGNITVNFLI

SEQ ID NO: 14254 - protein, 468 aa, synthetic construct
MKRAALYERVSTTTQAEEGYSIDAQINKLTKFAESKDYIVVNHYTDAGYSGSKMDRPGLQNMIQHIKEKKIDIVIVYRLDRLSRSQKDTIYLIDDVFLKNNVEFVSMSESFDTTTPYGRAMLGLLSVFAQLERENIRERIKMTFAERARQGLYHGGSSIPSGYYMENGMLKVNETEAFVVRRVFELYSEGFSYDKIGDYIVDNYSGMFSFSPRSIPHMLRNSIFNQKIKHYEKEYQGVHERIISEELWDKVQARLNRNSKIVRSGNFTFLLTGIIYCAHCGAKMMAMRGPKLKSGKRYGYYQCYSKRGTPKYMVVDPNCPAQKTYRSDMIEKHVIDSLNKLTLEKFEEMIDDTQTDTQSMKKEIEELDKKLDKLIDLYTIGSIPKDMLSVRATDLSKKKASLIKTVNEIENKNIRKKERFALDQTKKIEELKDLDWENTSVQEKRKIIYPLIDKIEVSKTDVIIHWNV

SEQ ID NO: 14255 - protein, 457 aa, synthetic construct
MRVACYDRTSVYEEAKISNDAQYDAVKEYVLEKYEQIPQRFSDKGESGGKADRPAFRQLRAWVCASEEEGVIYVWRYDRLARQAQIALEFIELCQQHQVQVYSISEPLPTSFSHASTNKLFVQLLFTFAEQQRNVIIENVRAGLAYKKQQRQYLSSAVPYGYRLVNGKIQQEAHEAKVVRHIFQLYLTKKYGYKKLCQRLTQQKFFFRERPFQPYHIYSILKNPLYYGEIKGGSLGKYLGTFEPILSKTIFLQAQEIRQSRCTAKKDTYPYLLRQKIRCPFCGRHLSSKYQWNTKKTKTLHYYHCTDRSCQGIFLRAERVESEVLEKIQAFFQHEGVYQALIAQLTQQLAEKRKDEKHKVIQQKKQEAQWLKAFEEGNCSLEELKQQLQALQKPRSTSSFLSLQQCEAKVKEWLQLKDLSSRQLLCDHVCRIEVTKEKTVCGIYFRQLTQNILEGNE

SEQ ID NO: 14256 - protein, 545 aa, synthetic construct
METRPTKRVALYIRVSTQEQALEGHSIQAQEQNGRQFAERMGYEVVEVYADEGISGKSTKNRFAYQRMMNDARNHRFDLLVIWKLTRLGRNMLDVLQTVEELLRYDVGLHSISEQFDVTTSTGKLMLQLLGSFGEFERNQIAENVQMSMQSLVKDKKRYAGGRRLGYVSGIDTNGQKQLVIEPEEAKIVRLIYAKYLGGAGYRAIANFLNRQGYQTVKKNAFSTTAVKDILCNKIYAGYLEYARYINWETKRRKGKNPKPILVKGTHEPIISEEDYQKVQERLALEGKQPKWNHTGENVLTGLLRCPECGAPMAASNVTNTLKDGTKKRIRYYSCSVFRNKGASVCHANSIRAEQAETFVADRLKEIVQLPEVLPRLVAALNEEIVRQSQPLEQELVVLLERKEELKTKIEKWEAALEDSPELFPMLKDRLDELTEKRRQLHIRENEILGIFQQQGEPIQVKDVQRILTSLDRFLAQSEKKQIKALYRTFIEKITFDPNHKEMLEITMKFTPAVVQQLNEQYQIAVSKTKDTAIFVLKTPFTLTI

SEQ ID NO: 14257 - protein, 516 aa, synthetic construct
MANVTKLTNPQPKVQATLQVAAYCRVSTNSDEQEDSLANQQAHFKSYIRKQPNWQLHQIYYDNGVSGTKAQNRAGLQTLLKDCRNGQIDLVLTKSISRFSRNTTDCLRIIRQLKQLDIPVIFEKENINTDSMDSELILSVLGSLAQDESQSIAYNVRLGYQQWASNGVFHYSLPPYGYQKDDKRDLIINPIERKVVLQIFNWTIEGKSPGQIAKLLNRQAIPTKRNGNWHDSTIRGILQNTVYLGTTEFQKTFTDDGYRRHPNQGEQGKIIIEEHHPAIIDQATFTQVQKIIKLKQKFHPQAKNPQPHTFSRKISCENCQKLFKRQNRSDQIYWGCQTHIKHAKDCPVKSIREDTLQLAFCTMINKLIFSRKFLLEPLVEQLQAEQNQEQTAKLSQVETELKETKDKQANLQHLWKQELIEKDFFTKQDVELEQKIADLQSEIKRIKQLLDGQDSKLPLIHELLRLCQRSNYLTAFNIDLFNQLIESITVDQDHNLTFHLKCGLNLTEGSNHHVKT

SEQ ID NO: 14258 - protein, 528 aa, synthetic construct
MAKVRIIPAQVKQGNRNRQIEETEAKLKVAAYCRVSTLYEDQASSYETQVAHYKEYITKNPKWELAGIYADDGISGTDTKKRNQFNQMIDDAKQGKIDLIVTKSISRFARNTIDCLQYIRELKELHVAVFFEKENINTMDAKGEVLITIMASLAQQESESISRNIKIGLQYRYQRGQVIVNTARFLGYDKDDDGNLVINPEQAKVVKRIFYECLTGKSAIEIARELTKEGLKNGIGRTKWHSSGIIKILRNEKYIGDALLQKTYTVDFLTKKRVKNDGQVPQYYVENNHPAIISRALFYQVQKLLDMRREGFTTEGGHHHGYTNAYCFSSIVFCGRCKDIYTRCVWYRPKIGEVEKVNVWRCYSRLHWNHKGKRCMGRTITEADLEEASLKAMNELIQQHQLADKQIAANILKVTKGTTGPSLDDLDQQLEDQQLLLLSMSTHNKNVEQLTEQVQALRKQREQLIQQEIDHDIKRSYLKNIQSFFQTYQGGLTKFDEKLVRLLIEKITIFKSKIEFTFKDGEVITIKA

SEQ ID NO: 14259 - protein, 478 aa, synthetic construct
MNPKTRPRAVLYLRQSVAREESISLELQEDAGRRYAAQAGYDVVAVEADHGISGRTWKRPAVLRVMKMIEDQHADVIILWKWSRLSRARLDWAVAIDKVEAAGGRIESATEQVDVSTSTGRFARGMLAEFAAFESERIGDTWKEAHRRRIEQGMPATGKKRFGYQYDRAMGFTPHPVEGPILQECYRKYITGTSFYEITDYLNAGPAKPGEGYTGPKPGIWSANTVRRVMDNPFASGRFVSKGEVHQGIHEPLIDEETWEQYQVRRKSRRVTRSSTKSTYPYTGLVFCVLCGHGMYAGLFGSNHALKYRCSGASQWKLHPGGYVMSSTIEATLLPWLADLAVEINTATKDRKAPKPRDPTPSLRRALIKVESRLEALTEKLVDGTVPQEVYERMRDQWLGEKKSLEDQLMAARVEARVEPVSLPPDLMEQWGEMPAGVKRELLARVVSRIVVKPGRPRAEVRIVARWEQSALSDGRSN

SEQ ID NO: 14260 - protein, 479 aa, synthetic construct
MRTALYIRVSTEDQAREGYSISAQKDKLQAYCLSQGWDIEDFYIDDGYSAKDLNRPGIKRMIDNIQKGLIDCVLVYRLDRLTRSVLDLYKLLEIFEKHNCKFKSATEIYDTTTAMGRMFITIVAALAQWERENIGERVKIGLQQKVKEGGWHGGIVPYGYRYTENGLEIDEEEAKVVRLIYDLYLSGKGDHKIAGILNRMGHRTRNGNVWTGKVIRDILQNPAYTGDIRYMGEVHQGFMTAIVSREVFEQAQKSRESRRGKHPRRNASTYIFSGVMRCGRCGALMNGKANYSRYKGKRLHYKLYVCINTRTGACDMPLLNEADIEATLIQFLSQYRDDVLSLEVANTMDKKDNIQEEMKSIENQLEQIKNRKRKWQVAYANEVITLDDLRELTQKDNELEKTLRQRYEDLKSQTTEEWKTPELIAAIISDFLNNWAFLTEEEKKECIRIYIKEFFVQASSDRPNQYKKREISISDVEFN

SEQ ID NO: 14261 - protein, 502 aa, synthetic construct
MSREEFIIKYVALYLRKSRGEEDSDLEKHRYILREMCLKHGWKYVEYVEIASSETIEYRPKFKSLLSDVGEGIYDAVLVVDYQRLGRGELEDQGKIKRIFRDSETYIVTPDKIYNLVDDTDDLLVDVRGLLARQEYKTITKNLQRGKKIGARLGNWVNGPAPFPYKYVAAIKGLEVVAEKNVLYQEMKERIFKGDSLESMSWDFNKRGIPGPKGGLWHANSIRRIITNEAHLGKIITNKTKGSGHKKKKSQPLVINPKDEWVIVENCHVAVKTEEEHMRLLSILDKNQIIPDRVKAGTYALSGLVFCGKCKKMMRYNVRTDTYPTNSIKACNKYDHFGNYCSNRGIKISVLTDFINGEIAEYEQRILDTENYINNNLIEQLERTINEKELQLKKLNRALTKIKEMYEMDEYTREEYEERKEKRQQEIAALESELSVHRYEINYDSRKKNKERIKLINSFKDIWSSESTTENDKNMIAKKIISRIEYVFEKGSDELNISIQFN

SEQ ID NO: 14262 - protein, 481 aa, synthetic construct
MITTNKVAIYVRVSTTNQAEEGYSIDEQKDKLTSYCNIKDWSIYNVYTDGGFSGSNTERPALEQLIKDAKKKAFDTVLVYKLDRLSRSQKDTLYLIEDVFIKNDIAFLSLQENFDTSTPFGKAMIGLLSVFAQLEREQIKERMQLGKLGRAKSGKPMMWAKAAYGYNYNKERSELIVNELEAIVVREIYHLYLQGMSITKIRDRINDKYPKKPAWHYRIIRGILDNPVYCGYNQYLNQIYPGNHEPIISEEVYNKTQKELKIRQRTAAEYFNPRPFQAKYMLSGIAQCGYCYAPLKIIMGMVRKDGTRYIRYECYQRHPRKTKGVTVYNNNEKCHSGAYEKHVLESYVLQEISKLQNDVSYIDELFSDPDTASIDRESYQKQIDSLTNKLKRLNDLYIDDRITLEELKEKALEFTTTRAHLETELENDPAIKQQEKKEHMRQVLKAEDILSIDYEQQKILVKALINKVQVTAEAIVIKWKI

SEQ ID NO: 14263 - protein, 569 aa, synthetic construct
MRVSSEQQLSGDGLDRQESMLTRYFDDNASCYDFDPNYELIVDRGVSAFKGHHQRESAGLGGFFKKVRNGEVEKGSVLCVESLDRFSRENPFKCVEYISILDSYQIELHDVDKKLKIGRKYPNSLSFAVMIAERSYEESRLKSVRIQKGWDKRRKMAKEEGQYMIKNCPKWIDVVNDRYVLNENHIVIREIFDLYLSGIGSYTIAVMLNRDNKTIDGMKWNSTKICHVLRNRRCKGEYTSNRVIRNFDDDTVTSTFEILNIYPRIVSDDEFHEVSTRLEKFNYTGRIRHDLKRTVFNSLLKCELCGSALGVSSTSGYTYIKCDNARANGGCTGVLMAYMPFEKAILSHIKDIDISRVINIDSIISNIDILKTEIVELESYIQSFTAGIENLKQQGRLPTFDMLDGKAQAEERLQDVKKTLAAERDTANVSNLEFSSDIHRLENIIERSRLEVELRKVIKRIAVKANKTYITADISYYNDDNIKHILLIHKKKATIEAMGEISQQGRWRTYSFVESGIQVFRVESNGDVWTLSATRNKSINEIQKYMTMMVGREPIDFDYYINEDMIEWI

SEQ ID NO: 14264 - protein, 454 aa, synthetic construct
MKCAIYRRVSTDEQAEKGFSLENQLLRLQAFADSQGWEIVADYMDDGYSGKNTDRPALKKMFAEIDNFDVILVYKLDRFTRSVRDLNDMLETIKGHDIAFKSVTEAIDTTTATGRMILNMMGTTAQWEREMISERIKDVLGKLAEQGIFPKGKPTYGYKIKNGVISIDEKEAEVVKLIFEKSKTLGQHAVSKYLRDNGIYTPSGSTWMSGGIGRIIRNPFYYGEMKVNGKLIAIKNEGYKPLISKEEFDLVNRISKSRNIKNPKRKSDIIYPFSGIALCPRCNKPLRGDRSKVGGKYYTYYRCINTREGRCTMKRIRTQVIDNAFSEYVAGAFNEANIQIDNKDERNALERKIEALKSKIDRLKELYIDGDITKVRYKEQTEAINSEINSTQDKMLSLDDGKITEKAIEKAKELDKVWLLLDDKTKDESLRSVFDTITLEETERGIIITGHSFL

SEQ ID NO: 14265 - protein, 467 aa, synthetic construct
MKCVIYRRVSTDMQVEEGISLDMQKLRLEQYAKSQGWVVVNDYCDEGYSAKNTERPAFQKMIKDMKKKQFDIILVYRLDRFTRSVSDLHSILKIMDEYNVKFKSSTEIFDTTTATGRMFITLVATLAQWERETTAERVRDSMHKKAELGLRNGAKSPMGYDLNKGNLYINHTEAEIVKYIFEMFKTKGIISIVKSLNSRGVKTKRGKIFNYDAVRYIINNPIYIGKIRWGDDILTDIAQKDFETFIDKDTWYTVQQVQDSRKRGKVRLHNFFVFSNVLKCARCGKHFLGNKQVRSHNRIVMSYRCSSRHHKGTCDMPQVPEDVIEKEFLNLLEDAIVDLDDTEEKPIELSNLQEQYNRIQDKKARLKYLFIEGDIPKNEYKKDMLTLTQEENIIQKQLANVTDTASSLEIKELLNQLKDEWYNLNNESKKAAVNAIVSSITVEVTKPARVGKNPIAPVIKVTDFKIK

SEQ ID NO: 14266 - protein, 492 aa, synthetic construct
MKVAIYVRVSTEEQANEGYSIRAQKNQLVDYCRVNEYEISNIYIDEGISAKDTNRPDLQKLLAAAKEGAFDAVLVYKLDRFTRSVKDLYELLEYLSSLGIGFISRQEKFDTTTAMGRAMIGILGVFAQFERELIAERVRFGMEQKVREGKRPGGKVPFGYDKNERLIEEEAEQIRMVRRLYMGGLSYQSVAVRMTRDGHKRRKYDWTATTVMLTLENAYYAGIIRYGTKMPNGKYAWRKKETRVKVLDVEGSHEPIWTVNEYEEHIARMRRRSVGGNGSKHDYWFNGVLRCGRCGAAMYGKQTTRRTLKSGKEVTNSYYWCSRRKDNKSCNMPMFRESHVTHLIMEHIEKIRLDHMAVETEKKSLKKQEDERKQEASRLKRELDKIRARIKKWQYAFAEDLITDSDLKKRMNEEKDLEAQTLSKLHALETSEESDILDRLVGLTEQWTSLDDADKNELITTVFEKITLHTDEVNVKGVKNAFFPASIEVEYK

SEQ ID NO: 14267 - protein, 568 aa, synthetic construct
MGAINKNSFKQLRVACLYRVSSKKQLTDDEIPMQRRACSDFIQSKPEWVFVKEYIEGAVSGFRVSASKRDVLQEAKSDAEKGLYDVLLVFMFDRLGRKEDETPFVLKWFVKQGIEMWSVLEGQQKFEDHTDDLTNYIRFWQSSGESKKTSMRVNENHEQMAEDGLFRGGTAGYGYKLVPSGKFNKKGKEVFKREILPEQSEIVDELYGYGENGLGGKRIAKLMNLERNPFIPSPTGGEWTARAINFILSNPLYKGYPAYGKRRSEMGVFTMQKPEDWVESKKQIPELVIIQEERWDRLQLQRGMRAPKKKSTVERGYHINTSKSPLLLVGMVNCGYCGAPLTTTYNQKKYKLANGTMQVWKAPKYRCSGKASGKDCVGQTLYAQSKIETVVLDEIDQYLEQLKQVDFAKEINSFLKKNVSSDMKELKKFQSELIQKQSELEALTAEVTKSIMGQSSFKPDLLNALMDQKNNELNELTLSIAKIEDKLLAKKIETSEMELLRKTIPSWKEVFDSAPLEKKKMLLAAMIDRVIVKKGDIDITVKLHITQFCNSINGSETDTLGRAHRWQR

SEQ ID NO: 14268 - protein, 519 aa, synthetic construct
MKRITKIEENKVLSVKKKIRVAAYCRVSTASDEQLISLDAQKVHYENYIKANDKWEYSGLYFDEGVTGTKKEVRSGLLSLIADCEKGMIDLVITKSISRFCRNTTDCLEIVRKLLDLNVYINFEKENLNTGSMESELMLSILSSLAESESVSISENEKWSIKKRFQDGTYIISYPPYGYANINGEMVIVPEQAEVVKQIFTDTLAGKSTHTIAKELNELGVKSKKGSKWTSGTVNAIIRNEKYTGDVIFQKTYTDSSFNRHTNYGEQDQYLCTSHHEAIISHEVFNKANEVMSQRGKEKGNGENTQRYQNRYGFSGKIRCGECGSVFKRRIHNKPSGNYVAWCCTYHIEDKDACSMKYITDDSIKVDFLTMMNKLIFSHQVVLRPLLRSLQGLDDKYRLLQIQEYETKLEKNMEQRQVLTSLMASGILEPALFNSENNTLIQEKEMLETEKNKLMHSVSGDRTKFDALEKLIKYVSGSEMLKEYEDEVFLAHVDKITVVSREEIIFLLKCGLELRERMA

SEQ ID NO: 14269 - protein, 521 aa, synthetic construct
MNKSITFIPARKRMGNTVKMEGKPRLRVAAYCRVSTDSDEQATSYEAQIEHYTNFIQKNEEWEFAEIFADDGISGTNTKKREEFNRMIEECMAGNIDMIITKSISRFARNTLDCLKYIRLLKEKNISVYFEKENINSLDSKGEILLTIMASLAQQESESLSKNVKLGLQFRYQNGEVQVNHNRFMGYTKDDEGHLIIEPTEAEIVKRIYLEYLQGASLKQIGESLESDGILTAAGKARWRPETIKKILKNEKYIGDALLQKTYTVDVLTKKRVKNNGIVPQYYVENSHEAIIPRDLYMQVQEEMLRRTNLHSGANRKKRVYSSKYALSSIVYCPKCGDIYRRIAWNNRGKRSFVWRCVTRVEHGPSYCDAPTVQETELQEAVVKAINIALGGKDNMLIALEQNIASVLALEDEGSMESINAKLEELQKELLKRANSKKDYNDLADEIDRVRELKQNAMAENAEREGLKQRIAEMQEFLAEQVEQIEEYDESLVRRMVEKVTVYEKKFSVEFKSGTSVDVER

SEQ ID NO: 14270 - protein, 531 aa, synthetic construct
MKVAIYSRKSKFTVKGDSIENQVEMCKNHIINRIGKNVDFLVYNDDGFSGKNLHRPKFQKMLIDAKAKKFDTLICYRLDRVSRNIADFSNLINTLQNLNINFISIKEQFDTSTPMGRAMMYIASIFAQLERETIAERVSDNMLEMAKSGRWLGGQTPLGFKSKPILYLDYENHEKKMFVLSPIEEELTVVKLIYKSYLKFQSISKVTKYLIQNSIKTKKGKLIWSKRSVKDILNNPVYVRADENVMKFLSNKGINVIGIPDNKHAILTYNKKKGIKKFRQTNEWIASISKHKGIIDSKTWLKVQKIMIKNKSRAPRIGSTQNALLTGLLICKQCGNPMKIIHGPLNKEGKKLFYYKCSLKEKSGNSKCCNSNIRTDEIESVVIQKLHSISINKDILLNSLKNFRNLDENTEIQNIKKIVKHKQAKIDNLIKFLSLSPSISENVVHEIEILNKDIKELNFKLEKIIKTKADFVDNEEVSNLILESLRRVYINNFFSIEEKKLILQKIVDYITWDGDNGIVDIHLINEASFLH

SEQ ID NO: 14271 - protein, 501 aa, synthetic construct
MKPNIKDVAIYLRKSRDDSDGQEDVLAKHESLLLEYAKSHNFKYKIYKEIGSSEYIDWRPEMVRLLTDVEQELYDAVLVVDLDRLSRGDLEEMGRISRVFRNSKTLVLTPSKTYDFNNEDQALINNFEMVFANHEFRMINKRMIRGKKQGTKSGRWTNGRPPFPYVYNRLTKELDVDPDKVKVYELMKKMFLEDMKATYEIAWKLNELGFKTNRNSYWYENTVRRILKNEVHLGKVVYGKTSGSGSKKKPTANGVQIKDRSEWIIAEGSHQPLKTEEEHQRILAILESRRYTPKGTRTNVQVLSKLIYCGKCNRIMSFTGKASGKRYVKTCLTMDRFGNRCHNRSLNVEVIYAQLFLDLEQYEQQLLNHEPKEKQGDSSTLQLALHNKLEELERLEKGIERIKDLFIDEIIDKLEMQKRIEKQKQLMQTKKEEIRSIEQSLAVIENVRTDNDRLHAIREFKTAWDTDGISKRELNILAKQLIDRIEYVREGNNVQINIKFF

SEQ ID NO: 14272 - protein, 522 aa, synthetic construct
MKTMKKRPLYVYTRVSSEKQLTGDGLNRQSKILETVQDYESRYNAEFKALISDAGVSAFSGANSVTGNLGQFIKDCEVGLINNPILVLESIDRLTRMEVDDSRDLINRMFKAGIDLIVQKMSGELLTKKSKSSFSNDLTISIFLHLANMESEQKSKRIKETFKNNLTNKKIKCSNHLPFWIDYRDGEYILNNYVDNLRLIFELRKQGYSVLSIARHLNDNGIKLGAKQRANVSANRIKHLLLRGQAIGQFLRYDSSRTKIIQCIDDYFPPAIELNDFKIVAESFKDSRTRETPSISNVFYGLTYCTCGSTMTAYHSQREDYYLRCKNKTQGVTTQSKKCFNGAIKYKSIIEPCLKLFFNHVSIETILNNNQDTVNIDSLKSSLDDEKKRLSKLKKMFMVLEDDESLLTDLAECKATIKRIESIINEHEQPLQHDVSEWRTLVDHPLTTKDDKIKVNGILKKFVKSIHLQKDGKIGCNATIVFKSGLTTKLYLPSMKHNEERFNTFSAMVTASNCTLPIFDEP

SEQ ID NO: 14273 - protein, 646 aa, synthetic construct
MLRPICYERVSSFDQVITGGGLDDQRSIIEQYLDDNIDKFTKNRIFITDEGVSAFKNANISAESNLGKFLQDVRDRKYGKGDALIVTSLDRLSRRSSWSENTIQFIVVSGIVIYDISTGLVLKDDDSFSKILMEIILQRSHNESLMKSVRAKVAWQNKVMRAVANGGVVSNRMPFWLENVDNKYAIKDEQAKLVVQCFEWYKAGFSTGEIVKRIDDPKWQMVRVSRLIRDRRLLGEHKRYNDEVIPNVYPKIIDDELFITANRMMDTVMTDKKKPAEDLLLEPDVVKLIFTLSETGLGSGAIVKRLPEGWSTVNVLRVLRDKRVVEEKIIDNLTFERVNEKLTKNGVANRIRKDVTIAQDDYITNLFPRILKCGCCGGNIAIHYNHVRTKYVICRTREEKKRCDAKSIQYIRIEKNIISTIMNVDFNNLMNEDSSNGSNVADSLKVELLALRKEESTYQRKISERKTGGKRTSLPLMEGLTDVQDRIDEILELISKSTIAQQPPVLNYDIDNLLDPLNVELRAKVRKEIKQVVSKITYRVIEKYIVVNLQYLTDVLSHVLIIDNKRGGGDLVCQIAIYVKDRITIYETPSFSLTVESEGMPRINFNNSESLNQIDYSLLLNYVDDIEGANTVAEWMRHNMNFLFPR

SEQ ID NO: 14274 - protein, 528 aa, synthetic construct
MNMNNSYEEYALYLRKSRADIDAEARGEGETLKKHQTALLALAKKMNINVSKEYKEIVSGERVADRPEMQQLLQDVEDGKWAGILVMEIERLARGDTMDQGFVAQAFKYSGTKIITPVKVYDPDNEFDEEYFEFGLFMSRREYKTINRRQQAGRIQSVKDGNYIGNVPPYGYSKIRLEDKSYSLMPHPEQAPIVKMIYDMYTTQNMGMGNIAKKLNLLGVPTAKGSLWTVATISGILQNPVYVGDIVWNRRPVKKSRKDGKLLKTRSEVSEAQWIRVPGKHEAIINKETWELAHRILKGRYHAPAPTGVITSSLAGLVRCSLCGRLMVRRPYSREAEPSLICVTPLCKQVSSLFSLVEERILEGLRIWINQYKAKWDNNMPVETEDTEELLNAKSQIVKDSEKNLSELRKQSSALHDLLERGVYSIDVFMERSQNLSERIADAERGLSVANDDLNLEKNRKEAKDGIIPLAEYVLDTYYSIEDAAERNTLLKSVLQGAVYSKEKRGHWSKPETMRKFDLKLYPKLPEH

SEQ ID NO: 14275 - protein, 474 aa, synthetic construct
MKCIVYVRVSTEEQAKHGYSIAAQLEKLEAYCISQGWELTEKYVDEGYSAKDLHRPYFEKMMNKIKQGNVDILLVYRLDRLTRSVMDLYKILKILDDNNCMFKSATEVYDTTNAMGRLFITLVAAIAQWERENLGERVRLGMEKKTKLGIWKGGTPPYGYKIVDKHLVINEKEQDVVKTVFELSKTLGFYTVAKQLTIKGFSTRKGGEWHVDSVRDIANNPVYAGYLTFNQNLKEYKKPPREQTLYEGNHEPIISKDEFWALQDILDKRRTFGGKRETSNYYFSSILKCGRCGHSMSGHKSGNKKTYRCSGKKAGKNCSSHIILEDNLVKKVFHVFDQIVGSINGPTNATEYSFEKVLELENELKSIERILNKQKIMYENDIIGIDELITKSTELREREKKINNELKNIKQNTPKNQKEIEYLTKNIESLWQHANDYERKQMITMIFSRIVIDTEDEYKRGSGNSREIIIVSAE

SEQ ID NO: 14276 - protein, 500 aa, synthetic construct
MKQIEQKEYVAIYVRKSRDDKGDIQETLHNQKMSLINLADNKGYDYDLYQEVESSVDFHRPELNNMINNIKKSKYSRILVTHIDRLSRDERDSAELKEIFISYDILIETPDNIIDLTDENQELMYGFNAVLSAYEYRRIRQRLLKGKLDAVAIGNRWVGSVPPLGYDWDKNKKQLVVNKESSTVKKMIELALAGYSSNQIAFKLNDLGYRTKTGKPFKSDRILRTLKNRVYLGEAKFNYKRMKKSAIAIGCHEPLITEEQYNLIQNLIQSRKSKGSLASLGIKSCLNKILVCGVCGKGLTIQKNKRVSKVDERDLSFYHIRPCLHKVDVNVKCPNRGMKIKKVEDAVQQSLKMYKQELQQTLKQLLDKDITVIEHQIKNNIDSLKKDLVLQQNKNQKLLDLYLASSELTLKNYQEKKAEIDHIIENLEKEITTNNNKLSKINISTQINHIENIISMLDNFRNLELEEQNATLKLIITKVVFTKTAETNFEPKIDIHWREL

SEQ ID NO: 14277 - protein, 536 aa, synthetic construct
MPKAISYIRFSTKSQTIGDSTKRQSKLIHKWLEDNPQYHLDENMRFQDLGISGYSGANAKSGAFGEFLAAVESGYIEPGSVLLVESLDRVSRQDIDKAGEQLRKILRAGVEVVTLVDGSWYKEESLRDSLSMIKAMLVMERAHEESLTKSKRLRSAWANKRKEAESGKIMSRRCVAWLKVSEDGKRFEQIPENVKAVQRVFQLRLDGLSHAKIAKTMNEEGFVTLNQFRSQAGVWSQSTVTELLSNRAVIGFKVPSKSMVVKGVQEISGYYPAILTEEQFYAVQQLKTGAGRRPSSDRPLLTNLFKGVMRCAKCGFIMIVTGVTDKRSGNYRCSMKYEGRCNAKGISRLQTDKALVQGLLYNAHRLNLSSDNSKVIGSLQSELETLQKQRERLVKLAMLTDDTESVAVELRGLNKQIKEAEKAIAEAHQRDQSSKLETINHLDLTVKKDRIEAQIIIKRMIRYISVDTARKVCKIEFHNGLVFHDYPLDRVIDGARDLELLPVMGYTEIRFVKGKHHTPNHVLMADAPQWVKDSEE

SEQ ID NO: 14278 - protein, 559 aa, synthetic construct
MKKAALYIRVSTHHQLDKDSLPFQRQELINYSKYVLGIDEHEIFEDAGYSAKNTIRPAYQNMMSRIRLGEFSHLVVWKIDRVSRNLLDFSDMYQELKNYNVSFISKNEQFDTSNAIGEAMLKIILVFAELERQMTSERVSKVMLDRATKGLWNGAPCPLGYKWDEDRKFPVIDKDEAIVINHIYNVYEETESTVKVMHFLNSNSYKTKRGGKWTTKVIADILRNPFYKGTYRYNYRQSARGKIKKQEDWILVDNNHESIISAEQWEKCNKIMDKNAQRNVAFYRGKPNIHVLAGLIKCGECASSYSSKLDRARENGYRPSTYICLNRNNGLGCKAKILNEMGLGSFIFNYIANIVNVTKSIKNQISINEFEKLLLKGNIFSDVVGLDPKSLEAIYYKYLFSYNSNTIKYSSKKHIVIKKDTSELEYEKNKLIRALERLEELYLFSDNSMSQKKYIVKTRELEDKIKAIDDKISESKVESLGGVNDIEFLKKSSYFIMMNEISNRSADIEYRELDMRINKETLREFILTIIEKIIVKNDRIDSILFKDGLEHKFIYKSYQ

SEQ ID NO: 14279 - protein, 528 aa, synthetic construct
MIAAIYSRKSKFTGKGESIENQIQLCMDYAKNIGITEFLVYEDEGFSGGSTDRPKFQDMLADAKDKKFDCLICYRLDRISRNVSDFSALIEELNKLGVSFISIKEQFDTSTPMGRAMMYISSVFAQLERETIAERVKDNMYELARTGRWLGGNTPTGFTSEKITYFDESMNQRSMWKLKVDKEEMKLVELIYSKYEELKSLSQVEKYFLSSNHKGKNNGNLDKSTLQSILRNPCYAKSSEEVIKYLSNNGMDVVGSPDNSHGFLTYAKQSNTPIVSVAKHKGIIDSDRWFYIQKILDSNKSKAPRVVSGSNVALLTGLLKCRCGSTMRVNYGSKRKDGTRGHYYICAKKNTKGLVACDNKNINGEQLEEVVIEQIKNVNENNIFNKFEESKKATLEKNKNIKSEKKIINKKIEDANSAIENLVKQLSLNTDSVASKYIISEIEKLNQELESLNNKLIKLDNLSKEIDSIDINLNIISDAFIKFRNEFDNADLNTKRFLLSSIIDEIIWDGDTGNINVCYLGTKKKALI

SEQ ID NO: 14280 - protein, 547 aa, synthetic construct
MTTTTDVPGLVDPWNEDTLDALGWGEAEILELRDLKRRAALLPANATRALLSLRLSVLTEETTSPVRQELDLYRMAVERNSRPVGVARDLGVSATKVPPWKRKELGDWIKNRSPEFDEILFWKLDRFVRRISDLHLMIGWCKEYEKTLAAKHDPIDLSTEFGQFMVTIIAGMARIEAANTGVRVESLWQFARSSRRWVIGKPVYGYTTEKDAEGHRILVIEPTQARVLRWVYRAVTRYKNPISLYRACKILTRAGILPPNKGAWSSGNLKVILINPALMGYRVYRPKGLKQGKPSLISYDTDGTPIKIAEGIFTPEEFANLQKVLTDRANKGIKTQGKNATPYLDIMKCGRCGSNWYLSQKTWTLRDGTKKTEPRLRCASFVGGNACGMAAFHEPDKVFSLVKDTILEDIGDYEVVHREYAKGSENLARKLELEASISHYMKELEPGGRFKVGGFIERQAMETLTSINNELEQIDPDSVEDRWIYESKGMTYRAHWETEGRVKMEEDLRRAGITFVIQEDGYGDLLIPEDVKERLIVRRDYFQEQKI

SEQ ID NO: 14281 - protein, 542 aa, synthetic construct
MTRVALYARYSSDRQNERSISDQVNVLIQHAAAKGWAVVGTYTDAAISGSAMANRPGLLAALAAADRGEFDLLLAEDEDRLARNLEHLAHVANRLADIGAGIATLSTDRVQDMHVAFKGLIAQDFIRNLSMKTKRGMASNAEKGLATGSRLYGYRSQPGGAVEIVPDQAEVIRRIFSMYVNDRMSSREIAERLNRDRIPSPAGRQWNASSIQGSRQRANGVLHSEIYAGVKVYNRVEMRKDRQTGRKITICKPPSEHKRIDVPHLAIIDQDLWKAAQQRLDSRQTTDPSQRASLRRRPGLLSGLTKCGRCGASYTSLSQGRLVCAAYREKGASACDNNRHVNRAEIEQRVLDGLRTRLVAPDAVAAYVRAYHAAWAEQAAQVEDRRRPLTRRIAEVERAIERGADALLSGATAAAVIGKKLEALEIEQAQLKATLEQLDAEGAPPVQLHPRAAENYARKIEQLQARLAEAAGSSDDADRDLIGSVRGLIQKVDIEPINKSRGSPVRVTLHGDLARFVLPQHPPSSGCALVVGGGIEPPTCGL

SEQ ID NO: 14282 - protein, 587 aa, synthetic construct
MTRTALYARYSSDMQSQTSIDDQFAICRDQAVREGRRIIGTYQDAAISGASVILRPGIQSLLQDAQLGKFDTILAEALDRISRDQADVATLYKHFQFAGVKLITIAEGEISELHVGLKGTMNALFLKDLAKKTHRGLRGRVEKGKSGGGLCYGYDVLKRVDASGELVRGERSINEAEALVVQRIFREFSNGKSPRAIACDLNRDNIPGPFGKQWSDTTIRGHAARKTGILHNELYIGVLVWNRQRFIKNPSTGKRVSRPNPESEWIRKDVPEMRILTDELWQAARQRAEEIGERYKAVADGLRASKGKRLRDLHRPVFLFSGMIECGVCGGNCTIIVNDRYGCNNHFRKGTCGNNRTIRREVLEKRALNGISDRLVSADAVKQAVASYIEQINAANREQRAQAELDRRSLDKVERAIAGILSAIEDGMYQPSMKARLDDLERQRDDLQHRNVEHSVAVPDIHPNVAELYRRRVAYLIDALKNPALRDEVAQDIRSIVGKIIISPGPDRGQVYAELCGELMGILNAVSKEGGGGGLLYQRGLRPPATTNLARFLNELAGFLLSRNNGSFSRRRNVQYGVVSGHPISSC

SEQ ID NO: 14283 - protein, 419 aa, synthetic construct
MKRVISYIRFSSEKQSRGDSLRRQSKMVTDWLKAHPEYYLDQDLSFRDLGVSGFTGKHLKGGLGDFLTAIEKGLVKAGDTLLIESLDRLSRQNVDRASELLRNILRSGVDVVTLSDGEHYTRESLKDPLALIKSILIMQRSHEESLRKSERIQGAWNRKKELISEGIKISKRCPAWLKLNDDRKSFSVIPEKVETVKRCFQLRLEGKSIWEIVRTLNDEGHQTLNQYKAGKFGQTSVQDLLKNRSVIGYFTPKGCEEISGYYPAIIDETIFYKVQQLSYSRYGRKPASDKPLSVNLFKGVIRCSECGHALIITGFSDTRNGIYRCPLRNENRCSAKGLSRKQTDGTLLTLLSRLDRFDSDTTNIIDMLRLHREHISSNIEKLVQLSLEIEDLSAAYFHERRSLNNFHRDRVITFEQIAE

SEQ ID NO: 14284 - protein, 538 aa, synthetic construct
MAKVLKKVVVVPVRTIDSVDGIPQIQKKRVAAYCRVSTDSEEQKESYTNQVNYYTSHIYNNAEWEMGEIYADEGITGTNTKNRTQFNRMIQDARNGKIDLILVKSISRFSRNTLDLLKYVRELKGLGVAVLFERENINTLDTTGEVLLTILSSLAQDESRNISENSRWGILRGFQNGKVFCNTTRFLGYDKDEHGELVINEQEAEIVRRIYEEYLDGKSYQAIADGLMRDQIKTATGGDTWWDSSITLILTNEKYYGALLQQKTVTVDFLTHKRIKNRGQEQQYLIEDNHEPIVSKEMFDSVQKEKDRRARLKGNVIGDRKKYSSKYPLSSKVFCGCCGANFKRRTWNSNNPSKKVVWQCRTYVNEGKEVCDAKSVDEQGLQNAFVRVFNRMYENKEAFIQTLKANIESVLTKRAGQEPLLEIARHIEQFKSDLKGLVNLKLRNQIDEAVYNEENVRISGELNELRQQKILLEKDNDRKTQIKDRVDEMIQVLSLRQDVLIQFDDNLFNALVEKITILSPAHFIFTMKSGLNIDEILD

SEQ ID NO: 14285 - protein, 540 aa, synthetic construct
MAQAATAKKVVVVPIKTMDIVEGIQFIQKKKVAAYCRVSTDSEEQKESYSNQVNHYTQYIQNNLEWEMADIYADEGITGTSTKNRTQFNRMIQDARNGKLDLILVKSISRFARNTLDLLKYVRELKSLGVAVFFERENINTLDTTGEVLLTILSSLAQDESRNISENSRWGILRGFQNGKVFCNTTRFLGYDKDEHGELVINEQEAEIVRRIYEEYLDGKSYQAIADGLMRDQIKTATEGDTWWDSSITLILTNEKYYGALLQQKTVTVDFLTHKRIKNRGQEQQYLIEDNHEPIVSKEIFDAVQKEKERRAKLKGNVMGDRKKYSSKYPLSSKVFCGCCGSNFKRRTWNSNNPSKKVVWQCRTYVNEGKEACDAKSVDEQGLQNAFVRVFNRMYENKEAFIQTLKANIESVLTKRAGQEPLLEIARHIEQFKSDLKGLVNLKLRNQIDEAVYNEENVRISGELNELRQQKILLEKDNDQKTQIKDRVDEIIQVLSLRQGVLIQFDDNLFNALVEKITILSPAHFIFTMKSGISIDEILD

SEQ ID NO: 14286 - protein, 522 aa, synthetic construct
MGVNQHKELTMADSAQCDIYLRLSIDREGKDSLERQESDLRDWAAREGMTVRKVWKDPGKSGYKPGVQRPDFDAAVAAVTSGEVAILGVWKLDRLSRRGAGQVGTVLDALDEAGGRIVFLKDNLDSAVANSRMLIVMLSELARAESASTSLRVTAKKEHQRKQGLYLGGTAPFGYTVGADRKLRQHPTEAPLLREACDRLASGETMLAICRDWNDRGVPTRRGGKFWRASSLSVAIRTPSLSGLVPAHKEARAAGYEGGDIHPWRHPDTGETVSLLAEGESPIIAEGERQALLAELDSRLRRYGRGMRAVKQPETLLGGGMLRCAECDRSCNSFGNSYRCRRRDHTSAGCEAPVNVRIPTLEREVKRVWAYGLAALEPDDPILAAVADRWLAKHDPASRTERDALLSELATLRARLDAADADHYVRATLSADRHATITALLEDRIAHATRTLATMPVPEADLGVLLDPELSLPAIEAAPVLEARKLLRLAIDRVIVSAAPYSGARFIARDRMRIVWAEGDAA

SEQ ID NO: 14287 - protein, 538 aa, synthetic construct
MAKNGARVYSYLRFSDPRQSTGSSADRQLQYAQRWAAEKNLVLDASLSMRDEGLSAYHQRHVTQGALGVFLRAIEDGRIASGSVLIVEGLDRLSRAEPIQAQAQLAQIINAGITVVTASDGREYNRASLKAQPMDLVYSLLVMIRAHEESDTKSKRVKAAIRRQCEGWQNGTFRGQIRNGTDPIWLTWTGSEWQFVPERVAAVKRALQLYQEGNGAVRIVRALHDEGLVYMKKGATTLQIYRLIRLQALRGAKTLTIDEEQFVLEGYYPRLLSESEWADLQQLTGERFRRRGHGEIPGIVTGMGITYCGYCGTVLLGQNIMGRPRKADGLVADGHRRLHCLEYSRDAGCPASGSISVVPIERALLSYCSDQINLQRLLQEGDGGQGVRQQIVLAKAKIEKITAQLDKITDALLADDDAPPVAFIRKARELEAQQAELKTEITRLDGELIKVARAAQPAKAELWSELAERALQQDTDAREKVRQLVMDTFQRIVIYMRGIGSSDRKSSVIDVQLISRTGQNRVLQINRRSGAWVASEDW

SEQ ID NO: 14288 - protein, 474 aa, synthetic construct
MRIALYIRVSTDEQAKHGYSLDAQKEKLEAFCKSQGWGNYETYIDDGYSAKDLNRPKFNLMKDAIKKGTIDVLLVYRLDRLTRSVIDLYEILKMLDENGCKFKSATEVYDTTNAMGRLFITLIAAIAQWERENLAERVKMGIEKKVKFGKWPGGLPPYGYVYKNDELIINPEEAKVVKLIFSMAKTLGFYTIAKRLTETGYSTKNGGQWHVDTVRGIANNPVYAGYLTHNDSPKAAKKPPREQALYEGEHERIVLRDEFWQLQEILEKRRGAGGKRETSNYYFSSILKCGRCGSSMSGHKTPAGKTYRCSGKKAGKSCTSHIVLEKYLVQKVFESFDDLISELSPQADVATNPLDEKIKELENNLANIEKKLEKQKNMYERDIIDIDELVTKTEKLREEEKEITSQLRAYKKSADQSEDITYIAENISSLWEIANEYERKQMMTTLFSQMVIDTKDEYKRGTGKPREILILSVK

SEQ ID NO: 14289 - protein, 531 aa, synthetic construct
MQNAKSSSNRNRKKNKRRTRAYVRVSTLKESQKDSPEHQEALIREEVAKEGNTVDHVYLDRDTATTIMGRDDVKRMIQDAKHGEFDEIWFASLSRFSRDTLDALSLKRILVNALGIRVVSIEDMYDSGKEDNEMIFGIISSVNQKQSENISVSSKRGIRQSALKGNFTGSIAPFGYKKIKIDNRKTLEIIPEHAEIVERIFNMYIREGMGEKTIVNTLNEEMVPSSTGKLWGVSSIQRILQNENYTGYVVSGKYESQQFYDDIEDLQNRSKRLVARDPDQYDRSESPVHPFIISEADFKAAQELRLLRGGGKRGGRRAYQNAFAKIVFCKECGCAMVTMKGKSRDGGKEYRYLMCSKRRRQGEQGCNNGKWMPYFELRDQIIEKTISRIHELINMKDVQRQLGDSAGFDDVDHSKQLKKLEKQISDSRKLLFEIRRQHMLEGISSEQYEFEKEMYEKEIEEAEVRLRSVNKKADEHKDWETLKRGLLEALYSLENKNNYDDAVGTRNMLIRLIDKIVIDKAGRIELHTVLG

SEQ ID NO: 14290 - protein, 559 aa, synthetic construct
MKGKIALYSRVSTSEQSEHGYSEKEQEQLLIKEVMKNFPGYDYETYTDSGISGKNIEGRPAMKRLLQDVKDNKIEMVLSWKLNRISRSMRDVFNIIHEFKEHDVGYKSISENIDTSNASGEVLVTMFGLIGSIERQTLISNVKLSMNAKARSGEAITGRVLGYKLSLNPLTQKNDLVIDENEAHIVREIFDLYLNHNKGFKAITTILNQKGYRTINQKPFSVFGVKYILNNPVYKGYVRFNNHQNWAVQRRSGKSDKNDVILVKGKHEAIISEDVFDQVHEKLASKSFKPGRPIGGDFYLRGLIKCPECGNNMVCRRTYYKTKKSKERTIKRYYICSLFNRSGSSACHSNAINAEVVERVINVHLNRILSQPNVIKQIASSVIEELKQKHSKQTEIKYDINSLEKQKAKVKTQQERLLELFLDDEMDSEMLKAKQSEMNQQLEVLDQQIKEAKQANQSQDDIPNFDKLKARLILMITRFSVYLRKATPEAKNQLMKMLIDSIEITKDKQVKLVRYKIDESLIPQSLKKDWGSFFIPKFNFVINVTKKNRIENLSLLPLF

SEQ ID NO: 14291 - protein, 536 aa, synthetic construct
MSTITKIQSYHRDAKQLRVAAYCRVSTDTAEQLESLENQREHYQKYISNQPNWQLAKIYYDEGISGTKLTKRDALKELLADCHNHRIDLVITKSISRLSRNTTDCLRIVRELQQLNIPIIFEKEHINTGAMASELFLSILSSIAQDESHSTAGNLRWSIRQRFASGEFRVSSAPYGYSIEDGNLVIDSVEAGVVREIFQQFLSGMSASQIAKGLSHKHIPTKRGGQWRSNTVINILRNCNYTGDMLCQKTYRDDQYHRHFNQGELTQYLIEDHHPSLVNHETFNRIQALLKEAAQKRHIETDSHKYQHHYLFSGKIICGNCGTTFKRQTRPNKICWACQRHLKSAKQCPIKAVPEASLEVAFCNMMNKLVYSRKFLLQPLLENLQVQVNSDTHGRLNSLTERIKANNHKAETLTELMQSGLIDKSIYVNQTAQLEQDTYQCREKAKQLHSRNTDSANSFEDVRSLLHWCQQDQELSGFDKTPFQDFVQQIVVHSSIVVFKLKCGLKLTEKLTKAVTINNHFYRNIIRQRFNVSTPY

SEQ ID NO: 14292 - protein, 546 aa, synthetic construct
MLRLAVYARVSSDDQAERGTIENQLEFARKYADLHQLEIVKWYKDDGVTGTVPLEARPAGRELLQDAKNGEIDLLLIYRLDRLGRSARIILNSVHDLESDGVKIRSMTEPFDTGDPSGRFLLTILAGVADLERETIIERLWYGANRAARAGKWLGGIVPYGYRVDSEGYLVVCEELLPRSDMTEAGVVRLIFHMVANQGHSCIKVSEYLNALGVPTAYARDDRKVTRGKRKQKTAGIWRPSRIRGIITSTTYYGLHIYGKRSKRKRDLIEREVPAIVDIETWEKAQAVLRSNQIEAMRNTKNQYLLRSLLKCQCCGLTYVGIHYPGSKRALKGFYVCTGKQAFKGPMQGKCTSKNLPQDWIEDLVWRDCLSFINQPGEALQEIAAAREVKQTKKVDLESEITLIQKSIDDKDVERQSILDLFRKSIITFTDLEKQIQKINQEKEILEQRLKEIRSSLQVDHDYSTKMMNAFQLLTSLRNKLDDNPSFETRREIVKALVERIQVHTTPSEGSKRPRASVTVQYSFAKDIIYTDKDYTNQLTETEQER

SEQ ID NO: 14293 - protein, 505 aa, synthetic construct
MVAKADETPIGKMKVAIYIRVSTDMQVEDGFSIEGQRTRLNSYADSQDWEVYDTYIDDGYSAKDLKRPAMIRMMEDMEEKKFEVILVYKLDRLTRSVGDLHGLLNTFDRYGVKFKSATEIFETTTAMGRFFITLVGAMAEWERGTISERVRFGVEQMVAEGRRPGGVLPYGYTQEGELIPEEADLIREVRDLYMSGMGYKTIAMKMNREGKSRRDSEWTSATVGYTLENPFYAGIIRIGSKTPEGSYVNTRRSERVKCIYGKGSHVSIFTDEEYDEIKQFMKRKTHSGYSQIKTYWFSGVLRCGRCGGAMFGHLSTRRTTTKGVVRTPYYICSRKHHGDKCDLPTFRQNHVEYLIMDYINRVQEDTDKLKSASLEMIADEGKKTTEIDKAKRDLIKIADRREKWQYMFVEGLISKEDIRHKMAEEDVAEQEARQRIANNQKSLSGIPRVTELAGLAEAWEYIDDDEKKEYIYTIFNRIEINTDLTKPKGVKNKFFDAYIQDVSFN

SEQ ID NO: 14294 - protein, 525 aa, synthetic construct
MLALADLIKPGMRGAFYGRHSTDKQTMETQRSMAYEFAKKYGCTITCEYEDAGVSARKKKLDDRDGISLLLKEAIDRKFDFVLINHHDRIARNPMEHQMIRMILAGYNIPVVISSSESLYDSGDFIVDLIKDGTSKMEVDNTRIRTRDTSKSILLKGKWTGGKAPFGYRYDKINKTFSQCEEELTIVRSVYKLYRNREGFQSISRLISHEFGKTINKATVRWIITNPFYAGYMSHHRKSEHSRNSITPIENWLMIRSDLIEPIMSLDEWKETWAIFEQRKTGNLNPKMYKTSFFLSNLLNCSVCNSILIGKDQTTFDVKRNKHYGKKWYFCPTCKYKIESYRMHNVIDALLNDLKSQNLKTVGLLVYDELLKERQLITNRLNSTKIELNRAEHQLQMAEDQSKHLASLMKDLETIDDNTKMVQILTLQKQHLLTRIKELKIEINQLDKTAQYLELIEGNEDEITRNIKSISITTSKDNNNDIRKMITYLVVQATFTPKTIDSKNVVTLGDIAIQTRSSLVRMTIS

SEQ ID NO: 14295 - protein, 492 aa, synthetic construct
MSGKQREDETFNLRFVAVYCRVSTDEQAREGVSLDEQQERLTAYCRAMGWTDQVQLFIDDGYSAKNLDRPELKRLLNAVKSGSVSRIMVTKLDRMSRRLLDLLNIIDMFQNFEVSFVSISESFDTNTPSGRLTLQVLGAVAEFERERIRERVFENMFHAATTGKWLTQSPYGYDLVDKSLVINEKEAEIVRRVYDLYLNEGLGFYSIAKRLNEEGIPSRQRKEWSIRAIKLMLTNPAYKGTLVWNRIDSSKSKRKDKDESEWVNVEDCLPVIIEKPLWYRVQKRMGQTTMAPRAQTSPHLLGGMLRCGNCGSGMSIGFSGSLARRYRVYRCSANKNKGTCMSKQYRADSVEEWFKEGLLKLVEDNSRLLMVLAKDSLVKDEREQLEHKANTAKARYKRKIEAYTSGLIELGDLNEEKTKLDEILSDLERMSHSEVKTVNMDQVQKELNDKVNNIISAIELLPVEQAKGIIQTLIQYVIVHGHEDIEIKLQPL

SEQ ID NO: 14296 - protein, 555 aa, synthetic construct
MLMTSDKVRRVAIYVRVSTEEQAEHGYSIDAQLKTLTDYSKLYNYEIYREYVDRGISGKSMDNRFELQQMLQDAKNNLFDTVLVWKFNRLARNAEHLSQIVNILNKNNVAFMSMTEQFDTSTSHGKFMLHIMGAVGQLERDTIVDNVKMGHKQRARTGKHNGKLPLGYRSVEDIVNGVRSRESKVEIVPEEEVIILKIFERFATGRGFKSIANELNHEGYVTRSGGAFSISGVKEILDNPFFVGRIRYGRYENWSEKRRKGLNTILETFDGIHPAIVSEELWSKVQYLRKKKSVVSLKRFDGEFLLTWLIRCPKCGAPMVANRTQNRKKDGSKVTRLYYSCSNFRNKGSKVCSANSIRKLEAENYVIERLKEVLAKPQILKAIVKNINERKTKRVKPLEQELEHILVKITELEGKRRKYFDMYEMNGLDKTMFSKRLDDIGGELERLHVKKAGLAAEMKDDHVEPVSYEVVRALLNKFDKLLDSSSFDQRKTLMHLAIKQITIKDSKTIDQIDMNFDENTLHHFLNADPSVPHAEGSFAVHMKREIQGQSISIAI

SEQ ID NO: 14297 - protein, 524 aa, synthetic construct
MESTVALYIRVSTDEQVDGYSIDGQMDMLKAYCRQHNLTIYKSYIDAGKSAKSIQGRPLLQQLLVDAQQGCFQNVLVWKLNRLSRNHSDLLQMVKIFNKSNVGIKSATEDINTDTTMGSFVVQVLSAIAELEREQICDNVRLAVQERNRQGCWNSGNMVLGYRWHKNPDPGQQQLEIVEPEAELVRTIFTMYADGLGYKAITNRLNAAGCLTKKGLAFGIAAVRGILTNPNYIGKIRIGTSQRHTGAEVQLIEGEQEAIITLELWEQVQANLRSRSNLTSKTIKRHFPLSGLLKCPECGCSMVAAHTKSFNKNGTIRKNYYYVCSLYRSKGSASCSLNAIRADNMDCWFSQQMQELVTKPPLLNQIIAAVNDKRDLSRKPLEDEKRGLTKELAAFDQRQQRCFELFEEEHIPQEVLVTRLKELEEQKAVKQEALRGIEEKLANQQIQLVDSNKILTALKNLWAMVQISPHEQQKKLFKSLFDKITLPPDKDISKAVLHGSASLNHILFTNNMEELQCKINSKSV

SEQ ID NO: 14298 - protein, 510 aa, synthetic construct
MALHENSRIAVYSRKSREDRDSEDTLAKHRNELEYLIKRENFKNVQWFEEVVSGETIDERPMFSMLLPRIENGEFDAVCAVAMDRLSRGSQIDSGRILEAFKQSGTLFITPKKTYDLSIEGDEMLSEFESIIARSEYRAIKRRTINGKKNATREGRLHSGSVPYGYKWDKNLKAAVVVEEKKKIYRMMIKWFLEEEYSCTVIAEMLNELKVPSPSGRSIWYGEVVSEILSNDFHRGYVWFGKYKKSKNNNSIVQNKNLDEVLIAKGHHETMKTDEEHALILNRIEKLRTYKVAGRRLNMNTHRLSGIVRCPYCHKAQAIEQPKGRKKHVRKCLRKSAERTKECEQTKGIHEEVLFQSIMKEIKKYNEALFSPTQQDVNDDSYTTQLIGLREKAVKKAKGRIERIKEMYLDGDISKTEYKEKLKISQETLQKAENDLAELIASTEFQNALSAETKKEKWSHHKVQEMIESTDGMSNSEINLILKMLISHVTYTVEDLGDGTKNVNIKVYYN

SEQ ID NO: 14299 - protein, 530 aa, synthetic construct
MKTCIYARRSTLKQGQAETIENQIKICERKAKELGLTIVDIKTDSASGTDDNNRPEVKELLKGAINKEYDCVIMKGISRIYRKTSKGLELIEKLDRHGVRVITVEEHFDSHARENRNGIGNLDTSRITMYLMFAEKESQKLAERIKFTQIEKAYAGEWNQASNAPIGYTYDSTTKKLNIDNSKSYVVRKIFKLYEQGMGMKAIAHYLNGDNPDKKTYPSSKGGRWSEYTVGYILKNRAYVGDVVYNKRSKKERPYKAPEALGKTSDDICIINDYNKEEDWIIAENAHEPLIERELFDKIQTMISTKSRRKGIRSNTSLFAGIAKCAKCGTGMTFKRGRKNSLGQVVSKDNYYCMNYIRYGKQYCDSHHVGARELQEAIFSDLEHILNSKDKLQRVLDKNKIVMSLDEKKAKERIVGIQKEMDSLIKKMDKLLEKNLAGDISDTQYKTFNEKYSAELDNLTEELKKARLTIANMSEQADNEMRFRQKLSNAIGIRNRAIEEQRHILLGLIDSIVINGNDIEDIVYKFERVD

SEQ ID NO: 14300 - protein, 521 aa, synthetic construct
MKKITKIEGNMNNSFIKAKTRVVAYCRVSTDSNEQLVSLQAQKAHYETYIKANPEWEYAGLYYDEGISGTKKENRSDLLRMLSDCETGRIDLIITKSISRFARNTTDCLEMVRKLLGFGVHIYFEKENINTGSMESELMLSILSGLAESESISISENTKWAIQRRFQNGTFKISYPPYGYQNIDGQMIVIPKQAEIVKYIFAEVLSGKGTQKIADDLNQKGIPSKRGGRWTSTTIRGILTNEKYTGDVILQKTYTDSHFNRHTNYGEKNMYLVENHHEAIISHEDFEAVDAVLNQRAKEKGIEKRNSKYLNRYSFSSKIICSECGSTFKRRIHSSGSRKYIAWCCSKHISNITECSMQFIRDEDIKTAFVTMMNKLIFGQKFILRPLWQGLRNQNNAASFRRIEELETKIENNMEQSQVLTGLMAKGYLEPALFNKEKNSLETERERLLAEKDQLTRSINGNFAKVDEVDRLLKFATKSKMLTAYEDKLFEDYVEKIIVFSREEVGFELKCGITLRERLVN

SEQ ID NO: 14301 - protein, 523 aa, synthetic construct
MAVSRNVTVIPAIKRVGNNKNSESKPKIRVAAYCRVSTDSEEQASSYEIQIEHYTNYIKKNKEWELAGIFADDGITGTNTKKRDEFNRMIEECMAGNIDMIITKSISRFARNTLDCLKYIRQLKDKNIAVFFEKENINTMDSKGEVLLTIMASLAQQESQSLSQNVKLGIQYRYQQGEVQVNHKRFLGYTKDENKQLVIDPEGAEVVKRIYREYLEGASLLQIARGLEADSILTAAGKAKWRPETLKKILQNEKYIGDALLQKTYTVDFLSKKRVKNNGIVPQYYVENSHEPIIPRELFMQVQEEMVRRANLRGGKGGKKRVYSSKYALSSIVYCGQCGDIYRRVHWNNRGYKSIVWRCVSRLEEKDSECTAPTINEETLQTAVVKAINELLANKEPFISSLQKNIATIFNEENDHTTDDIDGKLEELQQQLLIQAKSKNDYEDVADEIYRLRELKQNALVKNAEREGKRQRIAEMTDFLNEQSCELEKYDEQLVRRLIEKVTIHDDRIEVEFKSGISKDIEN

SEQ ID NO: 14302 - protein, 686 aa, synthetic construct
MRKELPQGLDVDAPFRRRRSETVAERRARQKRPRVNLGPPEPLVERVALYLRVSGERSVESNLSIPDQQAQLEKYCRAKGLQIVQTYIEPGRSAKSTARPAFRTMMLDAQAEVKPFDKILVHNTSRFARSTIDFELCEQILHRAGIQVLAVSQTFARDVGGWVAKKVTTLFDDYHSKRSAVDSVRARRRMVMEGHWPGSTPPYGYKLVPASANSKRRVLALEEAEVTLVEKVFSLVRFGDGESAPMGVKSIAEWLNVRGYRTRYGSRWSVQAVHRMLTNSVYYGVYYWGVSAQEREYQELEEPLPLNAPAIITREEFDAVQETLELRDPKMGAPKLMSSPLLLAGIAKCKCGASMTLGTGTGKSGRVYRYYRCSSDARGQRKCSGPRIREDDLNQVVRDVIRDTVLQEQRLSHLLQSLQHRWTLRRQDADGKIQELRGQIKTAELAFQGLLQAVQTTPSINTQPVFQAELMRVSSELERKRTLLTEALSIDSEFGEITPQRISYFKHEMENVIFGENEAVAKIYIGTIVECVVVGERFITIYGRDEDLRRAILDTTEGDKLSGPGVRRYVRRWRRGWDSNPRYAFDVYSLSRGAPSTTRPPLRCGLIISDAGRLQGLFEPADELPAEGACVRPEAGLNSRRSRLPPGCRGRSARRGCVMRRQIPPRPIRQRRSGHQGRCSAGSAPR

SEQ ID NO: 14303 - protein, 439 aa, synthetic construct
MERVALYCRVSTEEQALHGDSIQTQKDALTEYAKKNNLKIIDYYIDNGFTATSLKRPDLNRLLEDIKENKIDRILFTKIDRWSRGVRNYYKIQDILDKNNADWKTIFENYDTSTANGRLHINIMLSVAENEASVTSERIKAVFKNKIKNKEAISGKVPIGYKIENKKLVIDEKTVGIVHAIFDYFELTHSKRATLNYVIDNLGLNYSYRTVARILGESKYTGIYRDIIDYYPVIISKERFDNVQKISINNVRTTSNTSIYIFTGLLKCSHCNHNLIGYNTVHNKIRYYNYRCRHNYERKLCSNNKCISEKKIEKWLFENIKPELEKYIFNFKIDTKVKTNIPQVDKSSIEKKIKKINDLYINDFITLDEYKSMHEKYKLQLDNIMEKPIELDVSKYNTILNDDFINIYNKFSREEKRTFWRNIIDKIKIDSNKEMKLFF

SEQ ID NO: 14304 - protein, 447 aa, synthetic construct
MLRCAIYIRVSTEEQAMHGLSMDAQKADLTDYAKKHNYEIIDYYIDSGKTARKRLSKRKDLQRMIEDVKLNKIDIIIFTKLDRWFRNVRDYYKIQEVLEDHNVDWKTIFENYDTSTANGRLHINIMLSVAQDEADRTSERIKRVFENKLKNNEPTSGSLPIGYKIKEKSIIIDEEKAPIAKDVFDFYYYHQSQTKVFKEILNKYNLSLCEKTIRRMLENKLYIGIYREHENFCPPLIDKNKFDEVQLILKRRNIKYIPTKRIFLFTSLLICKECRHKMIGNAQIRNTKAGKIEYILYRCNQSYARHTCSHRKVIYENKIETYLLNNIESELKKFIYDYELEDIPKVKNKVNKTNIKRKLEKLKELYINDLIDIDMYKEDYEKYTEILNTKEEKIEQRNLQPLKDFLNSDFKSLYSSISREEKRLLWRGIISEIQIDCNNDITIIPHP

SEQ ID NO: 14305 - protein, 527 aa, synthetic construct
MRTVIYARFSGDNQNPRSAADQITLCRQRAEQEGWPVVATFEDAAISGAAGMGEDQRPGLNAMLRLVEAGGVDQVLAESTDRIARHVADAHVFRERIEFAGARLFTLFDGTVTPMIGLVKGFMDAQFRTDLAKRVRRGQVGTLKAGRIPGSIAYGYRQANQLNEKGEAIRGIREIEADHADVVRRIFREYIAGLSPRRIAEGLNNDGIPAPRGDFWHDTAIGGDPRHKRGILRNETYIGVVTYGRSRQVVNPQTRRRLMRPNPEAEVERQAFPQLRIIDDETWRRAQERLASNQGVRPERQRRPKHILSGLGFCGVCGSPWIKTASDFWGCSAHRFAKRCSNNRHVNTDRYQKWVLADLKGGMLDPEVISEWIREYRRDFARSAADLSRDRDRVQRKLQEAERKMERLLKAFSDGGSEFVEIRDALAAARDDKARLTRELASMDAMPNIIALHPHIEAVYRQQVEELAEFLEGPEAKLEAVPRLRSIIARIIVSPNEEKQRGVIVRVERHIDEILSIAMKSGKIAQL

SEQ ID NO: 14306 - protein, 428 aa, synthetic construct
MSTDQDEQLSSYENQVSYYRDYILKHEDYELVDIYADEGISATNTKKREAFNRLIQDCRAGKVDRILVKSISRFARNTLDCIKYVRELKELGIGVTFEKENIDSLDSKGEVLLTILSSLAQDESRSISENATWGIRKKFERGEVRVNTTKFMGYDKDENSRLVINPEQANVVKHIYNQFLDGFGPESIAKEFNAKGIKGWSGKANWYPSAILKMLQNEKYKGDALLQKTYTVDFLTKKRTENTGQVNQYYVANNHEAIISKELWETVQLEIARRKAFREEHKLVFYIMQSDDNPFTTKVFCAECGSAFGRKNWTTSRGKRKVWQYNNRYKVKGQIGCQNNHIDEEMLEKAFLKAVELLQEHRADVVVKWQKLEKGTNLLHKHYAKQMYQLLELDVFDGTIMNQVLDHIIISENGQISVKFLEGTEIDL

SEQ ID NO: 14307 - protein, 444 aa, synthetic construct
MAAYCRVSTDQLEQLSSYEAQVEYYTNYISNHPDYVLAGIYADEGISGTNTKKREQFNKMIVDCLDRKIDMIITKSISRFARNTLDCLNYVRQLKDLGIGVIFEKENINTLDGKGEVLLSILSSLAQDESRSISENSTWGIRRRFEQGKVALNHTKFLGYDKDEDGNLIINEKQAKIVKRIFTDYLNGKGPNRIARELEAEGVPNWNGKTKWYEGSIRNMLKNEKYKGDALLQKTYTVDYLTKKRVANTGQIPRYYVEDNHPAIIDKDMWEAVQLEMERKKSFAEKHGFRRVDYGMDDNPFASKVICGDCGGAYGRKVWNSNDDRFRRRVWRCNKRYVKKGEKGCDNTHINDEVLYQIFMNVFNTILENKDYFTQKWREKLSSENLLEKYKAKQFIEIITKGEPITEFDANLFFALVEKMTVLKEGMVIVTLLDGTEIECVIDK

SEQ ID NO: 14308 - protein, 428 aa, synthetic construct
MRVRIIEPTVQKETKKRVCAYARVSTDHEKQGESLQNQIAYYERLIKTNPEFEFVGVFADHGISGTTENRPEFKRMLELAKQGAIDIIITKSISRFARNTTVVLQKVRELKELGVEVRFEKECINTLSGDGEMMLTVLSSFAQEESKNISENIKWRIKKKFERGELLINTNRFLGYNKDENGQLVINQDEAEIVRRIFTEYLKGKGAFTIAKELNAEWLPTVAGGKWQESTILNILKNEKYKGAVILQKYFTPDHLKKGTIRNNGQVDSYYIEDHHPAIIPKGMWDDVQKELRARAEAKGNIKGQEKKYQKRYPLTGMLYCSKCGATLKRRTWNSKLPCRKIVWQCSSYIKNGKKACPGTRIDDEVVGELNIKEETVVKEALKNGKKHYSYSRKHKQEEQYRTARTPEKENGSLLPSVNRPIRTVIKL

SEQ ID NO: 14309 - protein, 519 aa, synthetic construct
MKTVTKIGGQLVFPTQKHKLRVAAYCRVSTDSEEQLVSLATQRKHYEAYITANPDWEFAGIYYDEGITGTKKEKRPALLRLIDDCEHKKIDFIVTKSISRFARNTTDCLELVRKLLELTVYIYFEKENLNTGSMESELMLSILSGLAENESVSIAKNSTWSIQSRFQNGTFKLAYAPYGYDVIEGKLVLQPEQATIVKAMFDQTLAGIGTDAIAKELNAKKIPAKRGTHWTATTVRGILKNENYTGDAIFQKTYTDSHFNRHHNHGEKDKYRVEHHHEAIITKDMFEATQQVIRQRGKEKGALPQDKKYQNRYPFSGVIRCHQCGATFKRRIQGGRNSYVAWCCATHLTDATKCSLKYIKETALKYAFVTMMNKLIFGHAFVLKPLLASLRTLHSDDSITVIQDLDTKLAENAEHQKTLAYLLTKKYLEPAMYQKGNNELLQEAEQWLHQKDSLVDFLNDDNKTVHETRELLQYTCKAKMLTGFDEAVFQQFVEQILVYSRTNIGFKLKCGITLRERLV

SEQ ID NO: 14310 - protein, 492 aa, synthetic construct
MAAYCRVSTDSDEQATSYETQIEHYTTYIQNHPDWKLAGIYADDGISGTNTKKRDEFNRMIEDCMAGTIDMIITKSISRFARNTLDCLKYIRQLKDKHIPVFFEKENINTMDSKGEVLLTIMASLAQQESQSLSQNVKLGLQYRYQRGEVQINCNHFLGYAKDENKHMVVVPEEAEIVKRIYREYLDGASMLKIARNLTADGLKNGAGHTKWRDSNIRQILQNEKYMGDALLQKTYTVDFLTKKRVKNTGIMPQYYVKDNHEAIIPRDIFLQVQEEMVRRSSIHLKNGRKLTYSSNHCFSQRIRCGKCGEIFRRIHWNNRGKKSIVWRCVNRVDHTGKCDARTISEPALEQVCLTAINQVLCGKKDFLTMLQQNIETVLSHNNDETLAAIDTRLEKLQTQLVKLASSKAGYDDVAEEIYHLREQKQQALAKSANQDEIRSRIDDMTAFLKTQSTAITQFDEHLVRQLIKTITVFEDSCTVAFKSGVTVDVEE

SEQ ID NO: 14311 - protein, 574 aa, synthetic construct
MEKKRVVCLYRVSTKMQVDPTGDISMQEKACREFIAQRPDWEFLYDYSEKGISGFTKSVDEREILQKIKEDAYNKKFDVLLVFMFDRIGRREIETLLFVEELTKLGIEIWSAQEKEQLDLMNPEARLISFIKYWKAGSESSQTSMRVAEKHRQMTLEGLYRGGEPPYGYRLVDSGIVNKKGKLIKKLAINEKEVEVVKLIYDLALNYGMGGHRIAKYLNEHGIKPRKGDEWNSAVINYMLRNPIYKGHLTSGKTKRKGSKHRRVSPKEWVLSEKPLEELIIIPEDIWNQVQLVRNSRTPEKYRLDNLDYSQYPLQTKSPLLFTGFIYCGSCGSKLSTGYVKHEWTTKDGKTHKKSRNVYKCIRKTSGGTKCTGRSIYYPEMIEEPVMDEIYKYLDTLKDLDLSQEIDRISKQNLQSSEKRIKELKETIAKNEKYLAVLKEEVPKSILGESQFSPEILNESIRDTADKLEKAYKELEEAQKEYERYKLELDDIIKMQKTVPYWREELEKAPTEVKKMILSEIIDKVVVYSNKGEKNCSIEIELNIEIEAFLRLADGRNREPNDLHEQNILKRRNS

SEQ ID NO: 14312 - protein, 522 aa, synthetic construct
MTTRNVTVIPARKRIGNSAKAEELPKLRVAAYCRVSTDSEEQATSYEAQIEHYTNYIKSNPEWELAGIFADEGITGTNTKKREEFNRMIEECMQGKIDMIITKSISRFARNTLDCLKYIRQLKEKNIPVYFEKENINTLDSKGEILLTIMASLAQQESQSLSQNVKLGIQYRYQQGKIHINHNRFLGYTKDKDGNLVIVPEEAEIVKRIYREYLEGSSMLQIARGLEADGILTGAGNPRWHTSTINKILRNEKYIGDALLQKTYTVDFLSKKRVPNNGIVPQYYVENSHEPIISREIFMQVQEQLVKRRCVHISKNGKKRNYSNNHPLSQMVFCGNCHEIFRRVHWNNRGKKSIVWRCISRLENTGLFCTASTILEDTLKEKIVEAINVAVSGKNSFLAILKKNIETVLSADLDESTADIDKRLEELQTELIQKANSNETYDNIVNEIYRLRDLRQETLSKNALRQDKRDRIAEMTDFLNMQTGGITEFDDKLVRKLVEKAIVYDDRLVVEFKSGLEIEVNL

SEQ ID NO: 14313 - protein, 522 aa, synthetic construct
MRKVTRIDGNNALQAFKPKVRVAAYCRVSTDSDEQMASLEAQKDHYESYIKANPDWEFAGIYYDEGISGTKKENRTGLLRLLADCENKKIDFIITKSVSRFARNTTDCIEMVRKLTDLGVFIYFEKENINTQRMDGELVLTILSSLAENESLSIAENSKWSIRRRFQNGTYKISYPPYGYDYVDGKLFINKEQAEIVKRIFSEALDGKGTQKIADGLNSDKIPTKRGSHWTATTIRGILSNEKYTGDVLLQKTYTDENFKRHYNHGEKDQYMIKDHHEAIISHEEFEAAQEILRQRGKEKGVIKGSSKYQQRYLFSGKIKCAECGSNFKRRIHGSGNRKYIAWCCTKHIKDASSCSMKFIREDAIHQAFVVMINKLIFGHKFILRPLLQSLKKTNYSDNLAKIQELETKIKENTERVQVIMGLMAKGYLEPALFNTQKNELHKEAALLKEQKEAIKRTIDGSMTTLVEVEKLLKFATKAEKQINAFDSEIFEDFIEEIIVFSQEEIGFKMKCGLKLRERLMK

SEQ ID NO: 14314 - protein, 523 aa, synthetic construct
MAVSKNVTVIPAIKRVGNNKNGESKPKIRVAAYCRVSTDSDEQATSYDIQIEHYTNFIQKNPEWELAGIFADDGITGTNTKKREEFNRMIDECMDGNVDMIITKSISRFARNTLDCLKYIRQLKDKNIAVFFEKENINTMDSKGEVMLTIMASLAQQESQSLSQNVKMGIQYRYQQGEIQVNHNRFLGYTKNENKQLVIDPEGAEIVKRIFREYLEGASLLQIARGLESDGILTAASKAKWRPETLKKILQNEKYIGDALLQKTYTVDFLSKKRVKNNGIVPQYYVENSHEPIIPRDLYMQVQEEMVRRASIQSGKGGKKRVYSSKYALSSTVYCGQCGDIYRRVHWNNRGYKSIVWRCVSRLEEKESDCTSPTINEETLQTAVIKAINELLGNKESFLQSLQDNIATVLNAESDNATDDVDVKLNDLQQELLKQAKSKNDYNEVADEIYRLRELRQNALVENAEREGRRQRIAEMTEFLSEQSNRLKVYDEQLVRKLIEKVTVFDDNLTIEFKSGVEIDVLI

SEQ ID NO: 14315 - protein, 429 aa, synthetic construct
MRVRIIEPILKVKKQKKRVCAYARVSTDSEKQEESLENQIQYYENIISNNPDYEFAGVFADKGITGTTENRPEFQRMLGLARDGKIDLIITKSISRFARNTAIVLETVRQLKDICVEVRFEKENINTLSGDGELMLTVLSSFAQEESKNVSDNLKWRAKKKFEQGELIINTTRFLGYDKDEYGDLIINPKEAEVVRRIFNEYLSGKGGFTIAKELNVEGVQTISRKKWCESSIYLILKNEKYKGDAILQKYYTPDHLKKRSVRNRGEIDSYYIEDNHSAIISREMWEQVQEEIKRRAEAKGNVAGDTYKYAKRYPLTGMLYCSKCGSTLRRRTWNSKYSCKKIVWQCSNYIKNGKDACTGTSIDDDFISRLNIKEEIIVREEVKDGKKHYSYTCKSKQGQSRGANTAAKKENGSLLQSINRPIRTVIKL

SEQ ID NO: 14316 - protein, 446 aa, synthetic construct
MAAYCRVSTDQLEQLSSYEAQVNYYTNYINGHPDYECAGIYADEGISGTNTKKREQFNKMIEDCKAGKIDMIITKSISRFARNTLDTLNYVRTLKELGIGVIFEKENINTLDSKGEVLLTILSSLAQDESRSISENSTWGIRRKFEQGKVVVNHKKFLGYDKDEEGNLIIDEKQAKIVRRIYKDYLDGKGSNRIARELEEEGVKGWNGKAKWYESTIRGILTNEKYKGDALLQKTYTIDYLTKKRVENNGEVPQYYVEESHPAIIDKEMWEAAQLEMERRRVFAETYGVFKLDYATLDNPFAGRVICGRCGSSFGRKTWHSTNENLKRKVWMCSNRYKIKGEKGCQNKHIDDKVLYQTFINTFNTIIENKDYFMEKWKDGLKSDNVLVRYRSKKFIKIIEKAEPIKEFDVNLFLRLIEKMTMFEGEKNIVSLLDGTEIEVIIEYIK

SEQ ID NO: 14317 - protein, 581 aa, synthetic construct
MKTIAIYSRKSKFTGKGDSIENQIEMCKEYILKKIGNVEFLIYEDEGFGGATIERPQFKKLIRDIKSKKISALVCYRLDRISRTVADFSSTLAILQENDCDFISIKEEFDTTSPMGRAMIYIASVFAQLERETIAERVKDNMLELAKNGKWTGGKIPLGFISKRVKYNDPDGLQREYPILEINKTEMDFVEFLYKKYLELGSLHKLEIYITKNQLKSRNGIMFEKSSLKLILQNPVYVKATLEVTDYLQENNWNIYGKPDNLHSLLTYNKTEQNIKNGKYTKSLKPKTERFAAVSNIKGALDADLWLQVQRQFDKNRDTFPRLGKTHNALLVGKLKCGNCKEHMLVQHGRISKNTGEKIFYYSCSLKRKSHKKLCSNGNAKAKYVEDLVIQSLKLLATSKRDFIDKLKDAYTSTLKTNKTSIEKVSLEKSLNEKRKQIDTLVTTLSKSEGIEDIILDKIKTLKKECADIEIKIENFQDLAKHEKVKNINLKLIESIINKCEIIDTLTQDEQKEIIDVLIDCIYWYGSGNGKGKIKIKFIGTDDEDSEEVELPDDELQQQMLQFSSSSMSGIKQNYIFSKFF

SEQ ID NO: 14318 - protein, 534 aa, synthetic construct
MIAAIYSRKSKFTGKGESIENQIQLCTNHAKSLGIDEFLIYEDEGFSGRTTDRPQFQKMLKDGKSKKFSFLICYRLDRISRNIADFSTLINELQELNIDFISIREQFDTSTPMGRAMMYIASVFAQLERETIAERIRDNMLELAKSGRWLGGQTPLGFRSEKMSYFDSEFKERSMYKLTPIDNELTVIKLIYNRYLEFKSLRKVTQYLLEHNIKTKLGADWNVRSVSDVLSNPTYVKADINVFDYLNKKGIITTGTPDSIHGMLTYNKKKGTNQYREMDEWIATVAKHEGIIEAANWLEIQETLKTNKVKAPQLGRTHNALLTGILRCGKCGANMTVIHGGINKDGKKIYYYSCAMKTNSKGTRCNNGNVRVDKIEQVTINKLKEITKDDNILIEELKSLKDEISSTTDLSGTETISKSIAELEISINNLVKQLAENKNSSAAKYIITEIENRENELTSLRTKLNNINNENEKKYDIDVNLDLIIKSLSEFSKTIEMIDIDYKKYLLSSVVDKITWDSSTGHIDIKLWGGAKKK

SEQ ID NO: 14319 - protein, 521 aa, synthetic construct
MKKGVAYTRFSSDMQSVDSTEAQLQEIQKYANTHDIQIIKIYSDEAISGKTDKRPALQQMLSDAKKGLFDIVLVHKVDRFGRDRYDSAIHKAQLKRQGVSIQYAGQSISDNPEGRLMEGILESFAQYYSENLANETMKGLKVKARRAEFNGGIPPLGYDVLDKKYVINEVEARVVKLIFDMHASGKTYGEIFASLKFKGYKTKRGADFTKNSLHSILNNEKYIGIYSYNKTAPRLYGKRNSRKQKDLDEIIRIPDAVPKIIDLNTWNLCQERMKSNRESRAKYRAKVTYLLSGIIYCECDSKMHGNTRNNGYHNYHYYRCAKGCPNSIQKDTVEDFVLYQLYETYFTDKAIKGLTKKLNEFARAAFEGKDNDMVLIRKDLKRVETEIINIVNAISTIGLSEALTEKLKDLEQVKRDLSFELIELEHSVNTYLIPEDAITELLGRYKTSIEERNIEECSKFIRKFVKRVTVSKDDVFVEFLMDYITQRLELNCVRTSASTSTAPKEKPLNSYLNMSLKVFLC

SEQ ID NO: 14320 - protein, 566 aa, synthetic construct
MEKAALYIRVSTHHQIDKDSLPFQKKELINYSKYVLGIDEYEIFEDAGYSGKNTDRPKFQEMMSRIRAGEFTHVLVWKIDRVSRNLRDFTEMYDEIKKYNVTFISKNEQFDTSTAMGEAMLKIILVFAELERKLTAERVYSIMLSRAEKGLWNGAPVPLGYDFDEELKFAVVNEEEAKIVKFIFDTYEEVRSTGEVKHRLEANGIRTKRNGHWTTKTIADIIRNPFYIGTYRYNYRYTPHGKIRPESEWVVVEDNHPAIVSKDQFEKLNKIMDSNAHGRGTDRTKENHIHVFKGLISCSKCNKNYIASIDRPRSDGYKPSVYRCYNYVHNKKQYRTCNGGIGEVKLGPFVINYITNLIKANEFISAYGSKGTEKEVEKILLKGSSFKDVAGIIPQDLKHTYEILLKSTGDILFDSIEESKEIEQDTELESLKSEKKKIERALQRLEDLYLFSEDSMSEKNYLVKKQELEKRINSINDKIKKRSQEYSRNLPGHDLSFIKKATQYLLAHNLYNDRAINYNKIVKMIDKKLLQDFMQCVIKKIIVEEDKTISSIEFVNGLSHRFIYRK

SEQ ID NO: 14321 - protein, 553 aa, synthetic construct
MKKSAIYVRVSTNHQIDKDSLPLQKNDMINYSKYVLGIDDYEIFEDAGYSGKNTDRPDFQKMFKRIKNGEFTHLLVWKIDRISRNLLDFCSMYDALKKYGCTFISKNEQFDTSTAMGEAMLKIILVFAELERKLTAERVKATMLDRASRGLWNGAPIPLGYKWDDKIKFPVIDEDEKETVMLIYTSYSELQSTSAVRNLLNNLGVQTKRNGTWSTKTISDIIRNPFYKGTYRYNYRETARGKKKKENEWIVLDNNHEAIIYEEFWVQCNEIMDKNSNKNNAKFRGNSNVHIFSGLIECGECHSTMYAKQDKPNLDGYRPSLYACKSRYNGLGCTQKTISDKIVGTFVLSFISNMIRLSDLDRKNLDKEKVEKMLLVGKSFNNVYGIKEIDTILNSLIYAPKNLFTPIKKSTEKNKESYDIKKLDTELKKYEKGLSRLEDLYLFDECDMSQKDYILKKNKINDKISEIKEKIDQTITLNMSSCNYDFLLNATALEFSKEISNGNVDLKALIQRVNRDIIKEFVNTLINKIIVKNKKVQSIEFKNRLVVTFIYNL

SEQ ID NO: 14322 - protein, 525 aa, synthetic construct
MNANVTIIPPRKIAGNTVDKHKDKPKLRVVAYCRVSTDSEEQATSYDTQVQHYTDYISRNPLWEFAGIYADDGISGTSTKKRVGFNDMIHDCMSGKVDMVITKSISRFARNTIDCLKFVRQLKDKNIPIIFEKENINTMEASGELLLTIMASLAQQESASLSQNVKLGLKFRYQEGKVQINHNWFLGYTKDDEGNLVILEQEAKVVRRIYREYLEGASLRDIAEGLEKDGIKNGAGHLKWHLSNIKTILQNEKYIGDALLQKTITTDFINHVRIKNDGTEPQYYVKDSHASIIPRDIFFKVQEEMLRRANMFSGEENKKRRVYSSKYALSSLCVCAKCGDVYRRIAWNNRGVRSIVWRCCTRWENGPSACDAPTVKENELKSAIVKAINKVFSVPDEVLDMLKNNIREIIAGNNLSELETVDKKIADKQAILLTLLKAKKDYTKTADEIDELKGKKQQLLIEKAGQEDAKRRIREMEDFLKSESHDISEYDEKLVRKYIKKIKVYEDRFSVTFKSEISVNIERAS

SEQ ID NO: 14323 - protein, 530 aa, synthetic construct
MKMITKLEAKQPDNSLRKIRVAAYARVSTDSDEQLLSLEVQKEHYENYIKSNPCWEYAGLYFDEGISGTKIDKRESLKQLLKDCQSGKIDRIVTKSISRLARNTVDCLEIVRKLTGLGIYLYFEKENIDTEHMSSELMLSILSSIAQSESRSISENSMWSIQKRFKNGSFVISCPAYGYKNENRKMIIVPEQAKVVKEIFNMALSGMGAKAIARVLTDKKIPTKKGGSWTSTTVNAVLTNKTYTGDVIFQKTYTDDSFNRHKNCGEKKQYVIENHHEAIISHETFNLVHELRQKRKLKLNITSGSNKYLARYTFSEKLYCGNCHSRLKKHNRHKKDGAYVVWCCTKHIREIKCCPMKAVKEEYVKLAFLQILNKLKATYAQILTPFIKSLRNVNSKDGLNKVIELEEKKLKLQEQEQVLSKLLAGGYIEMDSYYLESNQLKTEMDTCLKEKLQLSNSLNGNLTHLNEAQKLQRFVSVTEVFSEFKDEDFLDFVDDVVAKSRTEFIFHLKCGLELEEEVKETWHTSHMVTE

SEQ ID NO: 14324 - protein, 529 aa, synthetic construct
MRKVYSYMRFSRPEQAKGTSIERQSNFAEQYAIEHGLELDKSLTMMDKGLSAFHGVHKTKGAFGQFLAAVTAGKVPSGSVLVVESLDRLSREDPLIAQAALTDLILSGITVVTAADNQVYSREEIQQNPFKLIMSLVVMIRANEESETKQRRSNAFLKSALNQYQANGKIRRLGSDPSWLDFNKDNDTYSFNERVEVIRRILNLYNQGIGSLKIARQLTEENIPTLSGKRSAWGQTTVANIVKSHALYGMKRINVQGVEYDLEDFYPALITTSKWLALQQHRTKRSKSMHGRGEVVHLITGHGKGFTTCGYCGGGLGAQTQKQYKRSGEYSRTVTRLHCLTHKETSSCCSSVFLEPIESAVLFAACIGVEPQSLVPTVNNVNYSALIDEVENKVKHIVEQVTAGAPWDLFKDAHDKLKLEKQKLIKERDSQKPDVNQSDVQKWVNKLVELADKARANDKEARLKCRTLINSICKSIVIKLRGHDLKSEPVVTITFVTDEQFEFKVGKNGAVQFVDNGMTVNRRLKPLLA

SEQ ID NO: 14325 - protein, 446 aa, synthetic construct
MIVAEGLDRLSRNLKDIAALHETLGYHEASIWTAHEGRISELHIGLKGTMNALFLRDMKAKVRRGQSARIAAGFSASSCPYGYRVVRGIVDERGRTVNGVREIDETTAAVVRRIFTEFASGTKFVALIENLNGEGIPAPGGGLWKRNAIAGSAKKQEGILLNEIYIGNLIYNRTRSVRDPVTHKKRYIVNPEEEWTRRHVPEYRIIDDSLWQAVHLRLDRIGSTPPKAARKPRILSVHNQHALTGWVKCGWCGGSKSLANETRYLCSTHRYAKSCANSRGTKEPVLMSRTFGALYRRIETGPDFTPGLTEFFARQSRRRTELERREQDIQARIVRLLDAIESGVDHENAKERILTLQIDLERIRAELTYDLPAPLPVEAAIRARLMNAVQSVELSNDVPKQRLMFQCLLSEIVLTPIPDKHQGETVVIKLREGGWAEFWNSIEAGS

SEQ ID NO: 14326 - protein, 524 aa, synthetic construct
MTMIRPLRIAIYARYSSDLQNPSSIEDQVALCRQLVDDQFHGRADPRAVLVFSDSAISGSTLQRPGLIRLMNAIKAGRVDVVVAEGLDRLSRNLKDIAGIYETLDYHHVMIWTAHEGRISELHIGLKGTMNALVLRDLKARIKRGHRSRIAAGYAASSCAYGYRVVRGVVDEKGANINGLREIDEAAAPVISRIYDEYIAGRKIPEIIAGLNKDGIPAPNGGLWKRNAIMGGAKKQEGILRNEIYTGKLIFNRSHVVRDPVSNKKKFIHNPESDWTKVDVPHLRIISDAQWAAVRVIDQPKPQQPRQRKTPVGLTVYNQHALTGWVKCGWCGGSKSLANETRYLCSTHRYAKSCANSRGTKEPVLMARTFGTLYHRIETGPDFTPGLTEFFAHQSRRRTELENQEQDIQARIVRLLDAVEHGVDHENARDRILRLQDELGQIRAELTHDLPAPLPVEAAIRARLMNAVQSVELSNDVPTQRLMFQCLLSEIVLTPIPDKHQGETVVIKLREEGWAEFWSSISSE

SEQ ID NO: 14327 - protein, 499 aa, synthetic construct
MEFVAIYMRLSRDSTQNGIEESLENHRLALTRICKTNGWKHDIYEEIASGVSPEREQLNLLLSRLNDYTAILTMDVDRIGRDPEHNEKVLKMLILNGIKIITPSGEYDFANENSQMLYRMQSMLSSFEYSAIRKRLGRGKFLEASKGNWVMNNIPLGYLKNPETKRLEIDENESKIIRYIFEKTIEGYSVNKISQDLDAFGWRSKKGKVLSTAHISQMRRNPLYYGVVRYERKNELGRVLEDCWVEDAHPGIVTKEEFLRCQELIKNNNNKKFKTHGKVKHILQGLIYCAKCGRKRYICVDRKDVPYIKADGAKIENVRCSDAGMALKPITDAVIEDVKKLKPELEEEIIKLKKRDITKSEKEISNKLIETESNKDKLNKKKKNLVEMRMNGEITKDEFLQFKDGLEEQIRHTDDMIQLLQIKLNNLRNTEDEVKKLEKVIWTIDNLDNLSVEKINSFLRSIIKKVLFSRNIESNPNTTKRDDVEPTVDIEWIEGIPIL

SEQ ID NO: 14328 - protein, 553 aa, synthetic construct
MKAIAIYARKSLFTGKGDSIGAQVDTCKRFIDYKFANEDYEIKIFKDEGWSGKTTDRPDFTNMVNLIKSKKIDYVITYKLDRIGRTARDLHNFLYELDNLGIVYLSATEPYDTTTSAGRFMISILAAMAQMERERLAERVKSGMIQIAKKGRWLGGQCPLGFDSKREIYIDDMGKERQMMKLTPNKEEIKIVKLIYDKYLEMGSMSQVRKYCLENSIRGKNGGDFSTNTLKQLLTSPIYVKSSDNIFKYLESQNINVFGTPNGNGMLTFNKTKEIRIERDKSEWIAAVGKHKGIIDDNKWLQIQQQLQQQSEKQIKSSGRQGTTSTGLLSGIIKCAKCGSNLLIKTGHKSKKNPGTTYSYYVCGKKDNSYGHKCDNKNVRTDEADSAVITQLKLYNKELLIKNLKKALVQNKKADTDNIEILESKLKEKEKAVSNLVKKLSLVDDENISNIILNEITNINKEINDIKLQLSNETLKINEVTQATLDTEIYIKILENFNKKIDDITDPIEKRNLLKSALESVEWNGDSGEFKINLIGSKKNRTALSKRIQIIVL

SEQ ID NO: 14329 - protein, 565 aa, synthetic construct
MSGLKPHIYIRVSKANQVQGSGLDEQEARIREYIKGKNHLFNGEPIVWKDEGVSAYGSKNVETGQLAKFISEVDQGRIGDGNCLIIYSLDRLSRRSAWDEDTIQYIVKSGVEIHDVSTPVILKRDDPFTKIIMELIVQRANNESRIKSERSTSGWQARFNNMVTNGKVMTRRLPRWLDSNENGYLIKENEVAIIHQIFNDYINGQTSPVIAKRLNAENKLINGSLWRPNGITKLIKDRRLLGFFCRNINDEEVPDVFPRVIDDETFQHANSILKVASSGIKGRPRYNEEQRTVRNILTGIIRCGKCGGRVTTSVNSRGERYIRCRNRINFEICNADGFKYALAEKVIFAHVKQVDFASIINGTSKLDKLSGLKSELLQLEIEENEWLTAIDERKKAKQRISIAFATGLSDVQERIDLVKQEIVELSLNETIPDFEQFDIDILLNPENVDMRLAARKMLLQVLDTVAYTRDESRIGFNIKYRNSVFLHALIANIKTHKVISHGSVSIEGDGQVILKNNFFDLNMLNGEMTMHDVTDLEELEEAKESLDFWKTYLEHIASLIQQRSK

SEQ ID NO: 14330 - protein, 545 aa, synthetic construct
MNKYHLYQRVSKQIQAEEGQGIQRQEQACEHWISDYNKRLLSEGKSAYSKGLIYEDRGKSAYTAANFKRGELGALINDIENGKIEKGDLIVIELIDRFSRANVDFVRSQFQRIIDAGVKIAITKWNLVFEENMESVSSVTGRILLEIGMYLAYQESSQKSSRIKASRKLLEDSGRKSIAKPPFWLARNSDLKSYTIIEENAEIIRKIFYLKLNFNYGPQKIIKSLGDLDIYRYSFDENGNLIKTTKNSPLSESSINAYIRNTNVIGKLDGKDYYPRIIDDRTFYAVQKRTRENTGGVGEIFRNVFVGVGKCGCLIRKENENGCGSLAKCGYIMAFSSRKVKNPTKGMYLKCNRKRKSTKCDSENINYYLAQNKIYNVLKSLKFDIDQSVDISHLEEKINTIDKSMSKIREYMTQYSDDEEWENQYKIKRMEREKIENEIKASKSRITGKLSNLDIDFSKEKDRVLFNQFLKDNRITVYFTKERMEIIIGSLNNFSIKCGYDDSNRDIDHIIESYSKNGLVGIEEKSGKSEGKGLLRFNLPTVPGS

SEQ ID NO: 14331 - protein, 534 aa, synthetic construct
MNTLEKFKQFAPKQHLLGHSKNAIIYTRVSTKEQADTNTSLETQKKYCEHYAKSNGYNIVGYFGGTYESAKSDERKEFKRMLKHVRQSGSVGYIIVYSYDRFSRTGSSAAHISQELFERGIQVKAVTQEVDTTSAAGKFQQNMFFMFSQFDNELRRDKTITAMTDLLRKGYWLWSPPIGYVNKKKYHKAVDWEIVPSKKGKLLKKAFAWKTKGIYTNVEIIDKLKGLGMAINERRLSEVFKNPFYCGVLISKMVPGEIIEGRHEPLVSKENFLKINSVETHHPKHHKSENDKLPLKQFIYCERCKLPLTGYLVKKKGLYYYKCRTKGCSCNKSAKALHKSFEDNLNLYQVDPKYNAIIKEVMAYSYDNITKEIRQQSVAIKKKITELNDKIESVEERFALGEIDSDIYKKFKDKYDGQRVELQSKMENPAINSSNLEKAIEKALELSASLQYIWVNGDLKQKQRLQNLVFPGGLGYDKSNDRVRTPKVNAIFSAIHSLSGKIERIKKGEPIPVNQFSDLVTAKGFEPPTLRAEI

SEQ ID NO: 14332 - protein, 412 aa, synthetic construct
MSPDFKTITPRRTPTSRIRVAAYCRVSTMSETQAGSLAAQVSAYSKLIHANPAWQFAGIYTDQGISGTTSNRPGFADMMDHARAGDFQILLVKSISRLARNTVDLLSCVRELATLGVAVRFERENIDTSSAEGELMLTLLASFTQEESRSLSQNVKWAIRNRYKTGVTNSHRIYGYTWVGGSLHINDDEAQVVRRVFDEYLAGVSPEAIADRLNAEGLRARGGGNFLGSVIRTWLENPRYVGNEMLQATYTDGPGGKLVVNDGALPKYWVEGANPPIIDEATWRRVQDELARRRQSGGRALTPSGGTCALTHRVVCSQCGRRFHRRTKTRKHISYKYWWCETATRGQGNPCRAPQIREAQLKSAITTHLGLGEWDDQQVIERLEQVTVYPSGKVTVTKRGAHTAEPVMAGKE

SEQ ID NO: 14333 - protein, 517 aa, synthetic construct
MATVTTIPARPAKTLTPTTVRARRKVAAYARVSTDLEEQQSSYQAQIDYYTNYIQGRADWEFVGMYADEGISGTSTKHRQGFQTMITDALAGRIDLIVTKSVSRFARNTVDSLTSVRALKEAGVEVYFEKENIWTLDSKGELLITIMSSLAQEESRSISENVTWGHRRRFAEGKVMVPYASLLGYKKGDDGGLAVDEDQARIVRRIYREYLAGHSPKTIAAHLTEDGIPTPLGKKTWNVSTINSILRNEKYKGDALLQKTFTVDFLTKTTKRNEGEIPQYYVTGNHEAIIAPAVWDQVQSELARRSGRSRSFSHPFASKIECGCCGGWYGPKTWHAGSRYERRIWRCNRKYDPAGDQQCATKHVTENELIAAFEQATSQFAPPPSPEVLEAALDQLGDPHALEAKLAQAITARDAVVDAINALIRSAANTDFNPDAFEADHARLEADYQHHLSTVEAIEGHLRELEAKRAAITAFHQYRSENAAISYTPEAWRALVDHATIHSDGTITITFNDGTTL

SEQ ID NO: 14334 - protein, 523 aa, synthetic construct
MAVSRNVTVIPAIKRVGNNKNSESKPKIRVAAYCRVSTDSEEQASSYDIQIEHYTNYIKKNKEWELAGIFADDGITGTNTKKRDEFNRMIEECMAGNIDMIITKSISRFARNTLDCLKYIRQLKDKNIAVFFEKENINTMDSKGEVLLTIMASLAQQESQSLSQNVKLGIQYRYQQGEVQVNHKRFLGYTKDENKQLVIDPEGAEVVKRIYREYLEGASLLQIARGLEADGILTAAGKAKWRPETLKKILQNEKYIGDALLQKTYTVDFLSKKRVKNNGIVPQYYVENSHEPIIPRELFMQVQEEMVRRANLRGGKGGKKRVYSSKYALSSIVYCGQCGDIYRRVHWNNRGYKSIVWRCVSRLKEKDSECTAPTINEETLQTAVVKAINELLANKEPFLSTLQKNIATIFNEENDNATDGLESKLEELQQQLLVQAKSKNDYEDVADEIYRLRELKQNALVENAEREGKRQRIAEMTDFLNEQSCELEEYDEQLVRRLIERVTVHDDRIEVEFKSSIEIDIEN

SEQ ID NO: 14335 - protein, 521 aa, synthetic construct
MKKITKIEGNLANSFIKPKTLVVAYCRVSTDSNEQLVSLQAQKAHYETYIKANPEWEYAGLYYDEGISGTKKENRSDLLRMLSDCETGRIDLIITKSISRFARNTTDCLEMVRKLIGLGVHIYFEKENINTGSMESELMLSILSGLAESESISISENTKWAIQRRFQNGTFKISYPPYGYQNIDGQMIVNPKQAEVVKYIFAEVLSGKGTQKVANDLNQKGIPSKRGGRWTATTIRGILTNEKYTGDVILQKTYTDSHFNRHTNYGEKDMYLVENHHEAIISHEDFEAVDAVLNQRAKEKGIEKRNSKYLNRYSFSGKIICSECGSTFKRRIHSSGPRKYIAWCCSKHISNITECSMQFIRDEDIKTAFVTMMNKLIFGQKFILRPLLQGLRNQNNAASFRRIEELETKIENNMEQSQVLTGLMAKGYLEPALFNKEKNALEAEREKLLAEKDQLTRSVNSNFAKADEVDRLLKFATKSKMLTAYEDELFEDYVERIIVFSREEVGFELKCGITLKERLVN

SEQ ID NO: 14336 - protein, 508 aa, synthetic construct
MIAKWLLDHQDYELSKLNYSDLGKSGFHGEHVKEGGNFGKLLKAVMDGYIKRDDVVLVEAIDRTGRLPALQMLSDVIAPILRAGVSIITLDDNTTYTEASVGGPHLFMLVAKIQAAHEYSRTLSRRVEDSYKKRRKDAKEKGVAPKRMTPVWLNSDGTVREDVAPWIKTAFELYVSGVGKSTIAKRLRESGVERLAKASGPGVEGWLRNKAVIGKWETLIGTPEHHVIDDVYPLIIEPSLFYKAQVHAEKMKTQRPIKTAKHFLVGLVHCGECGKNYIMQNLHGKPHSMRCRTRQSQNNCSNSYVVPKPVLDAIYRYTSVTAALEAVQLQQLGVNEKEIVTREAELLTITKRVEGFVQAVNEAGPMPELLAALKQARIERESAENALVILRATVVTPPANQWREMGKVWTLEAEDAQRLAAMLRQVGYHITVGKGAIIKSSHSDVVYQYLGVDRVKDMYRVLANGEMKLIHKSQVDDYPYYEPFQEVVGEATMDEADKENLLLQYQSS

SEQ ID NO: 14337 - protein, 567 aa, synthetic construct
MAIKAKVYSYLRFSDPKQAAGSSADRQMEYAKRWAAERGMTLDSELSMQDAGLSAYHQRHVTRGALGLFLQAIDEARIPAGSVLVVEGLDRLSRAEPIQAQAQLAQIINAGITVVTASDGREYNREGLKAQPMDLVYSLLVMIRAHEESDTKSKRVRAAIHRQCQGWIAGTWHGLVRNGKDPHWLRLVGQAFEIVPERGEAVRTAVSMFREGHGAVRIMRTLAERGLQITNGGNPSQQLYRIVRNRALIGEKVLEVDGQEYRLAGYYPPLLSPAEFADLQHLTAQRSRRKGTGEIPGLITGMRIAFCGYCGAAMVSQNLMTRGRREDGRPQNGHRRLICVSNSQGGGCPVAGSCSVVPIEHALVTFCADQMNLSRLLDSGNRADGIAGQLTIARVQVSDTTARIDKITDALLASDASQAPAAFLRRARELEFELAEQQRRLEALEHELAAVALSPEPAAAKAWAGLVEGVEALDHDARIKARQLVADTFDRIVVFHRGRKPEQSRSWKGTIDLLLMAKRGGARLLHIDRQTGGWKAGEEIDTVQIPLPPVVAEATSQSEAPLGSVSR

SEQ ID NO: 14338 - protein, 622 aa, synthetic construct
MALEVEVIKASRKITDRKGGKSSDILRVAPYARVSTDSEEQLNSYKSQVVYYTELVNKRSDWVLVDMYADEAITGTQVTKREDFQRMINDCMDGKIDMVITKSISRFARNTLDTLKYVRMLKEKSVAVFFEDENINTLTMDGELLLVILSSVAQQEVENISANVKKGLKMKMKRGELVGFQSCLGYDYDPSTKKISINQEEAELVRYIFQRYVDGMGAYVIAKELTEAGRKTKNGRIEWQDTSILGIIKNEKYKGDLLQGKTFTVDPISKRRLENYGEEDQFYVKNHHEPIVSEEVFERAQTILHRRGENRRRGMKGKRDKYSRKFAFSSMLECAFCKSNFSRRSWHSGTPHEKTVWQCVTSTKKGKKLCPHSKGLDEKMIEDAFVESYKLACRNHTDIIDELIKRMESVFSEQNSQRRLNKLIGDIQALEQKRCKLIDLCLDEKIDQATYEQKYAELDTSLTALLEEKAQLEQSEQEEIDLGKRLEHFRKVLRTNELLPSFDRNVFESIVDKIIIGTDTDPEKPNPYKLTFVYKTGFHNSVQGKTRNQSQKKLQKNEGSGLCSYSENDTCGVLFTVGKKRLIDEMYWRMIYVKKRVIPLLFSFILIKTAYSLGISRVYSKN

SEQ ID NO: 14339 - protein, 496 aa, synthetic construct
MRCAVYIRVSTDKDEQKLSLENQRSLFYQYLEDRGWDVFDFYVDVESGTTGKREHLQRLIQDAKARKFDVIVAKELSRLARNGALSYQIRDMATDNSVHIVTLDNAINTLERRNEMFGLYAWIYEQESQRTSTRIKAALSSKAKKGEFKGSVPPYGYRLNSGKLVIAEDETPNNVKRIFRMYLEGKGFDAIARTLTREGCPTPAQVIGKKNAGLYWHGTSIKKILTNPHYVGDLVQGRQTTVSVTSKVREEIPKDKQIITEDAHSAIITREDFEAVQQYMEARKQQKEKPKAKKHLFTNYLYCADCGKALWYVHYRKGYVCGNYYKHGKHVCSQHSVKEKELKGVILTDIRNMAETLNENEVMGRLEAKTLQARKKAEKQLLALQRRIEKLKEQKTGLIRLLASGTINETDYKAATESGNAELFNLQGQLKAFQSLQVGNSAGESIVRLKKELKQFMKLEELTFEMVHRLVDKIEVQADGSVNIHYKFTPTAFLTA

SEQ ID NO: 14340 - protein, 520 aa, synthetic construct
MKKAVYCYARVSSRGQAKDGYGMSRQQEMLRDYVAAYDDSQHNRGYELGDISWLYAEGVSAYSGKNIEDGSVLKTFIDDVLQKKITNSVLVIENLDRFSRAAPNRAAGLFLSLINAGCDIHEVETEMIHHQYSDLNIISGGLQRAHNESKRKARLSIKNWDERIKNTIDGTSVLTHRVPSWIEVKNNKYVLKKGESEKYNLIFKMYADGFGPAAIRDELKKRGMQINEREPTINHLMKIIKDQRLIGRFNSTGRKILDGMSIYPVVVEPELFEAVNDLRKQRNPLGKINVKANNLFAGLCICMNCGRYVQVNSVDKKGDTYFRCGGSLVKIDKCKERGFKYKIVENALLEHLRNFDFSMLRSDDNDIQVKINYLSMELVSNEKYSNEILADLEKEDIPDPNDRRILKNIQRRISEIRNEITILKQSNIGYETFNDLKDSYTDDLLDPKNTKLRLDFNVKVKRVIKNIKMKRYDNTIMLVVSYVGVNEKQAMVINSKTGEVVFMAVQNDDLKSIEYLINNG

SEQ ID NO: 14341 - protein, 550 aa, synthetic construct
MKVAIYARYSSDNQRDASIADQFRMCRLHAEKQGWHIVEEYSDHAISGASLIRPGIQALMADAMGGRFDLILAEAMDRLSRDQEDIAGIFKRMSYADVKMFTLSEGEVTHLHVGLKGTMNALFLKDLADKTRRGQRGRVEAGKSGGGNAYGYDVVKKLDANGEPIRGDRTINEFQAEVVRRIFRDYAAGKSAKTIAFALNKEGIPAPSGGDWGFSTINGNPKRGNGILNNEMYIGKIVWNRQRFVKDPNTGKRQARPNPEEEWVIQETPELRILDDDLWNAVKARQEKNKIARKENGEADLSRINTRRRPKYLFSGLTKCSCCGGGYSAISATLIGCATARNKGTCDNRVNIRRDELEARVLNALRTKLVDPELFTHFCEVFTQEMNRLRMEGRAEIASAEAEIAKIDRELETLLNLILKGGAADALNAKMVAIEKRKKELELFLAEADEPPPLLHPSMALQYRKRVQQLYDALQDEDEGKRIEAADTLRSLVDQIELTPVDGKVEIAVQGDLAGILTISTQSKNPAAGATGSQVKMVAGAGFEPAAFRL

SEQ ID NO: 14342 - protein, 496 aa, synthetic construct
MTDSRKPTRAVLYLRLSAVVDDSTSIDRQERDLRAHADRQGWTVVRVLVDEGISGRKARAKATEAVKLIADDEADVLAVWKLDRFTRQGWDGLGELSRVLDARKHAGRPALFVALQDGLTSDQSAFRLIAGVLSEVARSEADNAAARLKNSIAYRKTVTNKYAGGASIPFGYRSVPAPDGVGRVLIHDPEESAIVHEIVARLLDGSESPSQICADLNTRGIPTSKSPARRAIRDGESAKGLDRGIWRGTTLRSLFTSDLLLGRVRHHGGLIRDADGLPASVWPPLVDLATLESLRARFAPSGDRPKVKGRSARLLSGMAFCAVCESKLYVTTSSGRPIYSCASSWNSVPCPSPKINAVGLEDHVSERFLAFAGDWPEVDTVTATDSTANDAALREVEAALREATAAMLEDDADLPAIAARIGTLKARRDELRALPTETKTQRVLTGRTLAEAWDGAVADEAKRSLLLYALDSVSVAPTASRRSPIDPDRVKIHWYS

SEQ ID NO: 14343 - protein, 545 aa, synthetic construct
MSGLVYSYSRFSDPRQAKGSSLERQAAYAARWAAEHGLKLDDSLTLQDEGLSAYHQRHVKSGALGVFLAAVESGKVPPGSVLVVEGLDRLSRAEPIQAQAQLAQIVNAGITVVTASDGKEYSRERLKANPMDLVYSLLVMIRAHEESDTKSKRVRASIVRQCQNWLAGTYRGLIRNGKDPVWVQLVDGEWRLIPERVEAVRTGIDLYRRGYSATRILTALTDRELSLTGRGPQALQIYRLIKQRALLGEKEIEVDGETFRLPGYYPALLTEADWNDLQTLAAGRGRRAAAGGSVPAIVTGLGITVCGYCGRALVGQNIGTRNRRPDGGIQDGHRRLHCTSYSHGGCPVPGSSSVAPVERALMAYCSDMLNLQALYGGDRAAGPRARLAKARAELADLTTKLERLTDAMLEAAEDGGTPATFARRARSLEVDQQRAAADVAAAERELASVARTDLQGVDETWRKLAAGVEAQDVDARLQARQLVADTFEQIIIYRRGALPAETPKGMMDVTLLAKGGTSRTLRIDAKGGWIDAEEALGEAPEQTDV

SEQ ID NO: 14344 - protein, 547 aa, synthetic construct
MKKNYGSKIADLYIRVSTDEQADKGYSQRDQAERLKGYCAKYGIAVQNVIFEDHSAKNFERPEWTAYLKNLKKRSKKDREPRLILFTKWDRFSRNAGDAYHMISVLESLQVEPQAIEQPLDLKIPENKIVLAIYLSTPEVENDRRALNVFYGMRRARKEGRIMGTPPYGYINRCTEDGRKYIGVLHPEADNIIWAFEEIAKGELPSEHIRVLMNKRQGKNLTRNAFMVAIRNPVYTGKVFIAEFENEPAHYVKGKHLPLISEELFEKVQRVLEGKSRKSRTEVGESKVLSNESFPLRGILICPRCGNTLTASTSKGNTKFYSYYHCNSKCGFRHNSDDLNKKFVDDLRKYEILPEYKDLLKVALLRNYKKYCGNVDDERKSVMAEIEKVNQKLTKARDLFLTDRLDEDDYTEVKKECKQKLEELEENLKGLVKAGKDQDIPGKLSLALDGISNLAQRYVEGSLDDRRKIASSIYYQKLEFDGKTFRTPKSNAFLNLIKLSKSGLEGQKKSHQNLENPDDHRVSAKGFEPLTVPIFDRDALSLLRYCY

SEQ ID NO: 14345 - protein, 569 aa, synthetic construct
MKTKVAAYCRVSTSSQDQDLSFDSQQRFFREEIGNKDSFKDYELIHIYADRGLTATKFKREQFLQMLYDGGVDVSYPSKSKKKIHFEASMKREPKFNRILVTNLSRFARDILAIDPLRELKSKGVFIDFLDCNKSTENDGDMFYIELMMTFAANDSRDKSQKLKAGLSKTAKWGSLFAAHRLYGYDYFEGEKRLEINEGEAEVVRLIYHLYVNEGYGFRRIINHLESKLIFTRNGKPFSINAIKHIVSNEKYCGTLVRNKWDSGAVFNKHYAKVKPETEWEVHEDVVPTIISKELFESAKQLRFDKGTEQRGVYKGIGEFSGLIICNKCGAAYVRNSDRGKILFNCGTKKSKGVQACDAPNLYEDVLEWAIEHFIGNGIEETIRNFKESYFTDLNIIKGKLLEKIDNQKEQDASTLRSQIDELDAQRKRVLKLYSLGKFKDDELDDLTNEINSEYETLNSQLQEVIMSNEDIYKNLSDIDEIINNISNFKVRDEHSTREEIIDFLSKIKVIGAVHAESNENLLILQFEFKAFEKLYDFTDKYFDSNVKETYSSSSIVWNRTTQSPYYRD

SEQ ID NO: 14346 - protein, 589 aa, synthetic construct
MTLPATIYARFSNQEQAQGNSKTRQLTLCRDMVARHGWEGSTDRELIDEGLSAYSGANRASGALLYRFEQQAEAGRYRNGHVLVVENLDRISRQGYDAILPFLQKLTASGVTVATVDGDRVYPAYERVTMTSVIEAVVKSELSREESEKKSRRLKAAQNKRVSEAQANAGRHISNTATVPAWIDTKRISKTSERPAYAMSLNEGRVAVLREIFQLTIDGYGTPAIAKMLNGRGEPVWSHLNQRSNNGWTVGYLTKIVVNRAVMGEYHPMNRPRSGPATSKDITVLNHFPQAIDPVTFAKAQAARQGRKGTSGAWQITHNNLFSGIAKCKSCGGRMKQEVVVRKGGNRRNGKNPDAVYQSKQDISYLKCHNALNRVWDEENDRVRCENRNWVRYEKLEKAVVEFAAGWLALNRQSAPTAAIAEVEVQIAEARRFLEDKQKQADNAAVSFTRTSSATMERLMLQLEVEVVDQQREIDALEKRLMAARTTGPSPDLLNEIEHQKRALDSEDDEERNRARVAMKQTLRGIITSMECCTSRDTMIVLGDRAMGLVFNQEGELVQSVVLQETIYGPHGEVDWHPDFPDADYTMAA

SEQ ID NO: 14347 - protein, 593 aa, synthetic construct
MTLPATIYARFSNADQAQGNSKARQLTLCRDMLERHGWEGSPDRELIDEGVSAYSGANRASGGLLHTFEQEALAGRYKNGHVLVVENLDRISRQGYDAVLPFLQQLTSQGVTVATVDGDRVYPAYERVTMASVIEAVVKSELSREESEKKSRRLKAAQNKRVSDAQANAGQHISSTATVPAWIDTRRISKTSERPIYRMSLNAARVAVLREIFQLTIDGFGTPAIAKILNGRGEPVWKHRNIASKNGWTVGYLTKIVLNRAVMGEYHPMNRPRSGEATSKGVDVLNHFPQAIDPVTFAKAAAARESRKGTSGAWQITHNNLFSGIAKCGVCGGRMKQEVVVRKGGNRRNGKNPDAVYQSRQDISYLKCHNALNRVFDEERGLPRCSNRNWVRYEKLEQAVVQFAVGWLALNRQSAPSADIESMEVSIADARRFLADKQKQADNAAVSFTRTGSTTMERLMLQLEVEVAEDQKAIQVIEQQLSTLRTSAPSPDFLNHIEKQRTALYSNDETERTTTRVAMKQTLGSLIKTMECDTERNTHVILAGNSLLFSFDNEGELIGNEMGQGTIHLGPYGEIDWHPDFPDADYAIHPAAL

SEQ ID NO: 14348 - protein, 517 aa, synthetic construct
MITADLYIRVSTDEQADKGYSQRNQEEVLQKYCFARDIKVRKVVFEDHSAKSFIRPAWQKLLADLKKKRGQTDLVLFTKWDRFSRNAGDAYQMIKILGDLGIEPQAIEQPLDISIPENKMMLAFYLAAPEVENDRRALNTFHGMRRARKEGRWMGPAPIGYTNKVTEDGRKYICPVEPQASIMKWVYDELSTGKWFIDQIWKAASDKGLKTGRKNFWQIIRNPIYCGRIPIAKYKDEEAHTVIGQHKAIVSESIFYKAMDVLNGRNKPKKTTISSPDALPLRGFLICPKCGYMLSGSASKGYSKHYHYYHCFSKCGVRYNADKVNKLFVEELKKYTIDPLLHEAYVMILKQVYQAFASEDNNELSNVKKQLEEFNNRISKARDKMLNDVILDFEYRKIKSDCERNILVLENRLIDLSRGKENIGELIGKATGLLKNLHETYIEADSEGKRRLISSIYPQKLTFDGTQHRTVRMNEAVRVLGTLKAVFEGKKKGQTKQKFDLPTMVAGSRIELPTSGL

SEQ ID NO: 14349 - protein, 534 aa, synthetic construct
MTRLKPIRAYAYLRLSVDKEDGTPQSIQAQRSSIRDYARKNGITIIEEFADAGFSGQNDRRPEFRRMVAQATADDHPVDAVLMFMLSRMARSARLFFEVTGKLEDAGVEIISITENFGTGRGRRIGRAITAVINEEQALDAAILTRKSRRENARQGFYNGGPIPFGYETYVARTDGEKERKKLAVVPAEAEIVKRIFGWADSGRGGRWIVRALNDAAYSLRGARFTNGNIAGILANEAYTGTYHDRTADDDGVRPDIEDAIPVACPAIVSREQFDRVASNRASRNPRAMAPHVAAGTTLLTGLARCGGAGCTSGLTIATGKGGRYAYYRCNDRLNRGGSCSTRPIRREELDGIVVDAIERRVLAPQRLRELLAGVLDLSAERHVARQAELRHLRAEKTRTETAMNKLLILVEDEIMSPRDPVFAGRMAENKAKLASVSARIDVVEVQLVRGARQIDEHTVAKFGELLSAKLRDSDPTLRAAYLKLFVAEVRVSDDLIEIAGPTAALEAGVTTGMPVKAGLPNFDREWCRLQASN

SEQ ID NO: 14350 - protein, 589 aa, synthetic construct
MTLPATIYARFSNQEQAQGNSKTRQLTLCRDMVARHGWEGSTDRELIDEGVSAYSGANRASGALLYEFEQQAEAGRYRNGHVLVVENLDRISRQGYDAILPFLQKLTTSGVTVATVDGDRVYPAYDRVTMTSVIEAVVKSELSREESEKKSRRLKAAQNKRVSEAQANAGQHISNTATVPAWIDTKRISKTSERPAYAMSLNERRVAVLREIFQLTIDGYGTPAIAKMLNGRGEPVWSHLNQRSNNGWTVGYLTKIVVNRAVMGEYHPMNRPRSGPATSKDITVLNHFPQAIDPVTFAKAQAARQGRKGTSGAWQITHNNLFSGIAKCKSCGGRMKQEVVVRKGGNRRNGKNPDAVYQSKQDISYLKCHNALNRVWDEENDRVRCENRNWVRYEKLEKAVVEFAAGWLALNRQSAPTAVIAEMEVQIAEARRFLEDKQKQADNAAVSFTRTSSATMERLMLQLEVEVADQQKEIDALEKRLMAARTTGPSPDLLNEIEHQKHALDSEVDEERNRARVAMKQTLRGIITSMECCTSRDTMIVLGDRAMGLVFNHEGELVQSVVLQETTYGPHGEVDWHPDFPDAAYTIAA

SEQ ID NO: 14351 - protein, 600 aa, synthetic construct
MTVVELLNKCGLVKPRVISYTRFSSRKQAKGLSEIRQVEAAKEWCDKHCLELSDHDQFKDLGVSAYSGANSTTGALAALQAKVAAGAIPRGTILIVEALDRLTRQSLPSAISLLMGLANSGLNVVTMTDPDKVWNSETMHDLGSFLMSVVTLYRGHQESAYKSDRLRKTFRKHRREGSQQAFGAAPGWLERESKVHPWTVVEERAEVVRKVFELAVAGLGSKAIAARANTEKWPIPTRLSKNDSIWHAQMPGQLLRNRSVLGEHQHRIRTHEANAQHWHGLAEGEPVKGYYPQIVSDELWAAARASVRGRFVHKRRDANFYNLWSGLMFCGHCGAPIHRKTEKKGYSKGQLQCSARLAGATKCPSMSAVNADFALLQAVYGHSHQDLADAQAVAKIDGIATLEAALADTEEQAQLAGDLVFKTGGKVPVFVNRSVRLAEEAEDLRRHIEELRALQLGDGGTGAFDEAWLETTMSFLYVADDVEALEARAALNLRLGRIVEAVWVYAYDCAFIKFRDEKLPLALPLPSKQLPSRANPQAKHHKPPPERVEKFKPIWAAHNDPAFELPEPKRPAARARKFSQLMVNLERVEEEDAEEVAAEL

SEQ ID NO: 14352 - protein, 540 aa, synthetic construct
MTSTTRAAIYARFSSDLQNERSCDDQIAYCEAWAERQGLFVVAAFSDEAVSGASAINRPRLAGMLRMAREKRFDVLVCEDLDRLARKQADLHRIRDELTFLGIRIMTVSDGTVTAMHAGLKGLMSEMFLAELGNKTRRGIAARVSAGASGGGVSFGYRAVPGKPGEHEINEREAATVRRIFADYIAGRTPREIAAALNAENIPGPRGGKWNSSTLNGSKTRANGVLQNRLYIGEIVWNRQRFIKDPATGKRVSRPNPESEWQRSAAPHLAIVEQTIFGLAQARKAERTQASGPVAAKPRHFLSGLTKCGCCGASYTVIGNDRIGCAGYRERGDCENGRSITRAHVEERVLNALDAYLADPEMIAAYISHYHLKRRELAATKTSQLKSIADRLPDLDKQIEKLIDLLVEGSATDGVLDRLRKMEAERAELRAEAEALKADDEPIVLHPSAADRYRQLIKELRMHLEGLREGQPRDLIFERLRGMIEKVVITPKGARQPVDIQVHGLLAELLVDKKETPLNARAFRGAMVAGAGFEPATFRL

SEQ ID NO: 14353 - protein, 533 aa, synthetic construct
MKRAVIYARYSTDLQNDQSVEDQIRVCRSHADRLGVTVVSEYHDRAKSGASMFGRPGLSALMQAAELSAFDMVIAEATDRLSRDIGDLAHIHKNLTFRSVEINCVNGGKIETLQVGMYGVIGQMQREEGAKKVKRGMVGVVRSGRNAGGKAYGYTPTVGKPGELEIVEAEAGTVRRIFEMYRDGFSPRAIAGALNSESVPAPRGTQWNASTINGNGQRGNGILRNPIYAGKIIWNRVRMVKDPSTGRRVSRVNDEADYEETSAPHLRIIDDALFEIVQRRKAERGGEHSRTTPKSKRLLSGLLKCGACGGGLSIVGADRSGPRVVCSNHKESRSCDNNGRYYVEKIERQVIDTLRIQFADTAIIDAYVKEYQAERRRVEVERRRGRAQAEKSLQEAVDGITRIVEKLSKGLIEDDDAAALLPGLRAQRDHWRKELAAEPPLANVIEIQPKAVSIFRQNVEALAEILTKKEAEPSIELAQAFRQVIAGVVVAKRQPGEHYQIEIKGYLSSLVSPEMSAVLMVAGEGLEPPTRGL

SEQ ID NO: 14354 - protein, 458 aa, synthetic construct
MHKRAVIYTRISKDMEAMGLGVARQLADCRDYAKEKGYEVVEELADNNISASGLKTRPEYLKLRDLMADRGVDVVLVYAMDRLHRNMRELAEYIELSNDTGTAIESVVAGKVDLASADGRMVATIIGALGAAEREKTSERQLRKARANAEEGRWPGQRVYGYTNDASIVPHEAEVIKEIAERVLGGEGLNAIANSLNSRGIPTLRGAAWRATTIVGIARSARIAGNREHHGVITKRGAWEAIVDEETSILLRKRLAKGRAEGRPVGGPRKHLLSGLLVCGKCGGPLQRGFAGTARTPVYRCGKNEGSRSCGRISINLKATEDFVASALFAAFDRAIEQQQEDAGEAERARYVAESKRLEERKAQLTKLFVADEIDEDALTTGLKAIREQLEALPQPRPKSTRQRQTGAELAAAWPEMETSVKRALLDQVFVKITVTPRNIVTGAKVFDETRLVPEWRS

SEQ ID NO: 14355 - protein, 569 aa, synthetic construct
MPTAYSYIRMSTDQQIRGDSLRRQLEFSRQWAEQHGVVLDESLRDIGVSAWKGKNRKEGALGRFLEMVNTGEVRRGSYLLVESLDRLSRDQVLEALGLFLEVIRSGITIVTLADNQSYSQESVGNDWSKLIISLTIMARAHEESQRKSERVSQSYVARVAAAKDGRGLSILTPSWITATKRGRGDYLFELNEHAETVRRIFELTADGLGQMAIAQRFNQDGTPTLTPAKGWYNSSVSNILNSRVALGEFQPHRMEGRTRLPAGDPIPDYFPAAVDATLFTRAQARRFKRPFIGGRKGTLFSNIFSGLCLCQRCGGSMVMSTGSKSQGAKQHLRCLSNMRKKGCTNATRFAYADLEPAVLDKVREFQLSDVMRSRRGDDPLKQIDEDIAQARLSIEKLDRLVRNLMQELEEEDDPAFRKAAREKAKARLAERNEQQERLEDLEHSRNKVQAELSEGTRIEDEIEQLRAEWEQADQPTRYQLRAKVNSALRDFIDFINFDGDTQVVTIIVLGGLRAYRFQTGEFLASVDLLPHVGSRSEGGIDPSMFTTDGITAEGDNARRAALNKLLSRA

SEQ ID NO: 14356 - protein, 462 aa, synthetic construct
MIRVSRERDGMTSPEVQRHAIESYAASNGIDIVDWVEGIDETGSRARSAWWPRLDQSIERLEAGDFEVIVVWKFSRTARHRLRWAVALDRVDALGGGLLSATEPIDDRTSHGRLARGMVGEFNAYQADLIGDTWREAHARRFREGKPINGKPRFGYTYSPADGFTPDPIAASVLAETYRRYVSGESVYALVRWLNFGPTRPVGGYGGKGDGLWSERTLRRVLDSGFAAGIITYQGEQKRGIHEPLITDDEWNAYLEARGRRRVYRRSERSTYAYSGMVWCACGSKMHGGTHGQDRAQSYRCKDGKEKGTHDGGYVAQSLIDYAVREWLGQHEARVRAEVRAGIERRPRRVAKDPTADLKRQLADIANRQVMLAEQRLSMGMPQAAYETLRDRYAAQATALEQELRTTEVQQSAPLRVLPVLLERWHDLTVEERREYLRALISRIEATPGRPHARIEIIPHES

SEQ ID NO: 14357 - protein, 537 aa, synthetic construct
MSDIFFFDSFAKGKQNKKVSKSLECVIYTRVSSKEQADNLSLGTQLKACMLYAEKFGFNIAAQFGGTYESAENDERKQFTAMLSFVKKFKGKISSILVYSLERFSRNDNSIWLSGELRRLGIEIISVTQPIDTSSASGQMQQKLLFLFGEFDNQLRKQKCSAGIKEMLLRGDWPTNPPLGFEIDRSKNKRQIVINGKGRLIRQAFEWKAYENVSNEVIRDRLAAKGLKLIHQRISEIFRNPFYCGLMVHNMLEGQVVVGNHEKLISRELFLKVNGMLDKIPHGFSLNEENVHIPLKRFMVCAECGKPLSGYLARKKNIHYYKCKTKACCNNKNADSLNSRFADILDFFKIDIAKEYIELLVEQVAATFNQLTQNKQADLLELENSHREVKKKVERLEERYIEEDISQELYTKYHEKYSDEKREIERNLLILSNKSSNLLKCVRLAIEYATQLPLNWLSGDYHTKQQLQTLLFPSGMSYDKKNDKVRTTEINLVFLYIAYFQQLISKKKRGIPELSLDYASFADSVAGSRIELPTSGL

SEQ ID NO: 14358 - protein, 533 aa, synthetic construct
MKRAVIYARYSTDLQNDQSVEDQIRLCRSHAERLGATVVGEYHDRAKSGASMFGRPGLSALMQAAELSAFDMVIAEATDRLSRDIGDLAHIHKNLTFRSVEINCVNGGKIETLQVGMYGVIGQMQREEGAKKVKRGMVGVVRSGRNAGGKAFGYTPTVGKPGELEIVEAEADTVRRIFEMYRDGFSPRAIAGALNSESVPAPRGTQWNASTINGNGQRGNGILRNPIYAGKIIWNRVRMVKDPSTGRRVSRINDKADYEEIDAPHLRIIDDALFEIVQRRKAERGGEHSRTTPKSKRLLSGLLKCGACGGGLSIVGADRSGPRVVCSNHKESRSCDNNGRYYVEKIEHQVIDTLRIQFADTAIIDAYVKEYQAERRRVEIERRRGRAQAEKSLQGAVDGITRIVEKLSKGLIEDDDAAALLPGLRAQRDHWRKELAAEPPLANVIEIQPKAVSIFRQNVEALSEILTKKDAEPSIELAQAFRQVIAGVVVAKRQPAEHYQIEIKGYLSSLVSPEMSAVLMVAGEGLEPPTRGL

SEQ ID NO: 14359 - protein, 572 aa, synthetic construct
MKRAVIYARYSTDLQNDQSVEDQIRVCRSHADRLGVTVVSEYHDRAKSGASMFGRPGLSALMQAAELSAFDMVIAEATDRLSRDIGDLAHIHKNLTFRSVEINCVNGGKIETLQVGMYGVIGQMQREEGAKKVKRGMVGVVRSGRNAGGKAYGYTPTVGKPGELEIVEAEAGTVRRIFEMYRDGFSPRAIAGALNSESVPAPRGTQWNASTINGNGQRGNGILRNPIYAGKIIWNRVRMVKDPSTGRRVSRVNDEADYEETSAPHLRIIDDALFEIVQRRKAERGGEHSRTTPKSKRLLSGLLKCGACGGGLSIVGADRSGPRVVCSNHKESRSCDNNGRYYVEKIERQVIDTLRIQFADTAIIDAYVKEYQAERRRVEVERRRGRAQAEKSLQEAVDGITRIVEKLSKGLIEDDDAAALLPGLRAQRDHWRKELAAEPPLANVIEIQPKAVSIFRQNVEALAEILTKKEAEPSIELAQAFRQVIAGVVVAKRQPGEHYQIEIKGYLSSLVSPEMSAVLMVAGEGREPPLCRNTLQTLVFDRSFRHLFRCTHVLVNRLKGKPFYRSVMRSND

SEQ ID NO: 14360 - protein, 535 aa, synthetic construct
MELKHIVNSYNVTKIIGYLRRSRQDVEREKRTGEDTLTEQKELMNKILTGIEIPYETRTEIGSGESIEGRPVFKSCLADLRSGKFQAIAVKEITRLSRGSYSDAGEIVNLLNEKRIIIITPYKIYDPRNPVDARQIRFELFMAREEFEMTRERMNGAKFTYAAQGKWISGLAPFGYKLNKRTSRLEPVDEDKVVVQLIFDIFLNGLDGKDLSYTAIATHLTKLQFTTPRGGKRWSKDSVRNILQNEAYMGRVRYKARETTKDGKKVFRPESEHIIVDDAHEPIINKEDFEAVQAKIKNKVPLLPVVTSYEPNELAGICVCSVCGKSLQKFESEYNRKNKDGTSSYFHVKLLICKINRCTSVRYEYVEEAILEYLEQLISLENNKLKTIIEKSMEAAETNNSEKTSEQMLVQANQKQKELENKLTFIFEKFESGIYTDEMFLQRKAAIEKEIADIKKLKQELSMTFEVKEKDVNEFRVNISDVVKFYKESKSRGLKNEKLRSIFDFIVLEMTEKRRGPIPAKFNIYPVLRIPSVVN

SEQ ID NO: 14361 - protein, 519 aa, synthetic construct
MKKITRIDKSSEGTALKEKLRVAAYCRVSTDSEEQLVSLETQKLHYEAYIKANPNWEFAGLYYDEGISGTKKEKRSELLRLISDCEHKKIDFIVTKSISRFARNTTDCLELVRKLVDLGVYIYFEKENLNTKSMESELMLSILSGLAESESVSIAENNKWSVQRRFQNGTYKISYPPYGYDYVDGEMVVNKEQAEVVKLIFSEVLSGKGTQKIAEELIQRGSPTKRGGKWTSTTIRGILSNEKYVGDVILQKTYTDSHFNRHTNRGEKDQYYIKNHHEAIISREDFDAVELLINQRGKEKGIEKGSDKYQNRYPFSGKIICSECGSTFKRRVHSCGNNKYIAWCCSKHLSQPAECTMLFTREKDVEFAFVTMMNKLIFGRKFILKPLLDGLRGMSKSDSLLRIKELEKLIEKNAEQKEMLVKLMAKGYLEPALFNKENNELQMEADNYRQQQETLTHAINGELSKVQEVSRLLKFTNKAEMLNAFDGELFSEYVEKIVVFSRTEIGFQLKCGITLRERM

SEQ ID NO: 14362 - protein, 521 aa, synthetic construct
MKKITKIESNKTNSFIKPKLRVAAYCRVSTDSDEQLVSLQAQKTHYETYIKANPEWEYVGLYYDEGISGTKKEKRSELLRMISDCENKKIDLIITKSISRFARNTTDCLEMVRKLVDIGVFIYFEKENINTQSMESELMLSILSGLAESESISISENNKWAIQRRFQNGTFKISYPPFGYENIDGQMIVNPKQAEIVKYIFEEALSGKGTQKIADDLNHKGIPSKKGGRWTATTIRGILANEKYTGDVILQKTYTDSRFNRRTNYGEKNMYLVENHHEAIITHEDFEAVDAVINQRAKEKGIVKRTSKYLNRYPFSGKIICSECGSTFKRRIHSSGARKYIAWCCSKHIRQITECSMQFIRDDDIKTAFVTMMNKLVFGQKFIIRPLLDGLRKQNSPESFRRIEELEAKIESNSEQSQMLTGLMTKGYLEPALFNKEKNSLAAEGARLLAEKEQLTHSTNDNLAKVEEVNRLLKFVAKSKMLTAYKDELFENYVEKIIVYSREEIGFELKCGITLRERLVN

SEQ ID NO: 14363 - protein, 488 aa, synthetic construct
MKRVISYIRFSSEKQAKGDSLRRQSKMVTDWLKAHPEYYLDQDLSFRDLGVSGFTGKHLKGGLGDFLTAIEKGLVKAGDTLLIESLDRLSRQDVDQASELLRNILRSGVDVVTLSDGEHYTRESLKDPLALIKSILIMQRAHEESLRKAERIQAAWDAKKEAAKAGIKISRRCPAWLRLNDDRKTFSVIPEKVATVKRCFQLRLEGKSIWEIVRTLNAEGHQTLNQYKAGSFGQSSVQDLLKNRSVIGYFTPKGCEEISSYYPSVIDETTFYKVQQLSHSRYGRKPVSDKPLSVNLFKGVIRCSECGHALIITGFSDTRNGIYRCPLRNENRCSAKGLSRKQTDGTLLTLLSRLDRFDSDMTNTIDTLKLHREHISSNIEKLVQLSLEIEDLSAITSKLKQLKGELSQVDADIEKETQRLKSIDVGCLSDCDLTTKAGRIEAQLIIKSAVKEVVLNTAKRRCKVTFHNSKSITLPITENPSEDVTEAI

SEQ ID NO: 14364 - protein, 531 aa, synthetic construct
MHDSLQGREAYGYLRISDDREGKELGVERQREDIAKLADQLGLSIVHFFCDNDISASTNSDEERPDYEEMLDRVQAGPVKIVLAYTKSRLTRDPSENERQIRLARKNQAQYYYVRGQALDLQVSANRKMDRIQAALDAGVAEDIQELTVRKKLQDACEGKVGGGRRCYGYGKVVSHNPLTGKDICDAYQVRDDEIVVLEEGKRRTLAGESQFVILQDWKRRGIKTALGHAWRVGSFKRTLLNERYVQFDPTGHPPTCPCLRNPETGGTRVHYNQRHRAKWPYIFTKAEYESMAAIFNGRNKYWSNVGRLKGRTYLLSGIMECGGTWPDTERQGQRCGGDMFGQGKTEDGRYIRRYACKKWDRDGSRIGCCTVFRIADAVEHFVTKQVLYRFDSPEVARALAPADNQGRMDAVMQELAELKERREQLAAEYAAGEHEKDDYRVMLQIIKDKQRAAESEKKQLLNVAAKNLAVPTDGGLRELWSTASIEWRASVIRLVVEKVIIHPGHPGGRMWPDKNGWRFNPELVEIVWLH

SEQ ID NO: 14365 - protein, 542 aa, synthetic construct
MSTAAAGLDLDTVRVGIYLRRSTDDENQPYSIEAQDTRLDAYVQSQPGWKIVKKFKDDASGKNTDRPGLQKAMQWAKANMIDVLLVYRVDRFSRNLRDTVTLLDELDKVGVAFRSATEPFDTSTPVGRMMLQLLSMFAQFERDLIVDRVTAGMEKKAEAGQWKGGYAPPGYMMDPVTHKLVVVESEAVIIRLIFDLYTKDRLGSHAIANELNERGYRTRSGGLWPFKRVLTILENRVYLGEIHYRDVITLDAHPGIITPEQFDEAERIMDSRSESHSRRRSNGSDYMATGRLSCPKCHTAMVGTRATGKTKTYRYYTCNKRLKYGTDSCDQDRINADALDQAVLDSVASFYGNQHQLIRDAVAEARKVYESSHEKVTAELKAVRSEITKVTAKIDKYLDAFEADTFDADDDTAKERMRRHRTTQKQLQAREAELMEDLENEPTMPDAATLDTVNNNIRTIIKAGNPNQRKAVVETFVVKIKITGPGRMVPVLRVPPAPTAADAADAEGAETRLSGPAPLGVRVSSYLVELRGLEPLTLTLPV

SEQ ID NO: 14366 - protein, 525 aa, synthetic construct
MRTLIYARYSSAIQNPRSIADQFAACRARAEAEGWEIVAEFSDAAISGAAGIEDVQRPGLAALLDRIDRHDIDQVLTESTDRIARHQGDAFAVRERIEFAGARLFTLMDGVVDDITGTIKGLFDARTRKDLASRVRRGHRGNIAQGKATGGIAYGYRKVARFDDKGEAIRGLREIDEDKAEIVRRIFREYAAGRSPIAIAMDLNAEGVAAPRGAIWRPSTIIGHHNAGFAILANPVYIGRLVYGRSKQVTDPRTRQRRMAPGDGELHTGEAPHLRIVDDTLWHAVQAQLQARSSHAKGASRPERQRRPKHLLSGLGECGVCGSKFIMRGGGYFGCSRFVDAKACSNDRTIQKDRYEAAVLAQLRGLMLAPEAVEAYLEEYRVEAARRAREAAGERGRLERRRAEAARKVERLVDAVAAGGSAFAEIRTALATAKTDQAEAERALAAAEAVPTIALHPGLARQYREAIANLADELADETTRREAAPKLRKLIARIVVSPSEEQRGVTIEVLRHLDEIVTLATRRTA

SEQ ID NO: 14367 - protein, 484 aa, synthetic construct
MAGVFADEGITGTSTCKRKAFLRMIRQYRQGKIDMILAKSVSRFARNTVDTLNFTRELRSLGIPVVFEEQNINSIYPESEFLITLHGAFAQAESESTSSRARWGKRQAMKSGHVAMQYKQLLGYEKGPDGKPRIVPEQAETVRFIYDRYLAGDSIREIKAALEGQGIPTVSGKAEWMASHIRSILTNEKYCGDVLLQKNFIQDCISKKVIPNTGQLPKYLIQNHHEGIVSRETFDAVQLEMARRNAKAGDTRKSTPTGRGKYSGKHVLSKLLFCGECGTAYRRCVWTQRGVKRPVWRCVSRLDYGKKFCTQSPTLDEEPLQQAILAAVNAVMLDRDTLARQLTAVMEWELAPMLGESMSLADIDRALEELSSQFNSLLAEASANPAEDYTERFRELSESTTRLKERKAQLEGACQEQGRLQNRLRAVSAAMEHMTAALTEWDEEVIHQLLEKVTVLSQEKIRVTFRDGREIEQYVAQPKRRKLA

SEQ ID NO: 14368 - protein, 505 aa, synthetic construct
MRIATYRRVSSEEQALHGFSLEAQKEACINKAKEMGATSILEFADEGETGKTLDRPGLEALRQAIADGLIDCVVILDPDRFSRKLSHQLLLTEEFEKAGVELVFINFEWVDSPEGRLFYSIRGAISEYEREKITERMKRGQVQKAKQGRPPIGVYHYGYDYDPTTETISINEREAKIVKYIYNSLIQGITPAAIAINLTNDSNVPTKKGKSFWHRQVVRQILMNPSYKGEWHYKDYIIPVPIIIEPELWEKAQKILQESLRTWNHKTKRQYLLSGLLVCSDCGQTMGGIYAKHWGRYYRGYTCRKSPSTSRFTGCYPQKIINAESLEKNVWEKFKNLFMNPDTLLEEVRKNLPKQNELEDELASIKQQLNDTEKGRESLIEAMSLGILELDDKTKKKLLDIKNRKEKLIQKQKNLQNSLLAFRHSAQNYTELYKTIAAVIDDIDNLDFEDKRSLIRSAISQIEIKGRVNSGNTIPGDLPGVNILMSIRVDDVLGFASNTSEIQKP

SEQ ID NO: 14369 - protein, 654 aa, synthetic construct
MTSSHRKSRIHQPDRTTKRVAIYLRISTDEKNQPFSLEAQEIKLLAFITSQDGWELTSKYVDQASGATTDRPQLQRALTAARAGKFDILLVYRLDRLTRSLRGLTELLETLDKAGVAFRSATEPFDTGNATGRMIIQILGVIAEFERALIIDRVINGMEVKASLGQWQGGSRPYGYQIDPTTDHLTVDPVEAPIVRRIFTEYVNDRLGSQAIARKLTSDGLRTKTGLPWSPAAILTILRNRVYLGYISFRDVEHAAPHPTIIDPDLFGQAQKILTERAKSTATKRAASGSDYLLTGKIRCAHCGRHYIGTAARGNLYRYRYYSCWTRNRYGTSICPAERLPAEQVDTAILNAMIETYAGGGLVTEAAASLAGRIADTRAAHRDELATVDSEISKAETAIDRYFNAFEAGTMTDALAGGRIEKLTIKIKELQGRRAELVDHLADDATQPVPPTAADLTRLSTQIADAIHDGAPATLRRLTEALVAEITVTSRAHIQPTFRIPTQPAAPTGGSDSGQDGTQPSSDGTEVRAIHGSVRPAGIEPATQCLEGTARSLRRRDVSRSQCPPTSMVVRRCPRSLLHALLHQAGRTGTARENVQHLRRPGVLRPRAGRQHPPWSAVIAVIIWQAGRFCRCASAEKTNFATATRSGNATARAM

SEQ ID NO: 14370 - protein, 451 aa, synthetic construct
MIRAAIYIRVSTQEQIENYSIEVQRERIRAFCTAKNWNVYDEYIDGGYSGSNLERPGIKKLLNDLKNIDVVVVYKLDRLSRSQRDTLELIEEHFLQNKVDFVSITETLDTSTPFGKAMIGILSVFAQLERETIAERMRMGHLKRAEKGLRGNGGDYDPAGYTRQDGHLIIKKDEADHIKRAFDLYEQYYSITRVQETLKEEGYPIWRFRRYRDILSNTLYIGRVTFSGNEYEGQHEPIVSLEQFKRVQMLLKRHKGHNAHKAKQSLLSGLITCSCCGEKYVSYSTGKSKDDESKRYYYYICRAKRFPSEYEERCMNKTWSRQKLEDVVIGQMKDLNVFKYHNQKKEKQINYAKLIKEIDKKMERLLDLFTTNTNISRQLLEQQMEKLNSDKEKLILKQQSSEQEISLSNEMITETMKSFDTLEFKDRQILINKFIQEIQIKHENVEILWRF

SEQ ID NO: 14371 - protein, 559 aa, synthetic construct
MSKIAIYSRKSKFTEEGESIENQINMCIKYAQNVLNIAEYEVYEDEGFSGGNTNRPQFQKLMRDIKNKYFTHLICYRLDRISRNVADFTNTLNVLDKFDVSFVSIKEQFDTSTAMGRAMMNISATFAQLERETIAERIQDNLRELSKTGRWLGGPAPLGYISIQVENNDLRGKSRKKHILQIEENDIKTVKLVFELFKKYKSFQKVSLTLENQGIYSRKGRVFSRELVKQMINNPVYVIADNLILDFFKDEGCEIYRREYANGVNGIMPYNRRKENGSFAPTEDWLISIGDHPGIICSQDWIKCQDICEEIKLKASNRQYTSINALLSGLVICGHCGSSMAPRKQFNKLINGTESIYRYYTCNLKNKAGNRCDNTSLNAYDAEDYVVNRIKSMTEDEIMNTYLDFKQRAAVKTNNNDLIIKLTKKISENKEMISNLSRRVAKSNEEEMIDTYENEIRQLRKENKELEDNIIKLKTENDTILDIKKDISEILDIYDNFKKFYDFTQTFEDKKRLISSVVKFVVWDSDNNSLTVVPIGSSLERKDFGNSAFKSTEQKKWPM

SEQ ID NO: 14372 - protein, 516 aa, synthetic construct
MASRLSGLHIFIYLRKSRSDVEEERRAADEGWAYDTLARHRKNLMEVIKREGHVLVDKFEELVTGESIVERTELQKMLKRMDEGAVDAVLVMDVDRLGRGDMYDSGILDRAFRYNNVKLLTPTEIFDPEEESWELVFSVKSLVARQELKSITKRLQGGRRDKAKSGKSISKKPPYGYLRDSNLKLYPDPETAWVVKKIFELTVSGQGRQAISNYLDSKSISPPDPKREFWSPSTITAIIKNEVYIGKIIWGKITYKKRGGNYVRKVMKPEEWIVKENAHEPLVSNELFVAANTAHTGRWRASTNTTKTLSNPLAGILKCELCGFTMLHGHNKSRPNASVRCNKPSCRGKQKSALLPLVEERILNSLEEYVKEFEVKVSHSAERENLSPQLGKLLLKKEKEKAEYTKQKNKLHDFLERGIYDIDTFMERQATIGDNLKTIEAEMKSIQDEIEIERVREKQVLDFLPRTLKVLETYRQTDDIVKKNQLLKSVLEKVTYRRHPDSKKSDEFEIQLYLNI

SEQ ID NO: 14373 - protein, 524 aa, synthetic construct
MVKKDRGYVRVSTMKDSQKDSPEHQEALIREQAAREGIELDHIYMDRDTATSIMARDDVQQMINDAKRGMIKSIWFASLSRFSRDTLDALSLKRILVNALKVRVVSIEDGYDSAMKDDELLFGVKSVVNQNQSEQISISSRRGIRQSAAAGNFTGSIPPFGYKKVTINDPRMKSGKRKTLEVIPEQADIVRMIFEMYVNKGMGEKAIVRYLNGENESKKAIPSYRGGVWGITSVQRILQNENYTGYNIYGRHTVETAYNDLSDLMNRGKKLVQKPKTEWERTSFQTHEAIISKEIFDRAQEIRLMRGGGERGGRRAFVNVFAKMIFCSECGSAMVTMKAKGPGEKEYRYLMCSRRRRIGEAGCSNRKWIPYYEMRDELIDEILNRLRARLSAYEAGKIQTRIPSGDRAKEKQKLEKRIEDNRKLLFEIRRQHMLGELETAQYDFEKEQYEKEIKEAEIRLQVIEAEERKSLDVENLMLDAKKSLSALSELKTYDEVEKTRMLLMQAVKRIEVDTEGTITVETYI

SEQ ID NO: 14374 - protein, 520 aa, synthetic construct
MSRPTHLDVFVYLRKSRKDVEEERKAQENNTPFDTLAKHRRELLELIRREGHNVIGIFEEVVSGEFISERPEIQEMLRQMEQGMVEAVVVMDMDRLGRGDMIDAGTLFRAFKFTETLIITPTEVIDCNAEGAELIFGVKSIIAREELKQINKRLQGGRRRSAKDGKSITRKPPYGYSRDENLKLVPDPDQAPIIQKIFEMIAGGHGRQAVVKHLDSLGVKPPEGNLWEQSTISNIIKNEVYLGHIIWGKERHIKRNGKRVRKKVPSELWIRHENAHEAIITQEQFDAANTALRDRWRAPTKEGLGLSNPLAGIIKCGLCERALYMTRTADRPNPQLRCINPRCQGIQKGVLLPLVENRILQALEILSWKSPLSENEVAASIQNNKDDVVEIKQQQIEHLNKELAELNSMRETAFEMLEKRVYSEEVFLQRHKSISDKIKEAEASLSRLQKEIEDELHRRKHQQTIVPKVRAVVENYYSIDDPEQKNHLLKSIIEKVLYIRKKEWTKKDQFEIEVIPRFPI

SEQ ID NO: 14375 - protein, 600 aa, synthetic construct
MRAQHQIDEDPTASGSQRREVGRTVIYLRVSSRSQVDTDYDPEGLSIPAQREICTRKAQSLGLQIVGEYVELGRSGRSVQGRPEYQAMMQRITTRRDIDYVMVYMLSRLNRNRIDDALVMVEMDSVGVKLISATENIDDSPTGQMTRGILASVNQYRSASEGQDIARKLAHKAKLGGTIRRAALGYVNVKENVEGRQVSAVAIDPVRGPLVRQGFELYATGDCSIKQLAARIGDLGLTTLPSRQSPSPVAPSVSKWHRMLRDPYYMGMVVYKGEHFPGRHEALVPPELFAQVQDVIAQRSAPTRRDRKHFHYLKKQLHCDRCRQRGRASKLIYTEVTGRGGTYAYFVCMGRQNKQCDLPYLPVHVVEQAIERHYQSVLLTEEFVESINAQVKDALDREQVGLDVIRKAASKKLRELDGREERLIDLAEQGLPQEKIRQRLNRLREERARLEAEQTASNDRLRAGAEALTAAIGLLRDVSTLYRDTSDEVRGLINDALYRKLWIDEAGVQDADPRPPFGELLEAAASGGPGQEETSHVQRRRAATSKRSARGPRHSEVARRPGASFGRNSSAGSSRTRMAVAVGFEPTVELPPHTLSRRAP

SEQ ID NO: 14376 - protein, 541 aa, synthetic construct
MQASQGVVYSYLRFSDPRQAAGNSADRQAEYAKSWAAARGLTLDESLSLRDEGLSAFHQRHIKQGALGVFLQAVDEGRIPVGSVLVVEGLDRLSRAEPIQAQAQLAQIINAGITVVTASDGREYNRERLKAQPMDLVYSLLVMIRAHEESDTKSKRVKASIKRLCEGWIAGHYRGLIRNGSDPRWVRLVDGHWELIPERAEVVRFAIEKYREGHGADRAFSMMQERGFDTSYLGISPQQIYRLIKLVALKGAKQISVGGEDYLLEDYYPRLLSDAEFDELQLLRGQRSRRRRKGAIPGVVTGIGITYCGYCGTAMTAQNVMHKVRPDGTLTDGHRRIMCMSYMNKGGCDVGGSCSVAPVERAVMSFCSDQMNLLRLQQPIGPSGDLQQGVMSSRKQVVDLDAQLGRITEALALGEGDGVLPITFLRKARDLEEQLAAARVKLHQAERELAGIASRQRPADARLWSELTAGVEAQEVEARDKVRQLMIDTFDRIVIYMRGLVPEGRRAWYIDVLLISKAGQRRWLRVERKSGKWAAGVDRPD

SEQ ID NO: 14377 - protein, 446 aa, synthetic construct
MTPPKPIRKVRCAIYTRKSSEEGLEMEFNSLDAQRESCEAYIASQKAEGWVPVPDHYDDGGFSGGNLERPALKRLLADIESGLIDVVVVYKIDRLSRSLMDFSKLVEVFDRNAVTFVSVTQSFNTTTSMGRLTLNILLSFAQFEREVIGERIRDKFAASRRKGMWMGGVPPLGYDVVARKLVVNQPEADLVRHIFDRFLKLGSATLLVKELNAAGHHTKSWTTQDGKTRDGMPITKNFLYKLLDNRVYLGEAVHKGEAHAGEHPAIIDRATWDKVVAVKTDNAPRKRANAVRSSTPAPLKGLIHCAHCGRAMTPSSTRKKGRLYRYYTCMKAIHSGHESCPVRSIAAGEIEAAVIGQVRALLRAPEIRARAERMAPSMAPADLHVALDRFEVLWDELFPAEQARILQLLVEKVAIAPDGAEVRLRAEGLASVIADITAQTGDRSAA

SEQ ID NO: 14378 - protein, 598 aa, synthetic construct
MDEKPRIAHIYSRVSKGTQVKGDGLRRQIEIASKFIEDVNISNSRDGLPVYTLADSPIYDRGLSAYFGLNTDENAGLGAFLKAAENGQVEKGTLLIVEAIDRISRLPVDDARALFARFKKYGIDVAICRFNLIIYHDKSSDLGQDLLITTAIHLAHLESEQKSKRIRARFTHKRLLEKEGGERRTSMSPSWIELSKDKTHFVLIPERARIVRKMVDLKLQGWGAHRITVYLNDQGYPCWNRSNTWYTKIVEKYLKMIQLVGDFQPVEHVHGEKGVRKEPVGDVIKGYYPALITEEEWIRLKASFKRSGGRQTGAFSNLFSNMLYCPTCGSCMSYYKPNRGRIKVRCRKQIDKQGCDQRALNYEEIEPRLIKALAGLDYAKINNNSFASLQKELNTLEAQVAELEASADDIKTQMLEQSDPRIISVYVNKLKAIYTEQDKAKARFEKLSTQTSDYDVNTLEQLQLERNEDRERYNGFVRSFVKYVIASDSKLGKPLRIVFKSEAVGEVPVFFNDDKNNKAISDIFTEQKDVNEAAPIRLINMSRVHGNLGKLAAIDTVPVPDDLGDPLERIKYLFAVRQAVRQNPEKWQAIADEARLFA

SEQ ID NO: 14379 - protein, 550 aa, synthetic construct
MGDSAKNGLVYSYLRFSDPKQSAGGSTDRQLAYAAKWAAEHDLKLDTHLSLRDEGLSAYHQQHIKSGALGVFLRAVEEGRVPFGSVLIVEGLDRLSRAEPIQAQAQLAQIVNAGITVVTASDGKTYSRQRLKDNPMDLVYSLLVMIRAHEESDTKSKRVKASVRRLCEKWIDGSYRGRVEQGHDPAWLTRNDADGWDFKPETVKAILLVIEMYKQGLGGKRIIEKLNAEGLRMYPTSKENQTLQVYRITKMPQLAGHKPISVDGDEYLLKGYYPPLLSEVEWEDLQRVVKSTGRRRVKGDLPHVITGIGITYCGYCGHPMAGQHLASKKRLPDGRIRDGYRRLLCSAAATFSAVCPVRGSTSVAPIERAIMSYCSDMMNLQGLFEADTSSASRKDLLSAQKNVETIKAQLDKLTDAMLASADEGIPLTFARRARQLEEDLAVAEKALTAQERDIAMLARRDISGADEKWRALAAGVEAQDIETRLQARQLVADTFSRISVYHHGLRPNHTPKSRDYYIDLMLVAKGGSSRWLRIDRNGNWVHGENYDMTE

SEQ ID NO: 14380 - protein, 559 aa, synthetic construct
MPGVGSKLISIESMNREELVPSTKLIAIYARVSTARQEEEGTVETQLTALRDFARQRGYSIVKEYIDDGWSGDILVRPSLDQLRQDAREKTWQAVLVYDPDRLARRYSYQELVMDELREAEIEIIFVTVSAPKNSEEKILHGVRGLFAEYERAKIAERFRLGKLRKVKEGHILVSEALYGYNYIPKLDGKHGYYEINPEEARVVRLIFSWVADDGCTLRKIVRKLQGLGIKPRKSKRGVWNTSTLSTLLRHKGYIGEAHWGASYAVAPQHPIKQDAYRKVKKTSRRMRPGEEWLIIPVPAIIDKKLFERARAQLDANFALSQRNKKNEYLLAGKIGCVCGRSRSGEGVLRGKHLYYRCTDRVLSFPLSATCKERGINARIADRLVWDKIADLMGSEELLSEQISRWLGTRRAKVQSSGDDVAAAEKELAALKVQEDRYNKAYGAGLFTVEQLREYTTPLREKLTSLKNTIASAQQQENAIHVTEMPSADEIKQFSDAAQTTLHNLSFQARRAILLNTVEKIVGTAQQLQVRGYIPVKDHVEFKTSNRHGQDATRHRISV

SEQ ID NO: 14381 - protein, 601 aa, synthetic construct
MNEQLPVSRPKAYSYLRFSTLRQKDGDSTRRQLELAREYAYRHDLSLQDTTIEDLGVSAFRGRNNREGALGEFLEAVREGHIERDSWLLVESVDRLSRQAVEDAYQLISGILALGITVVTLQDEQVYKQGKLDLGKLMILLVKAQTAFEESEKKSIRTAAAWKAARDDLANGKKIKNARIPSWVLWNDDKTDFLINEPVAKTVRYIFELSINGFASGIIAKRLNAEGYSMLTGKLPKWSAANVLAVQQDRGYIGEFTPMKKNPETGKREPIADPAANYYPVLINPEHFYEVQRQLKGRQRSSGSYRKGKMTNLFTGLIKCGCCGSAMAVHQKNKKADVKKYGQYYYLSCSRKTEKSCTSKPLNYRRLERLLVSSFTFLPSILDGNQNNNTQLSDARLEVIRLEQSQKEVQNKSDRLMAVLMERDSNELLLKQLDKLTEEQRTIDNDLKQAIANVEQLTGTLAYTDSKYNDIFTELNSFEAIGYVDWRTRFNTQLRRILLKIVVTTNDSYCDDGVTITCFDNQHYPIASLYGRRSLKKLFGISNNYDIFFAASDNDTAPLDLIGTNARRDNFAIAKSEDEIDQELFDSILEFTKGTSGFDLP

SEQ ID NO: 14382 - protein, 545 aa, synthetic construct
MNKYHLYQRVSKQIQAEEGQGIQRQEQACEHWISDYNKRLLSEGKSAYSKGLIYEDRGKSAYTAANFKRGELGALINDIENGKIEKGDLIVIELIDRFSRANVDFVRGEFQRILDAGVKIAITKWNLVFEENMESVSSVTGRILLEIGMYLAYQESSQKSARIKASRKLLEDSGRKSIAKPPFWLARNLDLKSYTIIEENAEIIRKIFDLKLNLNYGPQKIIKSLGDLDIYRYSIDENGNLIKTTKNSPLNESSINAYFRNTNVIGKLKGKDYYPRIIDDRTFYAVQKRTRENTGGVGEIFRNIFVGVGKCGCLIRQENENGCGGLAKCGYIMAFSSRKVKNPTKGMYLKCNRKRKSTRCEAENINYYLAQNKIYNVLKSLKFDIEQSVDISHLEEKINAIDKSMSKIREYMTQYSDDEEWENQYNIKRIEREKIENEIKASKSRVTGKLSNLDIDFSEEKDRVLFNQFLKDNRITVYFTKEKMEIIIGSLNNFSIKCGYDDNEREIDQLVESISQQGFVGLEVRSRKSEGKELLRFNLPTVLDS

SEQ ID NO: 14383 - protein, 528 aa, synthetic construct
MTYKEGGEAMKKITKIEGNKVASIIKPKLRVAAYCRVSTDSDEQLVSLQAQKSHYETYIKANPEWEYVGLYYDEGISGTKKENRTELLRMLSDCENKKIDLIITKSISRFARNTTDCLEMVRKLLDLGIYIYFEKENINTQSMESELMLSILSGLAESESISISENNKWAIQRRFQNGTFKISYPPYGYDNIDGQMVVNSEQAEIVKYIFAEVLSGKGTQKIADDLNQKGIPSKRGGRWTATTIRGILKNEKYTGDVILQKTYTDSRFNKRTNYGEKNRYLIENHHEAIINHEVFEAVEAALNQRAKEKGIEKRNDKYQNRYSFSGKIICSECGSTFKRRIHSSGTRKYVAWCCSKHLKQITECSMQFIRDEDIKTAFVTMINKLILGRKLILQPLLDALRGMSNSDNLSRIQELEKQIEKNAEQRELLVKLMAKGYLEPALFNRENNELQMEADNYMGQKEALIHALNGELSKVQEVSNLIKFTNKAEMINTFSEQIFNDYVEKIIVYSRVEIGFVLKCGITLRERM

SEQ ID NO: 14384 - protein, 523 aa, synthetic construct
MAVNKNVMIIPAIKRVGNNRKEDETPKLRVAAYCRVSTDSDEQASSYEVQIEHYTEFIKKNSEWEFAGIFADDGISGTNTKNRDEFNRMIDECMAGKIDMVITKSISRFARNTLDCLQYIRKLKDKNVAVYFEKENINTLDAKGEIMLTIMASLAQQESQSLSQNVKLGYQYRYQQGEVMVNCSRFLGYTKDENKRLVIVPEEAEIVKRIYREYLEGSSMDKIKKGLEADGILTGAGKKRWHTSTIRKILSNEKYIGDALLQKTYTVDFLTKKRVVNNGIVPQYYVENNHEAIIPREIFMQVQEELVRRSRGHISTSGKKRNFSSNHVFSQIIFCGECGEIYRRVHWNNRGKKSIVWRCVSRLENTGLTCHSRTVLEDMIGLATVEAINKLIGQKDGFLTILKENIETVISETDNNIVAEIDKKLEELQKDLLRLANSKEDYNDIADEIYRLREERHKALAEEAGKKGSKQRLEDMEKFLNEQSTLLEEYDEQLVRRLIEKITVYEDKLTVEFKSGTMIDVVL

SEQ ID NO: 14385 - protein, 558 aa, synthetic construct
MSTSPQTPNPKHPTSKVFSYVRFSSAAQELGSSLARQYELTRQWAAQNGYEVDDNLKFEDLGVSGFKQDARREGLERLLAAIDAGYIRSGDVVAIERLDRLSRAGLARSQQLLNSILSRGVNVVAVEEGLFLTKDSPNVFNDVLRVLLAAELANRQSVEKSRRVRDAKRRQRAAAAEGKVIRKRLPIWLTMNEDGTGYTFEPEHVETVKQIISLRRAGRGWSGIAADLNADGRRVRWGKNGWSDTSTRSIIQNPALYGAYQSGEMRPVDGDESAENGRLEWVPGELVLDFYPALISYAEWRDLQPGKQGKAAGQAGGNSRTNALAGVARCAECGGTLTRKCRQRKNKEGNLVHYAFWTCRQGEQGRCPVGASGFKDLGAEVVAACRHLEWVRPSDLGDVNRARDKLEQELDRVAGVLERLQKQLVDGDADDVDIVLPLIKKAKQDKSALENELDLLNRSTSTETAKADIERLGTISGDVVAFNNLLRKVVDRIVVRRRGKLSYSFTVEQTNGHQFRVDVIRTKQGQDPVRFYNRGVEGLPGDIDVEQLYPWETDQEDD

SEQ ID NO: 14386 - protein, 606 aa, synthetic construct
MKKVFVYHRVSSDQQLDGSGIARQAELLEAYLKRTNILAEMDDPEPVIITESGGVSAFKGHNMLITSGLGAWMQEVRAAMWDGSHLVYENGDRFSRQNPFTVIGYINDLINHNITIHDATMNIIISRQNSAMLPMVLMNAQRAYDESKYKSDRIRKGWAKKREQAFNKGTIVTNKRPQWIEVEKDKYVLNEKAAVVKEIFALYQTGMGCPTIAKKLQGKEGEQYKFNRPWTGELVHKILTNRRVTGKIFISETIRNHADIENPVTQKKYNMDVYPVVINEEEFELVQELLKSRRPNAGRVNVKKDGQEEVLIKSNLFSGIARCTECGGPMYHNVVRAKRTPKKGDPKIEEYRYIRCLNERDGLCENKAMTYETVERFVVEHLLGMDLSTVMKEQEFNPEIEVLRIQIDQVKEQITNYENGIERRKSAGKIITFDMREDLDDAKSELERLLARQASLATVQVDVAVLQDVNVTELYNVNHVDIRTRYENELNKIVSTIRLKRNGTSYTIDISYKQNELKRHVLFVENKKKEQTLISEVIIEDVDGGKFYYTPSFMIRLEDGEIRFQHTNEDLSIVDYSLLLNYVDAVDRNDTVGVWMRNQFNFLTSN

SEQ ID NO: 14387 - protein, 535 aa, synthetic construct
MIRRAAIYARFSSDLQNERSCQDQVDYCTTWAGRNELTVVASYSDEAVSGASAINRMGLARMLRAARERQFDVLLCEDLDRIARKQADLHRIRDELTFLGIAIMTVADGTITAMHAGLKGLMSEMYLTDLANKTRRGLRSRVAEGNSGGGRSYGYDLVPGIAGRHVVNEREADIVRRIFSEYLAGSTPREIVARLNAEGIPSPRGGSWNASTINGSKQRGNGILQNRLYIGEIVWNRQRFIKDPSTGKRISRPNPESEWLRSEVPHMAIVERTVFDAAQDRKAERTTERSSNPTPAKPRHLLSGLLKCGCCGASYAIVGRDRLGCVGYRERGDCNNNRSVTREHVERRVLEGLRNNLADPDLMAEYVRSYHEAMRELASTQTNDRAAIERRLAELSRGIQRIVDKVVDGTAPDALMTRLVEMEAEEKSLKASLAQIDEEFVPVALHPGAIEKYRRIVEDLQAHIDSTHAGAPTDALLAAARKLIGKVVITPTENKKPVNITLHGLLAELFLVQGTPQYRGALVAGAGFEPATFRL

SEQ ID NO: 14388 - protein, 483 aa, synthetic construct
MRVAAYIRVSTQMQVEEGYSLSAQKERLKAFAFSQNWEIVQFYVDEGISAKDMERPELKRMLEGVKEKLFDIVLVYKLDRLTRSVIDLDRMLKIFSDHEVMFKSATEVYDTTTATGRLFIRLVASMAQWERENLGERVRMGMDEKAREGKWVINLPPYGYEKDGDYLKIIESEAAVVRKIYEMYMTGKYGIAKIARLLNEEDLTSKKNNTWQYNTVSYILRNPLYIGTMRYNYRVNKEQYFEIENAVPAIIDEVSFQRVQAIINSRKTKHPRSATSKFIFTGVLRCSRCGGCMAGKYSISKRGDKKYHSYNYYCHNSKFGSCDQPLINQNYLEHQFLNRISHWNLNKEVNEAIIEDKKSVDNTDSIANINKEIEEIKKRRSKWQYAWVNEMISDEDFKKRTNEENKKEKMLLEELEALTKIENPIMDNYNIVDILSDIQLNWSNLEIHEKKQLVHLTFKTISVNKIKKLQKPESVEIVDFDFL

SEQ ID NO: 14389 - protein, 547 aa, synthetic construct
MKLLVTYIRWSTKEQDSGDSLRRQTNLIDAFYSKHKNDYYLLPAHRYVDKGKSGFHQQHKNQGSDFRRMFENVMSEAIPEGSLIVVENFDRFSRADIDTAIDDVRQILRKGVSILTLGDGELYDKSALTDPVKLIKHIIIAERAHQESLVKQKRIAQVWNHKTQLARELKKPMGKQAPGWLELSEDGSHYIVDEDKASLVNIIYDKRLSGMSMFAICKWLNEQGYPTINQRKVRISKTKKPDGNWSALSVKHILTSRSVLGYLPAKISTEDRKTVLREEIEGFYPQIVTDSKFYAVQQLLEETGKGKTSSGEHWLYVNILKGLIRCKCGLVMTPTGIRKPVYQGTYRCNGNKESRCNYGTVSRKLLDTQLCSRLFSKLSQLHDEATDTAKLDELQRRLNTVDSELEKLTETLIQLPNITQIQEALRVKQEEKDELIVQLSREKARVKSVSSLDLSGLDMESVEGRTEAQIIIKRLVKEIVVSGNEKLVDIYLHNGNMIRGFPLDGKDDHTLTLEEATDEMQSLDDMLIFGEPVTRIYPAGDMEEVDA

SEQ ID NO: 14390 - protein, 604 aa, synthetic construct
MEIRKAYIYSRVSKGTQTKGDGLRRQVESATKFVEMENASNRSSGRHTYVVEDNLITDRGLSAYKGLNTEANAGLGAFIEAAKNGDIARGSLLVVEAIDRISRLPADEARKLFGMFKTFGIDVAIVKFGIIIYHNENTKLEHDLLLTAAFHLAHLESDQKSKRIRARFEHKRKLEKNGGEKRTSICPAWMELSHDRTEFVLIPEHEQVLRRMIEMKLSGIGCLRIAKSLNEEGILNFSGKPWQVKLVEKYLKMDQLIGSFQRVEHVRDENGTIQKKPIGLIEKNYYPAVIDGDTFLRLKQSFKRSGGRQTGAYKNLFSNMLYCPTCGSAMSYSKPNRGRKKIRCRKQIDGRGCSQRALYYDVLEERLIQALAGLDYAKINSDSFVELEKEINTLEATISDLEEQAEIVNNQFLKEDDVRIQSTFREKLKSIFDKIDDNRKRYEQLVTVKQDYDLSVVSELKLEEMKDREKYNQFVRNFVDYIIASDDCEDSPKFVRIKFKADSIGEVHFGFKGELYENEAVLTDFFTRENTSSGVGVKRALSLSKVASNHQKLAEISDVKPPMTKDVREAIRYYFELQQAVKSDLPKWGDIAKAAQLPLEGRVI

SEQ ID NO: 14391 - protein, 499 aa, synthetic construct
MVVANKKVESTVIEAVGYIRQSDERQDKEDISEQTQLRKIEAFCEFNGFKLVKVFKDIDYSGFRIKYTKRPGLMDALKYVENRPAVKKFVFFNLSRLTRLRKDFQAIHETLKTLNIDICSASEAVDFSTANGRFVAGILVDMNEYYSDSLSDTMNETKKTNAEKGRWNGGPAPYGMLKKKDGYGFIEDFEVSYYIRKAFQMAKDGKGTYLISKWLNSQGFKTKTGREWAPRRVRYMLQNPTYAAMQKWKDKYYPLLECPEFVSWDDFCYIQSTLFGESNVWKGKQRQLLSSILICPVCGSRMHSRYFNHKNNRKYVCSRKIETGNCKSPNLDQASLNAAVISLLGRVAEEKFEPAHILPELAGTEDKSLNSIRKLQDELQNIERAEQQVFDDYYLHQKINEEQYNSIIRRYEKRKHEIHQLLDKIPLPVSKSFGDYDDVLKDFAEAIEVLEEDDKRRSVELLVEKIVPGEPTLVHFKWGEVKEIVPTETKKYKSKLIIY

SEQ ID NO: 14392 - protein, 493 aa, synthetic construct
MKAALYIRVSTEMQAEDGFSVEGQKARLFNFAQSQDWEIYDFYIDDGYSAKDLNRPDMQRLLADMEEQKFDVVLVYKLDRLTRSVADLHKLLKTFDQYGVKFKSSTEIFETTTAMGRFFITLVGAMAEWERETISERVRFGVEQMVVEGKRPGGVYPYGYTSEGKLIPEEKELIREVRGLYMSGMGYKSIAMKMNREGKLRRGSEWTAATVAYTIENPFYAGIIRLGSKTNKGTYANTKRDERVKCIYGEGDHEAVFTREEYEETKKFMERKTHGGYSRIKTYWFSGVLRCGRCGAAMFGKLTTKRMAGGETVRTPYYICANRHANSSCDMPIFRQVHIEHLMMEYIMSIRADSQLLAKESSALLKDQAKKTSEVDDAKRELARIVERKEKWQYMFVEGLISKEEVRKRITEEDEKEKEAKKKIAANEVSLSAIPKLEELAEMEELWPLIDDEEKKMVVFTLFKKITINTPLTNPKGVKNKFFEARIDEVLFN

SEQ ID NO: 14393 - protein, 496 aa, synthetic construct
MRAVLYLRLSKATEESTSIERQERDLRDLCAREEWDVAHVLVDEGISGGKRRANADRALRMLANDEADVLCVWKLDRWSRMGLSAIADLVDVLDKRGLFVAHMDGLRSDQTAWRLIAAVLSEVARAEREAITARVASSQAFMAQQLRWKGGKLPFGYTSGPHPSGEGRTLVVIPDEASVIREATERVIAGQTLYRIVHDLNAREIPSKNGGRWSIKVLRDVLLGQAIIGRMTHKGNVVTDAEGYPAQAWEPIVTVEAWQAMRAMIEPTPLTEPRRKASALLSGIARCAGCGTALHYEPRSNGRSHVYRCQARSSGRVCRAAVSIAARQLEQYIESEFLRGYGDRDELRLTVLDEGATERAELTSAIETVLARMKGATSDELPQLMERLQEMKQREASLPTGTREAWVPTGRTYREAYADSDMDGRRALIASVLPTLRVKKSKHPGRKGLDVSRLLVVWGLVPVRRAGGVTMSERYGELVEHDELGHEVPGDVEPID

SEQ ID NO: 14394 - protein, 557 aa, synthetic construct
MNKKTKVYTYKRVSTSMQVDGYSLDAQDDRITKYADAFDFEIVGEYEDAGKSGKSIEGRAEFKKMLEDIESNKDGVSYVLVFKLSRFGRNAADVLSTLQFMQDYDVNLICVEDGIDSSKDAGKLMISVLSAVAEIERENILVQTMEGRRQKAREGKWNGGFAPYGYSLNNGKLEIEESEAEAIRLIFDKYTNTDMGSNGIAKYLAQQGIAKKERQNGNSPLFSAKLIRDILDNPIYSGKIAFGRRRNEKITGTRQYHIVKQDDYMVCDGIHEAIIDEDTWEKVQEKRKLQAKRYEHVNKGKDEKIHLLSGILCCPMCGSGMYGNKSIKKKNGKHYKDYFYYGCKHRSMTLGHKCTYNKQLQEEKLDSAVAEVIGKLVGNPKFADMMKKKINIKTDTSEVEKEIANYQKQLSQYIGTKRSLENQIDNLNYDDKHYDRKLSDLQDRLDKMYDNIEDVEHSLKDCKDRKRAIEAEKLTGDNIYKTLIYFDKLYNVMEDADKRALLTALIKEIHVYEEEQANGQWLKSIVFKLPIIESNMEICLDNETHVECVCLMTRKEK

SEQ ID NO: 14395 - protein, 543 aa, synthetic construct
MRTLIYARFSSALQNRRSIDDQVTACRTRCEAEGWTVVDIFTDYAIGGGAGVSEDQRPGMAALLARLDAGDIDQVIADTTSRIARGVGDSDHIRKCITHAGARLFTLADGQVDNLVGGIKGVIDEHMRVELAHNIRRAQKGRAAQGLSPAGIAYGYRKVLKFDDRGEQIKGLREPNPETAAVVVRIFTEHAAGKSIRDIVNGLNAEGIPPPSGKFWRSNTVSGSAKRGDGILRNRLYRGELVVGRTQKTIDPRTRKVRIKPKPASEWQVTPVPHLRIIDDELWAASDAARLVYDMKPLQQTVRPKRLLSGLVKCGCCGSNYIVVRPERWGCSSHRDSGSAACANERTIATADLERRVLGGLSDRLLDPDLVSAFVKKYHAERAQRSREEAKRDAGLRRKLSDAEGRIARLVEAVATGGGEFTELRSALADATRDRDSLRQVLADADAAPVVALHPQLADEYRRLVRNLADALSDPADRSEAAPSLRAMIDSIVVLPKDERQGVDIELTGHLAAMLELATGKAPKSRNSSGMIQLERVAGIEPA

SEQ ID NO: 14396 - protein, 506 aa, synthetic construct
MRYGEYLRKSRMDDPHEPLEETLRRHREILKKFAVEHNIPIAEKDIYEEVVSGDSLYARPQMLRLLEDVAAGKFDGILCMDIQRLGRGSMSDQGIILEAFKSSGTKIITPVKTYDLNDESDETYTEFEAFMGRQELKMIKRRLRRGLKKTIEDGGYVANAPYGYDKAKIGKRPTLKINEEEANFVRLMFDLYANKNMGCQQIADVINGMGAKPHRAAQFGRTAIRQILTSPVYLGKIVWDRVTYIHPGMQGSTKHGKIYNPKESWTVVDGLHPAMIDEDTFYRVQEIFANRYHSPSFKGYVENPLAGLVICSNCGAAMQRQMCKGGPILLCQKRGCIVSSRLALVEQEVLRRLREEIGNLSAMQAVPVDEDDHAEEVLKSIEREIRTAKQQDSRLHDLLEQGVYDADTFLARHQILLDRIEKLKDSKLPFLQPKKQLNIPAMQMRIQDVLDHYPNASGAAKNEMLKSVIEHIDYRKRKGAKPAEFELDILLFTPLCRYIKPLRADK

SEQ ID NO: 14397 - protein, 516 aa, synthetic construct
MPTAFSYARFSSSTQKKGSSLERQKTMVARWLVAHPDYSLSDQTFQDLGKSGWKGEHIKEGGGFAELLAAVQAGLIQKGDAVLVEAIDRTGRLPVLDMLSNIVSPILRAGVSIVTLEDSLVFTEASLNEGGHIYILVGKIQAARQYSDNLSRRLTASYDSRRRLAKEGTPPKRNTPVWLTSKGEVIQEIADQIKLAFELYTSGLGKAVIAKRMRESGVPALAKTSGPGVEGWLRNEAAIGRWNGAEVYKPIVDLSRYQLAQIEGERRKTAPTAKTATHFYVGLVKCGSCGGNFIMRTIKGVQVSMRCRKRQELKGCDNKKVIPKVVIDAVYRYTATPAARKVVAHEHRGVNEKAIIAAEARVLELSKGIEEMAQAFRGGRKIPEVVDQIRAMDGEREAVERELVLLKAKVERSPTNWRVQGRVDDLGRTDPQRLAAMLRSVGYTITIHTDGRLCTSESETVYRYAGVDRREDMYRLAVVGGKELLVSKIAEEVFDEWWEPGDGDEVIESTYTDGSE

SEQ ID NO: 14398 - protein, 635 aa, synthetic construct
MDDTTPLPARKILYKYIRFSSIQQAKGSSFARQNARLEKYAEDNNFEIDDSLDLRDFAKSGFHGINKEIDQGLGRFIAAIEKGLIPTDGSAYLAVEQFDRISREDIDKAQDLFKSILRKNVNIITLMDGRIYTKKSLSNFMEVLYSLFLMEQAHQESLKKSDRIKGAYVNKLKKLKELAAEQKEILEEWEKNKSGKKPELEPLINQIQFSSQVPCWIDQKIEIIGGRKFRKFVVNEEKAKIVRYALSLLNDDNGYLNVSAQLNKENIPRLDFNTNRKRSTRKDIWTNRAVNEFVNSDSIFGELAVHNNFFVDKEFDYEGIKASKKVMTRTHLENIANYYPAIVDKKLIMGLRARANAKKKGRVAGRTTTNNLFQNMLFCGKCGDSMHLRQSKRETKKGTYQRFYVTCYAAAHKACDAKMFPYTQLEEQLVKYLINPVNTAELNEEGKVIEEKRKQKLLVLKGEIQDIQSRIDEFTQEITKNRNIKPAIALSIISEFENDKALKQSKISELEMQTEKLHDALQVGDISNFDLVGDDGRNGFKVAIKQRYAGFIIYTNEQILFAIEKTGATTIFKLQNKSRWGTVLKAEKGDIFEKQVQAIKFLRDRAADYKEGKLYELIQTFKATNIDIFEGQYIE

SEQ ID NO: 14399 - protein, 521 aa, synthetic construct
MNRKITTIQANKKLSHQSKLPSIKKKKVAGYARVSTDNEDQTSSYETQMKYYEEYISSRKDWEFVKMYSDEGISGTNTKKRLGFQEMVNDALAGKIDLILTKSVSRFARNTVDSLSTVRKLKDVGVEIYFEKENIWTFDSKGELLITIMSSLAQEESRSISENITWSKRKQAAEGKVTFPYNNVLGFKPKEDGGFEVDKEQAKIVRYIFGQFLSGKNPNQIAKHLTENKIPTPRGKTRWSYSSVRSILTNEKYKGDALLQKYYVADFLNKTQKRNNGELPQYYVENSHEAIIDKEVFDAVQVQLSENKKWYTEKNYFGKIRCGCCGSSYVRHLWHSNDKYRETIYRCKDKYKNEEKCDTPHIRDDEIQRWIVSALNKVIDNRKEIIGNIKLLIKMIKEDRGLDDEIIQLEEKLENIRTDVEKLIITNSKIAQDQEEYTRKYNKLIEEYKLLEKQLEQRNLDLLSKNKRVRELKIFIDSLEKQDELLTEYDTKLFNYLVDTIIIHEEKRIEIHLKNGEVISI

SEQ ID NO: 14400 - protein, 515 aa, synthetic construct
MKTAIYLRKSRADLEAEARGEGETLAKHRTTLLKIAKEMNLNVLSVREEIVSGESLVKRPEMLALLEEIEDNKYDVVLCMDMDRLGRGGMKEQGIILETFKRSNTKIMTPRKTYDLNDEWDEEYSEFEAFMARKELKIITRRMQRGRIASVEAGNYLGTHAPYGYDIHRLNKRERTLTINPEEASVVRMIFDWYAHEDMGANAIRSKLNDLGYKSKLGNEWNPYSILDILKNNVYIGKVTWQKRKEVKRPDAVKRSCARQDKSDWIIADGKHEPIIPASLFEQVQEKLNLRYHIPYNTNGIKNPLAGIVKCAKCGYSMVQRYPKNRKETMDCKHRGCENKSSYTELIEKRLLEALKEWYINYKADFEKHKQGDRLKETQVIQMNEAALRKLEKELVDVQKQKNNLHDLLERGVYTVDMFLERSNVVSDRITEITSTMENLKKEIKTEIKKEKVKKDTIPQVEHVLDLYFKTDDPKKKNSLLKSVLEKAVYKKEKWQRLDDFELVLYPKLPQDGDI

SEQ ID NO: 14401 - protein, 514 aa, synthetic construct
MVIPARKRVGSTAAKEKIKKLRVAAYCRVSTETEEQNSSYEVQVAHYTEFIKKNNEWEFASIFADDGISGTNTKKRDEFNRMIAECMDGNIDMVITKSISRFARNTLDCLQYIRQLKDKNISVYFEKENINTTDAKGEVLLTIMASLAQQESQSLSQNVKLGLQYRYQQGKVQVNHKRFMGYTKDEDGNLIIVPEEAEIIRRIYRKYLEGQSLVGIGRALEKDGILTAAGKPRWRPESVKKILQNEKYIGDALLQKTVTVDFLTKKRVKNEGHVPQYYVENSHESIIPKELYLQVQEEIHRRSNIYTGASKNKRIYSSKYALSAITFCGDCGDIYRRTYWNIHGRKEFVWRCVTRIEQGPEVCKNRTVKEDELYGAVMTAINKLLAGGNNIIKTLEENIHAVIGETTEYQISEINNLLEEKQKELIKLANKSQDYEHLADEIDELRDKRQTLLVEDASLSGENERINELIEFIRKNKFRTLEYDDKLVRKIIQSVTVYEDHFVIAFKSGIEMEI

SEQ ID NO: 14402 - protein, 520 aa, synthetic construct
MKKITKIDELPQGQLPNTKLRVAAYARVSTDSDEQLESLKAQREHYERYIKSNPEWEFAGLYYDEGISGTKMEKRTELLRMIRDCKQGRIDFIITKSISRFARNTVDCLELVRKLIDIGVYIYFEKENLNTGDMESELMLSILSGFAAEESASISQNSKWSIQKRFQNGSYVGTPPYGYTNIDGEMLIVPEEAEIIKRIFAECLSEKGGGTIARGLNKDKIPARRGNSWSAGTVIDMLRNEKYMGDILLQKTYTDSNYNRHPNTGEKDQYYYKDNHEPIISREDFAKAQDLIDERAKMKCKDVKKNVYLNRYALSGKIVCGECGRNFRRKTNYSAGRSYIAWSCIGHIEDKESCSMLFLRDGEIKATFTTMMNKLAFSNKLILEPLFKSISQIDEDSDRERMDAIDKRMEQLMEERNTLITLMAKGFLEPALFNQERNVLDSEMKNLSTEKTNLVSNSASGVLRANEIKDLIDYVSADNFNGDYTEELFEEFVVNIIVNSRDELTFNLKCGLSLKEKVVR

SEQ ID NO: 14403 - protein, 557 aa, synthetic construct
MKKKKAYVYTRVSTSMQIDGYSLDAQEERIKQYAKAYDIEIIQTYKDAGKSGTSITGRNEFIAMLNDIAAEKDKVDYVMVFKLSRFGRNAADVLQSLQVMENHNVNLICVDDSLDSSKDSGKLVITILSAVAEMERENILSQTMEGRKQKAREGKWNGGFAPIGYSLDNGELVVNEDEAKAVRMIFDLYANSDMGANGVSKYLVSLGINKPIRQNGKNPYFSASLIRQILDNPVYNGKIAYGRRKTIKDKNTGKIKLEKSDHYIIAQGNHEPLIDDELWNAVQEKRKSQAKKYEKINRGKDERVHILSNLIKCPYCGAGLYGNKSRKRNKNKEGEHYKDYYYYGCKHRQMMNGHKCTFNKQIRAELIEKEVETIITQIVSNPTFAKKIEDKINIQIDTKEIDEVINKHLAMIRQLTGTKASLINQIDSLNFEDKHYDRKYTDLNLRLDAIYDQLEYVEMQLNDSRKRKEAILEEKITSDNIYKILVNFNSLYTVLSDIDKKRLLNELIEEIQIYDEKTEKDTWIKSVVFKLPLIDHDIDYSLDKIDNVETMVLMSRV

SEQ ID NO: 14404 - protein, 510 aa, synthetic construct
MRPTGLDVFIYLRKSRKDLEREQNGEYDTLERHRKQLLELVKKENHNLVAPPFEEVVSGEYINERPKIQELLKEVEDGAVDGVLVMDLDRLGRGDMFDMGLIYRAFAYSETLVITPTEVIDPTEEGAELLFGVKSILSREELKNINKRLQRGRRASASEGKFIGKKPPYGYLRNEKMKLVPDPETAWVVKLIFEKMAEGYGRHALARYLDEHKIPPPERANQWEHSTLTAIVKNEVYTGTIIWGKTKQYKRNGKRVRKKMPRENWIIKENAHEPIVSKELFDRANEAHSSRWRPPMIEPNTLTNPLAGLLRCSICGRVMKYQPNRDRPNHHIRCYTRTCAPFHKGAGLHLVMDKVIESLSDILESIEFEGELLERKKVSLIPEKERALKEQQTVLKKAQTQKDNLHDLLEQGIYTIDVFMERQQAITERIKNAQEKIAQLKKEIDIEQEKEKHYDQFLPKARNALKAFYETDNAFEQNKLLKSIIEKIQYTRKKDWVEPDHFEIKIYLKI

SEQ ID NO: 14405 - protein, 566 aa, synthetic construct
MARPARKAVEPVAAHAPRLFIYGRFSSQKQADGDSYNRQMTYAHEWAIKNGFEVDDSLTMFDHGLSAYKGDHVKKGALGAFLKAIQKEMVRPGDVLLVESLDRLSRAEELDALGQFATIVQAGITIISMQDGIYNQERIRETQGGILHAALAVMTRAHNESERKSYLVTKTAHAICRAWDAGQGKTRIPVGKDPSWVEWDKADKRFELRPDQVASLEAMIGFFRAGYSATRLFAQMEASGIPLPEGIGNVARVNRVVKNRALVGEKIIQVGETTYTIPNYYPAILTEDEFTSLQHVRKQRGRRVGKGEVISFVTGMRLTFCAACGHAMANQNIMNRSRRADGLPQDGHRRLQCSGEQKSVNRCRAGSCSIVPVERAVMEFCSDQMNLASLFVDGNEKTKTLSAALTHARQEVEQAQAALDTFIEVGALDSKGAGAKVIRERIAKLSTDVDERTAQVSHLEYELASLHRHSTPAVAEVWAALRKSVTQLDNEARIKARQLVADTFARIEIGLAHVDLIELRLVSKRDVVRTLQIDRKTGERRDENVVEDPQHEALKPRRRAKDRVTA

SEQ ID NO: 14406 - protein, 449 aa, synthetic construct
MKQVIGYLRQSTMKQQSLAAQKQAIEAIAEKHHIQHINFYSDKQSGRKDNRSGYRQMTQLIQQGQCDILCCYRLNRLHRNLKNALKLIKLCQTYRVHILSVHDGYFDMDQAFDRFKLNIFISLAELESDNIGEQVRNGLQEKAKQGRLITTHAPFGYEYHNGTFIINQNESPTVKGVFNYYIKGHGYKKIAQLLEEDNTYINRQPYQVRNIIINPNYCGRVNNQYGQFDNMFPSIVSTSIYEQAQRLRSQKQTKQTPSDNQLKQKIKCPCCNATLTNMTVRKKNHTLRYYVCPKNMNASRFVCDFKGINAQTLEDKVLEVCRDFYQNQRIYTKIKSAIDKRIKRQRNIEKHHTLTQEQLIEKLAQGIIDAETFREQTQSLRQQPQRTTSINGHQIQHTIQNIIQKRFTLNILYPYIETIHITKDKNLIGIYFKNEPLNIVNQTMQSSIA

SEQ ID NO: 14407 - protein, 522 aa, synthetic construct
MRKVTRIDGNNALQAFKPKVRVAAYCRVSTDSDEQMASLEAQKDHYESYIKANPDWEFAGIYYDEGISGTKKENRTGLLRLLADCENKKIDFIITKSVSRFARNTTDCIEMVRKLTDLGVFIYFEKENINTQRMEGELVLTILSSLAENESLSIAENSKWSIRRRFQNGTYKISYPPYGYDYVDGKLFINKEQAEIVKRIFSEALDGKGTQKIADGLNSDKIPTKRGSHWTATTIRGILSNEKYTGDVLLQKTYTDENFKRHYNHGEKDQYMIKDHHEAIISHEEFEAAQEILKQRGKEKGVIKGSSKYQKRYPFSGKIKCAECGSSFKRRIHGSGDRKYIAWCCTKHIKDASSCSMKFVREDAIHQAFVVMINKLIFGHKFILRPLLQSLKKTNYSDNITKIQEMETKIKENTERVQVIMGLMAKGYLEPALFNAQKNELLKEAALLKEQKEAIKRAIDGSQTILVEVEKLLKFATKAEKQIDAFDIEIFEDFTREIIVFSQEEIGFKMKCGLNLRERLVK

SEQ ID NO: 14408 - protein, 522 aa, synthetic construct
MTTRNVTIIPARKRIGNSAKAEELPKLRVAAYCRVSTDSEEQATSYEAQIEHYTNYIKSNPEWELAGIFADEGITGTNTKKREEFNRMIEECMQGKIDMIITKSISRFARNTLDCLKYIRQLKEKNIPVYFEKENINTLDTKGEILLTIMASLAQQESQSLSQNVKLGIQYRYQQGKIHINHNRFLGYTKDKDGNLVIVPEEAEIVKRIYREYLEGSSMLQIARGLEADGILTGAGNPRWHTSTINKILRNEKYIGDALLQKTYTVDFLSKKRVANNGIVPQYYVENSHEPIIPREIYMQVQEELVRRRCVHISKNGKKRNYSNNHPLSQMVFCGKCHEVFRRVHWNNRGKKSIVWRCVSRLENTGLFCTASTILEDTLKEKIVEAINIAVSGKNSFLAILKKNIETVLNEDLDESTADIDKRLEELQAELIQLANSKEAYDNIVNEIYRLRDLRQETLSRNALRQDKRDRIAEMTDFLNMQTGGITEFDDKLVRKLIEKATVYNDRLVVEFKSGLEIEVNL

SEQ ID NO: 14409 - protein, 508 aa, synthetic construct
MINVVGYARYSSDNQREESIVAQERAIKEFCQKNNYNLIKLYKDEAISGTSIKDRTEFLELIEDSKKKEFQCVVVHKFDRFARNRYDHAIYEKKLNDNGVKLLSVLEQLNDSPESVILKSVLTGMNEYYSLNLSREVKKGLNENALKCVHNGGIPPLGYDLDENKRYIINEVEADTVRIIYKLYSEGVGYTSISEQLNKMGRLNKLGKPFRKTSIRDILINEKYTGVFVYGKKDGKGRLTGKEVKIEGGVPQIISKEDFEKIRNKMKNRKTGSRATAHETYYLTGVCTCGECGGRYSGGYRSRQRDGSITYGYTCINRKTKVNDCKNKPIRKEILEEFIFKTIKKEIFTEKRIKSIAKKVEKSVNEKILNKVQEIKKIEIEIQKVKNKIDTLLEIFLDNKVSKEAFENKNRKLENELFILTQEKNKLSASKKISRENIESFIRNFKSNFNKSNIKKSVIETFVKEIKVYETYVEITLRLFPMYIDRNGGDDESRTRVRNHNDHKLLQV

SEQ ID NO: 14410 - protein, 509 aa, synthetic construct
MKRVAIYSRKSKETDTGESIKNQINICKNYFKNQNLECSFEVFIDEGFSGGNTNRPAFKKMLKLCTLKKFDIIAIYKIDRMARNITDFFSIYNKLEKNNITLISVTEGFDATTPIGRMMMTMLAGFADMERENIKQRVKDNMYELAKLGRWSGGTPPTGYKSITKVINGKKSTYLNLINEECNNIISIFELCAKGFTSTQIGKKLNMNPKTILNIIQNPTYLKSDIASKNYLESIGFKVYGQINGKGYLSYGRRPRKNGQKLNNSSNMFVAVSEHEGIVDSSLWIKANNQLSKRSKKAKPRTSTNSFLSHLVKCSCGNYMFISSGRKRKDGSKSFYFRCTSKVNKNLVCNNKKSLRVDLAEEYILKELLNIKISEDLLKEHIINNTKHNDLNNKIKSIKNKIQSNNLSINNLSKKLLYVNGNTLIILNDKINNLALENSNLNNELLDLNKKSILENETINSDILKKRLNILLKNFDSLPLDQKQVFIRSLIKEIIFDGDQSIEIIFNDC

SEQ ID NO: 14411 - protein, 583 aa, synthetic construct
MATRLYSYVRWSTDKQSGNTSLDRQTDKAKAFASLHGLEYVQILDAGISAFRGKNTTQGALAGFIEAVKAGAIPNDSYLYVENLDRLTRQDVMTALNLFTGLLSLGLTIVTGMDGKVYSQESVKSNVTDLMMSLFLFSRANEESLTKQKRAHETALKLIDRHRAGLPVNIKSAGSAPWWIDASMGTYEAVKPHPVHWKAAQKAVELMLEGWGCFRVASYLTDNPDLYPPPRGNRGKGKKRSECWAVANLKAMRSNRALYGEKVITIDGVTHRLSNYFPAVCSQTDFARLQDVACNNRHKVGEVRQTITLLSGLGLLRCGHCGGAMVFFTKEGRIRYVCETGKNKTSACRVWSVSGLLVERCLLAPLIRGYMDLMMGKQGKREDLTQAIEAKQGELNGIESQISNITSAITMGGNIPALVASLQALEHTKSGVLVELERLTQRQALQDGKDHQLESMVDFYELLTPDLLEDTADERRLKVREVVRAVVRSVTLSKGPDKALTLSYELPDKTVYTYTGTLTAEGKKGYTLEVVNGDIQINGTEDNEEAQRLIGVIQDAEQEYHKAISKILAGFPAPVGSHFFGKR

SEQ ID NO: 14412 - protein, 515 aa, synthetic construct
MKTAIYLRKSRADLEAEARGEGETLAKHRSTLLKIAKEMNLNVLSVREEIVSGESLVKRPEMLALLEEIEDNKYDVVLCMDMDRLGRGGMKEQGIILETFKRSNTKIMTPRKTYDLNDEWDEEYSEFEAFMARKELKIITRRMQRGRVASVEAGNYLGTHAPFGYDIHRLNKRERTLTINSEEASVVRMIFDWYANEDMGANAIRSKLNDLGYKSKLGNEWNPYSILDILKNNVYIGKVTWQKRKEVKRPDAVKRSCARQDKSDWIIADGKHEPIIPESLFEQVQEKLNSRYHVPYNTNGIKNPLAGIIKCSKCGYSMVQRYPKNRKETMDCKHRGCENKSSYTELIEKRLLEALKEWYINYKADFEKHKQDNKLKETQVIQMNEAALRKLDKELVDVQKQKNNLHDLLERGVYTVDMFLERSNVISNRITEITSTMENLKKEIKTEIKKEKVKKDTIPQVEHVLDLYFKTDDPKKKNSLLKSVLEKAVYKKEKWQRLDDFELVLYPKLPQDGDI

SEQ ID NO: 14413 - protein, 638 aa, synthetic construct
MLNNTNTQNGQRKTLRCAIYTRKSHEEGLEQEFNSLDAQREAGEAYIESQKLQGWKAIPYRYDDGGFSGGNMERPALQRLLADIDAGKIDVIVVYKIDRLSRSLLDFMKMIELFNEKEVSFVSVTQHFSTTDPTGRMFLGILITFAQYEREVIGERIRDKVAAAKRRGKYCGGPAVLGYDVDRVNKKLLVNQSEAPLVKLIFRRYTQVGSAKKVAQELGRQGYKTKSWTTKKGKERVGTEWNTAQVYRLLNNRLYIGEIAYKGNNYPGEHEALIDRNTWDKVQSLLAENNRTKMSKARVKMISPLSGVIRCGHCDSAMGITYTNKGDRRYSYYICEKDTKRVVSQCPIKRVPAGDIESVVLDQLGAVFRTPTLVAKTYFAAREIEKEERQRLQVQKKELEQSLQNVRQEALKLMSPDNNVPDRNSRLPSVNQQAVDLTKQLTNVSARLKVIDTEQISEGDFSNPDADNYNGTDGEIKDRQIFVANEQTTLAAPIDDVQTDVELTEPRFADAEYIVIGTEQMQILSGGGTTNLTVRRAVANTVAASHLADALVYSGYDYTGLVVDPIDEFETDESVWYKLALTQAELDSATQSAPLNLGAKAHDQTISFWRRCTVLPGTPVQNKIDIKLRLTGTENPIV

SEQ ID NO: 14414 - protein, 517 aa, synthetic construct
MKTAIYLRKSRADLEAEQRGEGETLAKHRTALLKVAKEKNLNIIAVYEEIVSGESLVHRPEMLKLLQNVEDKKYDAVLCMDMDRLGRGGMKEQGIILETFKRSNTKIVTPRKIYDLNDEWDEEYSEFEAFMARKELKIITRRMQRGRIASVESGNYLGTTPPYGYLIKELKDGRTLEPHPDQSEIVKLIFEWYTHDDPEIRIGASMIANKINALGHKTATGKTWGNWTVLGIIKNPVYSGKVTWKKKEIKKSITPGKVKDTRTRDESEWIIVDGKHDAIISEELFEKAQSILKGRYHVPYQLTNGVRSALAGIIKCAKCGASMVYRPYTTQKPALKCYNQTRCHNKSSNYELVEQRILEGLAEWLEIYKANFEANTPLEETNEMKQINVYRQMLKNLEKELDETERQKEKLFDLLERGIYTDEIFLDRSKSLAEKTEKLQQDIDTIKKGIDSELQREEAQDNIIPQVERVLDLYTKSDDPKKKNSLLKSVLEKAVYNKEKHQYKDDFSLTLYPKLPK

SEQ ID NO: 14415 - protein, 506 aa, synthetic construct
MKRAIAYLRFSSLQQVQGDSVRRQKKLIEEWLKQNSDYYLDPVTFEDLGLSAYRGQHAISGAFSEFMEAVQRELIDAGSVLLIESLDRLSREKIGDATERLRAILKAGIDVVTLSDGTHYTRDSLDDPYSIIKAILIAQRANEESEIKSKRQRAVWAEKRKQAAETGKIMTRHCPYWLKVKISGDGFDIIEDKADIVRYIFQMRLDGISFEKISQTLNMQGKANLRGKVAQWNSASIERLVKAKAVIGYLVPSYRITVPDVAEIPNYYPAIINEKDFERVQRISYEPESRRNLNFNPHLINVFKGLMHCKQCGHAIILTGINTKGYGYYVCSMRRQHRCITEAVRRDLTDRYLITGVLNGASGMNMKISKDEALISMTAKHMELTGKLQNIIKAIELAPDVSELTIRASELSNEIRQLKKSMADIQIERDLKSVAALDVLNISDRKEYQALARSLIKDIKLDGRSKTCDIYLHNGMRILNYPLTKSIGWASILDAMAFLEQDEVIL

SEQ ID NO: 14416 - protein, 441 aa, synthetic construct
MKAAIYCRISKARRTDEDDADTLGVDRQESLCRKLAAAQGYDVVDVFVDNDLSGKAGVLRPQFEALKSAVADKSIDVVMVWKTDRLSRDRIALQLFYELLRKHGVRLHTEQEGVITLDTPDGQLMAGIRAELAQYERGVISERVKAQKTQAAQSGRVLGGRYRLYGYEDKHRTKIDAAEAKVIKKMSKDYLAGKSLHSIARSLNENEVPSLTGVKWTTQQVKRILRNPAYAGLRVFNDEVVADGQWPKILDLSTHQALVEKLTSYPAQNRDHNRKYLLSGILYCTLCNTRMVGGKTAFPSYRCTVNQGGCGRLSRNAAKVDAFVLELTAKAIARLPKVEPERDTSELDSINADIDSLSNARAEQIIPMAEYIKQYQILKKKKESLVKAAATTKLPTTDPQKFLDMDDIDVQREIIRKFFPAIGVKKSRKGVRFSHDQLKFD

SEQ ID NO: 14417 - protein, 487 aa, synthetic construct
MAHWLTQHPDYEPSDLSFEDLGKSGWKGAHIEGGMGELLAAVEAGFIRPGAVVLVEALDRAGRLDVADMLATVITPILRAGVSLYTLDDDVEYTKDSLNGGHIYLLVAKIQAANQFSERLSERVNKSYVRRREEAAQGKIPKRRTPLWLDGDGQLIEHLAPHIKQAFELYADGFGERRILRRLQETGIPEFQGLYGSTLKRWLQNKIAIGNWGDIVNVYPAVVDPELFYRVQERIAGNKTTRPASPSKHALTGIVKCGHCGRNYNYHVFKEQPTVLQCSNRFMTTAEKCENSKSVPLAVVEFVLLKTSQQARVEAIRKKKLTVNQKRVIVIEGEIASITQRLQGLARVIGRIGDEPELVQQFDELSAQRETLQKELESISASGSDVSILDQVQDIQITDADPMQLGADLQTVGYTITCTMDGKLVTTHGEIREWEYVGYQRASDSYVVKEGGQSSAGQFTAIPVAPFRNGSENIMEALGLKLNLIKE

SEQ ID NO: 14418 - protein, 648 aa, synthetic construct
MNREGKKCVLYPRVSTEMQVDGYSLEGQKNGLKRFADREEMEIVGIYEDAGKSGKSIEGRPAFKKMLSDIKNGLEIDYILVYKLSRFGRNAADILNSLEFVQSYGINLICIEEGIDSSQTSGKLLISVLSAVAEIERENIIEQTMNGRREKARQGGWNGGFAPYGYYLKDNQLLIEETEAEAIRIIFDKFANSDIGLGGVAKYLNLQGIKKIPRQNGTLETWSSHFIRLILDNPVYCGKIAYGRRTREKVKGTKNEYKQVHAEDYILEDGQHEGIISEELWQKVHAKRMATGIKQPSKIGKDRSHLLTGILKCPLCGSSMYTNKHAWTNKDGTYKEVYYYICGRNKQERGHHCDYKASLRKTDIEPLVIEAVKELVSDKYFAKEIEKRIGVQTDTTAIDKELANYESKLKEVDLNKARLEREIDNLPIDARFRERKIHDMTLRLDALYDTIVELEERIEDAKLRKSSIEMETITLDNIYKLMLNFGKLYDIISDEEKKSLITYLIKEIQIYPNGESEQPLKSIEFNFPIYRDGQEVRRLLWEKGNTVETVALLSKLNVDKHISVEVELDELDLTSAESKATYEQIKEYILNKFGLKVSALYIAQIKKKCGIELRENYNKSKKEKQVIPQCTPEKEEAIMDALRYFKMI

SEQ ID NO: 14419 - protein, 560 aa, synthetic construct
MSKEKIKVYLYTRVSTSIQIDGYSLEAQKSRMKAFALYNDYEIVGEYEDAGKSGKSIEGRIQFTRMMEDIKSGKDGVSFVLVFKLSRFARNAADVLSTLQTMQDFGVNLICVEDGIDSSKDAGKLMISVLSAVAEIERENIRVQTMEGRIQKAREGKWNGGFAPYGYQLIDGKLLINEEEAIAIRTIFDQYVNTSIGANGLSKYLENHGIRKIPRQNGKNPLFDAGLIRKILKNPVYNGKIAFGRRTLEKVHGTRNEYRQVDQDDYIVAEGIHEAIIPDELWQAAQVKLKAQAKKYEHVNKGKNMRTHLLSGIVKCPICGAGMFGNKSIKYKKDGTKYKDFYYYGCKHRLMNRGHKCTYNKQIREELLDDAVAEVIIKLVSNPKFASMMQEKINMKVDTSAIENEIDNYQKELRKSHSTKFKLIEEIDNLDVEDKHYKRRKNDLDDRLYRMYDKIEELESLLIDAKAKKQTIEAEKLTGDNIYKVLIYFDKLYKVMNDVERRQLITALISEIQIYEEKQPNGQWLKSITFKLPIIDKDLNIGLDNDEQVECVALLQRSKG

SEQ ID NO: 14420 - protein, 563 aa, synthetic construct
MKKSALYIRVSTHYQIDKDSLPFQKKELINYSKYILNIDEYEIFEDAGYSGKNTVRPAFQDMISRIKKGEFTHLLVWKIDRISRNLLDFCAMYEELKKYNCTFISKNEQFDTSSATGEAMLKLVLIFAELERKLTSERVSAIMLDRANKGLWNGAQCPLGYSWNEEKKFPDINKDESETIKLIYNTYENISSSLQVAKMLNSEHIKTKRDGKWSSKTVSDIIRNPFYKGTYRYNYRESARGKIKDESEWIIVEDNHSPIISKEQWEHCNKIMDINAQRNTSLYRKNSNIHVFASLIKCKKCGETFIANCDVTRKDGYRPSYYYCKGKYGSYGCDAKLISDVTLGPFIINYLANLLKAQKKLNKKNNLKDLEQFLLSGKTFVNIAGIDRANLESLYLSFLYSKTDNVLLKTKDKSKVIDLKSNLSVLTKEKEKYNRAFERLQSLYLFSDDAMSEKDFLVQKLKLTEKLDEVNKKIDLINEENSNTITYDDISFLKKTSNFMINNELMNKKFINFKTMVMTMDKQLIKGFINTIIDKIEIKNGKVVTIYFKNGIINNFIYKEKEC

SEQ ID NO: 14421 - protein, 523 aa, synthetic construct
MAVSRNVTVIPAIKRVGNNKNSESKPKIRVAAYCRVSTDSEEQTSSYEIQIEHYTKYIKKNKEWELAGIFADDGITGTNTKKREEFNRMIEECMAGKIDMIITKSISRFARNTLDCLKYIRQLKDKNIAVFFEKENINTMDSKGEVLLTIMASLAQQESQSLSQNVKLGIQYRYQQGEVQVNHKRFLGYTKDENKQLVIDPEGAEVVKRIYREYLEGASLLQIARGLEADGILTAAGKAKWRPETLKKILQNEKYIGDALLQKTYTVDFLSKKRVKNNGIVPQYYVENSHEPIIPRELFMQVQEEMVRRANLRSGKGGRKRVYSSKYALSSIVYCGHCGDIYRRVHWNNRGYKSIVWRCVSRLEEKGSECTAPTINEETLQTAVVKAINDLLANKEPFIQALQKNIATVFNEENDNATDDLDSKLEELQQQLLIQAKSKNDYEDVADEIYRLRELKQNALVENAEREGKRQRIVEMTDFLNEQSCELEEYDEQLVRRLIEKVTIYNSDLTIEFKSGIERQIEM

SEQ ID NO: 14422 - protein, 520 aa, synthetic construct
MKKITKIEGNLANSFIKPKTRVVAYCRVSTDSNEQLVSLQAQKAHYETYIKANPEWEYAGLYYDEGISGTKKENRSGLLRMLSDCETGRIDLIITKSISRFARNTTDCLEMVRKLIDLGVHIYFEKENINTGSMESELMLSILSGLAESESISISENTKWAIQRRFQNGTFKISYPPYGYQNIDGQMKVIPKQAEIVKYIFAEVLSGKGTQKVANNLNQKGIPSKRGGRWTATTIRGILTNEKYTGDVILQKTYTDSHFNRHTNYGENNMYLIENHHEAIISHEDFEAVDAILNQRAKEKGIEKRNSKYLNRYSFSSKIICSECGSTFKRRIHSSGRKYIAWCCSKHISNITECSMQFIRDDDIKTAFVTMMNKLIFGQKFILRPLLNGLRNQNNVASFSRIEELETKIENNMEQSQMLTGLMAKAYLEPALFNKEKNSLEAERERLLAEKDQLTRSVNGNFAKVDEVARLLKFATKSKMLTAYEDELFENYVEKIIVFSREEVGFELKCGITLKERLVN

SEQ ID NO: 14423 - protein, 497 aa, synthetic construct
MVVRQKEAEVIEAVGYIRQSDERQDKEDISEQTQLRKIEAFCDFNGFKLVKVFKDIDYSGFRIKYTKRPGLMEALEYVENRPAVKKFVFFNLSRLTRLRKDFQAIHETLKTLSIDICSASEAVDFSTANGRFVAGILVDMNEYYSDSLSDTMNETKKTNAEKGRWNGGPAPYGLVKNKDGYGFVEDFDVSYYIRKGFQMAKEGKGPYLIARWFNSQNFKTKTGKEWSPRGVRYMLTNPTYAAMQRWKDKYYPLLVCPELVTWDDFQYIQSTLFGNDNVWKGKQRQLLSSIMICPLCGSRMHSRYFNNRSNRKYVCSRKIQTGDCKSPNIDQASLNTAVINLIGKIAEEKFEPDHILPELGDTEDKGLNSIRKLQDELSNIERAEQQVFDDYYLHKKLNDDQYNNIIRRYEKRKQEIHKLLDKIPLPVSRSFGDYDDALKDFAEAIEVLDDDDKRRSVELLVEKIVPGAPTLVHFKWGEVKQIVPTETKKYKSKLIIY

SEQ ID NO: 14424 - protein, 466 aa, synthetic construct
MKITIAYCRQSFQRPKKESTVIWQRSKIESHAKNRDIQIQEVFSEVKSGKSTNRPEYQRMLKLIKAKQVSELYVYRLDRLSRNTQDLLTCFEIAAEAKVIIRSVTEGDFDYAKPNDRIKMQTLAIIGELQRTISRENREINNIKKFNSGQVVNHVAPFGYRYHQGKFEIESAEAPTVKFVFEQYLNGLGYKRIAQFTQNRPALITRSPAQVKNILTNPKYTGVFKSKYGTLKHVVPAIVSEDTFMSAKRERQKRACRTQQRHSVPARLRQKIFCPYCDSKLTTYHFRRQTNSQPFYVCQKKMSGQYDDCALPFIPLKQFENKVLQQLAQFFISKDQLHHLHQKAMSRMAEMQKQLKDETRRYIAQKDQLIEKLASGKITLAAFQEHMTSLESRRSKSNEYNETSHITPQQIAKLIRTNPNLHDELWDYVKYVKMDKHQNLTAIMLEDININVINSNTKEPISNESK

SEQ ID NO: 14425 - protein, 547 aa, synthetic construct
MNQNKGKVAAYIRVSTVEQAGEDRYSLKSQLEAIQKQCDMEGLTIVDTYADRGISGTSMDKRLELQRLLEDAKTGKFDKVFVLRISRMARNTKDLLQIVDELQNYNVSFKSISENFEAETSSGKMIAQILASFSEYEANVIRDNTSEGLLQRAHAGLYSGPIPLGFDKTEQASEPMSINSYEASIVQQIYDMYEKSNGFRAIANTLNKGGHQTKRGNPFSIAAIKDILTNPLYKGYVRYRNHIDWNKKRRRGKNPNPIIVKGQHEAIITEDQWERVNLRLKQRSKTPKVLGDGSNILTGVLRCPECDGAMAASNTTNRLKNGEKKRIRYYSCARFRSQGATACHANSVRADDIEAMVADNMMTLIDQPDILKTVIETANERLSQQYERQTLHQPRLEKEIEELALKIHNLSEMIQVDDSLSSILGDKINEYQTQLEEKKVKLQQGERAKKKVIPLKYGEDEMQLVLEKIQEAFDKGNKMAIKQLYLSIIQKITFKKTKPRKIDSFTIYLKPDIGSTLLDGLNTDEASTGASSFSMPETGIILHYPKI

SEQ ID NO: 14426 - protein, 529 aa, synthetic construct
MTIQNERVLLHLRKSRADLEAEARGEGETLAKHEAYLLKYAGEKGLNIVEIRREVESGEHLSHRPKMMETLREVEAGLYSAVLCMDVDRLGRGNKQDQGIILETFKKSKTKIITPRKVYDLCNEWDEDFFDFEQFMAAKELKYITRRMQRGRRASVESGNFINPIPPYGYTITIIDRSRILTPHSEQAAVVRMIFNIYTREDLSERMGSSKIANYLNDMGYPSATGKLWSSARVSDIIRNPTYAGFMRWGKKDKRKSTKPGFKTESTQRKDDEIVFVVGKHEPLVTVERFRIAQELIGKKHHPPYHLINGITNPLAGLVKCGLCGKTMVSAQGKRDQYMKCRTRGCQTKAAKTRYVEEKVMDALSKWLAEYEVKLKQQSETAKRSKQVDFLEKTLDKLNKEHNLLLKQKSSLHDLLEQGIYTKEDFLERSRVLLDKLEESRARIEKLTSQLEQDRSKVSLPKDIVPEARRAIDIYCSSADATKKNELLKLLLDYVVYNKSKSQHEDDFELKIFPKFPQEKAYSSVSSYT

SEQ ID NO: 14427 - protein, 536 aa, synthetic construct
MKKIRTIEKAPIFNKPLQKLRVCAYVRVSTNQAEQQESFFAQVQHYTSYINSNPEWSFTGIYSDQGISGKNAAKRPEFMRMVQDAENKKFDLIITKSISRFARNTTDCLETVRKLKLLGIAVHFEKEAINTLTAESELMLSILSSVAEEELASISQNMHWSNQRRFKKGKFSVTTKRFLGYDKHKNGQLVINEEQAAIVRRIFKDYLSGLGAFRIARGLEADEIINISGNVKWAESSILDILKNEKYCGDARLQKTITTALYNRKRNYGEAPMYYVKDSHPAIISRDDFEKVQELMGARAKAKGNKEGDREKYTNRYALTGTIVCGNCGNTFKRHIDNCGTVAESVCWICNTYIIGRKNSCGVGRIKEETIKGLFVKVFNQLYSNQAKLLGDYKARLEMEKLTELDNERIAKLDEEIEKLIKQERALFLIEEKGYADHNVVKTEHEELVKTLTQLQTERSDRMAEINKRDNRMVRTLELEAVLEAQGGNLTEFSDDLYRNMVEKIVVKERTKLIFHLKNGLVFEETYALKRGHDIF

SEQ ID NO: 14428 - protein, 513 aa, synthetic construct
MATVTVIPAKPMQELKGLEATAKLRVCAYARVSTDNEEQLSSYQAQVEHYTSYIQNNPAWEFVEIFSDEGISGTNTKKREGFNRMIDECMAGKIDMVITKSISRFARNTLDTLKYVRQLKEKGVAIFFENEVVNTLDSKGEFLITLLGSLAQEESSNLSQITKMGISYRFQEGKVLVNHNKFLGYTKDEQGQLVIVPEEAEVVQRIYREFLDGKSPYKIASNLQKDGLITGAGGTKWYDSTVIGILKNVKYMGDALLQKTYTTDFLTKKRVKNTGHAAQYYVEDSHEAIISKEEFAAVQMEFERRTNMRGYSKSGKSKFTSDYAFSGKLFCENCGSKFRRTKWGKGKNEQIVWICINHQTGGNEACDMKTIKEKALEQAFVRVMNRIIIKREAYLVEEISCEESDYEDIDAKIAELQQELMNVVRNNQEYSCLTNEIERLQVHRQRLKSDETEKAWRDRMREEFKAYLDARDGSLLDKFDGDLFRKLVEKVRVESMVEVEFVLKAGIEVREVL

SEQ ID NO: 14429 - protein, 549 aa, synthetic construct
MFPQALLMKEMSNIKKIRTIEKAPVFNEPFKKLRVCAYVRVSTNQAEQQESFFAQVQHYTSYINSNPEWTFSSIYSDHGISGKNAARRPEFMRMVQDAENKKFDLIITKSISRFARNTADCLETVRKLKLLGIAVQFEKEQINTLTTESELMLSILSSVAEEELASISQNMHWSNQRRFKKGKFSVNTKRFLGYDKDREGDLIINEDQAAIVRRIFKNYLSGLGASRIAKGLEADEINNISGRVKWAESSIRDILKNEKYAGDARLQKTITTALYNRKRNSGEAPMYYVKDSHPAIISREDFEKVQELMKARAKSKGNIEGNREKYTNRYALTGTIICSNCGNTFKRHIDNCGTVAESVCWICSTYIIGRKNSCGVGRIKEDTIKGLFVKIFNQLYNQRAKLLGDYKAKMEREKLTELDNERIAKLDEKIEKLIKQERALFLIEEKGYADHNLVKSEHEELVKTLTQLQTERSDWMAEINKRDNRVARTLELETILEVQGRNITEFSDDLYGKLVEKIVVKERTKLILQLKNGLAFEETYTLKRGHDIF

SEQ ID NO: 14430 - protein, 518 aa, synthetic construct
MATVTVIPAKPMQELKGLEATAKLRLCAYARVSTDNEEQLSSYQAQVEHYTSYIQNNPAWEFVEIFSDEGISGTNTKKREGFNRMIDECMAGKIDMVITKSISRFARNTLDTLKYVRQLKEKGVAIFFEKESVNTLDSKGEFLITLLGSLAQEESSNLSQITKMGISYRFQEGKVLVNHNKFLGYTKDEQGQLIIAPEEAETVRRIYREFLDGKSPYKIASNFQKNGVITGAGGTKWYDSTVIGILKNEKYMGDALLQKTYTVDFLSKKRVKNTGHAAQYYVEDSHEAIVSKEEFAAVQAEFERRANMRGYSKTGKSSFTSEYPFSGKLFCQNCGSKFSRQTWGSGKNKKYLWRCINREINGVESCGMKSIREKDLEKAFVRAMNKVISGKEAFLIEETGDCVGGTEEIDAKLEELQQKLMSVVRNLGTDNEEYARVVHEIEIMRGRRVGLKNAEAEGGWRKSKVEKFKDYLDARNGEPLDKFDGDLFRRLIEKVKVLSIVEVVFMFKVGVEVREVLE

SEQ ID NO: 14431 - protein, 517 aa, synthetic construct
MENAIKKAAIYARVSSDKQDVDLSISAQLRALKEYAKNNNCEIVREFIDEAETGRTTARPAFREMISLARHPEKPFEIIFVWKYSRFARSREDSIVYKAMLRKNGVQLISINEPRDDTPTGRLLEAIIESLDEFYSDNLGEEVTRGMRESATRGFYLSSKPPYGFIKVRAKDGEKERTKLEIEPNQAPIVASIYQDILGGKGLTTITKELNQKGIASPKGKGWSKTGVRIILLNEAYTGVLVYGRNSKRGLEPIRVENACPTIVSRAVFEQVQELIKGRTFKNIHPKRASSPFLLSGITSCGHCGKALTGQVAKSGKFAYYICGTLNKKGAGSCPAHYHNSRAFEQKVLQTIKDNILTEENLTHLAEVVNQEMDENSTQYREELNTVLDEVTEINHRLERLYDAVESGNIPMADLAPRIRELRIRHEKLNERKIQVEQKLTDRHIELASPEVLSQYVDDLRKLLTVSELTEKKAFIRSFVQGIKVVGDEATLTYVMPLNGLIEQKIGVLPIVQYGGQ

SEQ ID NO: 14432 - protein, 530 aa, synthetic construct
MKKVYSYMRFSRPEQAKGTSIERQSHFAEQYAQDHGLELDKSLTMMDKGLSAFHGVHKTKGAFGQFLAAVTAGKVKSGSVLVVESLDRLSREDPLIAQSALSDLILSGITVVTAADNQVYSRDEIQQNPFKLIMSLVVMIRANEESETKQRRSNAFLKSALKQYQTSGKIRRLGADPSWLDYNKEDGTYSFNERVEVIRRILALYNQGIGSLKIARQLTEENIPTLSGKRSAWGQTTVANIVKSHALYGMKRINVQGVDYDLEDFYPELITKSKWLALQQHRTKRSKSMHGRGEAVHLITGHGKGFTTCGYCGGGLGAQTQKQYKRSGEYSKTVTRLHCLTHKETSSCCSSVFLEPIESAVLFAACIGVQPQALVPTVNAIDHNALIDEIDAKIKHIVEQVTSGAPWDLFKDVHDKMKQDKKKLQSERDSQKPDIDQNDLEKWVDELVNLADKAKSGDKAARLRCRTLIKSVCKNIVIKLRGHDSKSEPLVIVTFVTDEQFEFRVASDGTLRFVDNDMAVNRRLRELDTQ

SEQ ID NO: 14433 - protein, 550 aa, synthetic construct
MKGLVYSYMRFSDPRQAAGHSRERQEAYAAKWAAEHGLQLDDTLTMLDEGLSAYHQRHVKSGALGAFLAGVEAGRISAGSVLVVEGLDRLSRAEPIQAQAQLAQIVNAGITVVTASDGKVYSRERLKDNPMDLVYSLLVMIRAHEESDTKSKRVKASIRRLCEGWRAGTYRGRVRQGHDPDWLHETPEGWEVVPERVNAVRRAIELYVQGHGGKRIVETLDAEGLQLYSTSDANHSSQVYRLVKLPQLAGVKPVSVDGEDYMLEGYYPAILSQAEYDELRRVGTHSGRRRTQGDLPHVITGLGITVCGYCGRPMAGQNLATKKRLPDGRIRDGYRRLLCQSNAAYGGGCAVQASTSVAPVERALMAYCSDIMNLQALFGVDRTEGPRAQVSAAKAKVEDLNAQLERVTDAMLASAAEGTPQVFARRARALETELQDAEKALRQAEHELAGVARKNVQGAEEAWQQLAGGVEAQDVAARLRARQLVADTFERIVVYARGMRPDPAAGERDYCIDLILVGRGGNSRLLRIDRAGNLLQAEDVSQAEDVVVPG

SEQ ID NO: 14434 - protein, 528 aa, synthetic construct
MKTAIYTRKSTLKVGQKETIENQIKICKRKAKELGLVIVDVKTDSATGTDDNSRPEVKELIKDAINGNYQCVIMKGISRLYRKTSKGLELIERLDQSGIRVVTVEEHFDSFAPENRTGTGKLDLSRLTMYLMFAEMESKKLADRVKYTQIEKAYAGEWNQPSSVPYGYEYVPETKKLQIKDSQADIIRLIFKLYIEGMGMKSIAHYLNGNNQDKIQYPSPKSKRWNEYTIGFILKNEVYIGSVVYNKRSKKERPYKNPEAIGKTTEDIYIGNDFNDKDKWITVKNAHDPIIGEDTFSKAQEIMGVKAARKGIRNNVSLFAGVAKCGKCGHGMTFKRGKKNSDGKVVTRNNYYCMNYIRYGSQYCDSHHVRAEDLEETIFNKLDELRNNKEQFDQIFNDSIKHIDDGSVSDDKEMKRIEKEIEQVAKKMDKLLEKNMEGKINDNQFELFNKRYSDDLDRLTSRLEEIKLKSQNNIDKELLLKSFRNRLDEIADYRNKSLEEKRYTILKLIDFIIIEDGIIKHLQFNFSY

SEQ ID NO: 14435 - protein, 623 aa, synthetic construct
MALEVEVIKASRKISDRNAGKLSDVLRVAPYARVSTDTEEQLNSYKSQVAYYTDLVSKRSDWVLVDIYADEAITGTQVTKREDFQRMIKDCMDGKIDMIITKSISRFARNTLDTLKYVRMLKEKNIAVFFEDENINTLTMDGELLLVILSSVAQQEVENISANVKKGLKMKMKRGELVGFQSCLGYDYDVNTKQITVNQEEAKIVRYIFERYTSGIGAYVIAKELTEAGHKTKYGRVEWQDTTILGIIKNEKYKGDLLQGKTFTVDPISKRRLDNYGEEDQFYVKNHHEPIVSEEVFEKAQDILHRRGENRRRGARGKRDKYSRKFAFSSKLECAFCGSNLSRRNWHSGTPHEKVIWQCVTATKKGKKYCSHSKALEEKLIEGAFVESYKLVCRNNSDVLDELMKRMESLFSDQNNQKRLNKIISDIEALERKRCRLIDLCLDEKIDRATYEQKYAELDTSLTKLLEEKEQLEQSAQEEIDLGKRLEHFRKVLQTNEVLTAFDRNVFESIVDKVIIGENTDQGSPEPYKLTFVYKTGFHNSIQSKMDKQKKSLRSERGKVPSYSENDTCGVSNIDDFERIIEMWQYCSDILSLVVRRKVELSVEAAWTSVNRLDSQNRENYAI

SEQ ID NO: 14436 - protein, 502 aa, synthetic construct
MNKICIYLRKSRADEELEKTLGEGETLSKHRKALLKFAKEKKLNIVEIKEEIVSGESLFFRPKMLELLKEVENKQYTGVLVMDMQRLGRGNMQDQGIILETFKKSNTKIITPMKTYDLSDDFDEEYTEFEAFMSRKELKMINRRMQGGRVRSVEDGNYIATNPPLGYDIHWIKKSRTLKINTHECEIIKLIFKLYTEGNGAGSIAEHLNNLGYKTKFNNNFSRSSVLFILKNPIYIGKVTWKKKEIKKSKNPNKVKDTRTRDKSEWIVVDGKHEPIISMKMWNKAQEILNNKYHIPYQLVNGPANPLAGIVICSKCKFKMVMRKLKGIDRLLCRNNKCDNISNRYDSTEKAIVQALERYLNEYRINISNKNKTSNIKPYERQVNILEKELAALNEQKLKLFDFLERGIYDENTFLERSKNIEERITKTSSGIEKINDIINKEKKVIKEEDVIKFQKLLDGYKNTDDIKLKNELMKKLVNKVEYTKDKRGETFGIDIFPKLKP

SEQ ID NO: 14437 - protein, 512 aa, synthetic construct
MYLRKSRADIEAEARGEGETLKKHERLLYKLAKDLAILITEEPFREIVSGESIYHRPEMLRMMALMEERRPKGVLVVDMDRLGRGDMQEQGLILGTFRRLGVKIITPRKIYDLNDEFDEEYSEFEAFMARKELKIITRRLQRGRVMSVEAGNYIATRPPYGYEIMELPDGRTLKPHPEQAEVVRQIFRWYTHPDTKEQMGSSKIATKLNEMKIPSYTGRQWTPPTVLTILKNAVYVGRIQWKKKEQKKSRTPGKRRDTRMRDPSEWIDVPGKHEPLIDERTFQAAQERLQGRYHAPYQLDENGQPRITTALAGIVKCAKCGKTMVYRPYTHQMPHLRCNTPGCTTRSTQYELVEHRVVESLEQWLSAYKVQWGKRKKEEPSQAIEFKRGALVTLERELSELEFQKGRLFDFLERGIYSEEVFLERSQTLAQRIQDTQEAITLARKQLEEEEQRLKARHNVIPLVENVVKSYFKTKDPVKRNALLKSVLNHVTYEKGKYQRGDDFTLELFPRI

SEQ ID NO: 14438 - protein, 514 aa, synthetic construct
MLSRHNLGQSSGMAEVVAICCRLSPKPGGGYEGVEDQEAWGRAYAARVWPGVPVEVFADAGLSAAKGDYRPEHERFRQWVRDGRVRHVWSVEQSRLERREIEWFQLAAELDVAGISEVHTDRDGILRVMDEVSGVKAVLNAAEVRKMKRRQADTLAAQAARGLPPGSKPYGYEHGVNDAGERTYHQVPEQAAVVREAAALLLSGWSQADIARTLRERGVTGGHMVKVRDENGDVVGARPGVVISRTIRSWLTNPAVAGYRVHRGDIVGRGNWVPILDETTWQAARAKLTGSRAVRRKDGGVYEIGPRHRGNTGRKYLLGSGFTHCAVCLAPMTATNKQVRSKTAVRNVVYLVCHPTRGGRGCTGIMYQQTEEYVLDELWAEVDKPAFRAALNADDRDGRRDQITKELTGIEGQRRELARMWAKKALTGDEWQAARDALDDEEAALRADLADVPSGLDDIDIDRVKREWPRMALGPKREFLGMFVASVAIKRARPGTKQFDPDRVDVTFRSLRAG

SEQ ID NO: 14439 - protein, 573 aa, synthetic construct
MNATATPKRAVVYVRLSRHQGAADPSTSPESQRKRCEAFAEAKGWEVVEVVEDLDVSGSDKGDRLNRPGLKKIRKRWADIDVVIFAKIDRLARNVVDFNTFAEEAKGHGVALVSVAESLDLSTPGGRFTANILAAFAEMEAATIQARVKQGRVDLIEARRWAGTRPPYGYRSAPHPSGKGRGLVQVPNEVEILRGMVAEFLPHGAATDPAKRHGSANAIARRLTADGIPAPRSAYRRAQLAALDGRPVEDLAVLDRGKWNASTVRALMRGNALAGYMTRDPERIGKDRPDPASLDVVRDAHGAPEVVWSPVVDGSTLRALRKRFPASTRKAPAGPVKGRKPSGLLSGKDGLAKCGLCGGTMNGGTSGGSPSYRCDRPGGGALCSGVSIRRAALDAIVEEAFLGAYGRLLVTIVEEVADDTALAAEREEVDGLLSDLEARKRAASPADRRRLLSEEAALWERHDALGVAAPETRTVVRETGETFAEAWESADLVDRRAFLAARIDLVEVAPASKSTPRVDSSRVTIYWRLTGEDAREILSPAEAVAARSAFTPCRAPGRHDAAGGVCCVVGGRR

SEQ ID NO: 14440 - protein, 528 aa, synthetic construct
MQCMNSPHPAAHLVDLYLRLSVDREGKDSLENQENDLREWATGAGLTVRKVWRDRGISGYKDVERPDFENALSALRAREVGTLAVWKTDRLSRRGAGQVGLVMDELEALGARIYFLKDQKDTSVPGDRMIIILLSEFARAESASTSIRVKAKKDKDRAKGRYLGGSAPWGYTVGDGRDGRPSDRKLRQHPDEAPLLREVVDRLLAGETMLAICRDFNARGVPTRRRGSQWRPSTLSATLRSPVLAGLQPEKRRDETSGKWSTSTDAWRDPKTGETVSLMADGAEPVVSESERLRLLDVMDSRLRRYGRGLRPVKQPKSLLGGLLVCASCGRTANTFGGSYRCRRWHSDGVDCAAPLNVKIDVIESAVLHTWAYGLAAMEPDSPVLDAVAEHWLRRYDPAPLQERADLMREIADVDASAKAADDARFVARTLSPDRYERVARGLDDRLTALRARLKELPEPEANLAALLDPEISLPAIVAASVEEARALLRLAIKRIECTAAPHPGARFVRHERVRVVWVGTEDDATTT

SEQ ID NO: 14441 - protein, 502 aa, synthetic construct
MKMKSVLYARVSTEDLEQNNSYIQQQLYQDDRFEIVKIFSDKASGSSVDGRESFLEMLKYVGISKEGNNYFVEHRTEIECIIVANVSRFSRSVVDARLIIDALHKNNVKVFFVDLNKFSDDADIFLQLNMYLMIEEQYLRDVSKKVKAGMQRKQSTGYILGSNKIWGYNYVTKDDGKGYLVPHETESLMVKNIFKEYITGAGTRTLAKKYKLSSSTILGILKNTKYCGYMGYNLKSDNPTYVKSPFIEPLISTEAFEEVQRIIKGRCNSESGRGRRIKVRNLTGKIKCECGANYHYKQRETEWCCGREGVEGRTKGCGSPQFNTKLIIPYLEKNIDNIEKNLEFNLNREIKDINVGSFDRLNQRKEELIRQQDKLLDLYLDEDKLKNISKEMLERRSKLIKEEIEEVEEKLVILNDMSSHLNNLRRIKVEYKNEIKNIRRLIEEKNLDEIEKLISKIQLETIVNIINFRKELRIKEIQFTCFNELYNTNFIFAPEPKKVWDK

SEQ ID NO: 14442 - protein, 570 aa, synthetic construct
MKTVAIYSRKSRFTGKGDSIENQIEMCKEHIKKFVSPKVEFLIYEDEGFSGGNTNRPAFQRLINDIKYGNIDLLICYRLDRISRNVADFSSVLDVLQEYKVDFISIKEQFDTSSPMGRAMIYIASVFAQLERETIAERIKDNMLEMAKKGKWTGGKLPLGFTSKKIAYIDEEGKKRFKVTLEHDSKDLEFVKFLYEKYLKLGSLHKLETYTHENNIRSASGKIFEKSTLKIILQNPIYVKADENVFNYFENKGWSVYGEPDGLHSLLSYNKTETAKKDGKLTKRNKDESESLVAVSDVKGFIDSSLWLKVQYQFKKNKNTFPRLGKTHNALLVGKLFCGNCGTRMIIQHGRTSTKTGIKTFYYVCSLKKTSKKKLCSAHNVKTDFLENLVLDSLEKLYYKKDFINDSLKINLKENKDNIKEINTTKKLIELNKNKINSLIEKLSLDFDNVLSDILIPQIKKIKIENDVLESKLEELKLKKQESEMNRIEIDLITSLLNKCKNIKDLTRTEQKQIIDCLVDSIYYYSNDNGNDKIKIKFINDIDSINTLLSDEEKRQFEKLSFYSHSMSSI

SEQ ID NO: 14443 - protein, 576 aa, synthetic construct
MPAVSEMSRVYSYMRWSTVVQGEKSTEDRQRQAQEAFCRHYGYTLAEELTDPGMSSFRGKNAHEGKLREVIERAKGGDIPPGSLLLFENADRMTRMGLSDAVPLFFEILGAGLKIGIADRLQIYTPGTLDLGGLMAILVDMSRANAESQRKSDFSRKGWKDNHKRMESGEVVTDKVAQWLTVERVGEERKFVEVDEVVKQIRAMFKLALQYGLSETCRRVNEQYGSEWKVYQLQYLLKNRRLIGEHTITNFDEKAGKNLPSDRVLSDYYPVIIDRNLFAEVQAVISKRRPFAGRQAASNLNIYRGLVFCAACGGSVRFMAKGGKEYFICTNSMSHTCIVPGVQSVRGEHLRRLLFRFEHWTNLKSYFMEHSDDLKTLARERDELLALIDKIAVRTKQTEQRVMDEDDQDRQEAYIGILAKAKGDDRVARAKLVDAEAKLAEMEDAFSIVGFDISDRVDWMLYDRSEEAALERARINRYLITIFEKMLIDFQAKTLDTFVREQFQGKVRPLHAGISAPADKRFKKAPVTGTIRISGRTGPKKPHKSPPMFTAEELAELKGVGWESVVEVIPKKKPTM

SEQ ID NO: 14444 - protein, 595 aa, synthetic construct
MTKKNGEVGDSVRRQMENQRKAVETYNLHVVDVFEDLGKSAFRGKHRLKGALSLFLASLDQGKIPSGAYLLIESFDRLSRERMTDGLTVVLTILRKGIKIITTDDLKLYDLSIKGKDLEQTIMITVLLERANNESTTKSDRQKAKWEGRRERIIKGEKKFLNKNVPWWIALDESTGAYSLIPERVAELKTIYELMMVKNLGLRAAAAYINENNPLKVGFGKNPDSYGWTARGIKRMIETPSLYGSLELCEYIYENGKATPDRKTIKVMDNFYPAAFTRHEVDVLKAKISSRMTSKERPTKRDLQYYNIYHGLIKCAFCGGNVRFSQKQKYSYLVCRNSEIKLCKHPKTLSMQYERFHEVFFKYAQHYNFELLIQSGGNDNEVVVKEITEIEETIAAEKYKAQKFTEKLFDMFDGDIPAEQEAALITRNKKIKLMEAKAKALRAKIVYVDTDAETISDAIQLVSKMVETKDGRLELSNYLTKVIDKMVVDFGKAHNRDGDYVKVMFKNKDFSHHMLIGKTTAYSYDSDGELFLDTLQGVVRDDGYYLEAQKAQDEWFDVPDFTDLEIYDDEQAKVNQAVDLGHRGDDENGVDSEYQ

SEQ ID NO: 14445 - protein, 447 aa, synthetic construct
MKVAIYLRVSTQEQVDNYSIEAQRERLEAFCKAKGWTIYDVYIDAGFTGSNIDRPGLQRLLMELDKVDVVAVYKLDRLSRSQRDTLTLIEDHFLKNKVDFVSLTEALDTSTPFGKAMIGILAVFAQLERETIAERMRLGHIKRAEEGLRGMGGDYDPSGYRRQDGRLVLVPEEAQHIQEAFNLYEQYLSITKVQKRLKELNYPVWRFRRYRDILSNKLYCGYVQFADKHYKGQHESIISEEQFDRVQVLLSRHKGRNAFKAKESLLSGLAVCGECGESYVSYHCRAKGKHYRYYSCRARRFPSEYPEKCHNKNWRSEAIEKYIQDALYMIADEKEASQREFVAIDYGTQLKKIDQKLERLVDLYADGSIDKSVLDKQVTKLNNEKRDIAEQQAAQTERAAQSVNRKQLQDYAIVLESAAFSDRQAIVQKLIRRLAIHKDRLEIEWNF

SEQ ID NO: 14446 - protein, 461 aa, synthetic construct
MTKAYTYARISADYSQDEHGVTSQLRQCHQYAERHGWEIGKDYIDNDISAYSGAARPAFEQLIHDMEAGLIPILICWDIDRLGRRIKDLHRIVEAASKNKTQIITINAGAFDLTSASGEMHVYLLGTFAQFESRHLSERAKASQHDRALRGLWRGGPIPYGYKPLGKGVLEINEEHAQWLRQWREWLLAGDSIMSMLRRTKAAVPEDHPLQKMNAYVIRKRLSNPATAGLLVEHGEVTGKASWEPIFTESEHQDILAILRDPSRRTSQGNERKHQGSGVYACQSCGSKMSTHKHPHKKGQRRYKCRNDCTQIDQDPVDALVDEVIIQYLSIPENTLFAGRDDETSKRVEELRNERLALVRRKDDLGVLFAEGAIDTGQLTSGSKSIQDQIAVIDRRLSAIGESNPVVDLSLDADNVRERWHSLDADKRALVISELLTVEIVKAKRGGSYGPPESRVRIGWK

SEQ ID NO: 14447 - protein, 519 aa, synthetic construct
MIAYPYKRFSFNQQEKGDSIRRQSKLIDSYCLEHSLTLSDKTFEDLGVSAFRSSNSKEDAGLGQFLQALQEGKLETPCYLLVESLDRLSRDNIDSALTQFMNIIQADVTIVTLFDNKTYKKGMDVVDYLTALISMQRANEESRIKSQRISASWKNRQSGIPAKKSKGCPFWLSVSDCKTFYEVNHRVDVVHKIFALANDGLGSRLIAKALNAEEVPSPKGKNWSDATVNGLLNSRAVIGEYQPKQRYNSEGVRVDMAVGSPIKDYYPAIMTEDEFLITQDGIKSRQKTSKRGASKTFLNVVKGVATCGCCGSPMRLRKQLEYYYLECNKRSVGICSDSNRINLRFIIDWLREVWLTPEYAPIIASDAPESKELRVLESDLDKLNNTLKKLLGLLDDDADDVIFDRIKAKKAEKKALLQKIDECKESLAPFNVTKKALWKRFTLVKIAFMDENTEETIKARCQLAQLINQLKGFKVTMSEDKIATLEVTDSKGNVALYKSRQNPYYVHCKESGSIWKKEP

SEQ ID NO: 14448 - protein, 436 aa, synthetic construct
MEKIVTKISPSVPPIPARLRVAAYARVSSGKDAMLQSLAAQVSYYSKLIQQRSDWEYAGVYADEALTGTKDTRPEFQRLIADCKDGKIDLIITKSISRFARNTVTLLETVRELKLLGVDVYFEEQNIHSMSGDGELMLTILASYAQEESRSVSENCKWRIRKRFQQGEIVNLRFMYGYRINNGQIEIDQEQAEIVRMIYADYIKGLGCDRIAARLREMGARTFSGRQWTAKRVLAILNNEKYSGNALLQKKYVADHLSKKLVYNRGTLPKYYAEGTHQPIIDPLTFQMAQEIMALRRENRNVRQNPANHYPFSGLIFCPRCGKNYRRVTYKGHAAWNCSTFVNYGKDACPAKQIPEPILLSLTAEVLGLAEFDEVVFRSQIKQLQVPQANKVIYIFQDGHKVEAAWQDRSRKSSWDDKKKQQARERTLAYQRGDLK

SEQ ID NO: 14449 - protein, 525 aa, synthetic construct
MKPARAVTVIPPTINRFTPETTGVAARKKVAAYARVSTDSEEQLTSYEAQVDYYTKYINERADWIFAGIYTDEGISATNTKKRDGFKQMVADALDGKIDLIVTKSVSRFARNTVDSLVTVRQLKEKGVEVYFEKENIYTLDSKGELLITIMSSLAQEESRSISENVTWGQRKRMADGKVSMPYRHFLGYEKGEDGLPKIVEKEAETVRLIYRMFLEGKTPSAIAKHLGNLGIPSPAGKKTWQVATVISILTNEKYKGDALLQKSFTVDFLTKTTKVNEGEVPQYYVQNSHPAIIEPDEFDAVQLEMERRKKIGRPVSCHSPFSAKIICGECGGFYGSKVWGSNTKYRRTVWRCNEKYKNDKPCSTPHITEDEIKQRFLKAFNILMSDRDEVLTNCRLAQEVLCDCIEIDAELKGLQREIDVVAELLRKAVYENARIAQNQEEFNERNNRYWERHRKATERFNQLEEMKRERQAKSLSLGTFIRELESSPSVVEEFDERLWAVAVDTVTVTKDGKLHFRFKDGTEV

SEQ ID NO: 14450 - protein, 543 aa, synthetic construct
MGKNGARVYSYLRFSDPRQATGSSADRQLAYASAWASKHGMELDATLTLRDEGLSAYHEAHVKQGALGAFLRAVDEGRIPAGSVLIVEGLDRLSRAEPLLAQAQLGQIVNAGITVVTASDGREYNREGLKAEPMNLVYSLLVMIRAHEESDTKSKRVKAAVRRQCEAWVAGSYRGRIVSGKDPQWLAWDGDSWQFIPERVEAVRFALDAYRSGIGAARLVRLMHEKGMVLSDWGIAAQQVYRLVRLPALRGAKRISIDGENFMLEDYYPRLLSDEEFSELETLVGQRYRRRGKDEIVGIVTGIGITRCGYCGTALVAQNLMQRVKADGSLEDGHRRLHCVSCSKNGGCNGGSCSSVPIERAVLAYCSDQMNLQRLLEPSSAGEDLRPRLVEAQKGVAEIERQLERVTDALLADDSGAAPLAFVRKARELEEDLERRRSAVQALEQELVAKSASAPAAGASKWAELAERAKSMADVDAREQARQLVMDTFETLVVYMRGVIPNPKGRYIDVMMKSRAGQTRWIRVDRRTGVWKKGADRPTTRRP

SEQ ID NO: 14451 - protein, 541 aa, synthetic construct
MPKAISYIRFSTKIQSVGDSTKRQSKYINDWLKRNPDYYLDESLRFQDLGISGFSGANAKSGAFAEFLAAVESGYIEAGSVLLVESLDRVSRQDIDTAGEQLRKILRSGVEVVTLVDNEWYTKESLKDSLSMIKAMLVMERAHEESAMKSTRLRSVWAAKRERAANGEIMSKRCAAWLKVSEDRSHFEFIPENVKAVQRVFQLRLEGLSHVKIAKQMNDEGFSTLNQFKSVTGGWSQSSVTELLSNRSVIGFKVPSKSMAVKGVSEIPNYYPSIITDEQFYAVQQLKQGSGRKPSSDLPLLTNLFKGVLRCSECGFVVVVAGVSAKRSGIYKCSMKSEGRCNSVGFSRLQTDRALVQGLLYNTNRLSLNRDNGSTIGGLQAELEQLQKQRERLIKLAMLADDTESMAKDLKALNSQIKDAEKAVSEVHQREQSSQLETISHLDLTVKKDRIEAQIIIKRIVKEIRLNTAGKKCDVFLHNGLKLLNFPLDRVVDGAQWLEVLPLIDGDEFDFAEFTTKPRHIALEEAPEWVKEMEEQPNQSL

SEQ ID NO: 14452 - protein, 413 aa, synthetic construct
MSVKKIRVNRQKHRKKVCAYIRVSTTNGSQLESLENQKQYFENLYSNRDDIDFVGVYHDRGISGSKDNRPNFQAMIENCRKGMIDIIHTKSIARFARNTVTVLEISRELKAIGVDIFFEEQNIHTLSSEGEVMLSVLASIAEDELRSMSGNQRWAFQKKFQRGELVINTKRFLGYDIDENGELIINPEEAFIVRQIFALYLEGYGTHRIAKLLNEKGVATVTGAKWHDTTIRQMLSNEKYNGSVLLQKYFHDGVNGPKKLNQGELEQYLIEDNHEAIISKEDWQTVQDKLNSRRWQQGRNKTYKFTGLLKCQHCGSTLKRQVSYKKKIIWCCSKYIKEGKVACQGMRVPEVDISNWVITSPVTVIERDGNEEKYYSYSGQESEDQRSSSGQEENQGSRILSSVHRPRRTAIKL

SEQ ID NO: 14453 - protein, 479 aa, synthetic construct
MKKVAIYCRVSTLNQAEDGYSIGEQQDKLNKYCDIMGWEVIETYTDAGFSGSNIERPAMKQLLKDAANHRFNTILVYKLDRLSRSTSDNLYLIKEVFKKNNIEFVSLNEKIDTSDAMGEFFFTLLAAVAEMERKTITERMVLGRLGRAKAGKTMSYQLPPFGYIRNKELDILEVVPHEAKIIKYIYSKYISGDSITKICHDLNDKGHIGKNVRWSHSSVKNALTNTVYIAKGKFKGEMYEQEHEKIIDENTFWLVQDEINKRQIRESQRTNNPRPFQAKYMLSGLMKCGYCGGHIRTVTGNKRLDGSKPVRYVCDRRSDYRKLMEPDEIKCKSGFYRRLDLEQYVIDYLADLPNDESELKEALSIGQTSEFDPTLLLTEIESINKKIDKENYLFRNDYIDEVELQRNVKNLVDTKKLLENQLQENNGDKINEQKRKRILDMLNTGNIREMNYEQQKKIVKSCISKILLTSEEITIEFNF

SEQ ID NO: 14454 - protein, 606 aa, synthetic construct
MVPATFAPTRPAGFDAHDLPQIVAIAASYVRQSSAKADKTEASPMVQREANEAESDKREAQFLRHFEDIGISGWNPDAYREGFEAMLTAARNRLFNMLVVYDVSRFSRQEVADAIPIVTELHRLGITIVSVMDGVFAPRDTMALIYLIMRLDAVHQESQKKSQKVRDVKAAQRAHGSWLGGQTTYGFESEKYLSPDSKYPLYRLVHVPKEAANLRRIWATIKKHMHIPIQPRKAHPGSLSGICTDMNKRGVPTKGQNIGKERTTSQWSVRTLKGILINPVIAGMSAEPVYRVKEDGTQTRTVEGYRIHRDEEGRPVMICKPIIPPAEWYQLQDWLNGRGPGEGLARGESLLSGLRDAEKKPVSVCECNRPLKGLNSGPKPVYKCTRATQAVPAEGEHETGNSAMQSHIDDFVARKVFALIQDATRSDPQPETVLAVRAATMVFSQAKEDPKTAAERHELKAERDDAQRAIDELYDALDAGLYEGPVGRERFLKRKVNIEGRLERVKTRLESLSAPETVELPLEAWLHNDGDSTDPLGEGSWWASVGLDERRKLIAMFVHRVTIKKAATAHAGRVRGGYKIDNRVAVEFVRPVKAEAPEPDAFELSA

SEQ ID NO: 14455 - protein, 452 aa, synthetic construct
MKAAIYIRVSTQEQVENYSIQAQTEKLTALCRSKDWDVYDIFIDGGYSGSNMNRPALNEMLSKLHEIDAVVVYRLDRLSRSQRDTITLIEEYFLKNNVEFVSLSETLDTSSPFGRAMIGILSVFAQLERETIRDRMVMGKIKRIEAGLPLTTAKGRTFGYDVIDTKLYINEEEAKQLRLIYDIFEEEQSITFLQKRLKKLGFKVRTYNRYNNWLTNDLYCGYVSYKDKVHVKGIHEPIISEEQFYRVQEIFSRMGKNPNMNKESASLLNNLVVCSKCGLGFVHRRKDTVSRGKKYHYRYYSCKTYKHTHELEKCGNKIWRADKLEELIIDRVNNYSFASRNIDKEDELDSLNEKLKIEHAKKKRLFDLYINGSYEVSELDSMMNDIDAQINYYEAQIEANEELKKNKKIQENLADLATVDFNSLEFREKQLYLKSLINKIYIDGEQVTIEWL

SEQ ID NO: 14456 - protein, 509 aa, synthetic construct
MGARVSVLSGPQKVSHEAQIDTATKWATAHDYPVVGSFEDLGVSASVPPDERPELGPWIRERSHEWQVIIWSKLDRGFRSMRHCSDFIKWAESNRKIVVFAEDGLTLNYLNPASVVESTLSELFVSMAAAFAQIELNRFKSRAEDMHRAIRPTTRWAAGLPPLGYQVVDHPSGRGKGLAIDPDAANLVREMADKLVDGWSFVRITEWLNESGKLTSQGRSRKARGLEPKGRWTTTNVIEILTGYRTLGIKTHKGQPVLDDSGEPIRLAPPLFTPERWDEVQRAAQLRKGKPRTPSDTSNPMLGVGYCGAPCSHKRSGSECPGDCQGICGSSLAQQFSKTRPRKSDGHVTFYRYYRCSRTPINCKAVFVVADDLDELLSEQFLLERGDRRVTERVFIPGEDNSYELDFIKDRIERLREDRVSGLYPSGEDELVFRNQMKQLLARRDELASVPVRQPGYENVELEKTYREVWPGATPEEKRKMLIDAEISIRLGESPGKSLRAELVIGTPY

SEQ ID NO: 14457 - protein, 508 aa, synthetic construct
MKKAIAYMRFSSPGQMSGDSLNRQRRLIAEWLKVNSDYYLDTITYEDLGLSAFKGKHAQSGAFSEFLDAIEHGYILPGTTLLVESLDRLSREKVGEAIERLKLILNHGIDVITLCDNTVYNIDSLNEPYSLIKAILIAQRANEESEIKSSRVKLSWKKKRQDAMESGTIMTASCPRWLSLDDKRTAFVPDPDRVKTIELIFKLRMERRSLNAIAKYLNDHAVKNFSGKESAWGPSVIEKLLANKALIGICVPSYRARGKGISEIAGYYPRVISDDLFYAVQEIRLAPFGISNSSKNPMLINLLRTVMKCEACGNTMIVHAVSGSLHGYYVCPMRRLHRCDRPSIKRDLVDYNIINELLFNCSKIQPVENKKDANETLELKIIELQMKINNLIVALSVAPEVTAIAEKIRLLDKELRRASVSLKTLKSKGVNSFSDFYAIDLTSKNGRELCRTLAYKTFEKIIINTDNKTCGIYFMNGIVFKHYPLMKVISAQQAISALKYMVDGEIYF

SEQ ID NO: 14458 - protein, 597 aa, synthetic construct
MTKKNGEMGDSIRRQMENQRKAVETYNLHVVDVFEDLGKSAFRGKHRLKGALSLFLASLDEGKIPSGAYLLIESFDRLSRERMTDGLTVVLTILRKGIKIITTDDLKLYDLSIKGKDLEQTIMITVLLERANNESTTKSDRQKAKWDGRRERIINGEKKFLNKNVPWWISLDEASGKYSLIPERVAELKQIYELLMVKNLGLRATAAHINENNPLKVAFGKNPDKSGWTARGIKRMIDTPSLYGSLELCEYIYDNGKSVPDRKTVQVMENFYPAAFTKHEVDLLKAKIASRMTSKQKPTRRDLQYYNIYHGLIRCAFCGGNVRFSQKQKYSYLVCRNSEIKLCKYSKTLSMQYERFHEVFFKYAEHYNFELLIKSGGNDNDVIVKEIVELEETIVTEKHKARKFTEKLLDMFDGEIPEEQEAAMIARNKKIKSLEAKVNALRAKIVYVDTDAETISDAIQYASKLIETKDGRLELSNHLTKLIDKMVVDFGKAHGRDSDYVKVLFKNKDYSHHFLFGKDVSYSYDSDGELFLDTLDGITRDEGYYLDSRKVPEWEGIEIPEFTDEEIADAEIQNSLNPINDLGHEDMPVIAIDSEYQ

SEQ ID NO: 14459 - protein, 509 aa, synthetic construct
MKTCIYLRKSRSDEEAEKQGEFETLSRHRSTLLKVAKEQNLNIVEIKEELVSGESIAYRPKMLELLEEVKNGFYDSVLVMDIDRLGRGNMQDQGLILETFKKSATKIITPRKTYDLNNEWDEEYSEFEAFMARKELKLITRRMQRGRVKSVEEGKFIASKPPYGYKFVFDESGNKSMVIDEDKAEVVRMIFDLYVNKHYGGVKIATHLNSLGLKTTTGRTWYDKGVRDILKNKTYAGYVVWNKVERGKNSSKTRPIDERIEAKGIHEPIIDESIFLEAQSLFKSNFIPSTKQHSTITNPLAGLIVCSECGHRMIAQQSTYKNKEIVKFVKCLNCGKNRGIRLDILEKDIINELADWVDAYNVSIKDLDSNENKNPNLESYYSIIKSLESEYQTLMKQKENLHNLLEQGIYDVDTYLDRSKILTDKIDLNRSNLSQAKKDLENEKESVFSIADIIPQIKKVLELYYQSSDMQERNELLKEVIDYIDYSREPKKRTSRFNIKIYPRLIKNK

SEQ ID NO: 14460 - protein, 530 aa, synthetic construct
MIAAIYSRKSKFTGKGESIENQIQLCMDYAKNLGINEFLVYEDEGFSGKSMDRPKFKEMLKDAKDKKLDYLICYRLDRISRNVSDFSTLIEDLNKLNISFVSIKEQFDTSTPMGRAMMYISSVFAQLERETIAERVRDNMYELARTGRWLGGMPPYGFISTQINYYDENMNQRKMYKLKVDEDTIEIVKLIFDKYLELRSLSKLYKYMYENGIKGTRGGNLDPSALSLILKNPAYVKADKSVVDYLRKSNIDVMGDTDNIHGILTYAKNTDSPIAAVAKHKGVIDSDKWIEAQRLLNANKAKAPRAGTGSKALLSGLLKCSKCGSNMRITYKNSKSGTIYYYICGTKKSLGVSACDCRNIRSDKAESKVIDELKNKSIKSIMSSYKDSKLENSKNSKNIKTEINSINNQIKEKETYIDNLVMQLAKVTESSASTFIINKLESLNNDLSNLKSQLESLNTMSMENKQVDININMLIDNLNKFNKEIDNSDINKKRLLLSTVVDYMTWDSDTDTIKVNLIGINSSNTIASGK

SEQ ID NO: 14461 - protein, 575 aa, synthetic construct
MDKVRVAAYCRVSTKKDEQLNSLENQQNYFQTEISKNKGYELHNIYVDHGLSAVTMAKRKSFLDMVYDAGIDYVIKGTKEVDFSVSNRTPKFNRIFVSNTSRFARNIDVIPLIRKLREKGVFIHFLDISKTSESVDDETFITIFMTFAQQESIDKSKKVRFGQKQSAENGVIMLNSKIYGYKKTEENELEIIEEEAEVIRKIFELHADGVGIRRTTNMINEMGYRTRAGKGFSQGTIAGIVRNPIYYGTLVRGKTTYGKDLYSKYNSRRMKDESEWHIHENRVQPIISKELFEQARKQREGNTISQKQKGVNKGVSEFAGRIVCGKCGARFNHNTELVKKTDETEWQRNFYVCCTKKVEGMNKCNSINLQQWQIEAMVDYIAKEGMDAVRKEAGKLLKSGAIIKRDKLEKKLAEEFDEEKVRQLYVELEKREQEKNRLLDIFVDGGFDKSVLEKKRIEIEEKIEKVKKEIAQNSKDELKKEIEETNQQIEFYEEHSKRKRYYTPEEIRKGLNKITVYTGNEKKGRYYLPILHCNVFKLPIYLKFTKDNSVLRADHTDLVFIGKVREWPEITPVKK

SEQ ID NO: 14462 - protein, 486 aa, synthetic construct
MSTPLRVAIYVRISNDRTGAGLGVARQEEECRTLAARIGWEIYDVYSDNDVSAYSGKTRPNYARLLADVAAGRVQAIIAWHADRLHRSPRELEDFIELVDKHHVRISTVKAGQLDLDTSSGKMVARILGSVARAESEQKSERLKSKLLQLAKSGKYGGGGSRPYGYEKDGITVRPAEAQTIQECARRVLAGEAIASVAKDLNVRGVPTATNRPNGWSVPILKRMLISPRIAGLREHRPRNPDGTRPNVGEIMAVAEWPAIIKREEMTRLHGILLDPARRVSPGRNGRYPLSGVLYCGREGCARRLVGRPDGLGRRRYVCNAVPGAGGCGKIMALSEPIEEHLFTLVAGALDDQPFMTRLMSAGSDVTADKVLAEIADDEAELEALAGDLGERRITRKEWLAARVPIEARLRQNRARLEKSDHRAPLTFADAPKSGEQALAWLTNPEIPASRKSAYIRAVMEKVWVLPGVRGRNKFDAARFKIDWVA

SEQ ID NO: 14463 - protein, 509 aa, synthetic construct
MKTCIYLRKSRSDEEAEKQGEFETLSRHRSTLLKVAKEQNLNIVEIKEELVSGESIAYRPKMLELLEEVKNDFYDSVLVMDIDRLGRGNMQDQGLILETFKKSNTKIITPRKTYDLNNEWDEEYSEFEAFMARKELKLITRRMQRGRVKSVEEGKFIASKPPYGYKFVFDESGNKSMVIDEDKAEVVRMIFDLYVNKHYGGVKIATHLNSLGLKTTTGRTWYDKGVRDILKNKTYAGYVVWNKVERGKNSSKTRPIDERIEAKGIHEPIIDESIFLEAQSLFKSNFIPSTKQHTTITNPLAGLIVCSECGHKMIAQQSTYKNKEIVKFVKCLNCGKNRGVRLDILEKDIINELADWVDAYNVSIKDLDSNENKNPNLESYYSIIKSLESEYQTLMKQKENLHNLLEQGIYDVDTYLDRSKILTDKIDLNRSNLSQAKKDLENEKESVFSIADIIPQIKKVLELYYQSNDMQERNELLKEVIDYIDYSREPKKRTSRFNIKIYPRLIKNK

SEQ ID NO: 14464 - protein, 530 aa, synthetic construct
MIAAIYSRKSKFTGKGESIENQIQLCMDYAKNLGINEFLVYEDEGFSGKSMDRPKFKEMLKDAKDKKFNYLICYRLDRISRNVSDFSTLIEDLNKLNISFVSIKEQFDTSTPMGRAMMYISSVFAQLERETIAERVRDNMYELARTGRWLGGMPPYGFISTQINYYDENMNQRKMYKLKVDEGTIEIVKLIFNKYLELRSLSKLYKYMYENGIKGTRGGNLDPSALSLILKNPAYVKADKSVVDYLRKSNIDVMGDIDNIHGILTYAKNTDSPIAAVAKHKGVIDSDKWIEAQRLLNANKAKAPRAGTGSKALLSGLLKCSKCGSNMRITYKNSKSGTIYYYICGTKKSLGVSACDCRNIRSDKAESKVIDELKNKSIKSIMSSYKDSKLENSKNSKNIKTEINSINSQIKEKETYIDNLVMQLAKVTESSASTFIINKLESLNNDLSNLKSQLESLNTMSMENKQVDININMLIDNLNKFNKEIDTSDINKKRLLLSTVVDYMTWDSDTDTIKVNLIGINPSNTIASGK

SEQ ID NO: 14465 - protein, 611 aa, synthetic construct
MRTVKAYVYSRVSSMQQVDAFGLDRQISTVMDFLENAKLPVELGYRLDPNNHEVLESDKGLSGYKGHNFTKGSLGRFKERVRSGEITEGCLLIESVDRFSRKQGYDAIDEFTFLIKRNIDIVEVETGQIFSNKLEHRLSALSTSIERAYQESKRKARISKKSWKHRKEESLANGVALNNNTPDWLALSNDKKKYEINIQRVQTITKIFELYRDGYGVTQIVNLLNKEGERYNGKGWNTVTVYNKLRDRRLNGYLVGKYPSIPKKDNESTSETEKRVLENLKIKREANENAKRIYPIVVEDDLFLKVQSMMDRNVSTKKQRSSTTKQRNLFNGLTKCHECGSPMIVQSMSNGGQYLRCYRQRTKDEKCNSKMLRYYVTERVLLGHIKGLNLNDIYGDKSGNLSLESLNNLLSQVNNKLVVLNEKIKSASDEEELFAIMDFKRKRNAEKEDILNQINALENESEVVRLSYDYDIEEITNQDNTVLRRKTNEHIAKVVSSVRCLRMDSSYIGAYYLYDISYHKDIIKHLLLTNNDGVLLSEISINESNNQRVYSVKEDNKIVFKVESNGDVWVLHASRQKSIDELLHYINVMMVGREPEGFAYEVNEDMIEWVD

SEQ ID NO: 14466 - protein, 537 aa, synthetic construct
MLPRQRPALDDTDSEPWIGYIRVSTWREEKISPELQETALRAWAARTGRRLLEPLVSDLDATGRNFKRKVMGAIQRVEAGEAKGIAVWKFSRFGRDRAGVALNLARLERVGGRLESATEDVDATTATGRFNRDILFAVAALESDRAGEMWKDAHEFRRAAGLPATGGARLGYIWHPRRLPDPTRSGQWITQNERYEPHPEVGPAVEALYTRKVGGEGFASLAAWLNTLGHRTSTGALWQADSVRRMMDSGFAAGQLRIHDPSCGCDYTANGGRCTRWTHIEGAHGPLITPELWERYEEHRKAMKARTPRSRRPIYPLTGLMRCGTCRGDAAATSARRKGEQIRGYAYMCSARSHAGTTICPLGVWVQRAVVEDEVRTWITRELAADVDATPSTPRPTPVPVIDERTIAARERARLQAEADKLSAALVNLRVDRAANPDDYGPGEYEAARDRIRTQQHANRAAMEQVAAVETTPHRADYVPLMLDLHDAWDHMNVQEVNRILRQAVRRVVVTREGRGSHQTRIDVHPAWEPDPWADQG

SEQ ID NO: 14467 - protein, 521 aa, synthetic construct
MKKVITIEPAKQVTHKVELPRFTKRRVAGYARVSTDHEDQTTSYEAQMTYYTDYINSRSDWEFVKMYSDEGISGTNTKKRLGFQEMVEDALDGKIDLILTKSVSRFARNTVDSLSTVRKLEEAGVEIYFEKENIWTFDSKGELLITIMSSLAQEESRSISENVTWGRRRQLAEGQVTFSYSQVLGFKKSDTGGFEIDHEEAKIVRYIFHQVLLGNNPNKIARELTAQGIPTPQGKRQWSYGTVKRMLRNEKYKGDALLQKSFTTDFLTKSTKLNEGELPQYYVENNHEAIIKREVFDLVQVELDKLERKRQTSNIFTGRLFCGDCGSAFGSKVWHSTSKYKRTIYQCNAKYKGEHKCQTPHVTEEEIKGWFLSAINQLLSNRDEIIANTELLIDMAKDTSSLEARLDDLEHHLETIRQDIEDLVDRNARKAQNQDLYQEQYNTLVTAYQEKQKELQETRSVLEEQKSKQLSLDGFIQNFKEQDDLITDFNQELWQTSVERLDIKEDKKIFLTFKNGLRIDL

SEQ ID NO: 14468 - protein, 521 aa, synthetic construct
MKKVITIEPAKQVTHKVDLPSFTKRRVAGYARVSTDHEDQTTSYEAQMTYYTDYINSRSDWEFVKMYSDEGISGTNTKKRLGFQEMVEDALDGKVDLILTKSVSRFARNTVDSLSTVRKLKEAGVEIYFEKENIWTFDSKGELLITIMSSLAQEESRSISENVTWGRRRQLAEGQVTFSYSQVLGFKKSDTGGFEIDQEEAKIVRYIFHQVLLGNNPNKIARELTAQGIPTPQGKRKWSYGTVKRMLRNEKYKGDALLQKSFTTDFLTKSTKPNEGELPQYYVENNHEAIIKREVFDLVQVELDKLEKKRQTNNIFTGRLFCGDCGSAFGSKVWHSTSKYKRTIYQCNAKYKGEHKCQTPHVTEEEIKGWFLSAINQLLSNRDEIIANTELLIDLAKDTSPLENKIDDLEQQLETIRQDIEDLVDRNARKAQNQDLYQEQYDTLVTAYQERQKELQEATSSLEEQKSKQLSLDGFIQQLKQQEDLITDFNQELWQTSVERLDIKEGKKISLTFKNGVRIDL

SEQ ID NO: 14469 - protein, 402 aa, synthetic construct
MKQIKTIQAQKVTAIKRLKVAAYTRVSHTSLLQSLSNQVSHYSQLIQANPEWDYVGVYSDSAISGRSQAYRRDFQQLLEDCRKGKIDLILTKSISRFGRNTVELLETVRELKRLGISVRFEKEKIDTLTAEGELLLTLLASMAQEESQSISQNIRWRVKKRFEEGKPYIPQDIFGYRWNGDEYVIEPHEASIVRQVFEWYMEGLSAPKIAKRLDDRGERTRLGNRFTKRIIYNMFDQEAYCGRLILQKTFRDHFGSRSIPNDGQMAKYIVENAHEAIVTPEYFQQVNQEKKRRARRRVSKHDALAKLQGKVYCEHCGLDMILTLETKSNQEKRVRYYCRTRDAKGVEACLGRTVTEEQLFQAFGESINTEDIHHISFNSVTNEAKATYRNGEEKHVIIQKGR

SEQ ID NO: 14470 - protein, 655 aa, synthetic construct
MKPTIITYLRYSSKQQADGLSEFRQSEINRKFVEKFCEEHGVDLNEVISLKDLGVSAYRGLNLTLGSFSQTIKKFKSGEIKKRFNEDGEINTYLIVESLDRITRTGPFKSTQIFTELLEYTNIVVLADGEKKIYSKKSIDSTHGMMDLFMALISLQRSHTESLMKEYRSRKSWEKKREDLLNYFTLPEDEREGLERPKNATAMCPFWLTAKKDGRGYDFIPENKKVMDFLIEKLLDGNGMTRAVRLLNDEIDNGNLKPKLKKANRKTRHFRAAAYSGLFNSVISTVKGDYLLTESYYPTEDDVEQGKYPEKHLGKRVRKEVAVLKNYYPALMTESQAAYIRKMMDERRTSGTKPNKSIKNLAQGILRCPYCNSTYIKSKDRRNVYLRCNLAREGLCNAKVIKHDVFEHNLLQFCKGLNINKIISNQACDQVLDSSLKELEQKMIPLKVRKSELEDDIEQIVKNISSIKIPSLLEKVQDDYLAKENELKKVVQEIDLIETSIMKLQQQIAMSDGDNSLQELIDLTLDESADDEIRQRFNVELKKVVKSMTVLYRDTEDNPFGYHMISIQFLDGVHRLIPVHEKMTDKIHNILPYQDAVKVDSVDFSETVILPTDYLEGLESGKYPQLDGMAKYYQENPAKYLKLKYQIDHSQEIYE

SEQ ID NO: 14471 - protein, 498 aa, synthetic construct
MRLFSYIRFSTEKQIDGDSVDRQTNSAKKYAQLHGYDFQNKSFSDLGISGFKNVDRDGLTSMLEAIQSGGISRGDLIFIENVDRLTRQGFQHANDLIVKIVNSGVLLHFERESVTFKSPSDLNDMMSLMKVCMSASLAFEESQKKSERIASAKQKQRNLMKQGIAVKHKAPHWIEFDEDGKCFHFGNTKIIKRVIELRRDGFSVSKIISTMNKEGFKAPYGGTLRSSTVKQWLQSPALYGAVMVEDELIKDYYPALMSYDEATKLYNKLTHKRAPENQNNHLRGLIYCSKCDSAMGLRFTTSSGKSKKKIPTFYCIKQREGGCDAPSVSNIMPLIEKMVSHMKTIENKVDVAAITARIDEISSNLERISKSVTTDNFKMMMDMMDKFEKEKRELQASLTVNNDVDTASLLSHIDNPVEFNNIARRYIDRIKVTFKGGTRRKRTFHFKLIQRNGHIVNLTRFGSGQITIGKTEILSTFGKPESEFGEEMTYLEELEPVG

SEQ ID NO: 14472 - protein, 530 aa, synthetic construct
MISAIYSRKSKFTGKGESIENQIQLCMDYAKNLGINEFLVYEDEGFSGKSMDRPKFKEMLKDAKDKKFDYLICYRLDRISRNVSDFSTLIEDLNKLNISFVSIKEQFDTSTPMGRAMMYISSVFAQLERETIAERVRDNMYELARTGRWLGGMPPYGFISTQINYYDENMNQRKMYKLKVDEDTIEIVKLIFDKYLELRSLSKLYKYMYENGIKGTRGGNLDPSALSLILKNPAYVKADKSVVDYLRKSNIDVMGDIDNIHGILTYAKNTDSPIAAVAKHKGVIDSDKWIEAQRLLNANKVKAPRAGTGAKALLSGLLKCSKCGSNMRITYKNSKSGTIYYYICGTKKSLGVSACDCRNIRSDKAESKVIDELKNKSIKSIMSSYKDSKLENSKNSKNIKTEINSINNQIKEKETYIDNLVMQLAKVTESSASTFIINKLESLNNDLSNLKSQLESLNTMSMENKQVDININMLIDNLNKFNKEIDTSDINKKRLLLSTVVDYMTWDSDTDTIKVNLIGINPSNTIASGK

SEQ ID NO: 14473 - protein, 493 aa, synthetic construct
MAATSLRALVGARVSVLKGAEKVSNLAQIGTGSSWVVSRGHRIVGTFEDLDVSADKYTPFDRPDLGRWLTDERAHEWDMLVFSKVDRAFRSIRDTVDLARWIEARKKILVFAEDGMVLNYRDDVDSFERMMSEFFIMVASFFAQMELNRFKSRAKDAHRIIRQTDRWANGVPPYGFWTAPHPSGKGRCLVPDPEGRRVLREVIAPRLLAGDSFSSIVAHLNATGVLTNMNRAKVEAGREPKADPWTVTNLRDMLTSLRTQGIKMSQGKPVLTEDGSMIRLADPTFDDETWTRIQEAVAARSHSGKRRVNSPNPLLSVGFCGKCGSNLSHQVQQNVPGGKEFRYYRCQKCKLRTRADEAEFLLEELFIETYGQQAVTRRIFVPGSDNSRELEEVEAAIKRLRMESDAGLITTEEDQNLYMTRLSSLVGRRNALQANPVVAPTWREETTGETNAEVWARSSQEERRKLLQERGIRFVLHPGKRWELVDIMGEKIT

SEQ ID NO: 14474 - protein, 556 aa, synthetic construct
MEYVAYLRVSSYNQKEKGDSIDGQRKSITRWVTERGGNIIKWYIDDGVSAYKGKRNNFDLMLQELENDIVKVDGLIVYSLSRFSRNLLAQLEATKVLQRKEIRLISATEALPESYEESYVMSSILGLMNEHSSMQNGKVVRDRLRDTALKQCFTGGPIPFGYRSVTVTGETSKKRKKLQIQEEEAEIVREIFNLAEKGENGKPLGVKKIAERLNIDMKYKRGTKWEKNTICRLLHNKSNIGEFIFNPSEGDPVTVKIPSIISKEQFYNVQECLRLKDIFSSESRGIRSKNLLTGLLKCSVCGGSMVVTSGKNGKYHYYQCSKQVRHSPDSCSSKRIRKDEIEPIVKDKFVKQLLKEDHLKMIHYNAKQRLKEVNKLSSTDKAKISKKIGSLETRYSRLVNLIADGDLVPDKRINKTLTGLSTQIDALEADMEKLKVRTNLPVKNFGSAWLEEFAKAIQIYLHGIDDEALKQLMLATVTSVKVVKTTKKLKFEGSNMAVLYLIANAKTGTDFSVPAFVTKWRRDRDLNPRYAINVCRFSRPVLSTTQPSLHKLSSSD

SEQ ID NO: 14475 - protein, 498 aa, synthetic construct
MNKTKVYSYIRFSTSRQESGDSVRRQLEIARNYSEKVGGVYQDRSFTDMGISAFKQKERDGLQMMLDMVEDGSIEKGSHIVIERLDRLSRQGISVTQQLITQIVQTGVLLYVAGDNLLLDRNSLNDLSTVIIVAVAADLAYKESLQKSQRIKASKIAKKKDGLDGRVTKKVCPFWLTFDENKQGYVFNEKLPTIQRIIELRQQGLGENKVAQHLNDENIKPPRAAKWNPTTLRKMYTHPALYGAWQTTEKADNGRYVDSDLIENYYPALLTYEEFSLMNPKSKTTTGKDSGLNPFKGLLRCAKCGATMSRQTTKMRSGEIYVAFRCTNAGKGIYCDAVGYRDLDKYLVSGCKRLKITKTADRDTRQQEADLRALESKLEQLQKAILTQTDISALINTSQLVERQIKELKSKIKPVATVTVEELYSHKDTPQSFNLLARSLLKRVEVEVKAKGRHTKTLFARFYQHNDYVITMTVLPSGESFYSTTELNELYKGTDNFD

SEQ ID NO: 14476 - protein, 547 aa, synthetic construct
MKLLATYIRWSTREQDSGDSLRRQTNLIDAFYAKHKDDYYLLPAHRYVDKGKSGFHQQHKAQGSDFRRMFENVMSGAIPEGSLIVVENFDRFSRADIDTAIDDVRQILRKGVSILTLGDGELYDKSALTDPVKLIKHIIIAERAHQESLVKQKRIAQVWNHKTQLARELKKPMGKQAPGWLELSEDGSHYIVDEDKASLVNIIYDKRLSGMSMFAICKWLNEQGYPTINQRKVRISKTKKPDGNWSALSVKHILTSRSVLGYLPAKISSEDRKTVLREEIEGFYPQIVTDSKFYAVQQLLEETGKGKTSSGEHWLYVNILKGLIRCRCGLVMTPTGIRKPVYQGTYRCNGNKESRCNYGTVSRKLLDTQLCSRLFSKLSQLHDEATDTAKLDELQRRLNTVDGELEKLTETLIQLPNITQIQEALRVKQGEKDELIVQLSREKARVKSVSSLDLSGLDMESVEGRTEAQIIIKRLVKEIVVSGNEKLVDIYLHNGNMIRGFPLDGKDDHTLTLEEATDEMQSLDDMLIFGEPVTRIYPAGDMEEVDA

SEQ ID NO: 14477 - protein, 479 aa, synthetic construct
MNKVAIYVRVSTKGQAEEGYSIDEQIAMLTSYCSIHKWTVFDTYVDAGISGATIERPELSRLSRDAQKKKFNTMIVYDLKRLGRSQRNNIAFIEDVLEKNGIGFISLTENFDTSTPLGKAMVGILSAFGQLDRDTIRERMMMGKIGRAKSGKPMMTSTIAFGYTYDKSTSTLNINPVEAIIVKTIFNEYLSGMSLTKLRDYLNKNDLLRNGRPWNYQGVSRLLRNPVYMGMIRFSGKVYQGNHEPIIDAETFETTQKELKRRQIATYEFNKNTRPFRAKYMLSGIIRCACCGAPLHLVLRNKRKDGTRNMHYQCVNRFPRTTKGITVYNDGKKCNTEFYDKTNLEIYVLGQVRLLQLNKSKLDKMFETPVIINTEEIENQINSLNNKMRRLNDLYLNDMVTLADLKAQTHTFLKQKELLENELENNPAIRQEEDRKKFKKLLGTKDITQLSYEEQTFTVKNLIDKVFVKPSSIDIHWKI

SEQ ID NO: 14478 - protein, 530 aa, synthetic construct
MIAAIYSRKSKFTGKGESIENQIQLCMDYAKNLGINEFLVYEDEGFSGKSMDRPKFKEMLKDAKDKKFDYLICYRLDRISRNVSDFSTLIEDLNKLNISFVSIKEQFDTSTPMGRAMMYISSVFAQLERETIAERVRDNMYELARTGRWLGGMPPYGFISTQINYYDENMNQRKMYKLKVDEDTIKIVKLIFDKYLELRSLSKLYKYMYENGIKGTRGGNLDPSALSLILKNPAYVKADKSVVDYLRKSNIDVMGDIDNIHGILTYAKNTDSPIAAIAKHKGVIDPDKWIEAQSLLNANKAKAPRAGTGSKALLSGLLKCSKCASNMRITYKNSKSGTIYYYICGTKKSLGVSACDCRNIRSDKAESKVIDELKNKSIKSIMSSYKDSKLENSKNSKNIKTEINSINNQIKEKETYIDNLVMQLAKVTESSASTFIINKLESLNNDLSNLKSQLESLNTMSMENNQVDININMLIDNLNKFNKEIDTSDINKKRLLLSTVVDYMTWDSDTDTIKVNLIGINSSNTIASGK

SEQ ID NO: 14479 - protein, 510 aa, synthetic construct
MIKTCIYLRKSRSDEECEKQGEFETLSRHRSTLLKLAKEQNLDIIEIKEELVSGESISYRPKMIELLDEVKNGLYDSVLVMDIDRLGRGNMQDQGLILETFKKSNTKIITPRKTYDLNNEWDEEYSEFEAFMARKELKLINRRMQRGRVKSVEEGKFIASKPPYGYKFIFDESGKKSMIIDNDKAEVIKMIFDLYVNKHYGGVKISSHLNSLGLKTSTGRTWYPKVVRDILKNKTYAGYVVWNKVDRGKNNSRTRPVDEHIEAKGIHEPIIDESIFIEAQNLFKNSSIPSTKKNTSITNPLAGLIICSECGHKMIAQQSTYKNNELVKFLKCLNCGKNRGSKLSIVEKEIINELENWIASYQVSIKNLESPKNNNSNLESYYSIIKSLDCEYKTLLKQKENLHNLLEQDIYDVDTYLDRSKVLADKIDLNRDNLTQAKKDLKKEKESNFSISDILPQVENVLELYYQSNNMQERNDLLKEVIDYIEYSREPKKRLSKFNIKIYPRLRYNK

SEQ ID NO: 14480 - protein, 559 aa, synthetic construct
MKNKKAYVYTRVSTSMQIDGYSLDAQEERIKQYAKAYGIEIIETYKDAGKSGTSISGRNEFIAMLNDIEAEKDKVDYVMVFKLSRFGRNAADVLQSLQVMENHNVNLICVDDSLDSSKDSGKLVITILSAVAEMERENILSQTMEGRKQKAREGKWNGGFAPIGYSLDNGELVVNEDEAKAVRMIFDLYANSDMGANGVSKYLVSLGINKPIRQNGKNPYFSASLIRQILDNPVYNGKIAYGRRKTIKDKTTGKIKLEKSDHYIIAQGNHEALIDDELWNTVQEKRKSQAKKYEKINRGKDERVHILSNLIKCPYCGAGLYGNKSRKRNKNKEGEHYKDYYYYGCKHRQMMNGHKCTFNKQIRAELIEKEVETIITQVVSNPTFAKKIEEKINIQIDTKEIDEVINKHLAKIRQLTGTKASLINQIDSLNFEDKHYDRKYTDLNLRLDAIYDQLEYAEMQLNDSRKRKEAILEEKITSDNIYKILVNFNSLYTVLSDIDKKRLLNEMIEEIQIYDEKTEKDTWIKSVVFKLPLIDNEIDFGLDNKDNVECVALLQRSKG

SEQ ID NO: 14481 - protein, 530 aa, synthetic construct
MIAAIYSRKSKFTGKGESIENQIQLCIDYAKNLGINEFLVYEDEGFSGKSMDRPKFKEMLKDAKDKKFDYLICYRLDRISRNVSDFSTLIEDLNKLNISFVSIKEQFDTSTPMGRAMMYISSVFAQLERETIAERVRDNMYELARTGRWLGGMPPYGFISTQINYYDENMNQRKMYKLKVDEDTIEIVKLIFDKYLELRSLSKLYKYMYENGIKGTRGGNLDPSALSLILKNPAYVKADKSVVDYLRKSNIDVMGDIDNIHGILTYAKNTDSPIAAVAKHKGVIDSDKWIEAQRLLNANKAKAPRAGTGSKALLSGLLKCSKCGSNMRITYKNSKSGTIYYYICGTKKSLGVSACDCRNIRSDKAESKVIDELKNKSIKSIMSSYKDSKLENSKNSKNIKTEINSINNQIKEKETYIDNLVMQLAKVTESSASTFIINKLESLNNDLSNLKSQLESLNTMSMENKQVDININMLIDNLNKFNKEIDTSDINKKRLLLSTVVDYMTWDSDTDTIKVNLIGINPSNTIASGK

SEQ ID NO: 14482 - protein, 530 aa, synthetic construct
MIAAIYSRKSKFTGKGESIENQIQLCMDYAKNLGINEFLVYEDEGFSGKSMDRPKFKEMLKDAKDKKFDYLICYRLDRISRNVSDFSTLIEDLNKLNISFVSIKEQFDTSTPMGRAMMYISSVFAQLERETIAERVRDNMYELARTGRWLGGMPPYGFISTQINYYDENMNQRKMYKLKVDEDTIEIVKLIFDKYLELKSLSKLYKYMYENGIKGTRGGNLDPSALSLILKNPAYVKADKSVVDYLRKSNIDVMGDIDNIHGILTYAKNTDSPIAAVAKHKGVIDSDKWIEAQRLLNANKAKAPRAGTGSKALLSGLLKCSKCGSNMRITYKNSKSGTIYYYICGTKKSLGVSACDCRNIRSDKAESKVIDELKNKSIKSIMSSYKDSKLENYKNSKNIKTEINSINNQIKEKETYIDNLVMQLAKVTESSASTFIINKLESLNNDLSNLKSQLESLNTMSMENKQVDININMLIDNLNKFNKEIDTSDINKKRLLLSTVVDYMTWDSDTDTIKVNLIGINPSNTIASGK

SEQ ID NO: 14483 - protein, 466 aa, synthetic construct
MTRTAIYLRISDPRGDRDDRFGLAVQERACREYAARAGLTVQKVYTDAVTGVTETRVGFGQLLAEADAYTDVIVYAVDRLARHPKAGYALLETLQAAGLQVHTAIEGMLDLEDDAGALNFGVRIVMADAERRRIVRRLTEGKKQKVRNGQPLAPLRCYGYQNGEVFEEQAQWVRWMYQQALVTGTHEIMNELQRLGVPSSAGHPKWNRDQVLKILRNSVYRGEYLYGRDRRTRRAHPDAISCPCPRIVDDETWYAVQRAIDYRRSGAGRRGSRTDLFSLTGRIRCAECGAAMVGRRPGGPDTRNAGYVYYACGDPALMRHRKGCTHRKFYPAVDVHGAVQAELERLARQPAQLASMVVTPTSRPIDTDKAVYDIDAQLTKARNAYLRGIDTEDEYAETKATLLAQRARLLALAEGGQPEPVADAGHLQRALTEALELGDLHQAAGRLGLLVRVAPGGEITLALDPS

SEQ ID NO: 14484 - protein, 583 aa, synthetic construct
MATRLYSYVRWSTDKQSGNTSLDRQTDKAKAFASLHGLEYVQILDAGISAFRGKNTTQGALAGFIEAVKAGAIPNDSYLYVENLDRLTRQDVMTALNLFTGLLSLGLTIVTGMDGKVYSQDSVKNNVTDLMMSLFLFSRANEESLTKQKRAHETALKLIDRHRAGLPVNIKSAGSAPWWIDASMGTYEAVKPHPVHWKAAQKAVELMLEGWGCFRVASYLTDNPDLYPPPRGNRGKGKKRSECWAVANLKAMRSNRALYGEKVITIDGVTHRLSNYFPAVCSQTDFARLQDVACSNRHKVGEVRQTITLLSGLGLLRCGHCGGSMSFFSKEGRIRYVCETGKNKTSACRVWSVSGLLVERCLLAPLIRGYMDLMMGKQGKREDLTQAIEAKRGELNGIESQISNITSAITMGGNIPALVASLQALEHTKSGVLVELERLAQRQALQDGKDHQLESMVDFYELLTPDLLEDTTDERRLKVREVVRAVVRSVTLSKGPDKALILSYELQDKTAYVYTGTLTAEGKKGYTLEVVNGDIQINGTEDNEEAQRLIGVIQDAEQEYHKAISKILAGFPAPVGSHFFGKR

SEQ ID NO: 14485 - protein, 523 aa, synthetic construct
MAEKHLTDGTTALAAQPRVIKIEAAEKPRNAQLRVAAYTRVSSDSDDQLNSFAAQNRYYAELISGKAEWRMVDIYADEGITGTSAAKREDFQRMMADCRRGLIDQILVKSISRFARNTKDCLEAVRELKELGVNVRFEREGIDTANVSSELITAIYAAFAQKESESISGNMRWSYQRRMESGEFNTCRAPWGFRLDGKSLAVHEEEAEIVRRIFHEYLSGRNPREIAEILNAEDTSGRIWKYKTVDYILQNERYAGNALLQKRYTTATLPKQQKINHGEREMYYVEDSNEAIIPQELFDRAKELRQRRSVGQAVTHGRLCVRMRCSCGSRIRAKRVNGRWYWCCCRHDEKGNCAIKPVPEAQTDEAFRRLYYKLKHQSLPILEQMLETIQTIRDCRLLWSEDIVSLNKKISELSSQNQTLAFLKRNGLVDSDIFISKSNELTRQLRQAKLDKEKLMDAEGDATAQRTRELIALLEDGPDLLDCPDTELCGALVAEIIVESNDTLRFRLHNGLELRESIERTVR

SEQ ID NO: 14486 - protein, 539 aa, synthetic construct
MNETAPRVIKIPAKPESVRQAELQRQLRVAAYCRVSTKEEDQANSYEAQKEYYTDKIMSNPVWTMAGIFADKGITGTSVKKREDFMRMIRHCRQRKIDVVLTKSVSRFARNTVDCLYYTRALKELGIAVIFEKENINSLEEDSELRITLSGAFAQSESESISANVTWGKRRAMESGKATIQYKYLYGYRRGTDDKPEIIPEEAEAVRWIYERYLAGASTRMLRDELHEQGVIYAEKSPQWTLPHIKSILRNEKYCGDVLMQKTFQQDVINRKVIKNTGQLPMYLIENHHEGIVSREKYNAVQAEMARRKAAKSPSKRATTGLSAYTSRYALSDRLVCGECGTLYRRCTWTRPDGKRVVWRCVSRLDYGKKYCHSSPTLDEAPLQQAIIAALNTVLPDLDGRIRQITEALEAEVIPFPGSGMSLGDIDRRLAELEAQFQRLLEKAADDPIAYGDQFKEILEEQTALKELRATILAESREHAEADRRIRDAAGMLENAVPHITEWDESAIRQLVAQVKVLSKNEISVTLKSGIEIRQSISN

SEQ ID NO: 14487 - protein, 579 aa, synthetic construct
MKAVIYARYSSDSQREESIEGQLRECAAFAEKNGITVLRHYIDRAYSAKTDNRPEFQSMIKDSGKQLFDIVIVWKLDRFARNRYDSARYKATLKKNGVKVVSATEIISEGAEGIILESVLEGYAEYYSADLSEKVVRGMTDNALKCKFNGGMMPIGYVIDAEQHFQIDPLTAPFVLEAFKRYDGGETISSVVNWLNEQGLTNTRGRKMTFNSVGHILHNRRYIGEFRYRDVIVPDGIPAIVPQDLFDRVQEKLAKNKKAPARHKAEDDYLLTTKLFCGYCGAYLCGESGTSRTGKVHHYYKCVSVKKKRTECHKRPVRKEWIEDLVVGETMKMVMDDKAIEAIVSMLMDLQDRDNVNVPLYEQQLREADTAISNLLGAIQQGILTRSTKARLEELENRRDELENRLACEKLAKPKVSAEFMTFWLHRFRKLDVRQQSHRKMLIDTFINAIFLYDDKMVIAFNYKEGTKTITFAELQEAISNKNGSDLDCLAAPSRSKRYKACSDFFQKSEESLRAKVFEKTMLENIEVIETQNQVSMINSEIIQKAETILCPHFYYSFYFADGRYSIFCLTADAVPAIL

SEQ ID NO: 14488 - protein, 493 aa, synthetic construct
MKAVIYARYSSDSQREESIEGQLRECTAFAEKNGITVLQHYIDRAYSAKTDNRPEFQNMIKDSGKRLFDIVIVWKLDRFARNRYDSARYKATLKKNGVKVVSATEIISEGAEGIILESVLEGYAEYYSADLSEKVVRGMTDNALKCKFNGGMMPIGYVIDAEQHFQIDPLTAPFVLEAFKRYDGGETISSIMNWLNEQGLTNTRGRKMTFNSVGHILHNRRYIGEFRYRDVIVPDGIPAIVPQDLFDRVQEKLAKNKKAPARHKAEDDYLLTTKLFCGYCGAYLCGESGTSRTGKVHHYYKCVSVKKKRTECHKRPVRKEWIEDLVVGETMKMVMDDKAIEAIVSMLMDLQDRENVNVPLYEQQLREADTAISNLLNAIQQGILTRSTKERLEELENRRDELENRLACEKLAKPKVSAEFMTFWLHRFRKLDVRQQSHRKMLIDAFINAIFLYDDKMVITFNYKEGTKTITFAELQEAISNKNGSDLDCLAAP

SEQ ID NO: 14489 - protein, 495 aa, synthetic construct
MNVVIYARYSSDRQTEQSIEGQLKECYEYARRNGYAVVGEYIDRAISGTTDHRPEFLRMIADGDKKLFQAVLVYQLDRFARNRYDSATYKAKLKKNGIRVLSARENISDDASGVLMEAVLEGMAEYYSVELSQKIRRGMDINAEKCLSTGGNLALGFCVDSEKHIQIDWDTAPVVQKIFEMYASGQSMADIIRYLNANHIKTSYGNEFNKNSINRILRNKRYIGIYTYRGTETPDGLPRIISDDLFYEVQDMMDKKKKAPARAKAFENYILSTKLFCGYCQAAMTGISGTSKTGTKYHYYQCVTNRRDKSCHKKTVSKAYIEDLVIKETRKLLTKENIDRIAKEVVRLCEQEKDTDNLKRLKKLLKENERATENLFKALESGQIVDVIAERISQKKQERNELEQQILVETSSHPTPTVNEVRFFLNQFRKGDVNDLKYRQALVDTFVNKIYLYDDKMTVLYNTQDSHSDVTIDDLSSSRVVLVEAGGVEPPSENV

SEQ ID NO: 14490 - protein, 475 aa, synthetic construct
MRAALYVRVSTEEQNLEGYSIEAQKNRCMSFIESQGDWYLSKVYADPGHSAKNLDRPAVQELIEGAKNKEFDVLVVYRLDRLVRSVLDLHKLLELFDKHNVKFKSVTEVFDTTTAMGRFFITLVGAMAEWERSNLSERVSFGMEQMTREGKWKGGHVGYGHMHIDGHMAINEDEARIVRMMYDWYLSGMSDRKIAKELRKRGIMTRGGAQWSESHVRYTLSNPKNKGDLRYGIEKEKSKQFVVEDIYPQIIDVDTFDKAMSIRESRRTFHGRQATSDHYFSGILTCFRCGRSMVGHMAKVNGKRLKNYVCLGRRHFECDMPSISERIIEHNFLQELRRGIESENINHIEEPAQNNADEIKALKRDLNKIKDRRKKWQYAWANEIMSDTEFQDRMQEEQELENHLKKQLEDLDETQPHVVDDAVLEMMSDAVENWGNLESTEKKQLMQIAFDKIIVDKIESKKVLDRANIIEIVFK

SEQ ID NO: 14491 - protein, 481 aa, synthetic construct
MKTMNKVAIYVRVSTTNQVEEGYSIDEQKDKLSSYCDIKDWNVYKVYTDGGFSGSNTDRPALESLIKDAKKRKFDTVLVYKLDRLSRSQKDTLHLIEDVFIKNGIEFLSLQENFDTSTPFGKAMIGLLSVFAQLEREQIKERMQLGKIGRAKAGKSMMWAKTSYGYDYHRETGTITINPAQALTIKFIFESYLRGRSITKLRDDLNEKYPKHVPWSYRAVRTILDNPVYCGFNQYKGEIYPGNHEPIISKEEYDKTQSELKIRQRTAAENVNPRPFQAKYILSGIAQCGYCGAPLKIMLGVKRKDGSRLKKYECHQRHPRTLRGVTTYNDNKKCDSGFYYKDKLEAYVLKEISKLQDDADYLDKIFSGDNAETIDRESYKKQIEELSKKLSRLNDLYIDDRITLEELQSKSAEFISMRGTLETELENDPALRKNKRKADMRKLLNAEKVFSMDYENQKVLVRRLINKVKVIAEDIVINWKI

SEQ ID NO: 14492 - protein, 530 aa, synthetic construct
MIAAIYSRKSKFTGKGESIENQIQLCMDYAKNLGINEFLVYEDEGFSGKSMDRPKFKEMLKDAKDKKFDYLICYRLDRISRNVSDFSTLIEDLNKLNISFVSIKEQFDTSTPMGRAMMYISSVFAQLERETIAERVRDNMYELARTGRWLGGMPPYGFISTQINYYDENMNQRKMYKLKVDEDTIEIVKLIFDKYLELRSLSKLYKYMYENGIKGTRGGNLDPSALSLILKNPAYVKADKSVVDYLRKSNIDVMGDIDNIHGILTYAKNTDSPIAAVAKHKGVIDSDKWIEAQRLLNANKAKAPRAGTGSKALLSGLLKCSKCGSNMRITYKNSKSGTIYYYICGTKKSLGVSACDCGNIRSDKAESKVIDELKNKSIKSIMSSYKDSKLENSKNSKNIKTEINSINNQIKEKETYIDNLVMQLAKVTESSASTFIINKLESLNNDLSNLKSQLESLNTMSMENKQVDININMLIDNLNKFNKEIDTSDINKKRLLLSTVVDYMTWDSDTDTIKVNLIGINPSNTIASGK

SEQ ID NO: 14493 - protein, 530 aa, synthetic construct
MIAAIYSRKSKFTGKGESIENQIQLCMDYAKNLGINEFLVYEDEGFSGKSMDRPKFKEMLKDAKDKKFDYLICYRLDRISRNVSDFSTLIEDLNKLNISFVSIKEQFDTSTPMGRAMMYISSVFAQLERETIAERVRDNMYELARTGRWLGGMPPYGFISTQINYYDENMNQRKMYKLKVDEDTIEIVKLIFDKYLELRSLSKLYKYMYENGIKGSRGGNLDPSALSLILKNPAYVKADKSVVDYLRKFNIDVMGDIDNIHGILTYAKNTDSPIAAVAKHKGVIDSNKWIEAQRLLNANKAKAPRAGTGSKALLSGLLKCSKCGSNMRITYKNSKSGTIYYYICGTKKSLGVSACDCRNIRSDKAESKVIDELKNKSIKSIMSSYKDSKLENSKNSKNIKTEINSINNQIKEKETYIDNLVMQLAKVTESSASTFIINKLESLNNDLSNLKSQLESLNTMSMENKQVDININMLIDNLNKFNKEIDTSDINKKRLLLSTVVDYMTWDSDTDTIKVNLIGINPSNTITSDK

SEQ ID NO: 14494 - protein, 509 aa, synthetic construct
MKTCIYLRKSRSDEEAEKQCEFETLSRHRSTLLKVAKEQNLNIVEIKEELVSGESIAYRPKMLELLEEVKNGFYDSVLVMDIDRLGRGNMQDQGLILETFKKSATKIITPRKTYDLNNEWDEEYSEFEAFMARKELKLITRRMQRGRVKSVEEGKFIASKPPYGYKFVFDESGNKSMVIDEDKAEVVRMIFDLYVNKHYGGVKIATHLNSLGLKTTTGRTWYDKGVRDILKNKTYAGYVVWNKVERGKNSSKTRPIDERIEAKGIHEPIIDESIFLEAQSLFKSNFIPSTKQHSTITNPLAGLIVCSECGHRMIAQQSTYKNKEIVKFVKCLNCGKNRGIRLDILEKDIINELADWVDSYNVSIKDLDSNKNKNPNLESYYSIIKSLESEYQTLMKQKENLHNLLEQGIYDVDTYLDRSKILTDKIDLNRSSLSQAKKDLENEKESVFSIADIIPQIKKVLELYYQSNDMQERNELLKEVIDYIDYSREPKKRTSRFNIKIYPRLIKNK

SEQ ID NO: 14495 - protein, 509 aa, synthetic construct
MKTCIYLRKSRSDEEAEKQGEFETLSRHRSTLLKIAKEQNLNIVEIKEELVSGESISYRPKMLELLEEVKNGFYDSVLVMDIDRLGRGNMQDQGLILETFKKSNTKIITPRKTYDLNNEWDEEYSEFEAFMARKELKLITRRMQRGRVKSVEEGKFIASKPPYGYKFVFDEFGNKSMVIDKDKAEVVRMIFDLYVNKHYGGVKIATHLNSLGLKTTTGRTWYDKGVRDILKNKTYAGYVVWNKVERGKNSSKTRPIDERIEAKGIHEPIIDESIFLEAQSLFKSNFIPSTKQHSTITNPLAGLIVCSECGHRMIAQQSTYKNKEIVKFVKCLNCGKNRGVRLDILEKDIINELADWVDAYNVSIKDLDSNENKNPNLESYYSIIKSLESEYQTLMKQKENLHNLLEQGIYDVDTYLDRSKILTDKIDLNRSNLSQAKKDLENEKESVFSIADIIPQIKKVLELYYQSNDMQERNELLKEVIDYIDYSREPKKRTSRFNIKIYPRLIKNK

SEQ ID NO: 14496 - protein, 521 aa, synthetic construct
MKKVITIEPAKQVTHKVELPRFTKRRVAGYARVSTDHEDQTTSYEAQMTYYTDYINSRSDWEFVKMYSDEGISGTNTKKRLGFQEMVEDAFDGKIDLILTKSVSRFARNTVDSLSTVRKLKEAGVEIYFEKENIWTFDSKGELLITIMSSLAQEESRSISENVTWGRRRQLAEGQVTFSYSQVLGFKKSDTGGFEIDHEEAKIVRYIFHQVLLGNNPNKIARELTAQGIPTPQGKRQWSYGTVKRMLRNEKYKGDALLQKSFTTDFLTKSTKLNEGELPQYYVENNHEAIIKREVFDLVQVELDKLERKRQTSNIFTGRLFCGDCGSAFGSKVWHSTSKYKRTIYQCNAKYKGEHKCQTPHVTEEEIKGWFLSAINQLLSNRDEIIANTELLIDMAKDTSSLEARLDDLEHHLETIRQDIEDLVDRNARKAQNQDLYQEQYNTLVTAYQEKQKELQETRSVLEEQKSKQLSLDGFIQNFKEQDDLITDFNQELWQTSVERLDIKEDKKIFLTFKNGLRIDL

SEQ ID NO: 14497 - protein, 510 aa, synthetic construct
MSRCEPAIVYARKSHTRQARQGRREISIADQLRELRDEAEAYGVEIAAEFTDNASAWTPTTREGWDAALAALDAPDAPRVLYLHAIDRMSRQGGYTPFAEELKRRIARGQLRVIGLLDDYDSARYRDPETAANELDKLLIEARRYSDKLAKRIRAAKTRTRLAGGFVGKAPYGMKLDDTETRRLMRGDNWDVVERVFTATVEGLGARRVAAALNAEGIPAPRGGQWTSRTIATIINNPAYMGHQTRREGPRTVSVLDDAGSPVLCVAPGEQLIPAELWHAANRAARSRAFISTGKAALLTGRLVCDGCGGPMSSGGTGYRCSRHSKGRPCPAPATAQMNALDEYVLWRASNAVAALDPDDPEDRDHLATLASVWAATMRPPEDTAAITNAEMAVRDAEKVLKRVQRNARWGVYDDDEPGLERDLKAARETLAAARARLDELTGSTTLVLPEWAGWWSGPEVLAAWRDQTPEMLKKILATVVAEVRVIKAGRGANRLDTRRVYVRFVWEPA

SEQ ID NO: 14498 - protein, 521 aa, synthetic construct
MAVNKNVMIIPAIKRVGNNRKEDETPKLRVAAYCRVSTDSDEQASSYEVQIEHYTEFIKKNSEWAFAGIFADDGISGTNTKNRNEFNRMIDECMAGKIDMVITKSISRFARNTLDCLQYIRKLKDKNVAVYFEKENINTLDAKGEIMLTIMASLAQQESQSLSQNVKLGYQYRYQQGEVMVNCSRFLGYTKDENKRLVIVPEEAEIVKRIYREYLEGSSMDKIKKGLEADGILTGAGKKRWHSSTIRKILSNEKYIGDALLQKTYTVDFLTKKRVVNNGIVPQYYVENNHEAIIPREIFMQVQEELVRRSRGHISTSGKKRNFSSNHVFSQIIFCGECGEIYRRVHWNNRGKKSIVWRCVSRLENTGLTCHSRTVLEDMIGLATVDAINKLIGQKDGFLLTLKENIETVISETDNNIVSEIDKKLEELQKDLLRLANSKEDYNDIADEIYRLREERHKALAEEAGKKGSKQRLEEMEKLLNEQSTLLEEYDEQLVRRLIEKITVYDDKLTIEFKSGVEVDV

SEQ ID NO: 14499 - protein, 530 aa, synthetic construct
MIAAIYSRKSKFTGKGESIENQIQLCMDYAKNLGINEFLVYEDEGFSGKSMDRPKFKEMLKDAKDKKFDYLICYRLDRISRNVSDFSTLIEDLNKLNISFISIKEQFDTSTPMGRAMMYISSVFAQLERETIAERVRDNMYELARTGRWLGGMPPYGFISTQINYYDENMNQRKMYKLKIDEDTIEIVKLIFDKYLELRSLSKLYKYMYENGIKGTRGGNLDPSALSLILKNPAYVKADKSVVDYLRKSNIDVMGDIDNIHGILTYAKNTDSPIAAVAKHKGVIDPDKWIEAQRLLNANKAKAPRAGTGNKALLSGLLKCSKCGSNMRITYKNSKSGTIYYYICGTKKSLGVSACDCRNIRSDKAESKVIDELKNKSIKSIMSSYKDSKLENSKNSKNIKTEINSINNQIKEKETYIDNLVMQLAKVTESSASTFIINKLESLNNDLSNLKSQLESLNTLSMENKQVDININMLIDNLNKFNKEIDTSDINKKRLLLSTVVDYMTWDSDTDTIKVNLIGINPSNTIASSK

SEQ ID NO: 14500 - protein, 428 aa, synthetic construct
MSTDQEEQLSSYENQVNYYREFISKHEDYELVDIYADEGISATNTKKRDAFNRLIQDCKAGKVDRILVKSISRFARNTLDCIKYVRELKELGVGVTFEKENIDSLDSKGEVLLTILSSLAQDESRSISENATWGIRKKFERGEVRVNTTKFMGYDKDENGRLIINPQQAETVKYIYEKFLEGYSPESIAKYLNDNEIPGWTGKANWYPSAIQKMLQNEKYKGDALLQKTFTVDFLTKKRIANDGQVNQYYVENSHEAIIDEVTWEAVQLEMARRKTYREEHRLKSYIMQSEDNPFTTKVFCGSCGSAFGRKNWATSRGKRKVWQCNNRYRIKGVEGCFSRHLDEVTLEQIFLKALVLLSENIDLLDGKWEKILTENRLLDKHYSMALNELLRQVDFNPSDMCRVLDHIRIGLDGEITVRFLEGTEVTL

SEQ ID NO: 14501 - protein, 413 aa, synthetic construct
MSVKKIRVNKQKHKQRICAYIRVSTTNGSQLESLENQKQYFENLYSNRDDIDFVGVYHDRGISGSKDNRPNFQAMIEDCRKGMIDIIHTKSIARFARNTVTVLEISRELKAIGVDIFFEEQNIHTLSSEGEVMLSVLASIAEDELRSMSGNQRWAFQKKFQRGELVINTKRFLGYDLDENGELIINPEEALIVRQIFALYLEGYGTHRIAKLLNEKGVATVTGAKWHDSTIRQMLSNEKYNGSVLLQKYFHDGVNGPKKLNQGELEKYFIEDNHEAIISMEDWQTVQDKLSSRRWQKGRNKTYKFTGLLKCQHCGSTLKRQVSYKKKIVWCCSKYIKEGKVTCQGMRVPEVDISNWEITSPVTVIERDRNGEKYYSYTGQESADQCSSSGQEENQSSRILPSVHRPRRAAIKL

SEQ ID NO: 14502 - protein, 507 aa, synthetic construct
MKRVISYIRFSSERQAKGDSLRRQSKMVNDWLKAHPEYYLDQDLSFRDLGVSGFTGKHLKGGLGDFLTAIEKGLVKAGDTLLIESLDRLSRQDIDIASELLRRILRAGVDIVTLSDGEHYTRESLKDPLALIKSILIMQRAHEESLRKAERIQAAWDAKKEAAKAGIKISKRCPAWLKLNDDRKTFSVIPEKVETVKRCFQLRLEGKSIWEIVRTLNDEGHQSMSQYKAGKFGQTSVQDLLKNRSVIGYFTPKGCEEIAGYYPAIIDETTFYKVQQLSHSRYGKRSVSDKPLSVNLFKGVIRCSECGHALIITGFSDTRNGIYRCPLRNENRCSAKGLSRKQTDGTLLALLSRIDRFDSDMTNTIDTLKLHREHISSNIEKLVQLSLEIEDLSAITSKLKQLKGELSQVNADIEKETQRLKSIDVGCLSDCDLTTKAGRIEAQLIIKSAVKEVVLNTAKRRCKVTFHNGKVIDLPITENPSEDVTEAIQSLSEVTERGLIDVDEVII

SEQ ID NO: 14503 - protein, 507 aa, synthetic construct
MFFKETETQEIIKYEDYPYAVYARVSSEKDEQVTSIANQIDICHHWIEKNNYEWKDEAIQLDDGISGTVLLDRKAMQLILDKAQKRKLKMVVFKSISRLARDLKDALEIREVLLAHGVRVVTLEEGYDSLYEGKNSMKFEMFSMFAAQYPQTISVAASGALAAKARRGEHSGRVPFGFKKEGKFLAINEEEAKVVRFIFDLHNNHGYGHKRIVLKLNEELALGNIVKPQKTEFWQLSTVQTILKNPIYCGVFIANRHTQVKIGGRKKFIRNPKEKWTVYKDWCPKIISEEEYEKANNKEHKMRKKRFNPRNELRGMMKCGVCGCNMVVLPSYKYNQKREKKEFNYLKCSAYRRGGTALCVNHAPMQYKDLRAFVIKTLKQKGKKLKLDVKSDFEEQKKNRIKRTKIEIENAENKKKRLIELYLEDQLITKTEFQAKRKELEEQIEKLNDKLFMLEREEEETIDISNIKNAFAQLERTDQDLFEAFSALIDKLVIYEDGTVDFHYKFK

SEQ ID NO: 14504 - protein, 566 aa, synthetic construct
MTSHQSIPRRAVLYARYSTDMQNPMSTEDQLRTARRYARERNWTVIKEISDSAVSGSVGQARPGFAELSAGLDPQARSFDIVLAESVDRISRDQEHIARFYKDARYAGVEIHTVGRGRVDALTLGLSSLMSAMFLEELSDKVRRGVEGKVLSGQSGGGRIYGYRPGTDERGAPVKGALAIDEIEAAVVRGIFRDYAAGLSPIAIAARLNAEGIPSPSVGTKRRSSGHWKQNTINGNRARGTGILNNEIYIGTRVWNKLTYSKNPATDRRVSKLNPESKWHSVDVPDLRIVEQDLWNEVKARQTGLTKWRAKLETTDRKALSSGQSLRRRKYLLSGLLTCARCGSSMTIAGVGKYKTYYCASAKEKGASVCEGFRGLRESRALPLVLSGLRGELMKPDAYQTFRDRFHHRLRASQGSAEDTLKLHDARIRELETSHRNLLRAIELGNDPSVLVARLNAIDAELKEMRVRRDRIVPPTVELPDNLPELYREMVADLATTLSQELIAGRAADELHELVDRIVVDWDEGAHAHRLTIEGNLLDMLRKSGPSGLDALSGEVFAEVGCGSRI

SEQ ID NO: 14505 - protein, 547 aa, synthetic construct
MKLLVTYIRWSTKEQDSGDSLRRQTNLIDAFYSKHKNDYYLLPAHRYVDKGKSGFHQQHKAQGSDFRRMFENVMSGVIPEGSLIVVENFDRFSRADIDTAIDDVRQILRKGVSILTLGDGELYDKSALTDPVKLIKHIIIAERAHQESLVKQKRIAQVWNHKTQLARELKKPMGKQAPGWLELSEDGSHYIVDEDKASLVNIIYDKRLSGMSMFAICKWLNEQGYPTINQRKVRISKTKKPDGNWSALSVKHILTSRSVLGYLPAKISTEDRKTVLREEIEGFYPQIVTDSKFYAVQQLLEETGKGKTSSGDHWLYVNILKGLIRCKCGLVMTPTGIRKPVYQGTYRCNGNKESRCSYGTVSRKLLDTQLCSRLFSKLSQLHDEATDTAKLDELQRRLNTVDSELEKLTETLIQLPNITQIQEALRVKQEEKDELIVQLSREKARVKSVSSLDLSGLDMESVEGRTEAQIIIKRLVKEIVVSGNEKLVDIYLHNGNMIRGFPLDGKDDHTLTLEEATDEMQSLDDMLIFGEPVTRIYPAGDMEEVDA

SEQ ID NO: 14506 - protein, 507 aa, synthetic construct
MKRAISYIRFSSEKQSRGDSLRRQSKMVTDWLKAHPEYYLDQDLSFRDLGVSGFTGKHLKGGLGDFLTAIEKGLVKAGDTLLIESLDRLSRQNVDRASELLRNILRSGVDVVTLSDGEHYTRESLKDPLALIKSILIMQRSHEESLRKSERIQAAWNRKKELISEGIKISKRCPAWLKLNDDRKSFSVIPEKVETVKRCFQLRLEGKSIWEIVRTLNDEGHQTLNQYKAGSFGQTSVQDLLKNRSVIGYFTPKGCEEIADYYPAIIDETTFYKVQQLSYARYGRKPASDKPMAVNLFKGVIRCSECGHALIITGFSDTRSGIYRCPLRNENRCSAKGLSRKQTDGTLLTLLSRLDRFDSDTTNTIDMLRLHREHISSNIEKLVQLSLEIEDLSAITSKLKQLKGELSQVDADIEKETQRLKSIDVGCLSDCDLTTKAGRIEAQLIIKSAVKEVVLNTAKRRCKVTFHNSKSITLSITENPSEDVTEAIQSLSEVTERGLIDVDVVEI

SEQ ID NO: 14507 - protein, 507 aa, synthetic construct
MKRVISYIRFSSEKQAKGDSLRRQSKMVTDWLKAHPEYYLDQDLSFRDLGVSGFTGKHLKGGLGDFLTAIEKGLVKAGDTLLIESLDRLSRQAVDRASELLRNILRSGVDVVTLSDGEHYTKESLRDPLSLIKSILIMQRSHEESLRKSERIQAAWDAKKEAAKAGIKVSKRCPAWLKLNDDRKSFSVIPDKVETVKRCFQLRLEGKSIWEIVRTLNAEGHRSMNQYKPGKFGQTSVQDLLKNRSVIGYFTPKGCEEIAGYYPSVIDETTFYKVQQLSHSRHGRKPVSDKPLSVNLFKGVIRCSECGHALIITGFSDTRNGIYRCPLRNENRCSAKGLSRKQTDGTLLTLLSRLDRFDSDTTNTIDMLKLHREHISSNIEKLVQLSLEIEDLNAITNKLKQLKNELSQVDADIEKETQRLKSIDTGSLSDCDLSTKAGRIESQLIIKSAVKEVVLNTAKRRCKVTFHNGKSIILSITENPSEDVTEAIQSLSEVTERGLIDVDEVII

SEQ ID NO: 14508 - protein, 558 aa, synthetic construct
MIKKRAYIYTRVSTGMQVEGYSLAAQEERIKQYANAFNIEIVQTYQDAGRSGKSILGREQFLEMLNNIESERDNIDCVIVFKLSRFGRNSADTLKSLEIMENHNVHLICVDDGLDSSKDAGKLVITILSAVAEMERENILAQTMAGRKQKAREGKWNGGFAPMGYSISQGVLQINEEEAELIKMIFDLYANTDMGSNKVAQHLVHLGVTKPIRQNGKTPYFSANVIRNILKNPVYNGKIAFGRRKSKFDSKTNKIRIVPSDSYMVVEGQHEALVDDALWEKTQAKLKAQSKKYEKVNRPKGEHVYLLSGIVKCPYCEASLYGNISKKKNRNKDGEYYKHYFYYSCKHRKMMDGHKCTFTKQIKMEALDREVLTIISKIVSEPSFAKKLQEKINIQIDTEEIDKILEQYETQLRKYLSTKLSLMRQIDNLDYEDRHYNQKFQDLNERLDSIYDMIEEVESLIEANKERKEVIQREKMTAENVYSILLKFETLLAVMEDIDKKRFCQLLIEKVVIRDEKNDSGRWVKSIIFKLPIIEKDLEISLDNNEHVEVVSLLEKRN

SEQ ID NO: 14509 - protein, 540 aa, synthetic construct
MTSHTNRLNRPQPKPKPADREPTRSVRCAVYTRKSTEEGLEQEFNSLDAQREAGEAFVRSQAGEGWVVLGTRYDDGGFTGANTDRPGLHALLADIADGKVDCVVVYKVDRLSRSLLDFAQLMRTFEDKKVAFVSVTQQFSTATSMGRLVLNVLLSFAQFEREIISERTRDKIAATRRKGKWAGGHPVLGYDIDPAGYKLTVNAPEAERVRQIFALYLEHGALLPVVEELERRRWATKRWATRKGPERGGKPFDRTNVYNLLTNPLYTGQVRYKDEVHEGEHPAIVEPAVFAAVQHALTRNGRTGGALVRNRFGALLKGLLRCGPCGAAMTPSHSTKGTTRYRYYVCTHAQKRGYGTCPSKSIPAEPIESFVVERVRAVGRDPELLRQVLEQAQEKGAARIAELEAENRDLEKDLRAWHREVTQLAGQLHPGDVNGPLVTRLADLHARIGAAEHRAAKVRECLTAVTDQLISEEDAARALAAFDPVWAILTPLERARVIALLVARVEYDGRTGAVTVSFHPTGLTALADELARHHEHRSIA

SEQ ID NO: 14510 - protein, 559 aa, synthetic construct
MSKEKIKVYLYTRVSTSIQIDGYSLEAQKSRMKAFALYNDYEIVGEYEDAGKSGKSIEGRIQFTRMMEDIKSGKDGVSFVLVFKLSRFARNAADVLSTLQTMQDFGVNLICVEDGIDSSKDAGKLMISVLSAVAEIERENIRVQTMEGRIQKAREGKWNGGFAPYGYQLVDGKLFINEEEAVAIRTIFDQYVNTNIGANGLSKYLENHGIRKIPRQNGKNPLFDAGLIRKILKNPVYNGKIAFGRRTLEKVHGTRNEYKQVEQDEYLIAEGIHEAIISDELWQAAQVKLKSQAKKYEHVNKGKDVRIHLLSGIVKCPICGVGMFGNKCIKKKKDGTKYKDFYYYGCKHRQMIRGHKCTFSKQIREELLDDAVAEIIIKIVSNPKFASIMQEKINMKVDTSEIEKEIDNYQKELRKSHSTKFKLIEEIDNLDVDDKHYKRRKQDLDDRLYRMYDKIEELESLLIDAKAKKQTIEAEKLTGDNIYKVLIYFDKLYNVMNDVERRQLITSLISEIQIYEEKQPNGQWLKSITFKLPIIDEDLNIGLDNDEQVEVVSLLEKRN

SEQ ID NO: 14511 - protein, 556 aa, synthetic construct
MSNMKRTGQTALYERLSRDDEMQGESNSIINQKQLLESYAKRNGFVNIYHYTDDGVSGTTFDREGFQKMIKAVEENKVSTVIVKDMSRFGRDYLKVGFYTEILFKEKGVRFIAINNGIDSEKQSESDFTPFLNIMNEWYARDTSRKIQSIFRARMEEGKRVSPSVPYGYYRNPKNKQQLLVDKESAKVVKRIYRLVIEGYGVTQIADILTKDKVLIPSAYAEIYYPENNHSSKKRGIEDPYFWTPTTVSYILEKQEYMGHTVLGKTICLDYKTKKRRKAKEDELIIFKNTHEAIIDEETWNNAQRLRKTVRRSPKYGTTSHPFTGLLICADCGGKLSYREPAEHKEKKYDCDYCFVCQHYRHRKGTCSMHYIKVKTVNEILLKSIKEITDFAKEEKQEFLKVMNKLSDEKREEKYQEDKEKLEKLLSRNGELTTLITKLYEDHALGKIPVKHFDRLFNIYDTEQQDLEKQIQYFEQEIESYHQRKVDTDKFLKMIEKYTDIEELTVPMINEYIEKVVVHEATGGRQGKDRKQQVDVYFNFIGNCQVPQKVDIEKMA

SEQ ID NO: 14512 - protein, 506 aa, synthetic construct
MRTVITYLRFSSATQGAEGADSTRRQNELFKQWLRKNSDAQVVASFSDEGLSGYKGKHLTGQFGDMLARIESGEFSEGTVLLVEAIDRIGRLEHLETEALMNRIIAHGIEIHTLQDGLIYTRDALSDDLGISIIQRVKSYVAHQESKQKSFRVSQKWKQRAKLALAGEQRLTRNVPGWIDPETFKLNEHAETVRLIFKLLLDGESLHNIARHLQSNDIKSFSRRKDANGFSVHSVRTVLRSESVIGTLPASQRNDRPAIPNYYEAAIDAATFNKAQEILDKNRKGRTPASDNPLTINIFKGLFRCQCGASVHPTGTKNKYAGVYRCNNHLDGRCDVPPLKRKPFDRWMIDNFLGMIDVGNDGEAEGGIASLQHEVEIVTARIKKATALLLEMDDIDELKIQLKELNQKRTELQTTIDNMRRKASLTDKELPQLKDIDLTTKAGRVECQLILSKHLKGLTLGKDSVTVTLQNDTEITIPTNPLPLNDGSPIFEIADKELLDIDAYQL

SEQ ID NO: 14513 - protein, 547 aa, synthetic construct
MLAYSYKRFSSKHQAQGNSIERQTKLAEDYCAKHQLELSTLSFEDLGVSAWTQANTKEDAGLGQFLSALENEVIKTPCYLLVESLDRLSRAKIKVAMNQLWRITDYDVTVVTLLDQKKYTKDMDFTDFLMAGLIMERSHEESLTKSMRLKAAWAKKRSRQDMHSKAPFWLDRVKGDPDRPDGYYLNKHQATVERIFEMASDGLGHYTITGILNKEQIPSPTGRDWNGSSVSNLLRYRQVIGEYQPCTVENKIATPIGEPIKDYYPSAISEELFNKVQLGINQRLKKYKTHRGGSTTTHRNVLRDVGKCSCGKYLSLVKKRSRYYLQCIGNRSSVCSIRAIQMDAFEKFLRQYFISPMFHNQWVSADQANLDIEREINRLRLEQEESNKALQGLLSVIESNPNPLILQKVSELSASVKERSDTIAEFEDSKGSGNKRQSLEETVKLLDLAFSPEDNSEIIKARVKLKQLLNACFDYFEMTRVDSDNGKVLWYSIELGFKGDSFKYKSIDAPTALQNAKRREIWFVPSSKEKIVLTEEQKAQVIEQHKI

SEQ ID NO: 14514 - protein, 491 aa, synthetic construct
MALAAIYLRLSRNEQELDIDEILNSHRNALIKLAKQHKLTYDLYQEISSGVNTERPQLNLLLSKLDQYDHLLVMDIDRISRENAYAEQIKQMLILNDVKILTPSGAIDLSQESNEMLFSFQAMMANFEYKQIRKRLGRGRLAAAEQGRWTMSNKAPLGYEKDKNQRLIIVEEEAKIIRHIFQKTLERVSANEIARQLDTLGWRSRSGKVLTTSHISSARKNVVYRGVVQACRRVNNRIVDEVFVEDAHEAIIPKQQWLEVQKILEENKDKKFFDKKKANRRLQNLIYCNCCGRKRYIQYDGKQDFIKSCSYKISNNTCKDRGHKYLPVEDYVLQKVKRRKEEFETALQKLKSLDTTDVENQFSIQRESLVKQLEKFERRERNLKEMRMDGEISKTEFVEMKEENGEQIKQILQQIELIEIQRENLSNTDEEQERLEYNIQTLDKLDELEPEDCNTFLKTFIKKIHFSSNAIANHNTRNGEEQEVTIEIAWL

SEQ ID NO: 14515 - protein, 493 aa, synthetic construct
MRCAIYIRVSTDKEEQKASLKYQKELFYKFIEEKGWDIYEFYVDVQSGTTAKRKNLQRMIEDAQVKKFDIILAKELSRLARNGELSYKIKNLCENQGIHIITLDNAINTLTGNTNMFGLYAWMYEQESQNTSNRVKETLKTRAKKGLFKGSNPPYGYEVVEGKLYIRKDEAPEIVRRIYKEYLEGSGRESIARRLYNEGVKTPADVAGKKNASDKWNDSTIKLILTNPHYVGDLVQGRTTTVSVTSRKRKKQQKDEMYIFENTHEPIISRDMFEAVQNLMKQRKKFITAPKLHLFTNILFCADCGKGMWYRSNRPNGYICGNYARHGKKACSSHTIKEDFLKETILYDIQKLVQEIDKEQYLKELEAKSKKSKKDIQQKLDKFNKQIEVLKTRKKKFINMLADEKINHDEYLEMVEDNNNELTQLAEKKNEMISMLESEQIIDNIDKLKQELLQFLNFDELTPEILHRLINRIDVKEDGTPVIYYRFAAPTFE

SEQ ID NO: 14516 - protein, 452 aa, synthetic construct
MGWQVSEVYTDAGFSGSNIDRPAIQNMIYDAKSHKFDTVLVYKLDRLSRSTRDNLYLIQDVFKNNNVEFISLNENIDTSSAMGGFFLSILAAFAELERETIKERMQLGKLGRIKSGKSSAVNNAALGYKYDKITDSRVIVPSEAKLVQEVFERYSSGDSISRIVRDFLARGITGKNGGHITPTRIRNILSNEVYIGKQRYQDKIYDATHEPIITEEMFYSVQKELEIKQNDAYKKGNSRPFQAKYMLSGLLKCGYCGSRFDTYVGKPNKAGEKTVRYVCRNRKTAHAKFSQKDVYQGLDHSSCPYDGFYYKQDLEDIVINEILELQYDKDKIKNLITEKKVKAVDEKQVKSDIQAIQKKISRLNDLYLVDAIDLDELKVKVKDLKQKEKNLEQLLVSNSNKQEELKMKEAKEKILLTSDISSSDYDVQKSIVRTLISSINVKENELDIVWNL

SEQ ID NO: 14517 - protein, 591 aa, synthetic construct
MSPILSPSVLPHQLDVVRVFLYARQSSARADGSEVSTESQLAAGHAVCAARSALGVPWVVVGEFADVGRSGWDPNVIRTDFEKMMTGVRAGEADVVIVNELSRLTRQGAQDALEIDSEFKKHAVRFMSILEPFLDTSTPIGVAIFALIAALAKQDSDIKAERLRGAKDTIAAVGGRHSSSPPYGMRAVREQVGDMVISVLEPDEDHPEHVETVLRMVELSFDGTSDNKIATTLDEEGIPAPGMSEKRATKKRMESIQARRVSGDADSPIRWRAQTVRWILNHPVIGGFASERVKRGAAYVNVIARDKATGKPLTPHRGIISGARWLELQEKRQAKAKPNRKSTTDTTPTLLSGWRFLGCGVCGGAMGQSAGEQGRTNLWVESYNCSNPKGHGGLSIRRDVLDDHVTRRVWARLQAADMDNENDREWLAAAALRYAAQNDLAGVAEEQRETKAHLDHVTRSIAELQADRKAGLYRGRDELATWRATMEQYRTYEDQCRARLAELAAAMAGRIEIPSEWFAELDPLDDGSPWANWGVIQRREFLSFFVDHVTVGRGKDPVTKKFIPTDERVEIHWTPALQEDEEENEEELAMV

SEQ ID NO: 14518 - protein, 604 aa, synthetic construct
MTIAPKAYSYIRFSTPEQQTGDSFRRQYELSLAYAELHGLILDERLTYRDLGVSAFDKSNVRDGQLGAFLKAIESGAVPIGSYLLVESLDRISRAKITDALEIFMAIINRGVTLVTLADGMEYSKDKINKQFTDIIISIAIMSRAHEESLMKSKRIKEAWRSKRANLDTKKLTSLAPGWLEISEDRSRYIPVPHKVQLVQDIFDWTRNGMGTASVAKRLNQQNVPTFGARAKNMWHTSYIKKILSNRSVLGEFQPHVMLDGKRVPEGEPILDYFPRIISDEIFLLATSSQQSRRVGGAGRKGVGLSNLFSGLLRCGYCQGSMVYVNKGHVGPRGKLLVCSNAKGGKDCHYVPWEYTFFEKSMLTYCTGLDVEHFLQLDDAAASEITSLAERIALLKASVESIQSKESNILSAIESGAKFQQFEVRARQLEQERTHIEFELQSAQKKYERSASMKVDIAALRATIDDLVSRMNELTGDELYNLRAELSQQVKRLIGRIMIYPGGYVEKPVYIAALREHLLSKSYSPDDINEHISAKYNLVPNPGKRFFIAASRTGSIRMIQPSAENPEILHLETPDADVAANMRIHAESIGLLKQVLDNRMKAVQ

SEQ ID NO: 14519 - protein, 596 aa, synthetic construct
MMSKIIPYGYLRVSSLEQVKSGGGLDSQDEAVRRYINERSDLFDIEQMVMMSDMASAYSGKQLSEGQLGGVLADVEAGKVPSGSALIAYSIDRLSRQNPWIGTKLISTLIGAGIQIHSVAENQILKSSDPVGAIMSTIYLMRANNESEIKSDRAKTGYQKRLKESIQNKKVLTRQMPRWLFDNDGKYAVEPKMKRVIEFVFDSYIAGQSSGYIANELNNKGWLYGNTYWRGSYVAKLIRDERLIGKHLRYSKQIKGVKREVIETIPDFYPNAVDVEKYHLANNMLTNVAENIRGRTRITYGDTSILRNIFSNVIKCGLCGGDTSVVQNTRKKVVGDKFVYIPYKMFLRCRNKYELKTCTHGDIRYEIIERAILVHLMGLDIANLLATPIDNSIELYKTELERCIADESQYREIIELRRKAGKRVRPETVEVLEDVLDRIDELNRLIESHVVENFVPDFNVDLGNIADVSNVEERSLIKKGIATIAKRIFYKRVGGYILVEVMYRNLSIKHILVIDNKSSNTVVNFSIKYEEEKHIYTCNSFNMNYLIKSGDFEIHEETTMEDYAQMMNFIDIVSEDEAKKAKEFLVKNFNQNFISK

SEQ ID NO: 14520 - protein, 509 aa, synthetic construct
MKKAIAYLRFSSPIQQYGDSLKRQNSLVEEWLEANPDYLLDDLTYKDLGISAYHGTHATRGAFSDFMDAVEGGYIEYGTALLVESLDRLSREKIGEATERLKSILKAGIDVVTLSDHTHYTKDSLDDPYSLIKAILIAQRANEESEIKSRRMKSAWKKKREEAAASGKIITRSCPRWLKVNQRGDSFELIPEHARTIKEIFRLRLKGQSLNGIVKMLNDKKVITLTGEIGVWNPSTIEKLLVNKALIGINVPSYRTIANGIQEIPGYFPRVISDTTFYAVREFRKPPFGKDKHTDNPYLINLFRSVMKCKVCGHSIILNSIDGKGMGYYVCPMRRLHRCNTPSIRRDIADVNLITTVVIHADKFQTNSTSRGSTRSLQDRNIEVLKSIDKLIEALQIAPEVTALAEKIKALHKEFKSNEVTMRVAKNKQRLAVSEDVTNLDLTLKEDREKCRRFIFKTFKEIVLDTENKTCDICFSNGFKLINFPLLKSTNSEQLISALAYTDDSTLIL

SEQ ID NO: 14521 - protein, 593 aa, synthetic construct
MSEVEVIRANSNLANQKRGKEIKQLRVAAYCRVSTGSEDQLNSYKSQVSYYSDLIQKNVEWVLADIYADEAITGTQVTKREDFQRMINDCMNGDIDMVITKSISRFARNTLDTLKYVRMLKERDIAVYFEDEKINTLTMDGELLLVVLSSVAQQEVENISANVKKGLKMKMQRGELVGFQGCLGYDYHPEDKSISINEKEAEIVRYIFQRYVEGAGGSIISRELENLGYKTKKDTPTWAETTVLGIIKNEKYKGDILMGKTFTLDPISKRRLENFGEEDQYYLRNHHEPIVSAEIFDKAQEIRMRRNRGRNTVANNGGKREKFSRKYAFSCMIECAYCDSTLTRRRWHSGTKYGKTIWQCVTSTKKGKRFCPDSKGIPEEAIEKAFLESYRIMCNNNKDVLEEFLQRMEEALSSNTIHKEIAKIEKEIQGLENKKNKLVDMRLEDIIDNETYEEKYNALMQEINEKVQTREKSLSNLEEEKDIKKRLLTFKKVLEQNEVIDTFDRYVFESVVDKIIVGGVDEDGNKDPAMITFVYKTGLSNSLDGEIFKPARRNAKKDNIKTSNELCSHTANEDNKLCSHSSDDTRRVGSIDV

SEQ ID NO: 14522 - protein, 491 aa, synthetic construct
MQDRITNSPNTFAAIYCRISSDKTGKSAGVERQQSDCRVMADRLGLSVQHVLVDNDISAYSGKPRPGYKQLLELMRTGAVGTVLAYHQDRLQRSPVELEEYVDVSEIHRVTTHTVLAGHIDLSTPSGRFNARIIGAAARYEVEHMIERQQTAKLQAAKDGKYLGGQRPFGFEPQRKAIRESEAAIIRDMYERFVVGRSWWSIAVSLNQRGIRTTHGKDWNSLKVRNVLIRPINAGIVLHKGVEYPAQSPAILSPDEWANLKLAIDISRRKSPHPGRARKHLLKGFLICGACGEKMFHKSKQQRDGSYKTTAACGKTDNQTGRQHGCGKVSRMVEPIIDLVVDSIMFRLNSPELATTLHKHKTSADTLKTLNDQQRALESSINEITDDYYVNKLLTREQFERAKTQADNDLALITKQIDAELVSEAVNTTDVSGDLRERWENETLEWQRSLLFLLIDRISVHPLPRVSGYKYPKYKSKWRFDPELIQIEWKA

SEQ ID NO: 14523 - protein, 472 aa, synthetic construct
MEDSSNKSVGIYVRVSTDEQAKEGFSISAQKEKLKAYCVSQGWASFKFYVDEGKSAKDTHRPSLELLLRHIEQGIIDTVLVYRLDRLTRSVRDLYTLLDYFDKYNAVFRSATEVYDTGSATGRLFITLVAAMAQWERENLGERVKMGQNEKARQGEFSAPAPFGFIKKGKSLVKNHEQGEILLKIIDKVKKGYSTRQIANYLDDSGLLPRRGYRWHPGTILTLLKNPVLYGSFRWGDEIIKDTHEGYISKDEFDRLQEILKERSIVKKRESYSTFIFQSKIVCVGCGNRLASERHQYFRKKDKRYVQNNNYRCQTCAQNRKPSVMGSEKKFQKALVKYMQNVTPKLEPVIPEEKKHDYEKIHQKILNLEKQRKKYQKAWSLDLMTDEEFEQLMHETKEALKSAQNKLAEAHSSDSQNPQVDFERAKEIVKMFNENWSVLTNEEKRNIVQELIKHINFTKEDGEIIITHIEFY

SEQ ID NO: 14524 - protein, 539 aa, synthetic construct
MNRTKKYIAALYCRLSKDDGSTNESMSIYSQKAMLKQYAEQNNIAVYDYYVDDGYSGTNFERPAFKKMITDIENGKINCVITKDLSRLGRNYLESGAYIEMYFPQKNVRYIAITDGIDTINSYEFDIMPFKNILNEMYAKDTSKKVKSALKSRMKEGTYIGSKAPFGFKKDPDDKHRLVIDERVKPIIELVYELCLEGKGTQLISQEMMKRKIPRPSSFLENADKLYGLTEENKYKWTHRMVLSILRDPVYCGNMERNKRPTLSFKNRKRLYVSKEDRIVVKDTHEGIVSEEVWTQVQQMLDKRKNTNKSGITYDNIFKGLVKCPTCGYALTPKADYRLNKKETIDFVHFSCSGYKKYGVKACTSHRINARDLYNVVLEDIQYHGQMALSSREDFVMKIAEKIDKDKVDERKDKTEKLNSSKIKLKDLDKAFEKLYEDRLSESISERNFNLMNEKLSRQQEKLIEEIDLLEEEIKEIADTEENCEQFVENISKFAKIKELNRYILNQVIDKIYVYDKEEVDGEIKQKVEIHYKFIGKLD

SEQ ID NO: 14525 - protein, 435 aa, synthetic construct
MAAYCRVSTDQDEQLSSYENQVRYYKEYIRQNPLYELVDIYADEGISGTNTKKRTEFNRLIADCRKGKVDRIIVKSISRFSRNTLDCLKYVRELKELGIGITFEKENIDSLDAKGEVLLTILSSLAQDESRSISENATWGIRKKFERGEIRVNTTKFVGYDKGENGNLVINEEQAKIVRRIFRDFLQGETPESIARSLKEEGVPGWNGKANWYPTTIQRMLQNEKYMGDALLQKTYTVDFLTKKRSENQGQVNQYYIEGNHEAIINKEEWDLVQLEVERRNQYRQDNHINFYIIQCEQNPFTCKVFCKECGGLFGRKNWTTSRGKRPVWQCNNRYKVKGIQGCTNRHIDEETLQQVFLRAIEVLRENMGKVEEKWANFSEEQKLEKYHATQLKILLDSEKEVFEGRKMCQVLEKISLGEDGSISIKFLEGTEVNL

SEQ ID NO: 14526 - protein, 518 aa, synthetic construct
MPKAISYIRFSTKIQSVGDSTKRQSKYINDWLKRNPDYYLDESLRFQDLGISGFSGANAKSGAFGEFLAAVESGYIEAGSVLLVESLDRVSRQDIDTAGEQLRKILRAGVEVVTLVDNEWYTKESLKDSLSMIKAMLVMERAHEESAMKSTRLRSMWAGKRERAANGEIMSKRCAAWLKVSEDRSHFEFIPENVKAVQRVFQLRLEGLSHVKIAKQMNDEGFSTLNQFKPVKGGWSQSSVTELLSNRSVIGFKVSSKSMAVKGVSEIPNYYPSIITDEQFYAVQQLKQGSGRKPSSDLPLLTNLFKGVLRCSECGFIVVVAGVSAKRSGIYKCSMKSEGRCNSVGFSRLQTDRALVQGLLYNTNRLSLNRDNGSAIGAIQSELEHLQKQRERLIKLAMLADDTESMAKDLKALNSQIKDAEKAVSEVHQREQSSQLETISHLDLTVKKDRIEAQIIIKRIVKEIRLNTAGKKCDVFLHNGLKLLNFPLDRVVDGEIFLEVLPVLEADEFDFDTYRMIE

SEQ ID NO: 14527 - protein, 522 aa, synthetic construct
MAVSKNVTVIPARKHTRKSKDEEKPKLRVAAYCRVSTDSDEQATSYETQIEHYTAYIQGHPDWVLAGIFADDGISGTNTKKREEFNRMIDECMAGNIDMIITKSISRFARNTLDCLKYIRQLKEKNIPVYFEKENINTMDSKGEVLLTIMASLAQQESQSLSQNVKLGLQYRYQQGEIQVNCARFLGYTKDENKRLVVVPEEAEIIKRIYREYLEGASMLKIARGLEADGILNGAGRERWHTSNINQILRNEKYIGDALLQKTYTVDFLTKKRVKNNGIVPQYYVENSHEAIIPREVFMQVQEELVRRRIVHTSPNGKTRTFSSNHCFAQIVICGNCGEVFRRVHWNNRGKKSIVWRCVSRLENTGLFCDARTVPESTIEQVLVTAINQALCDKDSFFSTLQDNIATIITREGDKVLADIDKRLEELQTELLKLATSNADYDKVGDEIHRLRDQKQKLLLESANRDELKKRITDMSVFLKKQSTALAEYDEQLIRRLIEKVTIYEDKFTVEFKSGLTVDVEG

SEQ ID NO: 14528 - protein, 520 aa, synthetic construct
MKKVTKIAQNKTNLTEQTKLRVAAYCRVSTDSDEQLESLDAQIKHYESYVNANPEWEFAGLYYDEGISGTKKEKRPELLRMIADCEDRKIDLIVTKSISRFARNTTDCLELVRKLLDLDVFIFFEKENINTGSMESELMLSILSGLAESESVSISENNKWSIKRRFQNGTYKISYPPYGYDNVDGEMVINKSQAKIVRFIFAEILSGKGTHKIANELNRRKVPTKKGGRWTSTTIRGMVSNEKYTGDVIFQKTYTDEYFNRHNNNGEKDQYLIRNHHEPIISHEDFETAQDIIDQRAKEKGLEKQNTKYQNRYSFSGKITCGQCGGTFKRRSHSSGRHRIAWCCSTHIANIKKCSMKYVPESAIEYAFVTMMNKLIFGHAVVLKPLLVSLRGMSSDETLENIRALDKKLEENTEQRNVLVGLMTKGYLEPAVYNKSNNELLQEAERLRRQKESITRFLNNDFQNLSEVSALLQYATKASMLTGFDGELFKRYVEKVLVYSREEIGFELKCGITLKERLVR

SEQ ID NO: 14529 - protein, 555 aa, synthetic construct
MANQEKYTILYGRLSQEDDLKGDSNSIQNQRLLLEKYAKENGFTNVKFLYDDGYSGTNFNRPSWNELLGLIEQDQVETLIVKDLSRLGREYLQVGYYTEIFFPQKGIRFIAVNDGVDSLYESSNDFTPMRNWFNELHAKDSSKKVRAVKRMQAERGEILGGRPPYGYRRDESVRKGIVPDEETAPIVQRIFSLCAGGKGPNQIARILTQEQVLNPTNYYYRRTGAEHKSLDTSSPYRWTSSSVTGILDNRTYLGHMPGLRTTTLSYKNKKAVYHDESEQILVKNTHEALITQEQWDLVQELRQRKKRTPKQMEEPNLFSGLVFCADCGKPLVLHRAYTMEAVKNNFMCYTYKKRGKEVCSSHYIREHDLIRIILDDLRRVTHFARQKEVLFAEYINRKNSFELRKEMNGLQRELDAAKRRDSELTSLFKRLYEDNLLGRVTNEQFRMLSADYNDEQKALREAMPIKETRLQKLVDSASNVDAFIQRAKQYTEIRELTPEILRLFIARIEVGEKSTKYSRTAEQAIRIVYRDVGIMDSVEQVAAEDAENTEQENIA

SEQ ID NO: 14530 - protein, 475 aa, synthetic construct
MNPSPPPGAARPRAVLYLRQSVAREESISLEVQETSGRTYCTQQGYDVVAVESDPGISGRTWNRPAVQRVMTMIETGAADVVILWKWSRLSRSRLDWAVAVDKVESAGGRIESATESVDVSTSTGRLARGMLAEFAAFESERIGDTWKQAHERRVKQGRPANGKPRFGYIYDPDTQDFHPDPKTGPILTELYQRYISGEPMTGLARWLNLQGTHSVMGNPWTPVTVRQMMDRGFATGTFVRHGERLEGVHEALISWETWEEYQARRKVRRATKWEGSKKLLSGLVRCYCGARMHSGSTSRYSCAGYLEQQTRPHPGRLSVQRDTVEDAVMEWLREVAAEIDAAAPKQPARPAAGPRPDVLQRKLMKLQNRLDTLTVRYLDGEVDRETYERIKTTTKAESAELEDQLRELRVHGRNPVGDLIPDLLRDWDGLSVGVRRDMLSRLIHPVIVGDGYGRSGTILVRGLWEDRPTPADLP

SEQ ID NO: 14531 - protein, 517 aa, synthetic construct
MYRPRNLDVFIYLRKSRKDIEEEKKAAESGASYDTLQRHRDNLLAVARKEGHNILGIFEEIVSGESIAERSEIQKLLRELETGIADAVLVMDIDRLGRGDMLDQGILDRAFRYSGTKIITPTEIYDPESETWELVFGVKSIVSREELKVITKRLQGGRRDSAAKGRSISKKPPYGYLRDEKLKLYPDPETSWVVVKIFEMMRDGHGRQAIAAELDRLGVKPPDEKRSFWSPSTISAIIKNEVYLGHIIWGKVKYIKQNGKYKRKKMPRERWYVKENAHEPLVSRELWEAANKAYRSRWRPSTVESKPLANPLAGLLKCEVCGYTMWYQPRKDRPHPLVRCPNPKCKGVQKGALLPLVEEKILQSLAEFVDQFEVQEEALARKEQRSVIPLKQKAVEKKEKELQELHKQKDALHDLLERGIYTIETFLERQHTIVNRIKKTKEEIDQLREEITKEQLKEKNINEYIPTVKKVLDAYRLTDDVEKKNRLLKSVLEKATYLRKPEWTKKDQFTIQLYPRI

SEQ ID NO: 14532 - protein, 515 aa, synthetic construct
MIAVGSTAALRVALYLRVSTTRQAQHDVSIPDQRQQGEAWCAAHGHQLVDTFVDAGVSATSDRRPEFQRLIEAASGRPAPFDIILVHSFSRFFRDHFELEFHIRKLARNGVKLISITQAVGDDPMHVMMRRVMTLFDEYQSRENGKHTLRAMKENARQGFWNGALPPIGYRIVEAERRGAKVKKTLAIDPMHADTVRLIYRLALSGDGTTGPMGVKAIVGYLNDRSIFTRDGGRWGVGPIHAILTRTTYVGQHRFNRRGKDRTRKADDEVITLAVPPLIDQATFNAVQTLLRDRNPKTLLPHLVSSPNMLTGLLHCAQCGGLMTMRTGKAGRYRYYACQKTARTDTARCTGIAIPIDALDTLVARHMMERLLDRKRIERILTMILERRQALIARDGAGRLDELNRCAEEAKLRLQRLRKGIEMGALDIDDPSLQERLTYLRALQARTAEETASLQAELDRAGIVTVSASMLSAVIETAGQRLLERGDGFRRGYASAFTGRIVAEPDKVRITCTKS

SEQ ID NO: 14533 - protein, 572 aa, synthetic construct
MAEQNQQPIKTADAKPAYLYARFSSLNQKEGSSIERQLTYGRTFIDKHGWDLVGELRDEGKSAFKGANREEGAALHGFELKARNGHFSSGAVLVCENVDRLSRQGAKAAAQLIWSLNEAGVDVATYHDGHIYKAGDDGDLMDLLSIIIKGALGKEESFKKSERSKANWTKVHQEIANGDKRAYSRQCPAWLDIEDDKYVLNEHRANIVRLMYGWYNDGLGCLIIMRKLNEMGEKPWSSEKRYKDRNDWTYRYIHKLLQSRAVIGEYVTLKGETLATDYYPAVVDVDTFYKAQSVRKVRASIGGDERKRSANLFLGISKCGVCGKAGVFMKRTFNDKYVKQDGTVVHYKNTRTYLKCNEARYKESPCNNPAHIRYDVIEKTVLNKALPLIASQKHEDKVLQAFDLKIAESQREIDVRQKQLDNIVEAIANGVAAKALAQKANAIEAEIETLAQQIANTKLEKDIEAAKPAKNQDVDLIAEMRSNLESEDADERFETRARINSLLSRLLRAVYINDDRTFTVEVDDGFSATYAADGTAIGYRVAGDRIVGAMDEGFLLEDKDMIIDEAFKRVRA

SEQ ID NO: 14534 - protein, 545 aa, synthetic construct
MRTIIYARFSSDLQNSRSIADQIALCRERAAREGWQIVDTFTDEAISGAAGIGEDQRPGLSALLARVERGGVDQILAESTSRIARHQGDGFAIRERLSYFGVRLFTLSQGEIDEIKGWVQGFLDSQARKDIAFNVKRGQRGTVRSGRSPAGLAYGYRKANRLDERGELIRGLRAIDPEQAEVVRRIFEEYASGRSARQIAAGLNAEAIPAPTGGTWRASTINGDRQRKNGMLQNRIYIGRIVHERTSKVADPRTRKERIRPNAESEWIEAEAPDLRIIDNATWERVQLLRNAFSMDKPHMARRPKRLLSGVGRCGICGGGWIVIGRDQWACGKHRDGGGCSNNRTIKTHIYEQKVLDGLRDDMLHPDAVAAYVKEFHESRRRRSQGVAQERTKLERRHREASAKVERLVNAIADGGDEFVEIRAVLAKARNDRDAIAQQMADLEAFPVITLHPGIAKDYREQIEELAKALDGNSHAQLEAIPKLRALIGSVTVFPAEGRRGVEVEATGRIANMLALAAGQPLDAAMYVNSGAGSGDRTRITSLEG

SEQ ID NO: 14535 - protein, 530 aa, synthetic construct
MEIAMRTVIYARFSNENQNPRSTADQIALCRQRAEQEGWTIVGTFEDAAISGAAGIGEDQRPGLNSMMRMVEAGGVDQVLAESTDRISRHVADAHNLRERIEFAGARLFTLFDGTVTPMIGLVKGFMDAQFRTDLAKRVRRGQIGTVKQGRASGGIPYGYVQANKLDDKGGVIRGLREIDPEKAEIVRRIFTEYASGKSPFAIVRDLNGEGVPGPRGKLWHSTALHGEKNHKRGILRNEIYIGILTYGRSRQVVNPQTRRRLMRYNSEEEVMRVPVPDMRIIDDELWHKVQEHLEANSTLQPSRARRPKHILSKLSFCGVCGADFVRTTSNHWGCSVKRYGGACTNNRLIRTDDFERRVLADLKAGMLAPDLVSAYVREYHRDFARAAADLGRDRAKIERKLEEAQRRKGRMLKAFADGGSEFDEIREMLANARKDVDQLTRELANMDAVPTVLTLHPHMEEVYRRQVEELDQALAAPEARLEAVPRLRAMIARVVVHPNLEKKRGVIVEVVRQMDEILAMATGAERLRR

SEQ ID NO: 14536 - protein, 508 aa, synthetic construct
MHQYNIVGYARVSSREQAENCHALEQQIDRLKSAGVEYVFVDVESGANPERLNYNKLIQLVEKGAIKMVIATRWDRLTRNELVYLQLKNLFQYSAVKLKLLDQGDVDLNSAFGELSADMQALFAVHERRMLKERVSRGFEYKRKKKSAWGRQPWGYKSENEKYVIDRSRIICLLSQRPYNYQELSDLPDNSSLLVQGLSKGEIAKEAIEYFLKVRKARDVLRYLYEKYGVSSKANNNNLLLTSQLLFWRSGQSFCEWIKNPVLRGHTAYNKYEPRNAQKRGNQKPPEEWEIHENTHPDERMLSDEEYCEVVTIIEQNSRTMGTMKTRSQLTGLIICGECGSKCINKNNQIYRYYGCRNSGIGCSNKKQIRVDLLEAKLFDFIIEKAHQFNGVDSVSQVIENPEDSSVVIKLKEQKQSLEKMLQDHYNLTIKKAINDLDLQIKKEISHSEIDDFSLATAAEVLVYPYITHLGFWYCLNTQERELIYHKLIKKIVVLDSQVTTIELKVSG

SEQ ID NO: 14537 - protein, 542 aa, synthetic construct
MTKKCFPYVRFSSTRQEDGSTRARQNELIDAFVTKHGLDVDRHLEDAGTSAHRGKNAGAEGVLGQFLRQVRMGEIDKGSYLLIENFDRLSRDKIVRSNKIFTDLLYAGIKIVILDKNKIYDAENLDFGDWISALVEFERANAESERKSDFSSKAWRFNREKMRAGEIVTKKVPTWLKVENNAFVIDHAKVERINTLFKLSLSKGLQEATREYNELYSEKLAIHQTQYLLSNRKLIGEHSPQKIHYDESGQLKRKDEGEAIPNYYPAVVDEKLFYQVQEVIKSRRPFAGRYSNQRYNVFRDLIYCKWCGGTIRYMNKGERDYFICTNSMTGKCDLNSHFGQLSIRGKKLFSMFFAFTDGLNVSALLEENTQAEELKTKIMKMKANRDQITSRLDDFKIDVKNMIMSGKTIPSTYNELIAELESNRTHIDQEIESESKKLDQIYMSEKSFSGLKSNDISEIIYDRSDESIEKRVRYNSELKKIIKHIRIDYLETGLEIEFFNGVQRFIDQDGNTGDQIIGFEPPEFEPEDEERFDLKAGYQSQE

SEQ ID NO: 14538 - protein, 450 aa, synthetic construct
MKRVALYMRVSTEQQAKHGDSLREQKETLYEYIEQHKDLKVVNEYVDGGISGQKINRDEFQKLLQDVKENKIDLILFTKLDRWFRNLRHYLNTQEILEKHNVSWNAVSQQYYDTTTAYGRTFIAQVMSFAELEAQIDSERIKAVMANKIAQGEVVSGKTPLGYSIENKKLVINDDAPIVIDIFNYFLSSGSLRKTVYYLGSQYGIVRDYQSVKNMLTNKKYIGELRNNKNYCPPIIDKKLFYAVQKALPKNLKTNAKRDYIFKGLLKCSDCQGSVAGQTIKARYKKKDGTESIYERTCYRCVKRRNNKLRCTNKRAFYEKNLERYIFEATKQKFEQIQINYSKKQPKIIKKQNSKKNIENKLDRLKKAYLNEVIDLEEYKKDREALMKELNEIEVEPAKIDIKNVEFILSKEFDEIYKESSEEEKNALWRSIIDNIIVFPDGNITVNFLI

SEQ ID NO: 14539 - protein, 579 aa, synthetic construct
MGRKILSDTIKISGADAELAVLYLRVSTKGQMDTAVDIDPDGNSIATQRELGLRKAGSLGAQVIRELVEPHSAKNVDDRKVFREALAYLHSHPEIKYLIVYMRSRAFRNRFDAAIVEVQLKKIGVRIVSVKEDFGEGPHAVAMEGMLDIMNDLQNTLQGLDVQTKMQHKAMNGGTIGLAKIGYLNVRAEFEGRQINTIALDPERAPLILKAWELYATGEYTIERLEATMADLGLTTRPTKRWPAGTPVSSSKLHLMLSDPYYAGFVVYKGELYPGRHEPIVSQKLFDTVQDVLNARSARGQRDRIHNHYLKGGLFCDRCHRQRRTSRLIFSQVRGRSGQRYTYFFCRARQEGLCDLPHLRTELVEHAIIDHYQTLQLPSTFVSDVRRLLEEVLADQQASTREHHAALTRQLKAIDEKENRLIDLAADGGMPQAKIRTKLNRLKQDRARVEAGLVNTGEELSIGANVLRDALHLMEDPRKLYATAANTVRRHLNQAFYQRFYLDDLEVADDEKTPVAAGLHEATQLHHDITPPNEKNPRSAEALSRSTEVGLPPVTGVRPVTGLSKATLVGLTGFEPATT

SEQ ID NO: 14540 - protein, 608 aa, synthetic construct
MTRNRFEAVGPSMTVADQPLKTAVSYPRVSTKEQAEKDGADPDGYSLPAQRDANRRKAASLGAVVVKEFVERGESAKTADRPKLQEMLAYIEEHPVDYVIVHKIDRLARNRADDVEIHMAIRAAGAELVSATENIDETPSGMLLHGILSSISEFYSRNLATEVLKGMTEKARTGGTPHRAPIGYRNVGIINEQGVEIRTVVVDPERGPLIAWAFQAYATGEWTLKRLAKELETKGLTTRPTPKRPSKTVEYNKLQEILRSPYYKGEVVYRGATHPGRHTPLVDSVTWQLVQALLTSRVNGEKQREHPHYLKSTVFCGGCGSRLIVTHAKNRHGTVYPYFVCLGRHQKVNDCQRRAVLIDRVEELVEEEYKAVQLIPELREQIETSLRGELSSSRLAADREARELDQQKKRLLDERGKLLQAHYAGAIPLDLMKQEQDRIAEQLARIEVRLEASVLNIEVVENNLRTALNYASNCYAGYLEASTSVRRLFNQAFFEKVYLEQDEVRVELAEPFNTLLGGELIGHVASHAEAAAPATEVDSADQRLAEDGVALMDVIRNGSAARAGTKKPAPVGAGLKGNGLVREGGLEPPRPRTLEPKSSASANSATRA

SEQ ID NO: 14541 - protein, 597 aa, synthetic construct
MARRTLPNRARVDEKAVLLLRVSTKKQLDTAIDIDPDGLSIATQRDHGNAKANAMGVEVATEFIEPGYSAKTIDKRPVFRDLLKYLAEHPEVRYVIVYMRSRAFRNRFDAAIIETQLNKMGVRLISAKEDFGEGPHAVAMEGMLDVMNHLMNTLQGLDIQEKMRTKALNGGTLGFAKVGYLNTRVEYEGKQINTITLDPERAPLVRRAFELYATGEYGLEHLEATMADLGLTARARGTIPQRPLSFKLLHRMLKDPYYAGWVLVDDQLRPGRHEPIVGQELFDRVQDVMDMRSRRGQRDRVLQHYLKGDLFCDRCRRHNRTSRLIYTEARGRNGHYYGYFLCRGRQERVCDLPHLPAERVEQAIVDHYATLRLPTSFHTALRELLDEALADEQTSVRAMHASLTTRLKELDAKEERLLDLAADGTLPQAKIKARLRTIHTDRAKVQVSLTATSAELAVGVDVLKRGLDLLIDPAQLYRARTDTVRRHLNQAFFQRFYLDVGGVTSDQLHQPFADLHQAAGTRPACVQPAARPHNPAGQKPKSGLTLTQVLTDPGSSKAAVVELPGIEPGSSAASPGLLRVQSAVPLLGSPGPANKPG

SEQ ID NO: 14542 - protein, 530 aa, synthetic construct
MIAAIYSRKSKFTGKGESIENQIQLCMDYAKNLGINEFLVYEDEGFSGKSMDRPKFKEMLKDAKDKKFDYLICYRLDRISRNVSDFSTLIEDLNKLNISFVSIKEQFDTSTPMGRAMMYISSVFAQLERETIAERVRDNMYELARTGRWLGGMPPYGFISTQINYYDENMNQRKMYKLKVDEDTIEIVKLIFDKYLELRSLSKLYKYMYDNGIKGTRGGNLDPSALSLILKNPAYVKADKSVVDYLRKSNIDVMGDTDNIHGILTYAKNTDSPIAAVAKHKGVIDSDKWIEAQRLLNANKAKAPRAGTGSKALLSGLLKCSKCGSNMRITYKNSKSGTIYYYICGTKKSLGVSACDCRNIRSDKAESKVIDELKNKSIKSIMSSYKDSKLENSKNSKNIKAEINSINNQIKEKETYIDNLVMQLAKVTESSASTFIINKLESLNNDLSNLKSQLESLNTMSMENKQVDININMLIDNLNKFNKEIDTSDINKKRLLLSTVVDYMTWDSDTDTIKVNLIGINPSNTIASGK

SEQ ID NO: 14543 - protein, 623 aa, synthetic construct
MTVDTRVDVTGLDLAVSYLRVSSKKQMDTARDIDPDGNSIATQRIHVDRKAGNLGARIAKEFLDPGISAKSIEKRREFQELIEYLKEHREVKYVIVYARSRAFRNYVDAALTKRLLDKLGVKLVSSREDFGDGIYAEMMEAVTDIFNDMQNKLSGEDVRIKLQNKAINGGTIGQARIGYLNTRTLFEGRMVKTVELDAKRAPLIREAFELYATGDYTTERLEAVMADRGLTTRASAQHPVEKPIPHKTWQRILRHPYYAGWLLYKGNLYPGRHEPIVSQELFDKVQDLLDLRSAKGNRERIHSYHLKGMLFCARCRQAGRTSRFVFTRVTSRTGKKYDYFICRARQDGLCDLPHLRTDLVEHAITDHYHTLQLPPDFIETIRTQLDTAIHDEQTSVRALHASLKDKLKRLDEQESNLIDLAADGSLPQGKIRSKLNHIQVQRAKAQAGLVNTTEQLEVGAAVLHDALELLRDPADAYANAPDSVRRTLNQAFYERFYLDHLEVVDDQKKPLFAELHAAKQAHQQHAPTLSGIMLATGRAEHASRGATGGPKPGMRDMEATVAKWGTHGPRNAESLPYREASPETTNANTDQLRLSDLFVPSVGGLSTGLMVGRVGLEPTTSGL

SEQ ID NO: 14544 - protein, 508 aa, synthetic construct
MKKAIAYMRFSSPGQMSGDSLNRQRRLIAEWLKVNSDYYLDTITYEDLGLSAFKGKHAQSGAFSEFLDAIEHGYILPGTTLLVESLDRLSREKVGEAIERLKSILNHGIDVITLCDNTVYNIDSLNEPYSLIKAILIAQRANEESEIKSSRVKLSWKKKRQDALESGTIMTASCPRWLSLDDKRTAFVPDPDRVKTIELIFKLRMERRSLNAIAKYLNDHAVKNFSGKESAWGPSVIEKLLANKALIGICVPSYRARGKGISEIAGYYPRVISDDLFYAVQEIRLAPFGISNSSKNPMLINLLRTVMKCEACGNTMIVHAVSGSLHGYYVCPMRRLHRCDRPSIKRDLVDYNIINELLFNCSKIQPVENKKDANETLELKIIELQMKINNLIVALSVAPEVTAIAEKIRLLDKELRRALVSLKTLKSKGVNSFSDFYAIDLTSKNGRELCRTLAYKIFEKIIINTDNKTCDIYFMNGIVFKHYPLMKVISAQQAISALKYMVDGEVYF

SEQ ID NO: 14545 - protein, 524 aa, synthetic construct
MTKKVTTIPATITKFSQTPINRVTKRRVAAYARVSTEQEEQQTSYEAQIDYYTNYISGREDWEFAGMYSDEGISATNTKKCVGFQTMVTDALDGKIDLIVTKSVSRFARNTVDSLTTVRQLKEKGVEIYFEKENIWTLDSKGELLITIMSSLAQEESRSISENVVWGQRKRFADGKVTVPFKRFLGYDMGEDRNLVVNPEQAKLVKRIYGMFLQGKAPHTIAKILTEEPETLTPAGKQKWNPSTIKSILTNEKYKGDALLQKSYTVDFLTKEKKANEGEIPQYYVKGNHEAIIQPEIFDMVQKQMALRTKGNNRRRSTSIFSSKLICGDCGNFYGSKVWHSNTKYRRTVWRCNHKYGNDEKCQTPHLTEDEIKEIFIKATNQLVDMKDEVISNYDEMKEMLFGTVDLESEQGKLEDELNEVASLIEDCINENARVALDQSEYEKRYNSFVERFDKANGRLEEVKVQITERQARGQQIEIFLKDLEEVGVLEEFEDDLFLALVENIEVGRYKVVVRFKDGTEVEG

SEQ ID NO: 14546 - protein, 487 aa, synthetic construct
MESYAVYVRVSTDRDEQVSSVENQIDICRNWLERNGFNWDEKRVFKDEGISGTLFVDRPSIQLLLQKAKAKEINMVVFKSISRLARDLKDSLEIREVFLAHNVRIISVEEGYDSTKAGKNDMAFELWSLFSAQYSRTLSSSITAALAVKVRRGEHIGKIPYGYNREEQKLVVNEEEAQVVQMMYKWYLEGWGYKKITNELNQLGIKSKTKKNWQMTSVQRILQSPIYKGTFILNQYTSVKVGGKKKQIRNPKEKWFVFPNHHPKVVEEEIWDQANRKKNKKNKTKITAWNEFRNLAKCAVCGSNMIIVQSHLKKKSGERTEWKYLKCSQYRRAGKHGCVNHVPIQYGDFRQFIINLLVEKGESVTLRLQSNIEKGQDKKIKKLQQLMSTNQQKKKSLLDLYLEELINKEEFEKKRNDLEAEITKASQELFILQQNDVVQTDIKTIKEAFQRLQQQEKDLFHVFQTLIGEIVVHQDGTVDITYTFESA

SEQ ID NO: 14547 - protein, 530 aa, synthetic construct
MNKYDQARLEDVVQPGKRIVFYARYSTEKQEYDMQKHSVETFLQRYGCQIYKEYVDRATSAIKVPFEKREDLQNLIRDAEKGKFDVVITYKNDRIARRIEEHQLFREKMRELNIHVVVSSSSELYTVGEVVSQAVKDGLTRIEAALIQDRTKDTFRSKTKRGTWLGGKAPYGYTYRVIEENDGGRKTRKEYFKDEEDQQEAVMEIFRLFEIGYGFQQIANEIHSKKLDENMKWTKEKIRYIITNPFYCGFISMNRYDNGVLNDQSQWIEGTPKDMKPLFTREYWEYVMRLFEERKKRKVHSRDYSTPFLLRSILYCYQCKELMLAKNQQSGGEKYKGKKKKEQRRIYECKNCDFKLQANMIHERFRQDYLPYVLEQVTQQKREQVESAIEERLKTEMQSLKGSMKKSDEEIAKLNKQIEALNVEMKSYYDKETIDKKVLEFMSIIMSHRTNKIHELHTVKDKKVGLQERIDRIAKTMQQKKYLPPQHLIREFAKENVDTQKLRAFLLQFFKCIHVARDGNLVLSINEYLM

SEQ ID NO: 14548 - protein, 506 aa, synthetic construct
MRHVITYLRYSSAIQGAEGADSTRRQNDLFKQWLKKNSDAQVVASFNDEGLSGYKGKHLSGQFGDMLSRIESGEFSEGTVLLVEAIDRIGRLEHLETEALMNRIIAHGIEIHTLQDGLIYTRDALSDDLGISIIQRVKSYIAHQESKQKSFRVSQKWEQRAKLALAGEQRLTRNVPGWIAPDTFKCNEHAETVRLIFKLLLDGESLHNIARHLQSNDIKSFSRRKDANGFSVHSVRTVLRSESVIGTLPASQRNDRPAIPNYYEAAIDAATFNKAQEILDKNRKGRTPASDNPLTINIFKGLFRCQCGASVHPTGTKNKYAGVYRCNNHLDGRCDVPPLKRKPFDKWMIDNFLGMIDVGNDGEAEGKIASLQHEVEIVTTRIKKATALLLEMDDITELKTQVKELNQKRTELQTTIDSMRRKTSLSDKGLPQLKDIDLMTKEGRVECQLILSKHLKGLTLGKDSVTVTLQNDTEITIPTNPLPLNDGSPIFEIADKELLDIDAYQL

SEQ ID NO: 14549 - protein, 542 aa, synthetic construct
MIAAIYSRKSKFTEKGESVENQIEMCKEYLKRNFKELKHIEIYEDEGFSGKDTNRPEFKKMIKDAKNKKINILICYRLDRISRNVADFSNTIEELQKHNIDFISIKEQFDTSTPMGRAMMNIAAVFAQLERETIAERIKDNMIELAKTGRWLGGTSPLGYKSEQMEYSNEDGKNKKMYKLKVVKDEINIVKLIYKLYLEKRGFSSVATYLCKNNYKGKNGGEFSRETVRQIITNPVYCISDDKIFKWFKSQGATLHGTPDSTHGLMVYNKREGGKKEKAISEWIIAIGKHNGIISSSVWLKCQSIIKENKNKISPRSGTGEKFLLSGMLICGECKSGMSSWSHFNKKINFMERYYRCNLKNRASNRCSNKMLNAYKAEEYIPKYLKQLDIEEFKTVYRENKKNTLRYDQDEAINLKKKIKENKKILQGIIKKFALIDDTDILNLLKDELDRLKKETDTLELRLRELDSIAILKDEEDVFINDIKEKLLNFKKFYDFVNIEQKRTLIKGLVTNIEWYSNNKTFEINLVGSNKKISPGKVKRRI

SEQ ID NO: 14550 - protein, 519 aa, synthetic construct
MKRITKIEQDNANALMPKLRVAAYCRVSTASDDQLVSLEAQKTHYESYIKANPEWDFAGVYYDKGVTGTKTEGRDELLRLISDCENGLVDFIVTKSISRFSRNTLDCLELVRRLLDIGVFVYFEKENLNTQSMEGELMLSILSGLAESESVSISENNKWSAQKRFQNGTFKVAYPPYGYDNVDGQMVINEEQAEIVRWMFAQALAGKGAHKIASELNERGVPTRKGGNWTATTVRGLLANEKFTGDILFQKTYTDSQFNRHHNNGERDRYFMEDHHPAIVSRETFEAVAAVIGQRGKEKGVTRGSKYQNRYPFSGRIVCSECGSTFKRRIHYSTHQKYIAWCCSRHIEMIEACSMQFIRNDAVEAAFITMMNKLVYGHRTILRPLLDALRGTNDTGAYHKVAELESRMEEVMERSQVLTGLMTKGYLEPALFNKEKNALEAELENLQRQKDSLSRVLNGNLAKTEEVSRLLKFAAKAEMASDFDGDLFEKYVDRVVVYSRTEIGFELKCGLTLKERLVR

SEQ ID NO: 14551 - protein, 525 aa, synthetic construct
MAVNKNANVTIIPARQRVGNRKKDEERPKLRVAAYCRVSTDSDEQATSYEAQIEHYTAYIQKNPEWELAGIFADDGLSGTDTRKREQFNLLIEECMAGKIDMVITKSISRFARNTLDCLKYIRQLKDKNIPVFFEKENINTMDSKGEILLTIMASLAQQESQSLSQNVKLGLQFRYQQGLVQVNHNRFLGYTKDEEGMLVIDPEEAEIVKRIYREYLEGASLLQIGKGLESDGILTAAGKAQWRPTTLHKILRNEKYIGDALLQKTYTVDFLSKKRVKNNGIVPQYYVEGSHEAIIPRDLYMQVQEEMARRANLHSGSDRKKRVYSSKYALSSIVYCSRCGDIYRRIAWNNRGKHSTVWRCCTRVEHGPKACDAPTIQESDLQDAVARAINGVLGGREVFLPLLEENIEAVIGCGVDDEIAEIDRRLAEQQKELLNLANAKKDYSKVADKIDRLREERQDILMREADRDGRRQRIEEMKAFLQEQADTPLEYDEQLVRRLIEKVTVHEDRVTVEFKSGLETDVEL

SEQ ID NO: 14552 - protein, 512 aa, synthetic construct
MKVAIYSRKSIETDKGESIKNQIEICKEYFLRRKSNVQFEIFEDEGFSGGNTNRPDFKIMMNRAKNNEFDIIACYKIDRIARNVVDFVNIYDKLNKLNIKLVSVTEGFDPGTPLGKLIMMILASFAEMERENIRQRVKDNMKEMAKAGKWTGGNVPFGYSTERIDIGNKKATYLKLDNAKKEIVKEIFNLYISTNSMHKVQKWLYDTKDIKWCLSTIKNILTSPIYVKCDKEIIKYLSNFGEVFGEPNGVNGVITYNRRPYTNGKHRWNDKSMFYAVSKHEGIINSDLWLLVQSIQEKTKTKPRPKNSQVSYLTGTLRCSKCGSSMTVNYNHKNKDGSISYVYVCSGRRSFGKNYCDCKQVSQKILDKQIEAALNSYVKLDIEEFKRTIEVKEPKSQKGKIQTIEKAIQTNKTKINNLIDKISILSNTASAPLIGKIETLTQENEDFKKELLFLKQEELNNNIISPEEKYKKLKQLVNILNSNDIETKRNLLNFSVQEILWDSDTKYADIII

SEQ ID NO: 14553 - protein, 544 aa, synthetic construct
MRIAIYARYSSDLQDERSIDDQVALCREVMAKRFGGIEAGIYADYAISGAHMANRPQINQIVSDAKDGKFDAVLAEDLDRLSRDQEHIAAIYKQLTYHQVKVLTVADGEINEMHIGLKGTMSAMFLKNLALKIRRGTTARAKAGSNPGGRCYGYETFHEIGADGKAIRGQRRINEDQAKVVRRIFRQYANNVSPRAIAQGLNDDGIPGPTGGQWTASTINGNKARHHGMLFNELYIGFQIYNRVQMIKHPDTGKRISRPNLPTDWVVTEIPELAIVDKEIWDKAQERKAAISELYTVAKKRRPKHPLSGLVRCGSCGGSFTITNRTAMGCSTRRERGTCDNAHRIKMEDLEKRVFDGLREKLLTPDVIEAAIDEYHKERARLRKLARANLQTYTKRRTALRSQIENMVNAIANRPDSTALVSKLAELEDDLADVEQKLRDADDSPVIEIHPNALDDYKRAVTDLAETIRTTDAPNRAEATSLIRSLIDHIEVHPTDQKRETRIEVFGILEALKNLAGLPSGEVSAQCTVKVVAEEGLEPPTRGL

SEQ ID NO: 14554 - protein, 515 aa, synthetic construct
MKIGIYPRKSVYRDNSDSVAVQIKMCKDYAGIIFRGEELEFFIYDQDEGFSGKNTNRPSFQQLMQDVKANKLDVVMVYKLDRISRNVKEFSAMYDTMQDHDVSFVSVKESFDTSTPIGRTVMYILAAFAQLERENTSERVGDNMKQLGASGKWTGGHLPSGMTSIRKKVDGKEHSYLIVNQETIGRVKLLYQLILEGYPITRVERYCRDHNITSETGKFLNTSQIYGILTNPVYCQADLQAFYYLHGKGCTLPDKRLFDGTKGLIGYGRTQGTENKKKLGMDRWIIALGIHDYVIPANDWIAVQERLGQNKQVRTLKHEVGILRGILKCRCGRTMQNRVYIKNQRMFAYYFCPARDREGINYCDADFVKIDTIDNIFIDKLKAIRIDEEFVHPQHNQHSVTDINALKKDIRSTESALENLTRQLQENVTSTAAKYIVQQIENLDKKLNTLKNQLQLEELRDNKERSETEEREEIYKNICYLLDNFDDMAYKEKNELIRRTVKRCVLNDKNLEISF

SEQ ID NO: 14555 - protein, 506 aa, synthetic construct
MRTAITYLRYSSAIQGAEGADSTRRQNDLFKQWLKKNGDAQIVASFSDEGLSGYKGKHLTGQFGDMLARIESGEFPEGTILLVEAIDRIGRLEHLETEALMNRILGNGIEIHTLQDGLIYTKDALADDLGISIIQRVKSYIAHQESKQKSFRVSQKWEQRAKLALAGEQRLTKMVPGWIDPETFKLNEHAETVRLIFKLLLDGESLHNIARHLQSNGIKSFSRRKDANGFSVHSVRTILRSETTTGTLPASQRNDRPAIPNYYEAAIDASTFNKAQEILGKNRTGRTPASDNPLTINIFKGLFRCQCGASVHPTGTKNKYQGVYRCNNHLDGRCDVPPLKRKPFDKWMIDNFLGMIDVVSDGESERKIAALQHEVETVTARIKKATALLLEMDDITELKAQVKELNQKRTELQTTINTMKRKTSLSDKGLPQIKGLDLMTKAGRVECQLILSKHLKGLTLGKDSVTVTLQNDTEIIVPTDPLPLNDGTSIFEIAEKELLEIDAYQL

SEQ ID NO: 14556 - protein, 518 aa, synthetic construct
MKVALYVRVSTEEQAEEGYSIEGQVKTLTDYCKSHKYDIYNTYKDDGFSGKSTERPALQQLLNDCKNHKFNMIIVWKISRLSRKQLDFLQLIDYFDNNNVLFSSVSESIDASTATGKAMMQMMGTFAELERNTIVDNVKMGMKQRAREGKWNGGSMLGYTSKNKQLVIVESEAELVKKIFHLYLNGKGYKAIANQLNHEGHKTKRNMAFSTNSVRTILHNSAYAGYISFNKVTEWSKKRRKGNNQDPIIVKGEHTAIIDENTWQKTQTLLKRKSNKPTKTFIGNFPLTTLLRCPMCGQGMIGHKIRKSPSTNEYIRYYQCGNFHSKGSAVCKSNLIRADYAEQYVFEKLEEIVSDPLILQDIIDNVNNKISKHLQPLKNELKTINEQISSTEKNINRYFNLFEATKIPGDLLANKLESLNQELTQLKGRRQYVEQKLQEPTIKEVSFDKVFDTLSAFSKLLPTLPAEKQKHFLHTLIDRIFVNHSDDIKKRSIKDIILFFDTSSSNNYVLTYDTVHHD

SEQ ID NO: 14557 - protein, 506 aa, synthetic construct
MRSVITYLRFSSATQGAEGADSTRRQNELFKQWLRKNSDAQVVASFNDEGLSGYKGKHLSGQFGDMLSRIESGEFPEGTILLVEAIDRIGRLEHLETEALMNRIIAHGIEIHTLQDGLIYTRDALSDDLGISIIQRVKSYIAHQESKQKSFRVSQKWEQRAKLALAGEQRLTKMVPGWIDPETFKLNEHAETVRLIFKLLLDGESLHNIARHLQANNISSFSRRKDANGFSVHSVRTILRSETTIGTLPASQRNDRPAIPNYYEAAIDAATFNKAQEILDKNRKGRTPASDNPLTINIFKGLFRCQCGASVHPTGTKNKYAGVYRCNNHLDGRCDVQPLKRKPFDRWMIDNFLGMIDVGNDGESERKIAALQHEVEIVTARIKKATALLLEMDDITELKTQVKGLNQKRTELQTTIDNMRRKASLTDKELPQLKDIDLTTKAGRVECQLILSKHLKGLTLGKDSVIVTLQNDTEITIPTNPLPLNDGTSIFEIAEKELLEIDAYQL

SEQ ID NO: 14558 - protein, 547 aa, synthetic construct
MKLLVTYIRWSTKEQDSGDSLRRQTNLIDAFYAKHKEEYYLLPAHRYVDKGKSGFHQQHKAQGSDFRRMFENVMSGVIPEGSLIVVENFDRFSRADIDTAIDDVRQILRKGVSILTLGDGELYDKSALTDPVKLIKHIIIAERAHQESLVKQKRIAQVWNHKTQLARELKKPMGKQAPGWLELSEDGSHYIVDEDKASLVNIIYDKRLSGMSMFAICKWLNEQGYPTINQRKVRISKTKKPDGNWSALSVKHILTSRSVLGYLPAKISTEDRKTVLREEIESFYPQIVTDSKFYAVQQLLEETGKGKTSSGEHWLYVNILKGLIRCKCGLVMTPTGIRKPVYQGTYRCNGNKESRCSYGTVSRKLLDTQLCSRLFSKLSQLHDEATDTAKLDELQRRLNTVDSELEKLTETLIQLPNITQIQEALRVKQEEKDELIVQLSREKARVKSVSSLDLSGLDMESVEGRTEAQIIIKRLVKEIVVSGNEKLVDIYLHNGNMIRGFPLDGKDDHTLTLEEATDEMQPLDDMLIFGEPVTRIYPAGDMEEVDA

SEQ ID NO: 14559 - protein, 538 aa, synthetic construct
MRALIAIRLSRVTDATTSPERQLEACRTLCDQRGYEVVGIAEDLDVSGAVDPFNQKHRPNLARWLAGEHVDDSGNVVPFDVIVAWRVDRLTRSVRHLRRLVDWAEDHGKLIVSATEAHFDMSSPFAAVLIALLGTVAEMELTAMRERNRSAAQHNIRAGKYRGGLPPWGYIPDNSTGEWRLVQDDEQVAIIKEVVRRVLKHEPLRAIAHDLTDRGVPTPRDSFAKHKGRPAKGRGWSSGRLKQSLTSESLLGYAMSGGAVVRAEDGSPVVRAEPILTRDKFDRLVKELARRENRKEPYARSTALLLRVIFCSCGRQMYALKGGQGRQYRYRCASAQYKNNCGGPSCLAPDADQLVEGAVLGLLKDSERLEKVWDPGDDRSAELATIDAELADLAGQLGTAAFLPGTPQRQRLNDRIEKLAHRQAVLSRDVTRPAGWAWKPTGELFGAWWKSQDVVGRNVWLRDAGVRVTFDHGQYRLDLGDVDTMTKQLKPAGAVAQWQQNFATMTESGIAGIEILTNGEMIFHHKSGATVSSSELDN

SEQ ID NO: 14560 - protein, 539 aa, synthetic construct
MSKRAALYARYSSDLQTDRSIEDQLNLCRSFAEKQGHQIVAEFHDHAKSGASIMGRDALLGMMDAARDGAFDVLIVEALDRISRDQEDLAGIFKRLTHEGVEICAVHDGRADIIQIGIRGLVGALFLQDLAHKVRRGLAGVVRDGRSAGGKAYGYKPVLGMPGELEIVEAEAEVVRRIFEEYAAGAPPRDIAGRLNRDGIEAPRGTEWQASTINGNMKRFNGILQNPIYDGRIVWNRVSMVKDPDTGRRISRPNPESAWQEVPAPHLRIVPAELFQAVADAKSRYRPFSKTMKRNPKRLLSGLLRCGACGGGMSIHGKMGNVTRIKCTKATEARTCENKRPYVIEDIEAGVVSGLKQHFGDPRSIEYFVTVYNAEQQRLSAGDGAEREKAAQRLAAVNKSFQRAADLAIDGVLSSEEAKVRLDELRAERAVIETKLATMPEPPNVVQLRPAVVNRYLGMVKALAMDLQDSGELSDDVKATVRELISKVTVYPTSSGQPPMIEVEGFLSKVLDDAPEQKLKIRGGVMVAGSGFEPPTPGL

SEQ ID NO: 14561 - protein, 521 aa, synthetic construct
MKKVITIEPAKQVTHKVDLPSFTKRRVAGYARVSTDHEDQTTSYEAQMTYYTDYINSRSDWEFVKMYSDEGISGTNTKKRLGFQEMVEDALDGKIDLILTKSVSRFARNTVDSLSTVRKLKEAGVEIYFEKENIWTFDSKGELLITIMSSLAQEESRSISENVTWGRRRQLAEGQVTFSYSQVLGFKKSDTGGFEIDQEEAKIVRYIFHQVLLGNNPNKIARELTAQGIPTPQGKRQWSYGTVKRMLRNEKYKGDALLQKSFTTDFLTNSTKPNEGELPQYYVENNHEAIIKREVFDLVQVELDKLEKKRQTSNIFTGRLFCGDCGSAFGSKVWHSTSKYKRTIYQCNAKYKGEHKCQIPHVTEEEIKGWFLSAMNQLIGNREEIIANTELLIDMTKDTSSLEARIDDLEHHRETIRQDIDDLVDRNARKAQNQELYQEQYDTLVTTYQEKQKELQETRSALEEQKSKRLSLDGFIQQLKEQDDIITDFNQELWQTSVERLDIKEDKKISLTFKNGVKIDL

SEQ ID NO: 14562 - protein, 402 aa, synthetic construct
MKQIKTIQAQKVTTIKRLKVAAYTRVSHTSLLQSLSNQVSHYSQMIQANPEWDYVGVYSDSAISGRSQAHRRDFQQLLDDCRKGKIDLILTKSISRFGRNTVELLETVRELKRLGISVRFEKEKIDTLTAEGELLLTLLASMAQEESQSISQNIRWRVKKRFEEGKPYIPQDIFGYRWNGDEYVIEPHEASIVRQVFEWYMEGLSAPKIAKRLDDRGERTRLGNRFTKRVIYNMFDQEAYCGRLILQKTFRDHFGSRSIPNDGQMAKYIVENAHEAIVTPEYFQLVNQEKKRRARRRVSKHDALARLQGKVYCEHCGLDMILTLETKSNQEKRVRYYCRTRDGKGVEACLGRTVTEEQLFQAFGESIDIEDIHHISFNSVTNEAKVIYRNGEEKHVIIQKGR

SEQ ID NO: 14563 - protein, 432 aa, synthetic construct
MKSAYIYVRVSTDEQKRKGYSLVEQEDRLLKHCEIYGIRVKGIYREDYSAKDFNRPEWKKLIKKIRKNTHRPPENILFIKWDRFSRNIEYAYQMIRMLREMNVQPMAIDQPIDLEVPESIVMLAVYLSIPEAENSRRGLTTSDGIRRARKMGRWPGKAPVGYANRANPDGKKYITPKHPAADHIKWAFQQLATGAYTISQVRKMSYVNGFHCSKNNFWKLVHNPFYCGIIRIPANRSEEEQFVRAIHEPLISESLFQQVQLIICKDRNKRGHKDTLRALFPLRGLLRCPWCGGKITGSVSQGKCSKYPYYHCTRDKCKGRFRAEILNNCYEEMLKKIRLRPEIYELFGLVLEDENIFTCRREHIDERMKILDAIKKQELQISKARSYFLDEKIDFEDFGKLKKEYNEALDQLNHQLGRVTQKLADCDANNNL

SEQ ID NO: 14564 - protein, 478 aa, synthetic construct
MKVALYVRVSTLEQAEEGYSINEQKDKLKKYCEIKDWTIVKEYVDPGRSGSNINRPSMQQLIKDADTGLYDAVLVYKLDRLSRSQKDTLYLIEDVFQKNNIHFISLSENFDTSTAFGKAMIGILSVFAQLEREQIKERMSMGRVGRAKSGKIMEFNNPAFGYEIDGDNYKIDPLRAEIVKRIYKMYLSGTSINKIKETLNSEGHIGNKKNWSDTRIRYILSNPTYLGKIRYDGKTYDGKFSPIIDEETFNKTQNELKERQTATYKRFNMKLRPFQSKYMLSGLLRCGYCGATLFVNSYVYNGKRKLRYNCPSTYKSKQKTRTYKIMDPNCPFKLVYAKDLEPAVINEIKNLALNPQSIQKPVKKTPDIDVEEIQKELAKVRKQQQRLIDLYVISDDVNIDNISKKSADLKLQEETLKKQLAPLEEPDNDDKIVAFNEILAQIKDIDSLDYDKQKFIVKKLIKKIDVWNDNKIKIHWNI

SEQ ID NO: 14565 - protein, 446 aa, synthetic construct
MTAAKPLRKVRCAIYTRKSSEEGLEMEFNSLDAQRESCEAYITSQKAEGWVPVPDHYDDGGFSGGNLERPALKRLLADIEAGLIDVVVVYKIDRLSRSLMDFSKLVEVFDRNDVTFVSVTQSFNTTTSMGRLTLNILLSFAQFEREVIGERIRDKFAASRKKGMWMGGVPPLGYDVVARKLVVNEAEADLVRHIFRRFLQVGSATLLVKELNSAGHHTKSWITQDGNERLGAPFTKNFLYKMLENRVYLGEAVHKGVAHPGEHEAIIDRTTWERVEAVKVDNAPRKRAAAARATTPAPLKGLVVCTHCGRAMTPTHTRKKGRLYRYYTCMKAINAGHDTCPVRSIAAGEIEAAVIGQVRALLRAPEIRARAERMAPQLAIADLHAALDRFDAVWDELFPAEQARLLQLLVERVSISPDGADLRLRAEGLASVVADITAQASERSAA

SEQ ID NO: 14566 - protein, 558 aa, synthetic construct
MKGKIALYSRVSTSEQSEHGYSIHEQEQVLIKEVVKNFPGYDYETYTDSGISGKNIEGRPAMKRLLQDVKDNKIEMVLSWKLNRISRSMRDVFNIIHEFKEHDVGYKSISENIDTSNASGEVLVTMFGLIGSIERQTLISNVKLSMNAKARSGEAITGRVLGYKLSLNPLTQKNDLVIDENEANIVREIFDLYLNHNKGLKAITTVLNQKGYRTINQKPFSVYGVKYILNNPVYKGYVRFNNHQNWAVQRRSGKSDKNDVILVKGKHEAIISEEVFDKVHEKLASKSFKPGRPIGGDFYLRDLIKCPECGNNMVCRRTYYKTKKSKERTIKRYYICSLFNRSGSSACHSNSINAEVVERVINVHLNRILSQPDIIKQIASNVIEELKQKHSNQTEIKYDIDSLEKQKAKLKTQQERLLELFLDDQMDSEMLKAKQSQMNQQLEVLDQQIKEAQQANQSQDEIPNFDKLKGRLILMITRFSVYLRKATPEAKNQLMKMLIDSIEITTDKQVKLVRYKIDESLIPQSLKKDWGSFFMPKFQFEIYGQNDYFIDQITTFTT

SEQ ID NO: 14567 - protein, 517 aa, synthetic construct
MLENIQKLKCALYVRTSTTEQKDSLELQARYKNNNFKIDKIYSEEVSGRDILKRPEQIKLLNDCGIEVTSVQKQAIFTLNDKPPLYDCIIVSNTSRWGRNVVQVKQIVEALHKKNVKLWFDDLSKFSDSKDLSLTLDMLFVLDENYSQTISQKVKSAMDKRKKEGYILTNGRLIGYDKSKEGTLVKNKDSDMVKSIFEDYVYENLAIRKLAEKYNLSTSTITTLLKNIKYAGFMAYGIKEYGWDFSKLEIVKTDKIEPIITEELFWKVQDIRRSRSRIVEGSKNTRNKIGVNNKTHSLSSKILCTNCGKNFHYKDRGYWICGTHSKYPKKCDMPTMRENKIINYLKSPYGLKAIKNGLEVRLEGELNKLQLENTEPIKRNLKEFKEKSSKLLDLYMDSLIDKNTFEKRNNILKNKIDKLENELKRYNDKENYRIKLLELKKEAKRFLDEYEEILDSNKPEKIFDRVFKIEVDKIIDIKKGKEVSYVKNIRFKDFKVLEDYQLFNQFTNIEDVLEYRK

SEQ ID NO: 14568 - protein, 510 aa, synthetic construct
MALHENSKIAVYSRKSREDRDSEDTLAKHRNELEYLIKRENFKNVQWFEEVVSGETIDERPMFSMLLPRIENGEFDAVCAVAMDRLSRGSQIDSGRILEAFKQSGTLFITPKKIYDLSIEGDEMLSEFESIIARSEYRAIKRRTINGKKNATREGRLHSGSVPYGYKWDKNLKAAVVVEEKKKIYRMMIKWFLEEEHSCTVIAEMLNELKVPSPSGRSIWYGEVVSEILSNDFHRGYVWFGKYKKSKSNNSIVQNKNLDEVLIAKGHHETMKTDEEHALILNRIEKLRTYKLAGRRLNMNTHRLSGIVRCPYCHKAQAIEQPKGRKKHVRKCLRKSAERTKECEQTKGIHEEVLFQSIMKEIKKYNEALFSPTEQDVNDDSYTTQLIDLREKAVKKAKGRIERIKEMYLDGDISKTEYKEKLKISQETLQKAENDLAELIASTEFQNALSAETKKEKWSHHKVQEMIESTDGMSNSEINLILKMLISHVTYTVEDLGDGTKNLNIKVYYN

SEQ ID NO: 14569 - protein, 460 aa, synthetic construct
MKCAIYRRVSTDEQAEKGFSLENQLLRLQAFAESQGWEVVHDYMDDGYSGKNMNRPQIKRMLHDLKSNKFDIVLVYRLDRFTRSVKDLNDLLEVFKEHEVDFKSATESIDTATATGRMILNMMVSTAQWERETISERVKDVVRKKKELGLISTGYPPYGYAMNDGVISQVPHEVEIVKFVFEKAKVYGFQKISKLLNEQGLVTRNGTKWLISTASRIAHNPFYSGEMRYKRDGETSTVPINVEGYEPVITKEEHKEVLKAIKKRNRNQTRAKSNEVYPFSGIVLCPECGHPMKGTRVSSRGYYYKYYRCDRASDHFCNGKLIRYEKLDKAFAEYIHDAFQIDRIEIKEETNTKDIQREIKRCKSKIERLKDLYVDGDISKKKYKNDVGELNEKIYDLEQKLLSAENKISHDHIRENLKRLSEFWGLIDDNTKMESIRGVFDTITVEIQGNDVVITDHTLL

SEQ ID NO: 14570 - protein, 451 aa, synthetic construct
MTKAAIYIRVSTQDQVENYSIEVQRERIRAFCKAKNWTVYDEYIDGGYSGSNLERPSIKKLLTDLKNIDVVVVYKLDRLSRSQRDTLELIEEHFLKNKVDFVSITETLDTSTPFGKAMIGILSVFAQLERETIAERMRMGHIKRAENGLRGNGGDYDPAGYTRQDGHLIIKKDEANHIKRLFDLYEQQHSITKVQEVLKEEGYPIWRFRRYRDILSNTLYIGRVTFAGKEYEGQHEPIVSSEQFKRVQALLKRHKGHNAHKAKQSLLSGLITCSCCGENYVAYSTGKSKDVESKRYYYYICRAKRFPAEYEERCMNKTWSRKKLEDIIITGLKRLTVEDNVNNKQKKKINYEKLIKDIDKKMERLLDLFTTNTNISRQLLEQQMEKLNSEKENLIQKQKRQEEEKTIAQDTLIDSIKSIDLLEFKDKQVLINNLIKQINIDHKNVEIIWRF

SEQ ID NO: 14571 - protein, 557 aa, synthetic construct
MNIQSPHVALRAALYLRVSTTRQAEHDVSIPDQRKQGEAYCAARGYELVETFVEAGASATNDKRPEFQRMIEDGTSKPAPFDVVVVHSFSRFFRDHFELEFYVRKLAKNGVKLVSITQEMGDDPMHVMMRQIMALFDEYQSKENAKHVLRAMNENARQGFWNGARPPIGYRIIAAEQRGSKTKKKLEIDPLHAETVRMIYRLFLEGDGNTGPLGVKAITCYLNERRLFTRDGGRWGLAQIHAILTRTTYIGQHRFNTRTHKNREKKPESEVAIMEVPPLIEREVFHLVQARLKSRHPSLVPARVTSGPTLLTGICFCSKCGGAMTLRTGRGSTGAEYRYYTCSTKARQGKTGCVGRTIQMGKLDDLVANHLDERLLVPARLEKILSSLLDRRSDRAERRREQLAEINRRVTETEARLNRLYDAIEAGLADLNDENLKERMTSLKAIRDQAKAEAERLQATLDSSGNQTITVDMLDSLSSAARAGLRLEEGGYRREHLRALAQRVEVADDEVRIMGSKAELLRTLVAASSGKSAAFGVSGSVLKWRTRNDSNVRPPDS

SEQ ID NO: 14572 - protein, 678 aa, synthetic construct
MKSELVTPSHLARKAVVYIRQSTPHQVVSNQESLRLQYALRQRARELGWREAAIDVIDADLGLSGASIAQRNGFKELVGRVGLSEVGLILSIDVTRLARNCTDWYPLLDICGLRGCLIADRDGVYDPGTPNGRLLLGLKGSISELELHTIRSRLTAGLLAKAERGELAVMLPIGLMRDPSGVVVKDPDMAVQGRLGLVFQLFLQLRSVAKVMRALNERDLELPRRDRYGDLCWTRATLAAVAAILKNPAYAGAFVYGRTRFRPPKREGALPQKAPRPMEEWRIVVKDRYPAYIDWPIYEKIRSVIRDNRAEYMRIKTRGAPRNGELLLHGIAWCARCGHKMYVRYKGGGEYVCNHLRTQEGQPTCQHIRAAHIDAAVGDAFLTALAPAELDALSRSRRVQQQTNNALRSSAERELERKRYTAALAERQFNRADPDNRLVASELERRWEAALNDVRAAEEALARQTPPKAITQVAISKELNDKVISLTGRLPQIWGDETISDAHRKALLRCLIEKVVLDRGERDLALARIVWRGGAVTELEVKMSVNSVTRLTRGTEMRERLLTLARDGVPDDKIATILTREGHRSPRCADKVLPITVGRLRRAAAIKVTAQRSRWEHDDSYLSPPELARRLEIPVNWLYVQIRTKRLLIDRQPSGAYLFYTIRSSRHRRPSKPRHRAT

SEQ ID NO: 14573 - protein, 700 aa, synthetic construct
MLISSNIADERLTTAHRAKLAYVYVRQSSVNQVRQHQESTELQYRLVDRAIGLGWPPERVQVIDEDLGKSGAGGVDRHGFQKLIAEIGLGNAGLVVSLDASRLARNNRDWHQLLELCSVFGVVIADGERLYDPRAYHDRLLLGLSGIMSEAELHQLRMRLHQGERQKAARGELRLPLPAGLAYDRTGTIILNPDEEVQARFHLVFAKFRELQSARRVMRYLDRNGLSLPVRPLLGPSPHEVVWRAPDSARVLNILQNPAYAGAYVYGRRQKDPSRCRPGSLTGTVKVAIADWAVCLHAAHPGYISWEEFMANQGRLADNVCRYEAGHSGVPRKGAALLQGIAVCGRCGRRMSMRYTGPHADYPVYCCRSDRDQQGSALCQEVRALAVDALVERIVLDALVPDQIEIALAAAGQLEQENRQLERQWALRVERARYEAERARRQYDAVEPENRLVARSLERAWEDKLRVVEAVEQQHARWRAQEPLLIGPTERAGLQALGENLPRIWNAATTSAADRKRILRFVIREVVLDQKRTRGQVWFKIVWQTGATSEHHVQRRVQAYRNYIDIDRLRQRIVELNAEHKMDGEIAAILNQEGFVAARGCAFKGENVWLLRTRWSIPTVKINGVDKNPMRWPDGSFSIQGAAAELCVTPQTVFDYLARGMLTGRQLTKGQPWQIELSDEQMSQLRNRVRRTKRSKKEAS

SEQ ID NO: 14574 - protein, 696 aa, synthetic construct
MKSELIKPIHLARRAVVYIRQSTTHQVVTNQESLRLQYALRQRAIELGWPEAGIDVIDADLGISGASAAQRSGFKELVGRVGLKEVGLILSIDVTRLARNCSDWYPLLDICGLHGCLIADRDGVYDPGSANGRLLLGLKGTISELELHTIRSRLTAGLLAKAERGELALTLPIGLVRDPSGVVVKDPNLEVQERLELLFETFLKVRTIAKVMREFNDRGLELPRRDRHGDLHWARATTSAVAAILKNPAYAGAFVYGRTRLRRPSDGRLPTKVPKPIEQWRIIVKDRYPPYIAWQSYEKIRGIVSDNRAEYMRNKTRGAPREGELLLQGIAWCGRCGHKMYARYKGGAEYVCNHLHSHQGLPACQYIRARRVDAAVAQAFLTALAPAEIDALSCARRAQQQAYKAMQSGAEQQLERRRYEAALAERQFNRVDPDNRLVAAELECRWEVALKEVRVAEEALARLKSPQAIAQITVGNKVLNDKVVRLSGRLPEIWTDPGTTDAKRKALLRCLIDKVILDRGEHDVVRMRIVWRGGAVTDIEVKMRVNSVADLTQGAEMRERVLELARAKMHDDEIAAKLTSEGHRSPNCPDKVLPITVQRIRLHAGLKGLTEQRTRWRHSTDLLSAQQLAGVLNIPVNWLYVQIRQGRLLIDRHPSGAHLFSNTSRVIEAVRKLRNHELDQLDLRITEPHEEGHQHA

SEQ ID NO: 14575 - protein, 542 aa, synthetic construct
MQQLKQKRVGIYVRVSTEMQSAEGYSIDGQINQIKEYCNFHHFEVKDIYADRGISGKSMNRPELQRMLHDANEGLIDCVMVYKTNRLARNTSDLLKIVEDLHRQNVEFFSLSERMEVNTSSGKLMLQILASFSEFERNNIVENVFMGQTRRAQEGYYQGNLPLGYDKIPDSKHELMINQHEANIVKYIFESYAKGHGYRKMANALNHKGYVTKKGNPFSTSAIAYILSNPFYIGKIQFAKYKDWNEKRRKGLNDNPVVADGKHSPIISQELWDKVHSRMKQVSQKPQVHGKGTNLLTGIVHCPQCSAPMAASNTTNTLKDGTKKRIRYYSCSNFRNKGSKVCSANSVRADVIEKYVMDQILEIVKSDKVLKQVVERVNQDSQIDMAALNHDIAYKQQQFDEINTKLKNLIQTIEGNPDLASTLKPTIHQYETQLNDITNQMNQLKQQQNQEKPSYDTKQIAALLQQIFQNVESMDKAQLKALYLTVIDRIDIRKDGNHKKQFYVTLKLNNEIIKQLFNDTPLDEVLLSTSSLFLPQTLFLQI

SEQ ID NO: 14576 - protein, 449 aa, synthetic construct
MKQAMGYLRQSTTKQQSLAAQKQTIKALAEKHNIQHITFYSDKQSGRTDKRNGYQQITELIQQGQCDVLCCYRLNRLHRNLKNALKLMKLCQKYHVHILSVHDGYFDMDKAFDRLKLNIFISLAELESDNIGEQVKNGIKEKAKQGKLITTHAPFGYHYHNGTFTIDTVKAPTVKAVFNYYLQGYGYKKIAQYLEADDKFINRKPYQVRNIILNPNYCGRVINQYGQYENMFPAIVSTTIYEEAQVTRTQKQVKRKPSENQLKQKIKCPYCHSTLTNMTVRKPDHSLRYYVCPQNMNNARFVCEFKGINAQELETSVLATCQDFFQNQQLYSKINQTIQQRLKRQKDIETKSTLTQEQLIEKLARGKMDAGTFREQTQSLRQQSKPISSINAYQIKNAFQNIMQQRFTLNMLYPYIDEIHITKNKTLTGIYFKNEPLNIVNQTTQSSIA

SEQ ID NO: 14577 - protein, 560 aa, synthetic construct
MSGKIALYSRVSTSEQSEHGYSVKEQEQVLIKEVVKNFPGYDYETYIDSGISGKNIEGRPAMKRLLQDVKDNKIEMVLSWKLNRISRSMRDVFNIIHEFKEHGVGYKSISENIDTSNASGEVLVTMFGLIGSIERSTLISNVKMSMNAKARSGEAITGRLLGFKLKLNPLTQKNDLVIDENEANIVREIFDLYLNHNKGLKAITTVLNQKGYRTINQKPFSVYGVKYILNNPVYKGYVRFNNHQNWAVQRRSGKSDKNDVILVKGKHEAIISEEVFDQVHEKLASKSFKPGRPIGGDFYLRSLIKCPECGNNMVCRRTYYKTKKSKERTIKRYYICSLFNRSGSSACHSNAINAEVVERVINVHLNRILSQPDIIKQIASNVIEELKQKHSNQTEIKYDIDSLEKQKAKLKTQQERLLELFLDDQMDSEMLKAKQSQMNGQLKMLDKQIKEAQQATESQDEVPNFDKLKSRLTMMISRFSVYLREAKPEAKNQLMKMLIDSIEITTDKKVKLVRYKIDESLIPQSLKKDWGSFFMPKIHFIIYGTQKYSIDKITTFATLS

SEQ ID NO: 14578 - protein, 411 aa, synthetic construct
MRTVRRIQPIKSPCKPRFKVAAYARVSDSRLHHSLSTQISYYNRLIQAHPDWELVGIYYDEGISGKEQSNRQGFQNLIKDCDDGKIDRIITKSIARFGRNTVELLTTVRQLRLKNIGVTFEKENIDSLSSEGELMLTLLASVAQEESQNMSENIKWRVQKKFEKGIPHTPQDMYGYRWDGEQYQIEPNEAKVIRKVFKWYLEGDSVQQIVDKLNQEQVLTRLGNPFTVASIREFFKQEAYFGRLVLQKTYRESFSRNPKRNKGQRNKYIIENAHEPIVTKEYFDLVLHEKERRYQLMSQESHLNKGIFRDKISCSECGCLMIVKVDSKQVNKTIRYYCRTRNRFGASSCSCRTLGEKRLLASFKSKLGILPDKEWVENNIKHIEYDFGHRIIRVTPVKGRKYPIEIREGRY

SEQ ID NO: 14579 - protein, 520 aa, synthetic construct
MKKVITIEATPSIIRSSSDDFSLKKRRVAGYARVSTDHEDQATSYESQMRYYSEYINERDDWEFVKMYSDEGISGTNTKLRTGFKAMVEDALNGKIDLIITKSVSRFARNTVDSLTTVRQLKEVGVEIYFEKENIWTLDSKGELLITIMSSLAQEESRSISENVTWGLRKQFAEGKVHFPYTNVLGFKAGEDGAIVVDQDEAKTVRYIFQQALIGKSPYYIAKDLTEQGIPSPSGKSHWNSTTIKRMLRNEKYKGDALLQKTFTIDFLTKKKNINRGELPQYYVENNHEAIVDRETFDAVQQVLDNKGRKSSTTIFSSKLVCGDCGHFFGSKVWHSTSKYRRVIYQCNDKYSGDKRCTTPHVTEENIKGWFIQAINQLITNKSEIISNLQVLLELKEKPDLNRQICEVETEIKVVMQMVENLVRENAVKPQDQDIYRMEYVSLSDRYDKLIRKMETMELEQMNTIQQLGEITKFIETLNHQDRLVTEFNELLWESTVDKVEIREEKFVTFTFKNGIELNI

SEQ ID NO: 14580 - protein, 584 aa, synthetic construct
MTTIADDPAASLIDPPKTVAAAVSYLRVSTREQAEKGGTDEGFSIPAQREATRRKAEQLGAGIVEELIDAGASAKSSDRPELMRMIQYVKANKVSYCIVHKVDRLARNRADDVSIHLALQQCGVMLVSATENIDETPSGMLLHGIMSTIAEFYSRNLATEVTKGMTQKAIGGGTNGRAPIGYLNVRKRDEMGRELRTIELDPERAPMIEWAFKAYASGNWSVSQLHDELTSRGLRSLPTPKRPAKPLAVSTIHRLLTNPYYKGDVVYRGTRYKGNHPALVPAEVWYQVQSVLTAHQCAVEATQVHGHYLKGTIHCGQCGSRLIVSNAKNRHGNVYCYFVCSGRHSKRTDCTRQAMLIEDVEKLVEDYYTRVQITPAQQDALAGMLHHEFDRLMAAETEELERLITNRDRLESEQDRLMQAHYADAIPLSVLKREQDRIVAELDQVTRRIDAHFGDYADARAHLDDALGLLANCADIYTRCDDTNRRLCNQAFFTKVYIDEDNELRVEHNRPFEMLLDPQVNANALTWAADVNKARTSANVSIGKGSSLVRAVELGGFEPPTFSLRTRRATNCAIAPDHRAQRAL

SEQ ID NO: 14581 - protein, 520 aa, synthetic construct
MTEKNIMVIPARKRVGSTAAKEKIKKLRVAAYCRVSTETEEQNSSYEVQVAHYTEFIKKNTEWEFAGIFADDGISGTNTKKRDEFNRMIAACMDGNIDMVITKSISRFARNTLDCLQYIRQLKDKNISVYFEKENINTMDAKGEVLLTIMASLAQQESQSLSQNVKLGLQYRYQQGKVQVNHKRFMGYTKDEDGNLIIVPEEVEIIKRIYREYLEGQSLVRIGRGLEKDGILTAAGKPRWRPESVKKILQNEKYIGDALLQKTVTVDFLTKKRVKNEGHLPQYYVENSHEAIIPKELFLQVQEEIHRRSNIYTGEGKNKRIYSSKYALSAITFCGDCGDIYRRTYWNIHGRKEFVWRCVTRIEQGPEVCKNRTVKEDELYGAVMTAINKLLAGGNNMIKTLEENIHAVIGETTEYQISEINNLLEEKQKELIKLANKGQDYEHLADEIDELRDKRQLLLVEDASLSGENERINELIEFIRKNKFRTLEYDDKLVRKIIQSVTVYEDHFVIAFKSGIEMEI

SEQ ID NO: 14582 - protein, 520 aa, synthetic construct
MKKITKIDELPQGQLPNTKLRVAAYARVSTDSDEQLESLKAQREHYERYIKSNPEWVFAGLYYDEGISGTKMEKRTELLRMIRDCKQGRIDFIITKSISRFARNTVDCLELVRKLIDIGVYIYFEKENLNTGDMESELMLSILSGFAAEESASISQNSTWSIQKRFQNGSYVGTPPYGYTNTDGEMVIVPEEAEIIKRIFTECLSGKGGGTIARGLNKDKIPARRGNHWSAGTVIDMLRNEKYMGDVLLQKTYTDSNYNRHSNTGEKDQYYYKDNHEPIISREDFAKAQDLIDERAKMKCKGVKKNVYLNRYALSGKIVCGECGRNFRRKTNYSAGRSYIAWSCIGHIEDKESCSMLFLRDGEIKATLTTMMNKLAFSHKLILEPLFKSISQIDEESDRERMDAIDKRMEQLMEERNTLITLMAKGFLEPALFNQERNVLDSEIKNLTTEKTNLVTNSTSGVLRANDIKDLINYVSADNFNGDYTEELFEEFVENIIVNSRDELTFNLKCGLSLKEKVVR

SEQ ID NO: 14583 - protein, 502 aa, synthetic construct
MELQNRIQRVAIYLRKSRNKEGEETEETLGKHRKRLIDIAIKNKWDYELFQEVGNSMNENRPEYQKLLSKLSEGIFDAVLSVNLARVTRDDAETPKFMSLLRQEDILFITDSERIYDLEVQEDWQALKFTGFVNNWEYENIKAQLRKGKKDSAKMGRWSNGIPNYGLVYNRFDRSLEIDQQKADAVKLAFQLVIDGLGVDKVAKELNRLGYKTNRGRYFSGNAITRMIRAEIYKSVIISNRVKGRNLHEGKLRPKDQWIIAENAAPPIIDEETWNMANEALDQRKLLSPRGKQKKHPLSNLIKCGLCGRTQTVSRRRDRNDALAIQPCNKTDPLGGNKCNNRGIKHDTMISLVIEAIHEKHHEISSELIKFEEETEANDIKSIKINKIQEQINKSKKALNILQIQLEEELINISSFKERRKIRQVELNKLEKELTDLLEETKKDALKSKKSFANKLDFFLENWHTIDGADLNHELMSFINKIIWYAPRDSELPPQLKFEWRM

SEQ ID NO: 14584 - protein, 487 aa, synthetic construct
MKYAVYVRVSTDKDEQVSSIQNQIEICRYWIEKNGFEWDENSIYKDEAVSGTAWLERHAMQLILEKVRRKELDTVVFKSIHRLGRDLRDALEIKEILLGHGVRLVTIEEGYDSYYEGKNDLKFEMYAMFASQLPKTVSVSVSAALAAKVRRGEYTGGIVPYGYKIVDQKYTINEDEAELVKKMYELYDNGLGYMKIADAINDMGVPSRTGKLWAYPSIRAIITNAAYKGDYIMQKYAEVKVDGRKKMIINPKEKWVVFENHHPAIITRDLWDKVNNPKTDKKTKRRVAINNELRGLACCAHCGTPLALQQRMYKNKEGETRYYCYLICGRYKRMGARGCVKHSGLQYSDLRLFVLQKLKEKENDLEKVFNLNDTDKHQEKQKKLRKEKKELEIKRERLLDLYLDGGPIDKETFTKRDKNFEKIIKEKELEILKLDDVKALVVEQQKVKEAFELLEESKDLYSTFKKLITRIEVNQDGVINIVYRFEE

SEQ ID NO: 14585 - protein, 540 aa, synthetic construct
MRAAIYARFSTDLQNERSVDDQIALCRAYAGREGLTVVDTFSDSARSGASIFGREGLIQLLAQATKQPRSFDVLLVEHSDRLSRSMKDLAGIHENLTFAGITIRAVHSGEMNTAMIGLFGLVGQMQREDGARKTHRGLAGVVRAGRSAGGRAYGYRPVAGQPGELEIVPAEADVVRRIMSLYAGGMAPRSIAHELNREGVSPPRGGRWNASTINGNGQRGSGILLNELYAGRIVWNKVRMIKDPATGRRVSRPNAPDEWQSVERPDLAIIDRDLFDAVAARKGVRSIEHGERKPAPRHLLSGLLRCGSCGAGMSRCGRDKSGRTRIRCSAATESGVCPEPKTFYLDVVEQAVLAGLKAELRAPEVLAEYVRAYHAERQRLAGDVAKTRAKIARQIAEQERVIRRTMDMLLREVGIEADLSAQQKAAGAARDALRAELGTIAEPPKTIALHPQVLARYEQQVARLGSALSEGINRGDGDGATALRDLVDSVTVYRDKSRSDGISIEIAGRLNALLGEEAYPNAVCFGMVAGEGLEPPTRGL

SEQ ID NO: 14586 - protein, 518 aa, synthetic construct
MYRPTGKDVFIYLRKSRKDIEEEKKALENGRQYDTLSKHRKELLELVKREQHNVIDIFEEVVSGEFLSERHVAQEMLRQVEEGAVEGVVVMDLDRLGRGDMIDAGTIFRAFKFSDTLIITPNEVIDCNSEGAELLFGVKSIIAREELKQINKRLQGGRRRSAKDGKSITRKPPYGYIRDENLKLHPHPEEAPVVRKIFELAAEGNGRQAVVKKLELLGIQPPEGKVWEQSTISYIIKNEVYLGHIVWGKHKYIKRNGKRIRKNVPPELWIRHENAHEPIISKDLFEQANLALSGRYRTPTKEGSQLTNPLAGIVKCSVCGRSLRYVYSKERRPQLRCINLHCQSVQKGALFHLIEERVINSLHMLVEQATLQQDELAASLQKEESIIERKQKQISKLEREIQELHGMRDTAFEMLEKKVYTEEIFLQRHQTISQKIKEAEANIEQLKKEIELEEAQLHHQKNILPQIQKVVDTYWEIESPVEKNHLLKSILEKVYYTRKKEWTKKDQFELEIVPRLPI

SEQ ID NO: 14587 - protein, 490 aa, synthetic construct
MYELKYAVYVRVSTDRDEQVSSIENQIDICRYWIEKNGYEWDENSIYKDEAVSGTAWLERRAMQLILGKARKKELDTVVFKSIHRLGRDLRDALEIKEILLGHGVRLVTIEEGYDSYYEGKNDLKFEMYAMFASQLPKTLSVSISAALAAKVRRGEYTGGTVPYGYKIVDKKYVINQEEAEIVREMYELYDNGLGYLRISNALNDVGKYKRSGKLWTYSAVKLIITNPMYKGDYVMGRSTEVKVDGRKKRIQEPREKWVVFENHHPAIIERPLWDKINNPKINKKIKRRVAVTNELRGIARCIHCGSPFVLHTYKYKNKEGEELNYGYLTCGTYKLTGGRGCVKHSGLRYERLRSLVLRKLKEKERDLEKVFKLNDKDKHQEKQKKLRKEKKELEIKRERLLDLYLDGGSIDKETFTKRDANFAKNIKEKELEILKLDDVKALIVEQQKVKDAFKLLEDSENLYPVFKKLIAGIDISQNGAVDIRYRFEE

SEQ ID NO: 14588 - protein, 451 aa, synthetic construct
MTKAAIYIRVSTQDQIENYSIEVQRERIRAFCKAKNWDIYDEYIDGGYSGSNLERPGIKKLITDLKNIDAVVVLKLDRLSRSQRDTLELIEEHFLKNKVDFVSITETLDTSTPFGKAMIGILSVFAQLERETIAERMRMGHVKRAENGLRGNGGDYDPAGYTRKDGQLIIKEDEATHIKRVFDLYEQYYSITKVQEVLKEEGYPIWRFRRYRDILSNTLYIGRVTFSGKEYEGQHEPIVTSEQFKRVQTLLKRHKGHNAHKAKQSLLSGIIACSCCGENYVAYSTGKSKDTESKRYYYYICRAKRFPAEYEERCMNKTWSRKKLEEVVISELKSLTEEKKQTNKKEKKVNYEKLIKDIDKKMERLLDLFMNTTNISKNLLEQQMEKLNLEKEKLLLKQQRSEEESISHEVTLTAIDDAFETLDFKEKQVIINNFIEKIYINQNNVKIIWRF

SEQ ID NO: 14589 - protein, 595 aa, synthetic construct
MNTKVKLIKASNTGARNRNALDLDLKRVAAYCRVSTDSKDQLESYKSQVDYYTNLIKNNKNWTLAGIYADEATTGTTATKRADFMRLISDCQNGDIDMIITKSISRFARNTLDTLKYVRLLKENNVGVVFEEENIDTLTMDGELLLTILSSVAQQEVENTSAHVKKGLKMKMEKGELIGFQGCLGYDYDPITKSISINEEEAKIVRYIFKRYLEGNGGSVIGRELEEQGYLTPRGKTKWSDTTVLGIIKNEKYIGDILMGKTFTVDPITKRRLANFGESDKYHIENHHEPIISREDFEKAQEIRLRRAQNRNTIANKDRKREKLSRQYAFSSMLECGFCGEILSRRTWHTSSIYKKINWQCVRSTKKGKKYCPHSKGIQEAAIEKAFVESYRQLCHADSTVIDDFLKIVEEEINDNTLVKDLKKIENQLNRIISQERKLVDLHLEDSIDEEVYAKKYKKLTKQKEELLDEKKTLELTIKDEDSIKERLKQFKKVLENKEIIEEFNRTVFESIVDKVVVGRIDKDGTVHPYDLTFYFKTGVKDSQDSNNFKDKRKNAKDNDSEKLCSYKNDEDKKLCSQSKDNARRVRSVANQGVR

SEQ ID NO: 14590 - protein, 487 aa, synthetic construct
MTAFSYIRFSTKDQAQGDSYQRQIASSRDWCKQRGIELSGKGYADLGISAFTEKTRASLADMLEAIQLGTIKAGDWIILENLDRLSRQGIDKTQEIIKSILRHGVKIVSLQDGLELDSGSLNDLVAVIRIALSADLAHKESLKKSERVSAAKASQRELAKQGKAIGKRLPYWLERDGYSYQFNDGVDAVRLMIQLRTDGLGFHKIAMALNASEFKPRWADHWSDTTIRNILSSPALYGRYQFRDGDGVDDYYPALVSYAEFKAFQSTFTASAGGQEHHNHLFGLVRCGACGGAMSKKVSKRKVAGEWKHYKGWICTKTLSGACAQKSPMMDLDTLVIKAVKRLKVSDSKKVSREANQLDQEIDTKKARLYEITQALVSGNGSVSVLSAAASTLERELKDLLVQRKDSVSTSQSEIQTLYDLRDDPKLFNVALRRVVDRITVSHKGSSTWHVVIHQRNGHLISVAAFRKSQRSPWQYLFGNTAEIAEL

SEQ ID NO: 14591 - protein, 539 aa, synthetic construct
MKAGIYSRKSMFTGKGDSVENQVQMCKDYGNRLNVDEYLIYEDEGYSGGNINRPKFQELLQDVKKKKFDVLICYRLDRISRNVADFSSTLELLQDNNISFVSIKEQFDTSTPMGKAMVYIASVFAQLERETIAERVRDNMLELAKSGRWLGGQTPLGFESEKISYFDAEMKERTMYKLSPEPKELELVKLIYNKYLETGSIHLTLKYLLSNNIKGKNGGEFASMSINDILRNPVYAKSNEMVLNYLEDKGMNICGTANGNGILIYNKRNSKYKKKSVNEWIAAVSKHKGIIPANTWLEVQKTLDKNSKKDTPRQGTSKKALLSGVLKCSRCGAPMRVTYGRKRKDGTSIYYYTCTMKAHSGKTRCDNPNVRGDYLEKNIITELKNLNSDVVIKGLEEHKKQLAATTENSIIKNISKEIEEKKKEMDSLINKLSKIESDIASEFVLSKVDSLGKEIKELEVNLLKRTDKKKENCDIELNIEIVLQAIKEFNDFFNSVESFKDDELTIQRKRYLLERAVDEIRIDGETNRIDIDLWRAKKK

SEQ ID NO: 14592 - protein, 540 aa, synthetic construct
MKTIAIYARKSLFTGKGDSIGAQVDTCKRFIDYKFANENYEIKIFKDEGWSGKTTDRPDFTNMVNLIKSKKIDYVITYKLDRIGRTARDLHNFLYELDNLGIVYLSATEPYDTTTSAGRFMISILAAMAQMERERLAERVKSGMIQIAKKGRWLGGQCPLGFDSKKEIYIDDMGKERQMMKLIPNKEEIKIVKLIYDKYLEIGSMSQVRKYCLENSIRGKNGGDFSTNTLKQLLTSPIYVKSSDNIFKYLESQNINVFGTPNGNGMLTFNKTKEIRIERDKSEWIAAVGKHKGIIDDNKWLQIQQQLQQQSEKQIKSSGRQGTTSTGLLSGIIKCEKCSSNLLIKTGHKSKKNPGTTYSYYVCGKKDNSYGHKCDNKNVRTDEADSAVITQLKLYNKELLIKNLKKALVQNKKADTDNIEILESKLKEKGKAVSNLMKKLSLVDDENISNIILNEITNINKEINDIKLQLSNETVKINEVNKATLDTEIYIKILENFNEKIDGITDPIEKRNLLKSALESVEWNGESGEFRINLIGSKKK

SEQ ID NO: 14593 - protein, 588 aa, synthetic construct
MKTVAIYSRKSKFTGKGESIENQVQMCTEYIKQRLNKDTEILIYEDEGFSGGTTNRPKFKEMIKDIKSKKIHILICYRLDRISRNVADFSNTLEILQENNCSFISIREQFDTSTPMGRAMIYIASVFAQLERETIAERVRDNMLELAKNGRWTGGKIPLGFTSERVKYTDDTGLQREYSKLKINKEEIKFVEFLYKKYLELGSLHKLEVYITQNELKSRNGIMFEKSSLKLILQNPIYVKANYEVINYLKENNWTIYGEIDNKHSLLSYNKTEQSFKNGKHTKVKKSENERFVAISNIEGFINPDLWLNVQRQFDKNRTRFPRLGKTHNALLVGKLRCGKCKEYMLVQHGRVSKTTGKKLFYYTCSLKRKSHKKLCDNGNAKADYVENLVINSLKLLSKSKKKFINGLKILYKNKLKSNETSIERLSLEKSLNEKKNQIDNLVLALSKSSEIEDILLDKIKSLKNDCVEIENKIKNIETSTKEQKLNNINLSLIESIIDECSMIDQLSRNEQKRIIDILIDTIYWYGSGNGKGKIKIKFIGADENTKEIVLSEEKLQQRMLQFYSPSTCKINDSFYLKLLVNFLFPLL

SEQ ID NO: 14594 - protein, 434 aa, synthetic construct
MLICYRLDRISRNVADFSSTLELLQDNNISFVSIKEQFDTSTPMGKAMVYIASVFAQLERETIAERVRDNMLELAKSGRWLGGQTPLGFESEKISYFDAEMKERTMYKLSPEPKELELVKLIYNKYLETGSIHLTLKYLLSNNIKGKNGGEFASMSINDILRNPVYAKSNEMVLNYLEDKGMNICGTANGNGILIYNKRNSKYKKKSVNEWIAAVSKHKGIIPANTWLEVQKTLDKNSKKDTPRQGTSKKALLSGVLKCSRCGAPMRVTYGRKRKDGTSIYYYTCTMKAHSGKTRCDNPNVRGDYLEKNIITELKNLNSDVVIKGLEEHKKQLAATTENSIIKNISKEIEEKKKEMDSLINKLSKIESDIASEFVLSKVDSLGKEIKELEVNLLKRTDKKKENCDIELNIEIVLQAIKNLMIFSIVLRVLKMMN

SEQ ID NO: 14595 - protein, 540 aa, synthetic construct
MAQAATAKKVVVVPIKTMDIVEGIQSIQKKKVAAYCRVSTDSEEQKESYTNQVNYYTQYIQNNLEWEMADIYADEGITGTNTKNRTHFNRMIQDARNGKLDLILVKSISRFARNTLDLLKYVRELKSLGVAVFFERENINTLDTTGEVLLTILSSLAQDESRNISENSRWGILRGFQNGKVFCNTTRFLGYDKDEHGELVINEPEAEIVRRIYEEYLDGKSYQAIARGLMRDHIKTVTGGDTWWDSSITLILTNEKYYGALLQQKTVTVDFLTHKRIKNRGQEQQYLIEDNHEPIVSKEIFEAVQKEKARRAKLKGNVMGESKRYSSKYALSSKVYCGCCGAIFKRRTWNSNNPSKKVVWQCKTYVNEGKVACDAKSVDEQVLHSAFVRLFNRMYENKKEFIKTLKGNIESILSRKVEQKSLLDIEGQMQQLKSDLKELVNLKLRNQMDESVYDEETNRLSSELNELRQQMVILEEEHEQQAKIKERVDEIIQLLSSRQDILEQFDDNLFNALVEKITILSPAHFVFTLKSGMSIDEILD

SEQ ID NO: 14596 - protein, 538 aa, synthetic construct
MAQAASAKKVVIVPIKTMDIVEGIQSIQKKKVAAYCRVSTDSEEQKESYTNQVNYYTQYIQNNLEWEMADIYADEGITGTSTKNRTHFNRMIQDARKGKLDLILVKSISRFARNTLDLLKYVRELKSLGVAVFFERENINTLDTTGEVLLTILSSLAQDESRNISENSRWGILRGFQNGKVFCNTNRFLGYDKDEHGELVINEPEAEIVRRIYEEYLDGKSYQAIARGLMRDHIKTVTGGDTWWDSSITLILTNEKYYGALLQQKTVTVDFLTHKRIRNKGQEQQYLIEDNHEPIVSKELFEAVQKEKERRAKLKGSVMGDSKRYSSKYALSSKVYCGCCGTIFKRRTWNSNNSSKKVVWQCKTYVNEGRAACDAKSVDEQVLHSAFVRAFNRMYENKERFIKTLKGNIESVLSRKVGQEPLLEGKMQQLKSDLKELVNLKLRNQIDEIVYDEETNRLSNELNELRQQKLTLEQEHEQKAQLKERVDEIIQVLSSRQDILEQFDDNLFNALVEKITILSPAHFVFTLKSGMSIDEILD

SEQ ID NO: 14597 - protein, 618 aa, synthetic construct
MAGIKEEKKIYLVGIYCRLSKDDGTDNESASIATQKSILTDYVKKQGWHIAKTYVDDGYSGTNFQRPSFQNMIKDIESGLINCVITKDLSRLGRNYLDCGLYLEVFFPEHNVRYIAVNDGVDTLNKSAMDITPFRNILNEMYAADISVKIKSAYRARFQQGKFMGTTAPYGYIKDPADHNHLLIDDKVAHVVKEIFDLALKGNGVAKICRHLNKQHILRPAAYAAERGETGFERHFEGNEDKRYIWSGNSVRSILRSPIYAGNLVGYKRIAANMKSKKRPSKLPEEWEVIPNTHEGIVTQEEFDIVQQLITSRRLPQNKGGFVNIFAGVIKCVDCGCALRAMNVHRRKRPEIIDCVQYSCNNYARNGRSECSAHNIEARDLFNAVLAHINCFADMAVNDEKAVRAIEKRLTETDQSRAKALEKERKKLNKRLAELDRLFSSLYEDKVMERITERNFEMMSGKYQKEQLEIEARLKEVTETLNESYEKSRGIRDFLALIRNYQGLKELDATVINALIDKILVSEREKMADGTVKQEIKIYYKFIGFVDELHIIPTKRWAAMPAKNCTVCGVEYVPGSGASRYCPACAKKIRREKSNESKRRSREQKRIACMNCPQKMTD

SEQ ID NO: 14598 - protein, 515 aa, synthetic construct
MKTAIYLRKSRADLEAEARGEGETLAKHRSTLLKIAKEMNLNVLSVREEIVSGESLVKRPEMLALLEEIEDNKYDVVLCMDMDRLGRGGMKEQGIILETFKRSNTKIMTPRKTYDLNDEWDEEYSEFEAFMARKELKIITRRMQRGRVASVEAGNYLGTHAPFGYNIHRLNKRERTLTINSEEASVVRMIFDWYANEDMGANAIRSKLNDLGYKSKLGNEWNPYSILDILKNNVYIGKVTWQKRKEVKRPDAVKRSCARQDKSDWIIADGKHEPIIPESLFEQVQEKLNSRYHIPYNTNGIKNPLAGIIKCAKCGYSMVQRYPKNRKETMDCKHRGCENKSSYTELIEKRLLEALKEWYINYKADFEKHKQDDKLKETQVIQMNEAALRKLEKELVDVQKQKNNLHDLLERGVYTVDMFLERSNVVSDRITEITSTMENLKKEIKTEIKKEKVKKDTIPQVEHVLDLYFKTDDPKKKNSLLKSVLEKAVYKKEKWQRLDDFELVLYPKLPQDGDI

SEQ ID NO: 14599 - protein, 507 aa, synthetic construct
MKRVISYFRFSSEKQAKGDSLRRQSKMVTDWLKAHPEYYLDESLTFRDLGVSGFTGKHLKGGLGDFLTAIEKGLVKAGDTLLIESLDRLSRQAVDRASELLRNILRSGVDVVTLSDGEHYTKESLRDPLSLIKSILIMQRAHEESLRKSERIQAAWNRKKELISEGIKISKRCPAWLKLNDDRKSFSVIPEKVETVKRCFQLRLEGKSIWDIVRTLNDEGHLSLNQYKAGKFGQTSVQDLLKNRSVIGYFTPKGCEEISGYYPAIIDETTFYKVQQLSHYRYGRKPVSDKPLSVNLFKGVIRCSECGHALIITGFSDTRNGIYRCPLRNENRCSAKGLSRKQTDGTLLALLSRLDRFDSDTTNTIDTLKLHREHISSNIEKLVQLSLEIEDLNAITNKLKQLKNELSQVDADIEKETQRLKSIDVGCLSDCDLTTKAGRIEAQLIIKSAVKEVVLNTAKRRCKVTFHNGRAITLPITENPSEDVTEAIQSLSEVTERGLIDVDVVAI

SEQ ID NO: 14600 - protein, 605 aa, synthetic construct
MVPPTFAPARPAGFDAFELPQIETIAASYVRQSSAKSDKTEASPMVQRDTNEAEAGKREARFFRHFEDIGVSGWDPDAYREGFEAMLTAARNRLFNMLVVYDVSRFSRREVADAIPIVTELHRLGITIVSVMDGVFAPRDTMALIYLIMRLDAVHQESQKKSKKVRDVKAAQRAQGSWLGGQTTYGFQSEKFFSPDSKYPLYRLVHVPKEAANLRRIWATIKEHMHIPIQPRKAHPGSLSGICTDMNERGVPTRGRNKGKERKNSQWGVRTLKGILMNPVIAGMSAEPVYRVKEDGTRTNTLIGYRINRDDDGRPVMICEPIIPPAEWYQLQDWLNGRGQGEGLARGESLLSGLRDAEKKPVSVCECNRPLKGLNSGPKPRYKCTRDSQAKPAKGEHTSGNSAMQSHVDDHVARKVFALIQDATRSDPAPETVLAVRAATLVFSQGQEDPKTAAERAELKAERADAERAVEELYDDLEAGLYDGSVGRERFKKRKENIEARIERATKALEGLSAPESVELPLAAWLHNDGDSTDPLGEGSWWASADQDERRKLIALFVQRVKIKRTGNAHGGRVRGGYKIDDRVVVEFVKLVDAEAETDAFELSA

SEQ ID NO: 14601 - protein, 522 aa, synthetic construct
MARPRKPKPAPVRRGRPAAEQKAVLYARVSTAEQEKEGFSIDAQVKLIREYAEKQGLAITEEYVDIESAKKTGRTQFEAMLKFLRARAGVRHVLVEKTDRLYRNLKDWVTLDDFDIEIHLVKEGTVLSRDSRSSEKFMHGIKVLMAKNYVDNLSEEARKGMLEKAKQGMWPSVAPIGYVNVVGPLGKKIIVPDTNAGSIVARVFEWFETGAYSLKEVTKMARDEGLRYRRSQLPIGVSTIHFMLRNRLYAGAFEWAGRLYQGTHEPLVTTETWQNVQDVLDGRSGGNLRAEPRRFAFTGLISCGHCGCAVVAQMQRGRYIYYHCSGFKQKCPERYVREETLAAAFAQQLARLEMNDTVFALIERALRDVHSESSRERTDTIARLRTESDRLQLRLDKLYVDHVDGRITADMHDRMAATWREERERCQRQMDALYSAEDALVDDGIALLDLARKAHKTFSIQSQSAKNTALNLLVLNSTWANDTLTVTFREPFGMLEEMSFLVPASEPAKGSENPPRTEWLPE

SEQ ID NO: 14602 - protein, 500 aa, synthetic construct
MARPRKPKPKAPRRDRSTTGHKAVLYARVSTPEQEKEGFSIDAQVKLIREYAAQQGLTVAEEYVDVETAKKTGRTQFEAMLKYLRAHAAVRHLLVEKTDRLYRNLKDWVTLDDFDIEIHLVKEGTVLSRDSRSSEKFMHGIKVLMAKNYVDNLSEEARKGMLEKAKQGIWPSVAPIGYANVVGPVGKKIIVPDSDAAPLVTRVFEWFETGNYSLKEVTKMARAAGLRYRRSQLPVGISTIHFMLRNRLYAGAFEWAGRLYQGNHEPLVTTETWENVQEVLDGRSISNVRAAPMRFAFTGLITCGHCGCAVVAQMQRGRYVYYHCSGFKQKCPERYVREETLTHAFAQHLARLRMDDSVFALIERVVRESHVDRSRERLETISRLRADLDRLQQRLDALYIDRLDGRITTDTHDRMATTWREERERCQHELEILYKAEDGYVQDAVALFDLARKAHQTFGTQTPDAKNSALNLLVLSSTWANGILTVTFREPFGMLEQISI

SEQ ID NO: 14603 - protein, 591 aa, synthetic construct
MEQGRKTKLYSYIRWSSDRQAKGTTLKRQTAKARQYANTNGLEYVEILDAGVSAFRGKNTSPESALGGFIEAVKNGAIPSNSVLYVESLDRLSRRTVRAASRLFDSLLELGLTIVTGMDGKVYTAKDVDENFPDFLMSLFLFSRANEESQTKSKRVKANAAALVKRHNSGLPTTIKSAGSHVFWVDASGHHTEAVKPDPIYWQAARKIIEFYLSGYTTHKICDYLDEHYPPPPVKLNRRSVVGAVRRWSYQLVRRMKTSEALIGNRTLVLDKNTKPPTTTTLEGYYPALCTPDEYGRLIDMAKNNRISQGKHKRRITLLSGMGIARCGHCGGAMTFFVSLGTIRYLCANGKDRVSDCKAWSVRGDIFEHTAIHALVRGYASMMSREKKWVEDLHSEIERKEGELTAVNKQLVQLGETILLVGNTETLINLMIRAEANKRELTTEVKQLRHRQIVADSKEGDIDHLSDFIGLLSNDLLEDVTHPHRANIREAIRAVISSARVTKRQNNSLSIVFDIHDGTRHTFEGGEERNTYIEFVQDLDTDGNPITYPDTEEVREAISKRQELESRLFAAVSASLEAMPPIDPSRFWSKR

SEQ ID NO: 14604 - protein, 524 aa, synthetic construct
MTQKTAIIYLRVSSVQQARKELPVESQLQYAQAKAKELGAVVVAIFTDNGISGRSDKRVDFQEAIAYCELNKPDYFIAWDTARFARNRIDAALYKRELRKHGTDVVYVSMSIDTKTDEGWFVEALLEVMDESTSRRISKDTKRSMMKNAEEGYFNGGRAPFGYKTVADGNRKRVDVLESEAVIVREIFALCQRGTGAQSIAVSMNNSGHTNRGRPWAKSTITNLLKNHAYAGYTIFNRRKHHSKTMEPEANWIKTKSRPAIIDEAVFMQIQQQITARAPVLDAGSPKSGHLFTGLLKCGICGCAMHIESATGRSKQYFYYRCGEAKRGGSCEGRRISAPAIDDFVAQTILNKILTADRVSTIIREIEKATGNWWKDREQRRETIVAEIRGAEKKRSNLFSVLELHGKDAPNLGDITIRLRAIKEQIETLERDLVTLEAASDPDLDINQEEIVQAANVIRTMVINCDDPRTVRTFFGTFVSKVVLEAAQIAIHYDPAKIMNHGISVVHNKNRWLPDLDSNQGPAD

SEQ ID NO: 14605 - protein, 522 aa, synthetic construct
MATSLVRAVVGARVSIFTDGKESQITQRTKGTAYAESQGWTVVGAFEDLDVSAIKQSPWDRPDLKQWLTDRADDWDALVFAKTDRVFRSAADCVKLSEWCRDHKKILVLVDDGIKLDYFHPDSQQDAFAGAMSKVFLILASVFAEIEGQRFVQRALDRVTQYRHQPRWAYGVPPYGFQVVDRPEGGKTLGHDLEAQQVLQGIATRLLSGDSLTRITAELNETGVLSPADRLRQRTGKELRGSRWTVITVQTILTNPATQGIKTAKGKPVLDAGGEPVRVGPPSFDSETWGRIHSELAQRSQSGQQRRHSDNPLLGVAKCGVCGKNMRHFQRTKGGRHYRYYICGSTPKACPGVLINADNAELAVETSFLDVHTNRRIKERVWRAGSDHSAELEQTTNTITALWEDRALGLFTTPEDQDMFRSQMAALVAKRDALAQTPVIKAGWVDVETEQTYGAVWPDATPVERRKMLTDAGMKLTVYRANKYETYVDLDKAIGEGSVGEHLHSELEARAAEERRRWGMPD

SEQ ID NO: 14606 - protein, 461 aa, synthetic construct
MPKRAALYIRVSSEEQARHGLSLGEQRADLLNYAKEHGYSVVGIYADEGVSARKAMSRRKELQRMLADVEAGCIDIIIIKCLDRWFRNVADFYKVKERLDACGVDWVCSREDYNTTTPNGILMLNLKLSIAQHESDQTGERIRYVFEGKRARRQFVTGLIPLGLKVADGYFARDDKTAPIVECAFNHILNGGSTRSLVQVLYDKFGHKITKAGLFDLLRNRSYIGEVYGIPDYMFSLIPHDVFFRVQEILSRNTKYTRSGRIYLFSGLLRCPDCGRNLAAYRGRRVNSDGERRFQYQCGYRVNRSMPGCHFARGMYEDKIEQYLLDNIQSLIREHIITMESFCGQQGRERPESKIDALKAKLSRLEDIYIAGLMDKDKYTKTYKEITQEISELSTLVARSLSIPSALREVADDRDFRSTYESLTRENKQRFWKSIIASITFDDTPDTRGKGAYIPYRVTFL

SEQ ID NO: 14607 - protein, 447 aa, synthetic construct
MLRCAIYIRVSTEEQAMHGLSMDAQKADLTDYAKKHNYEIIDYYVDSGKTARKRLSKRKDLQRMIEDVKLNKIDIIIFTKLDRWFRNVRDYYKIQEVLEDHNVDWKTIFENYDTSTANGRLHINIMLSVAQDEADRTSERIKRVFENKLKNNEPTSGSLPIGYKIKEKSIIIDEEKAPIAKDVFDFYYYHQSQTKVFKEILNKYNLSLCEKTIRRMLENKLYIGIYREHENFCPPLIDKNKFDEVQLILKRRNIKYIPTKRIFLFTSLLICKECRHKMIGNAQIRNTKAGKIEYILYRCNQSYARHTCNHRKVIYENKIETYLLNNIESELKKFIYDYELEDIPKVKNKVNKTNIKRKLEKLKELYINDLIDIDMYKEDYKKYTEILNTKEEKIEQRNLQPLKDFLNSDFKSLYSSISREEKRLLWRGIISEIQIDCNNDITIIPHP

SEQ ID NO: 14608 - protein, 495 aa, synthetic construct
MTARAALYLRLSVSKDDSTSLTVQEKDLRARAAAEGWTIAPEHVIRDDGISGAKNATGTAHALDLLRRGEVDVLLAWKFDRWSRAGIPALGRLMDVLASAPGARFVTIKDSVDSAAPFWGVIASILATIAEQERENVRTRVTASIAERVSVGRYTGGTTPYGYRSAPNPEGPGRILVHEEDEAAVVRDAAERILSGESVYSITRDLNAHEIPTRRGTTWSIQAVTQILTADTALGRVTHRGQLVRDEEGAPVEVWPPLVDADTWHRLAERLQVRRPLQTADGRPRRRARSNRLLSGVASCGLCAAPLYVKKNGTGRIAYACGQKSNGRPCPGVSVSADLLDTHVAGAFLAAVGPSEIFDRVEISTDDVDLAEVERSIAQLKTAQDDDDADLHTIAEQLGALKARRAAIKARPHRPTVRLVPTGETFAEAWERLTVADDVAGLRALLSPNVAILTIGKGRRGAHGLDPARVTLVAQPAFPIGAEVDEAMPAGRLVA

SEQ ID NO: 14609 - protein, 606 aa, synthetic construct
MKKVFVYHRVSSDQQLDGSGIARQAELLEAYLKRTNILAEMDDPEPVIITESGGVSAFKGHNMLITSGLGAWMQEVRAAMWDGSHLVYENGDRFSRQNPFTVIGYINDLINHNITIHDATMNIIISRQNSAMLPMVLMNAQRAYDESKYKSDRIRKGWAKKREQAFNKGTIVTNKRPQWIEVEKDKYVLNEKAAVVKEIFALYQTGMGCPTIAKKLQGKEGEQYKFNRPWTGELVHKILTNRRVTGKIFISETIRNHADIENPVTQKKYDMDVYPVVINEEEFELVQELLKSRRPNAGRVTVKKDGQEEVLIKSNLFSGIARCTECGGPMYHNVVRAKRTPKKGDPKIEEYRYIRCLNERDGLCENKAMTYETVERFVVEHLLGMDLITVMKEQEFNPEIEVLRIQIDQVKEQITNYENGIERRKSAGKIITFDMREDLDDAKSELERLLARQASLATVQVDVAVLQDVNVTELYNVNNVDIRTRYENELNKIVSTIRLKRNGTSYTIDISYKQNELKRHVLFVENKKKEQTLISELIIEDVDGGKFYYTPSFMIRLEDGEIRFQHTNEDLSIVDYSLLLNYVDAVDRNDTVGVWMRNQFNFLTSN

SEQ ID NO: 14610 - protein, 484 aa, synthetic construct
MRGTEYMQQPRFAIYTRISRDRVGAGLGVERQQEDCEALVAQLGGVVVAAYSDNDISAYSGKHRPGYESLLHSVKAGDIDAVAVWHQDRLLRRTIDLEKYIDLCQPLGVATHTVKAGTFDLATPSGRAVAKTLAAWAAYEVETSTDRVKASKLQAARAGKTSGGNRAYGWNQDGMSLREAEAAVVREIVDRFIAGDSWNRIAVDLNSRSIPTAKGKMWSAINVANVAKLKRHYGIRDHNGVEYEAAWEPLLSRDKYEDLQLAIKRGQVLYGKRSYARKHLLTGFVHCGLCGTRMRIINAQQRDGSYSPAFSCRKNDHRGQEVGCGKVKRKKDPVELLVIDCIMYRLDTPEVSGLLSADAATPELKRLMREHETQRQRLEEILSLYSTNELTHDEYKVAKASAQSRLDTLTREIERTSSKRITANVPSGKTLRETWDQADLVWKRQLLDTLIEGVYIHPKKPGDGKAKFRGFIFNPDRVEIRWKI

SEQ ID NO: 14611 - protein, 452 aa, synthetic construct
MKAAIYIRVSTQEQVENYSIQAQTEKLTALCRSKDWDVYDTFIDGGYSGSNMNRPALNEMLSKLHEIDAVVVYRLDRLSRSQKDTITLIEEYFLKNNVEFVSLSETLDTSSPFGRAMIGILSVFAQLERETIRDRMVMGKIKRVESGLPLTTAKGRTFGYDVVDTKLYVNKEEAQHLQLIYDIFEEEKSITFLQKRLKKLGFKVKSYSSYNKWLMNDLYIGYVSYGDKVHVKGVHEAIISEEQFYRVQEIFSRMGKNPNMNKESSSLLNNLIVCEKCGLGYVHRAKDTVSRGKKYHYRYYSCKTYKHTHELEKCGNKIWRADKLEEIIISRVKNYSFATRNLDKEDELDSITEKLKTEHSKKKRLFDLYMNGSYEVAELDKLMADIDAQINYYNSQIEANEELKRNKKVQESLAELATVDFDSLEFREKQIYLKSIINKIYINDEQVTIEWI

SEQ ID NO: 14612 - protein, 520 aa, synthetic construct
MRKITTLDVTTSSAVKPKQKVAAYIRVSTSNEDQLISLEAQRRHYKTLIEKNVEWQLIDIYSDEGITGTKKDRRPELIRLISDCEKGKIDFILTKSISRFARNTIDCLELVRKLMDLGVHIYFEKENINTNSMESELMLSILSSLAENESVSLSENSKWSIRQRFKRGTYKLSYPPYGYDYIDEQVIVNKKQAQVVKRIFNSVLEGVGTERIARQLNKEKIPTKRNGKWTGTTIRGIIKNEKYTGDVLLQKTYTDEHFNRKVNQGELDQYLIENHHEAIITHADFEVANRMLEYQASQKNIAVGSRKYLNRYPFSGKIECAECGDTFKRRIHTSTHSKYIAWCCSTHIKNKDECSMLFIREERIHQAFITMMNKLKFGYSYVLTSLSKQLETSNQDETYQKITEIEEQLEVIKDKLNTLIQLMAKGFLEPAIFNEQKIELSQRHMKLKEEREQLLYLINDGSNQLSEVKRLIKYFKQGKFIDAFDEESFQDIVKKIIVYSPNEIGFHLNCGITLREGVKR

SEQ ID NO: 14613 - protein, 522 aa, synthetic construct
MKRAIIYVRVSTTRQADEGISIDAQTDQCKKKAQELGASVLQIFRDEGITGTSAVKRQAFQRAIHYCAVNDVDYFIVWSTSRFARNKLDAARYKLLLRESGTRLVYASMNIDSDTDEGWFTDSIMEIMDEQVSRQISRDTRRAMLKNAEEGWFNGGRAPFGYQITSQGKRRKLVPNDAEKPLVQEAFRRFAAGEGAIAIARSFTGRGYTRRGAEWQAASLSHMLKNRVYIGQTVYNKRSGNKPNPPEEWIIRQTHEPLVSEKDFEAVQKRYRPDYKQTGSPSSRFLFTGLLRCGHCGKAMSIETATSKTKRRYNYYNCSGFKKGCNCISRRISAEKLDDYLLNIVVDKLLTQEVVSDFIGEAYRKYVEKRTNNAEQRKLLQQELTELRRRRNTLFELVESGLSGSDSRSLLERVAGYDEREQTLLIELDKLAGAPDVDAIPEIDVDSALRTLKTILLNTANEKKLRILLQSFIRKIDINPTEVVIHYNPERIINDSIGVHSTESWHAQGESNPRYRRERAMS

SEQ ID NO: 14614 - protein, 598 aa, synthetic construct
MRKINKIEPLMPALPTRKKVAAYARVSMESERLQHSLSAQVSYYSELIQSNPEWEYAGVYADDGITGTKTNREEFQRLLADCEAGKIDIILTKSISRFARNTVDLLETVRHLKELGIEVRFEKERINSLSGDGEVMLTLLASFAQEEIISLSNNVKWGTRKRMEQGIPNGHFRVYGYRWEGDQLVIVPEEAAIVRRIFQNFLDGKSRLETEREFAAEGITTRDGCRWVDSNIKVVLSNITYTGNLLLQKEYVEDPLTKKRKKNRGELPQFYVEDTHEAIIDKETFDYVQAEMARRKELGAFANKSLNITCFTSKLKCSRCGCSYVRNQRANRTKHTSTYDDTIVVWGCGTQKKKGGRCSNKDIPERVLREACAAALDLEDFDEDIFLERVDTIQVLDGQVLEFHFYDGTVSQIEWVSTAKKDCWTDEHKDRQREWMRNYMANATDGRYSEFTTRIRCDNCGSTFRRNTQPSKSADGGKMHYWRCPTSGDCVTTGIREDRLKELTASVMGLAEHDAEAFKAQIEYISVAAGMVLTFHFFDGREESIQYNTKRQGTAWTPERREKFKSSMQGKYTEERRQAMSENMKRIRSEKHWSSKRK

SEQ ID NO: 14615 - protein, 527 aa, synthetic construct
MVVQKKVTTIPATLTRFTATPINQQKKRRVAGYARVSTDHDDQFTSYAAQVDYYTNYIKGRDDWEFVDVYTDEGITGTSTKRREGFKRMVADALDGKIDLIVTKSVSRFARNTVDSLTTIRQLKEKGIEVYFEKENIWTFDGKGELLLTIMSSLAQEESRSISENCTWGQRKRFADGKVTVPFNRFLGYDRGPDGNLVVNPEQAVIVQRIYAMFLQGISYHGIAKQLTVDGIPTPGGKDKWSISTIRSILSNEKYKGDALLQKSYTVDFLTKKTKVNEGEIPQYYVEENHEAIISPDVFAMVQREMAKRGRGKNYHSSVHAFSSQIRCGQCGCWYGSKVWHSNSKYRKTVWQCNHKFDNDEHCTTPHLTDEDIQNAFLSAANKLLATKDEVIANGHEMVELLFDTSELETEQTTLLEETQLISDMVQQSIYENAHVALDQAEYQKRYDSLTHRFDTAKERLETVMAQLQQMQLQRADIETFLQSFKELPDTLTEFSAENWHALVDYATVYSADDIRITFKHGQEIKA

SEQ ID NO: 14616 - protein, 565 aa, synthetic construct
MTRVALYARYSSDNQRDASIEDQFRICREHAKREKWKVIGAYKDAGISGASMILRPGIQTLLQDAQAGHFDIVLAEALDRISRDQADVATLFKHLKFAGVPIVTLAEGEISELHVGLKGTMNALFLKDLAAKTHRGLRGRVEDGKSGGGLCYGYRVVRQFDAKGEQIRGDREIDAHQAEIVRRIFRDFAAGIGPRAIAKTLNDQGIAGPEGKLWSDTTIRGHVKRGTGIINNELYIGRLVWNRQRYVKDPSTGKRVSRLNPESEWVITDVPDLRIIDDALWQATKARQSVIAEKYVNVTEAVRAHHKRNRLNGTRRPKSLLSGLLFCGLCGGPYALRGSDRFACSSHVTNGSCTNSRTIPRPDLERRVLSGLKDRMMAPEIAAEAMRAYAEETNRLNRERRSNTDVWQVEQVKVEKQIRGIIEAIKEGMFHPSMKAEMDTLEARKAELASLLSDVPNDVPDLLPSASAIYARKVGRLTDALNRPEERLEAAEALRALIEKVVLTPGPNRGEIDAMLYGELGTILTWIERQAIGKAKNTNTPGAVLTGVSVSVVAGAGFEPAAFRL

SEQ ID NO: 14617 - protein, 459 aa, synthetic construct
MYLRISLDDERTGLGIERQRHDSAALCKRLGWEVAKVYADENLSAYKRSVDRPAWEELLADLEAGAIQGVACYDVDRIARQPKQLERLIDLYESKRRLVFATVAGEIDLSTADGRFLARLLVNVANKSSADTARRVARAQLQRAQQGKVAGGGHRPYGYERDNVTVVPAEAAVIQDAAKRVLLGETLISICKSFDGQYPTPGKSVKWSRTVLRAILLNPRIAGLRSYKGSVLIGEDGSPVKAIWEPIVSVETWEQLTSLLTDKSRQANGGRVDRKYLLSGLLACPCAARMSGATSKGVPEYRCTPDRGCGRTRRKAKALDEYVEKELLDYLERQSMEPVGDVSPESVLDRDIANAEQSLSALIDEWTAGRISDAVFFAAQARKEAALNALKGERAQEKRRQTMKAPVGAGVRQKWAGLTLPQKRAILFEVLQAVKVHPKPVTAPKRFDPYYYELIRRTD

SEQ ID NO: 14618 - protein, 495 aa, synthetic construct
MRLAAYCRVSTELGEQLESLENQKSFFEEFARRHHYDLVEIYADEGISGKQIHNREAFLRMLSDAGQHLFDMVVVKDISRFSRNTVDFLNAVRQLKALRIEVQFLSNNQTVLGNSEFILTIFSALAQEESANLSKRVKFGKRVNAKKGRVPNVIYGYDQKDTFTLRVNEPEAQIVREIFTLYAQDGWGVRKIAQHLNESGVPSKRGYGWTPKTIRRMLENPLYIGILENNKSETVDFLTGMQVKLPPEEHFFHDRPELAIVPRELYDRAQREIAARRKPEDCEGKLAARHSARRLFSTLIRCGVCGYAFTRVQYTYQNTYVKWRCSGKNQYGAKFCKNNLTIDEADLTGALDQYLASRIADRGAFAARVAAACRGNAPPDAEKARQKRLERIARQKQRYRTLYANELLTLEELKEKLAALGAREAELSDQQQSQPITSGHVLEELRLLHWTNAELRELVETIEARPDGRVVIRFRTLAPAGLPAAKPRAAVGRAP

SEQ ID NO: 14619 - protein, 588 aa, synthetic construct
MKKAVIYARFSSDNQRDESIDAQVRACQDYAEKHDLEVIKIYADKAQSATSDKRPEFLRMMNDAEDSIFEAVIIHKLDRFSRDRYDHAYYKRKLKRCGIRLCSVLENLDDSPESIILESVLEGMSEYYSKNLARETMKGLRETALQCKHTGGTPPLGYDLASDNTYIVNEHEAEAVKIIFTMYANGEGYSKIIDRLNSLGYKTKRGTSFGKNSLSDILRNEKYIGNFIYNRSASYGRSGPRNTHANKADEEIIRIPGGIPAIIDTDLFYKVQNKKRTNVGRPGAGKAKHDYLLSGKVVCGKCGGSMVGESARNKKGSYDYFYVCATRKRKRTCDKRAVASHRVESTVIEYLENEVFSEKKLPEVAQKLFDSQEKSKAEISDSQKFLKSKLTDVSAKIDNIMQAIESGIFTTTTKGRLVELETLKNELLEELHKSENESNRDIMPLENIVASLKKYQNLSTLPTSTQREAIEIFVDKVICYDDSADVTINLNIILHNKNSEYPSDLPAREGSERYSDVSGGAEGNRTPVRKPVHISFSECSRFFKIPLPRRQPTGYAARYPLIQSCVRGRSARSFTTNRRPIRGRGTPR

SEQ ID NO: 14620 - protein, 552 aa, synthetic construct
MTAKRQKLIRAVAYYRRSTKKQETSIADQRKAVLKYAEANGYEIVDEFIDDGISGDATEKRFAFLRMREEASSRKFEVVLCWDQDRFGRFDSLEAGHWCYPFRQAGVRIVTVNNGPIDWEDFTGRMMYSMQQEAKHQFLQDLSRNVLRGQIEAAKAGSWIGSPPYAYRIEGESKNKRLIPGDPVHVATVKRIFSEYVEEQRTLTDIARRLTTDGILSSGGSKRWKPSAVRVILANPAYTGLFRSNTYSYSKYHGYRDGQITKGGRRGPNDESDWIVFKDHHPPLVEKRIFNRAQRLLKRNEGRKCRYSRDENPYLLSGLLVCGNCGSLLWGIKNRGQSKVTTPQRYECSKRRREGKNACEGCTVGEQDVLDYLVQFIEENFIPTKDQTRLLSTAKRGKLKQSDLPKGFKKLKRLLVGDRGSASIAKDTHRRLADVEAQIAKAQRNLVLLDANNIPAAEERISQLSKLRDDLKDAAQQTPSENDVNELVSDVLTKLFWLCSLKEDEMRPVLNEIHRITIHTTGRGGGSARRYIFDHGDIEFAGTSGCSPHPEP

SEQ ID NO: 14621 - protein, 522 aa, synthetic construct
MKRAIIYVRVSTTRQADEGISIDAQTDQCKKKAKELGASVLQIFRDEGITGTSAVKRQAFQRAIHYCAVNDVDYFIVWSTSRFARNKLDAASYKLLLRESGTRLVYASMNIDSDTDEGWFTDSIMEIMDEQVSRQISRDTRRAMLKNAEEGWFNGGRAPFGYQITSQGKRRKLVPNDAEKTLVQEAFRRFAAGEGAIAIARSFTGRGYTRRGAEWQAASLSHMLKNRVYIGQTVYNKRSGNKPNPPEEWIIRQTHEPLVSEKDFEAVQKRYRPDYKQTGSPSSRFLFTGLLRCGHCGKAMSIETATSKTKRRYNYYNCSGFKKGCNCISRRISAEKLDDYLLNIVVDKLLTQEVVSDFIGEAYRKYVEKRTNNAEQHKLLQQELTELRRRRNTLFELVESGLSGSDSRSLLERVAGYDEREQTLLIELDKLAGAPDVDAIPEIDVDSALRTLKTILLNTANEKKLRILLQSFIRKIDINPTEVVIHYNPERIINDSIGVHSTESWHAQGESNPRYRRERAMS

SEQ ID NO: 14622 - protein, 520 aa, synthetic construct
MKKITKIEANQKEESILRVAAYARVSTDEDAQLVSLKTQKSHYEKMISENKSYTFTGLYYDEGITGTKKECRDGLLKMLKDCEDGKIDFILTKSISRLARNTTDCLEIVRRLLDLNIGIYFEKENIDTRTMESELMLSILSSLAESESRSISENNKWSIKKRFQNGTFIISSPPYGYENIDGKMVVNEEEGKIIKEIFKQYLSGKGTHKIAEDLNKRKIKGQKGASWHGSTINGILKNEKYIGDVIYQKTYTDENYNRHKNNGEEDQYKIIDNHEAIVSREDFEKVQDLIKIRAIAKGNGKDTKRYQNRYSLSGKIKCGECGSSFKRRHHYNGKDKYIAWTCSEHLKDINKCSMKFIKDKGIKLEFVTLVNKLIFGKDRILMPLLETLKRVDSNEEVEKINKIEESLEKIKERKEVLNKLIRSGVLDASIYAKESSEISSEERNLLMEKERSKKAILGNDEEIRELEKLIGILDKSKMIDHFEDDLLEEIIDHIQVVNRETLDFHLKCGLVLREEVRKDV

SEQ ID NO: 14623 - protein, 520 aa, synthetic construct
MNNKVIVIPAKKKKGNSIKESEKKKLRVAAYARVSTDSDEQATSYDTQVDHYTNYIKRNPDWEFAGVFSDEGISGTYTKKRAGFNKMIEEAMEGNIDYIITKSISRFARNTLDCLKYIRKLKENNIPVYFEKENINTMDAKGEVLLTIMASLAQQESQSLSQNVKLGFQYRFQQGQVQVNHNRFLGYTKDEDGKLVIVPEEAKIIKRIYREYLEGASLRDIKEGLEKDKIVNGAGNKKWHVSNLNQILTNEKYMGDALLQKTYTVDFLNKKRVKNDGIAPQYYVENNHEAIIPKEIFMRVGEEMYRRANMVSGKGKRRIYSSKYALSSIVYCSKCGDIYRRIAWNNRGKKYTVWRCCTRVTHGPEACEARTIREEDLQEAVVEAINQLISESSQLKEIIKENIEQVITWNVSSRIEEIDKEMLKVQEELLKVANAKKDYTDLADKVEELRNEKEKILLNIAEEKNEQNRLKELEEFLDNQELEIESYDEDLVRKLVDKVVVYDEELKIVLKSGVEVNVCV

SEQ ID NO: 14624 - protein, 595 aa, synthetic construct
MNTKVKLIKASNTGARNRNALHLDLKRVAPYCRVSTDSKDQLESYKSQVDYYTNLIKNNKNWTLAGIYADEATTGTTATKRADFMRLISDCQNGDIDMIITKSISRFARNTLDTLKYVRLLKENNVGVVFEEENIDTLTMDGELLLTILSSVAQQEVENTSAHVKKGLKMKMEKGELIGFQGCLGYDYDPITKSISINEEEAKIVRYIFKRYLEGNGGSVIGRELEEQGYLTPRGKTKWSDTTVLGVIKNEKYIGDILMGKTFTVDPITKRRLANFGESDKYHIENHHEPIISKEDFEKAQEIRLRRAQNRNTIANKDRKREKLSRQYAFSSMLECGFCGEILSRRTWHTSSIYKKINWQCVKSTKKGKKYCPHSKGIQEAAIEKAFVESYRQLCHADSTVIDDFLKIVEEEINDETLVKDLKKIESQLNRIISQERKLVDLHLEDSIDEEVYSKKYKKLTKQKEELLDEKKTLELTIKDENSIKERLKQFKKVLENREIIEEFNRTVFESIVDKVVVGRIDKDGTVHPYDLTFYFKTGVKDSQDSNNFKDNRKNAKDNDSDKLCSYKNNEDKKLCSQAKDNARGECCVDVKKIR

SEQ ID NO: 14625 - protein, 554 aa, synthetic construct
MKKKRAYVYIRVSTSMQIDGYSLDAQEERIKQYAKAYDIEIVDVYKDAGKSGTSIIGRNNFITMLDDIKEEKDNVDCVLVFKLSRFGRNAADTLNSLQVMEEHGVYLVSVDDGLDSSKDAGKLVITILSAVAEMERENIIAQTMEGRKQKAREGKWNGGFAPIGYKLQDGELIINEDEAKAIKMIFDLYTNSDMGANGVAKYLASLDIRKPIRQNGKSLYFSASLIRQILDNPVYNGKIAYGRRKTKKDKITGKISQEKADNYIISKGIHEAIIDDELWELTQKKRKSQAKKYEKINRGNDEKTYLLSSLIKCPVCGAGLYGNKSRKRKNNGEHYKDYYYYSCKHRQLMNGYKCNFSKQIKADAIDSEVATIITKIISNPSFAKKLEEKINIQIDTDEIDKIIDKHMAKERQLLGTKASLINQIDSLDFEDKHYERKFEDLNLRLDAIYDQLDYVELQISDSRKRKEAILEEKITSDNIYKILINFHKLYSVLSYVDKKRLFNQLIEKIEIYGEKTESGRWVKSLTFKLPLIDEDINLSLDNDSSVESVVLMSK

SEQ ID NO: 14626 - protein, 559 aa, synthetic construct
MKTKLYSYIRFSSMRQNDGSSYERQIRMAREVAAKYDLELVNDYQDLGVSAFKGANSKTGALSRFLDAIGRSVPVGSWLFIENLDRLSRADIVSAQELFLSIIRRGITIVTGMDNKIYSLDTVTANPMDLMFSILLFIRGNEESQTKRNRTNSSALIKIKAHQENPQNPAVAIEEVGKNMWWTDTTSGYVLPHPVYFPVVQEIVELRKNGRSTAEILDHLNETYTPPPAVSNKKHSKWSRAMVERLFHTRALIGIKEISVDGVNYELKDYYPRVIDDPTFYHLKKNIGARAWNFGDKEEVKPIPLLSGIGLLKCDHCGCAMVKVKGTNKRSDQYRYTCDATRSRRLDCEHPNWSFRGDQLEKAVLQLLADKIWIAEDKANPVPALKVQVDEISRKIDNLIALSAMTGATKELADQITTLNSERETLYNQIKMAEEEMYSVDSQGWEKLAEFDLEDVYNEERLKVRFKIKQALKRIGCSRIDRNKNLFVLEYIDGKTQRVVIENSRGTRKGQIFVDLKTINDRQILESNGLVLHPCLDMLTDKNWKPEEEIPGPLQEFGI

SEQ ID NO: 14627 - protein, 536 aa, synthetic construct
MKVPVWSYARVSTLSQVDGFGIQRQVQTINQFIQYLVLDHRLPFTLDVDTITQMVAEGKSAFKGKNWNPKTKLGQYRKQVMDGVVPESVLIVENIDRLTRLDPFQAVEIISGMINRGTTILEIETGMTYSRYIPESITVLTMQINRANGESKRKSIMMQKSHVNRYGKVSKVRPRWFDVVEVDGMKQYRPNDTAKAIQRMYGDYVNGIGAAQIVRTYGKTDNGKQWTLVTVLRALSDKRVADDARYPSIVDKSLYERVQAMKIATNKTGSTHQKNMLNIFSGMSRCPVCKQAIIVKRNSHGGLYTVCLGKRTNKTCTARSMAYNALERPLLEAIKGLDFSEVYNHEESNVLTLRDQWIQNERDIAAFRERLNKASRHEKFAILDELETISKEQEELSIRLKSLDAPKDVQLTYNDDKLDLNVEYRIELNNRMKKLIQEINIGRVDTSKSTYTIYCTIKYWTDKVKHLVIIDSESTRIGKGGANTLTTTLRSVSSINADGTFYGNPDEEAVSYWKKSVNQVFIEAGKPAPFDDSYST

SEQ ID NO: 14628 - protein, 606 aa, synthetic construct
MKKVFVYHRVSSDQQLDGSGIARQAELLEAYLKRTNILAEMDDPEPVIITESGGVSAFKGHNMLITSGLGAWMQEVRAAMWDGSHLVYENGDRFSRQNPFTVIGYINDLINHNITIHDATMNIIISRQNSAMLPMVLMNAQRAYDESKYKSDRIRKGWAKKREQAFNKGTIVTNKRPQWIEVEKDKYVLNEKAAVVKEIFALYQTGMGCPTIAKKLQGKEGEQYKFNRPWTGELVHKILTNRRVTGKIFISETIRNHADIENPVTQKKYDMDVYPVVINEEEFELVQELLKSRRPNAGRVTVKKDGQEEVLIKSNLFSGIARCTECGGPMYHNVVRAKRTPKKGDPKIEEYRYIRCLNERDGLCENKAMTYETVERFVVEHLLGMDLITVMKEQEFNPEIEVLRIQIDQVKEQITNYENGIERRKSAGKIITFDMREDLDDAKSELERLLARQASLATVQVDVAVLQDVNVTELYNVNNVDIRTRYENELNKIVSTIRLKRNGTSYTIDISYKQNELKRHVLFVENKKKEQTLISEVIIEDVDGGKFYYTPSFMIRLEDGEIRFQHTNEDLSIVDYSLLLNYVDAVDRNDTVGVWMRNQFNFLTSN

SEQ ID NO: 14629 - protein, 646 aa, synthetic construct
MLRPICYERVSSVKQVELGYGLDDQRSSIEDFLEKNTDKFTSERVFITDDGVSAFKNANISPESNLGKFLQDVRDKKFGKGDALIVLSLDRLSRRSSWTENTIQFIVASGIVIYDISTDLVLREDDNFSKILMEIILQRSHNESLMKSVRAKVAWQNKVMRAAANGEVVSNRMPFWLENVDNKYSVIEEQAALVVQCFEWYKSGFSTGEIVKRIGDPKWQMVKVSRLIRDRRLLGEHKRYNDEVISNVYPKIVDDELFIMANRMMDTVMVDKKKPAEDLLLEPEVVKQIFTLSEMGLGSGAIVKRLPEGWSTVNVLRVLRDKRVVEEKIIDNLTFDRVNEKLTKNGVANRIRKDVTIAQDDYITNLFPRILKCGCCGGNIAIHYNHVRTKYVICRTREEKKRCDAKSIQYIRIEKNILSTIMNVDFHNLINEESSNSSNVVDSLKVELLALRTEENTYQIKISERKSAGKKTSLPLMEGLTDVQDRIEETLDLISKSTNVQQLPVLNYDIDDLLDPLNVELRARVRKEIKQVVSKITYRVIDKYIVVNLQYFTDVLSHVLVIDNKRGGGNLISQIAIYVKDHITIYETPSFSLTAENEGMPQINFNNSEPLSQIDYSLLLNYVDGIESANTVAEWMRHNMKFLFTK

SEQ ID NO: 14630 - protein, 502 aa, synthetic construct
MPQQNNGIAYSYVRFSSKRQEQGDSVRRQTEMAEKYALEKGLTLSSKNFQDLGISAFKEGKRPSLVDMLDTIENGQITAGSTIIIEALDRLSRRGIDATLETVKDILRKDVQVVSLSDGLLLTKNSLNDLQSIIRIAVAADLAHKESERKSSRLRETKGQQRQAALAGKAINKILPFWLQRASERYEFSDKAHIAREIIRLKQEGKGSNMIAKTLNKQGVAGIRSSQWNHASITKMLKHPALYGAYQTGETTKERELIKLDLIENYYPALISKEDWLLIQSDQSKSTRGRRTTDNPYSGLLRCGCGGALVKRQTTVKNKLYVYHGCLNAKDGRCEQNISIKGLDQALKTILGRLEFKKRPTPDQSIHHERKQLEDRISNLNNKLLTLDDIPVSVIKTIGTLEERLKTVTDLILQNEREQRGIDAVQSETLSSITDGLELNLLLKRVLKSITVSASGNGWAVRVLHLSGHKQNFLMVDGKIKFLSDTIALQKLLASFKETTEK

SEQ ID NO: 14631 - protein, 541 aa, synthetic construct
MKAAIYSRKSVFTGKGESIENQVQMCKNYAKKNLNINEFIIYEDEGFSGGNINRPKFKELLLDVKKNKFNVLICYRLDRISRNVADFSSTLELLQTNNISFVSIKEQFDTSTPMGKAMVYIASVFAQLERETIAERIRDNMLELAKTGRWLGGQTPLGFKSKKITCFDNELKERSFNKLSPINNELNLVKLIYNKYLETYSIHKTLKHLLSNNIKGKNGGEFASMSINDILRNPVYVQSNELVVNYLKSKGIQVCGIPNGNGILTYNKKNSKYKAKNIDNWIAAVSNHMGIISPDSWLQVQNSLDNNSRKSNPRKGTSKRALLSGILKCAMCGSPMRVCYGKPRKDGSKNYYYTCTMKAQSGKIRCNNPNVRGDYLENEVISHLKELNTDLIIEELSKYKKEIASIKNISIVKNLHDEIEGKKTQLENLINQLSKIKEPMASDFIAKKINQLGNDIKNLQLKFKYINEEKKLSCSNTLNIDMILEFFKDFKTFFDNIENLKNHEFVIQRKRYLIETIVDSIFFDGTTNEITITLWGSKNLK

SEQ ID NO: 14632 - protein, 558 aa, synthetic construct
MKGKIALYSRVSTSEQSEHGYSIHEQEQVLIKEVVKNYPGYDYETYIDSGISGKNIEGRTAMKRLLQDVKDNKIEMVLSWKLNRISRSMRDVFNIIHEFKEHGVGYKSISENIDTSNASGEVLVTMFGLIGSIERSTLISNVKMSMNAKARSGEAITGRVLGYKLSLNPLTQKNDLVIDENEANIVREIFDLYLNHNKGLKAITTILNQKGYRTINQKPFSVFGVKYILNNPVYKGYVRFNNHQNWAVQRRSGKSDKNDVILVKGKHEAIISEDVFDQVHEKLASKSFKPGRPIGGDFYLRGLIKCPECGNNMVCRRTYYKTKKSKERTIKRYYICSLFNRSGSSACHSNAINAEVVERVINVHLNRILSQPDVIKQIASNVIEELKQKHSKQTEIKYDIDSLEKQKAKVKTQQERLLELFLDDQMDSEMLKAKQSQMNGQLEMLDKQIKEAQQATESQAEVPNYDKLKSHLTMMISRFSVYLREATPEAKNQLMKMLIDSIEITTDKQVKLVRYKIDESLIPQSLKKDWGSFFMPKFQFEIDGRKNYFIDQITTFTT

SEQ ID NO: 14633 - protein, 530 aa, synthetic construct
MIAAIYSRKSKFTGKGESIENQIQLCMDYAKTLGINEFLVYEDEGFSGKSMDRPKFKEMLKDAKDKKFDYLICYRLDRISRNVSDFSTLIEDLNKLNISFVSIKEQFDTSTPMGRAMMYISSVFAQLERETIAERVRDNMYELARTGRWLGGMPPYGFISTQINYYDENMNQRKMYKLKVDEDTIEIVKLIFDKYLELRSLSKLYKYMYENGIKGTRGGNLDPSALSLILKNPAYVKADKSVVDYLRKSNIDVMGDIDNMHGILTYAKNTDSPIAAVAKHKGVIDSDKWIEAQRLLNANKAKAPRAGTGSKALLSGLLKCSKCGSNMRITYKNSKSCTIYYYICGTKKSLGVSACDCRNIRSDKAESKVIDELKNKSIKSIMSSYKDSKLENSKNSKNIKTEINSINNQIKEKETYIDNLVMQLAKVTESSASTFIINKLESLNHDLSNLKSQLESLNTMSMENKQVDININMLIDNLNKFNKEIDTSDINKKRLLLSTVVDYMTWDSDTDTIKVNLIGINSSNTIASGK

SEQ ID NO: 14634 - protein, 509 aa, synthetic construct
MKTCIYLRKSRSDEEAEKQGEFETLSRHRSTLLKVAKEQNLNIVEIKEELVSGESIAYRPKMLELLEEVKSNFYDSVLVMDIDRLGRGNMQDQGLILETFKKSATKIITPRKTYDLNNEWDEEYSEFEAFMARKELKLITRRMQRGRVKSVEEGKFIASKPPYGYKFVFDESGNKSMVIDEDKAEVVRMIFDLYVNKHYGGVKIATHLNSLGLKTTTGRTWYDKGVRDILKNKTYAGYVVWNKVERGKNSSKTRPMDERIEAKGIHEPIIDESIFLQAQSLFKSNFIPSTKQHTTITNPLAGLIVCSECGHKMIAQQSTYKNKEIVKFVKCLNCGKNRGVRLDILEKDIINELADWVDAYNVSIKDLDSNENKNPNLESYYSIIKSLESEYQTLMKQKENLHNLLEQGIYDVDTYLDRSKILTDKIDLNRSSLSQAKKDLENEKESVFSIADIIPQIKKVLELYYQSNDMQERNELLKEVIDYIDYSREPKKRTSRFNIKIYPRLIKNK

SEQ ID NO: 14635 - protein, 527 aa, synthetic construct
MISAIYSRKSKFTGKGESIENQIQLCMDYAKNLGVNEFLVYEDEGFSGKSMDRPKFKEMLKDAKDKKFDYLICYRLDRISRNISDFSTLIEDLNKLNISFVSIKEQFDTSTPMGRAMMYISSVFAQLERETIAERVRDNMYELARTGRWLGGMPPYGFISTQINYYDENMNQRKMYKLKVDEDTIEIVKLIFDKYLELRSLSKLYKYMYENGIKGTRGGNLDPSALSLILKNPAYVKADKSVVDYLRKSNIDVMGDIDNIHGILTYAKNTDSPIAAVAKHKGVIDSDKWIEVQRLLNANKYKAPRTGTGSKALLSGLLKCSKCGSNMRITYKNSKSGTIYYYICGTKKSLGVSACDCRNIRSDKAESKVIDELKNKSIKSIMSSYKDSKLENSKNSKNIKTEITSINNQIKEKETYIDNLVMQLAKVTESSASTFIINKLESLNNDLSNLKSQLESLNTMSMENNQVDININMLIDNLNKFNKEIDTSDINKKRLLLSTVVDYMTWDSDTDTIKVNLIGINSSNTIA

SEQ ID NO: 14636 - protein, 436 aa, synthetic construct
MYKVVYYARVSTEEEGQKNALQNQIGMLEDFINNNIEWELVNSYIDEGKSGTTSKGRKEYNKLYEDLATDKFDIIVIKDLSRLNRNPLDYYKFIDRMVKNEKRLFMFSDNKFYESDDALINGIKAILAQEYSRDISKKVNAGHKQRQKKGTVITNGTTWGYDQQRGSKQLIINEEEAKIVRKIFNWYCDGNGFRKIFKLLEEEGVKNRNGKPFAMTTLKRIIKNEKYKGTLVCNKRHKDFDTKRVKKNSKEEWIIHENAIPAIVTEDIWNKANKILNSKKRKNNADKEEVAGYFNGTHLYSSKIICGQCNRTFWHTKARQKSKWQCKEYKSFGLKKENGHGCWNVQLFTDEIDDIVKDAIYQFWSNKDKAINNVMNILNKVIGNETDNNEEEILKKQQYKLEQKKSRLIDMLADDLITKNEYKNKKKRNRYSIEKY

SEQ ID NO: 14637 - protein, 550 aa, synthetic construct
MSKIKVVAYCRVSTNKKDQENSYENQHMFFMNRANETEDEELVSIYADRGITGTSVKKRDEFKRMLYDAGINEYRGRDEFTYEIDKMRPPKFSKIYVRNTSRFTRDSSIIIILRALLKNKVYVHFLDIDLIYDDPSKEFMLNMFINFAQQESIDKSKKVRDGNIVMAERGSIRIGGKGIYGYEYSTVTKSLTIIEEEAEAVRKIYNLYLEGYGYRRLINYLKENGYRPRGGKEKFTLSSIKHILKNEKYYGCNVRNKYDTGVVFNKQYPQLKPEKEWKFHEDTIPAIIDKSTFEKAQDFRKNKIHHEMQVGLYKGISEYAGLIKCGKCGANYTRNKDKGRVFYNCSTKKSIGVDACDNLNISEDTIGLGIEKLLKEGIKGKFEQYKDLMVELLNDVVRSKMVDQIDKQNEDKVVQLRAEIDKLTAQKNKLAELYLEGDIEKSFLDFKANDINIKLDDLNSQINDLSKSNEQIYSEIIEFDSIIDEIKKTTINEVTSRKELMKLIVMNIEPHPENDKKPMIKFYFKFDHQIKHLASRYKFVNEIKTMDTHC

SEQ ID NO: 14638 - protein, 492 aa, synthetic construct
MKKAVLYIRVSRSKDESVSLARQEAELRELCQRENWAVAAVVEDDGITGTRERENAEAALAMVASGEADVLVSWELSRWSRMGLSAVAKLVAVLDERPSALLVFHKEGLRSSQPAFGIMAAVIAEVARMEAQGTRDRILSMRAYVLGQTAPEDQRWLGGKCPVGYKAVPRPDGKGKRLVVDEEAARHLREVARRLIAGHTLTEVTQYLTDNLPTPQSKGPWRISTVRKLMQSPTLLGRTTQKVEVGKRVDGSPIIEYHVVTDAQGLPIQRWDPVLDAGTFAAVQERFYKKGPNQPRKAASWLSGFMICALCGSVMYANSRKNRAVDTFRCSNRAIPGQACPGVSISRKVLEDYMESVILGMIGSLKEYTVTERIEGPDLGSLDDVGLAIADVQRALAADGADYGVLLPQLDALKAERRRLVDSPARVVRKRVPTGRTLAEAWVEGTIPQRQYIISDMLDCVKVSRPRVAGKAGRIEDRIEEVWIDPVAEPDD

SEQ ID NO: 14639 - protein, 518 aa, synthetic construct
MDRVCMYLRKSRADLEAESRGEGETLAKHKKALLKTAKQLNLNIIKIREEIVSGESLMHRPEMLELLKEVENKQYSGVLVMDMDRLGRGNMQEQGLILETFQKANTKIITPRKAYDLSDEFDEEYSEFEAFMARKELKIINRRLQGGRIRSVEDGNYIATRPPFGYIIKELDNGRTLEPHPDQSPIVKMIFNWYTNPDHTNRLATGHIANKLNSLGYKTYTGKSWTGNSVLNIIKNAVYAGRLQWKRKEIKKSTTPGKSRDSRTRSKDEWIDVKGKHEPLVSMETYEKAQAILKKKYHVPYQLINPVRNPLAGLIRCGHCDASIVYRPYMKQAAHLICSNKHCNSRSTRFDYVEKRVIEGLKMWLEQFKANWEAYTPTEDKSFEVLELKRKSIANLEKELEEMEQQKNRLHDFLERGVYDEKTFLDRSQLLSKKMNDIKISIEEIKVDLEIEDKREEAQKNIIPVVENVLDVYYKDEDAERKNTLLKTVLDKAIYHKEKHQRNDDFELVLYPLIKPFL

SEQ ID NO: 14640 - protein, 523 aa, synthetic construct
MALNRSVTVIPARARNRNNDKEEAKPKLRVAAYCRVSTDSEEQASSYEVQVQHYTSYIEGNPEWELAGIFADDGISGTNTKKREEFNRMIEACMEGKIDKIITKSISRFARNTLDCLKYIRQLKDKSIPVFFEKENINTMDSKGEIMLTIMASLAQQESQSLSQNVKLGIQYRYQQGEIQINHNRFLGYTKDENKRLVIDPEGAGVVKRIFREYLEGASLLQIARGLEADGYLTAANKTKWRPETIKKILQNEKYIGDALLQKTYTIDFLSKKRVVNNGIVPQYYVENSHEPIIPREIFMQVQEEMVRRANLYTGKNGKKRVYSSKYALSSIVYCSECGEIYRRVHWNNRGCRSIVWRCVSRLEEKGSDCTSQTVNEEVLKGAVLKAINEILAVKDNFLSTLKENIAIVLNEESDKTTKDIDEKLDKLQKELLRLANSKADYEEVADEIYRLRELKQRALVENAEREGKRQRIEEMTAFLNEQPCEITEYDEQLVRRIIEKVTVDDDKVTVEFKSGVELDVEI

SEQ ID NO: 14641 - protein, 521 aa, synthetic construct
MRKVTKIKENNGEHKLKSKLRVAAYARVSTENADQLVSLEAQKHHYEAYIKANSNWEFVGIYYDKGVSGTKKEKRTELLRLISDCENRKIDFIITKSISRFARNTTDCLELVRKLTDIGVFIYFEKENINTQSMDSELMLSILSSLAENESVSISENNKWAIKRRFRNGTYKLSYPPYGYDYLDGEIVINKKQAEVVKRIFADALSGKGSQRIAQELNDEGVPTKRGGQWTGTTVRGILCNEKYTGDLLLQKTYTDETFKRRANKGELDQYFIESHHEAIISHADFEAVNEAIEQRGKEKGIKKGNNKYLNRYPFSGKIICDECGSTFKRRIHSSKTNKYIAWCCSKHLSKIKECSMIYIREDRIHEAFIMMVNKLIFSHKVVLKPLLRNLKSIDYADNLMKVQEIESKIEENTERVKVLVNLMTKGYLEPALFNTQKNELRVEAEKLKEQKKALYRSINGGMNKVTELQQLLKYASKTDQIERFNEEIFEQFVDRVIAFSPTEIGFELKCGVTLKERIER

SEQ ID NO: 14642 - protein, 580 aa, synthetic construct
MTSSHRKGRIHQPDRTTKRVAIYLRISTDEKNQPFSLEAQETKLLAFITSQDGWELASKYVDQASGATTDRPQLQRALTAARAGKFDILLVYRLDRLTRSLRGLTELLETLDKAGVAFRSATEPFDTGNATGRMIIQILGVIAEFERALIIDRVINGMEVKASLGQWQGGSRPYGYQIDPNTDHLMVDPVEAPIVRRIFTEYVNDRLGSQAIARKLTSDGLRTKTGLPWSPAAILTILRNRVYLGYISFRDVEHAAPHPTIIDPDLFGQAQKILTERAKSTATKRAASGSDYLLTGKIRCAHCGRHYIGTAARGNLYRYRYYSCWTRNRYGTSICPAERLPAEQVDTAILNAMIETYAGSGLVTEAAAALAGRIADTRAAHRDELATVDSEISKAETAIDRYFNAFEAGTMTDALAGGRIEKLTIKIKELQGRRAELVDRLADDATQPVPPTAADLTRLSTQIADAIHDGAPATLRRLTEALVAEITVTSRAHIQPTFRIPTQPAAPTGGSDSGQDGTQPSSDGTEVRAIHGSVRPAGIEPATWCLEGTDCTQCHKPSPSSDGPAQSAIVRLRTHPLLQA

SEQ ID NO: 14643 - protein, 541 aa, synthetic construct
MPKAISYIRFSTKIQSVGDSTKRQSKYINDWLKRNPDYYLDESLRFQDLGISGFSGANAKSGAFGEFLAAVESGYIESGSVLLVESLDRVSRQDIDTAGEQLRKILRSGVEVVTLVDNEWYTKESLKDSLSMIKAMLVMERAHEESAMKSNRLRSVWAAKRERAAKGEIMSKRCAAWLKVSEDRSHFEFIPENVKAVQRVFQLRLEGLSHVKIAKQMNDEGFSTLNQFKSVTGGWSQSSVTELLSNRSVIGFKVPSKSMAVKGVSEIPDYYPAIITDEQFYAVQQLKQGSGRKPSSDLPLLTNLFKGVLRCSECGFIVVVAGVSAKRSGIYKCSMKSEGRCNSVGFSRLQTDRALVQGLLYNTNRLSLNRGNGSAIGSLQSELEQLQKQRERLIKLAMLADDTESMAKDLKALNSQIKDAEKAVSEVHQREQSSQLETISHLDLTVKKDRIEAQIIIKRIVKEIRLNTAGKKCDVFLHNGLKLLNFPLDRVVDGAQWLEVLPLIDGDEFDFEGFTTKPRHLVLEEAPEWVKEIEAQPNQPL

SEQ ID NO: 14644 - protein, 506 aa, synthetic construct
MRTVITYLRFSSATQGAEGADSTRRQNDLFKQWLKKNSDAQVVASFSDEGLSGYKGKHLTGQFGDMLARIEAGEFPGGTILLVESIDRIGRLEHLETEALMNRIIAHGIEIHTLQDGLIYTRDALSDDLGISIIQRVKSYLAHQESKQKSFRVSEKWKQRAKLALAGKQRLTKMVPGWIDPDTLKLNEHAETVRLIFKLLLSGESLHNIARHLQSNGIKSFSRRKDANGFSVHSVRTILRSETTIGTLPASQRNDRPAIPNYYEAAIDAATFNKAQEILDKNRKGRTPASDNPLTINIFKGLFRCQCGASVHPTGTKNKYAGVYRCNNHLDGRCDVPPLKRKPFDKWMIDNFLGMIDVGNDGEAEGKIASLQHEVEIVTARIKKATALLLEMDDIDELKIQIKELNQRRTELQTTIDSMRRKASLTDKELPQLKDIDLTTKAGRVECQLILSKHLKGLTLGKDSVTVTLQNDTEITIPTNPLPLNDGTSIFEIADKELLDIDAYQL

SEQ ID NO: 14645 - protein, 508 aa, synthetic construct
MKKAIAYMRFSSPGQISGDSLNRQRRLIAEWLKVNSDYYLDTITYEDLGLSAFKGKHAQSGAFSEFLDAIEHGYILPGTTLLVESLDRLSREKVGEAIERLKLILNHGIDVITLCDNTVYNIDSLNEPYSLIKAILIAQRANEESEIKSSRVKLSWKKKRQDALESGTIMTASCPRWLSLDDKRTAFVPDPDRVKTIELIFKLRMERRSLNAIAKYLNDHAVKNFSGKESAWGPSVIEKLLANKALIGICVPSYRARGKGISEIAGYYPRVISDDLFYAVQEIRLAPFGISNSSKNPMLINLLRTVMKCEACGNTMIVHAVSGSLHGYYVCPMRRLHRCDRPSIKRDLVDYNIINELLFNCSKIQPVENKKDANETLELKIIELQMKINNLIAALSVAPEVTAIAEKIRVLDKELRRASVSLKTLKSKAVSSLGDFHAIDLTSKNGRELCRTLAYKTFEKIIINTDNKTCDIYFMNGIVFKHYPLMKTISAQQAISTLKYMVDGEVYF

SEQ ID NO: 14646 - protein, 596 aa, synthetic construct
MMSKIIPYGYLRVSSLEQVKSGGGLDSQDEAVRRYINERSDLFDIEQMVMMSDMASAYSGKQLSEGQLGGFLADVEAGKVPSGSALIAYSIDRLSRQNPWIGTKLISTLIGAGIQIHSVAENQILKSSDPVGAIMSTIYLMRANNESEIKSDRAKTGYQKRLKESIQNKKVLTRQMPRWLFDNDGKYAVEPKMKRVIEFVFDSYIAGQSSGYIANELNNKGWLYGNTYWRGSYVAKLIRDERLIGKHLRYSKQIKGVKREVIETIPDFYPNAVDVEKYHLANNMLTNVAENIRGRTRITYGDTSILRNIFSNVIKCGLCGGDTSVVQNTRKKVVGDKFVYIPYKMFLRCRNKYELKTCTHGDIRYEIIERAILVHLMGLDIANLLATPIDNSIELYKTELERCIADESQYREIIELRRKAGKRVRPETVEVLEDVLDRIDELNRLIESHVVENFVPDFNVDLGNIADVSNVEERSLIKKGIAAIAKRIFYKRVGGYILVEVMYRNLSIKHILVIDNKSSNTVVNFSIKYEEEKHIYTCNSFNMNYLIKSGDFDIHEETTMEDYAQMMNFIDIVSEDEAKKAKEFLVKNFNQNFISK

SEQ ID NO: 14647 - protein, 596 aa, synthetic construct
MMSKIIPYGYLRVSSLEQVKSGGGLDSQDEAVRRYINERSDLFDIEQMVMMSDMASAYSGKQLSEGQLGGVLADVEAGKVPSGSALIAYSIDRLSRQNPWIGTKLISTLIGAGIQIHSVAENQILKSSDPVGAIMSTIYLMRANNESEIKSDRAKTGYQKRLKESIQNKKVLTRQMPRWLFDNDGKYAVEPKMKRVIEFVFDSYIAGQSSGYIANELNNKGWLYGNTYWRGSYVAKLIRDERLIGKHLRYSKQIKGVKREVIETIPDFYPNAVDVEKYHLANNMLTNVAENIRGRTRITYGDTSILRNIFSNVIKCGLCGGDTSVVQNTRKKVVGDKFVYIPYKMFLRCRNKYELKTCTHGDIRYEIIERAILVHLMGLDIANLLATPIDNSIELYKTELERCIADESQYREIIELRRKAGKRVRPETVEVLEDVLDRIDELNRLIESHVVENFVPDFNVDLGNIADVSNVEERSLIKKGIATIAKRIFYKRVGGYILVEVMYRNLSIKHILVIDNKSSNTVVNFSIKYEEEKQIYTCNSFNMNYLIKSGDFEIHEETTMEDYAQMMNFIDIVSEDEAKKAKEFLVKNFNQNFISK

SEQ ID NO: 14648 - protein, 511 aa, synthetic construct
MESIAYLYARFSTKRQEDGDSLERQTLAAQEWCARNSVKLSDKTFEDLGVSAFKEGTRPALSEFIQVTQTGRVHRGSFLLVEDDDRLSRRGWKVTQDLMHELVNLGITVVLLKTGRKYDADNIHDIGDNIILMVNADRAYKESERKSHLIRAQRKRARENRKVTGKLPAWIVRADTETGFDFNDKISVIRELIEVRSQGHSFQYVAKQLNAKNYTTGTGAKWSASGVRSIIQNHALYGAKAYFDTDKSSGRMNKHPIDIALDVFPLVINFEQWLSLQQKSKTGKGGRTSKRGAYSQLLRCGNCGSGMVQRTTTYKDQKRLYRKCISAVEGKCTQVEAVREPEIYLDKVLKDLTYKVIESGFVSKTPELKQQLETLEKTQDILIQNGMAEQLADLYVKMNEIKSLIDKSMEADRKSAEPVETSFSKILDIHDSTKRNIELRKLLDSVTFVLHAKVKTRSQWHVIIKQMNGYETSFLLDQKHGFGNTKIKFVANQEKLAKLESLIPEMEPWEQ

SEQ ID NO: 14649 - protein, 413 aa, synthetic construct
MSVKKIRVNKQKHKQRICAYIRVSTTNGSQLESLENQKQYFENLYSNRDDIDFVGVYHDRGISGSKDNRPNFQAMIEDCRKGMIDIIHTKSIARFARNTVTVLEISRELKAIGVDIFFEEQNIHTLSSEGEVMLSVLASIAEDELRSMSGNQRWAFQKKFQRGELVINTKRFLGYDIDENGELIINPEEALIVRQIFALYLEGYGTHRIAKLLNEKGVATVTGAKWHDTTIRQILSNEKYNGSVLLQKYFHDGVNGPKKLNQGELEQYFIEDNHEAIISMEDWQTVQDKLNSRRWQQGRNKTYKFTGLLKCQHCGSTLKRQVSYKKKIVWCCSKYIKEGKAACKGMRVPEVDISNWTVTSPVTVIERDRDGEEYYSYSSQESADQRSSSGQEENQSSRILSSVHRPRRTAIKL

SEQ ID NO: 14650 - protein, 430 aa, synthetic construct
MSTDQEEQLSSYENQVNYYREFISKHEDYELVDIYADEGISATNTKKRDAFNRLIQDCRAGKVDRILVKSISRFARNTLDCIKYVRELKELGVGVIFEKENIDSLDSKGEVLLTILSSLAQDESRSISENATWGIRKKFERGEVRVNTTKFMGYDKDDNGRLIINPQQAETVKFIYEKFLDGYSPESIAKYLNDNEIPGWTGKANWYPSAIQKMLQNEKYKGDALLQKTITVDFLTKKRIANDGQVNQYYVENSHEAIIDKDTWELVQLELARRKAYREEHQLKSYIMQNDDNPFTTKVFCKECGSAFGRKNWTTSRGKRKVWQCNNRYRVKGQIGCQNNHIDEETLEKAVVMAVELLSENVDLLHGKWNKILEENRPLEKHYSTKLAEVINKPSWEFDSYEMCQVLDSITISEDGQISVKFLEGTEVDL

SEQ ID NO: 14651 - protein, 533 aa, synthetic construct
MALGKHPLRVVGVLRLSNETDESTSIERQRALVKNWAQATGNVMVGWSEDVDVSGGIRPFARPELGPWLATPERFDALVVWKLDRLTRRAAHFVELRDWAEEHGIAIVSVTEGFDLSTAMGKMFATIIAAFAEGELETIRERTRGSHARLRQIGRYAGAPWPMGYRAVDLPTGGKTLVPEPEYAEILRGIIRDVTEGVSTAEIARRLNAAGVLTWGDKRAELRGAEPAETRQRWTADVVQQIVRNPVCAGYRTEKTKAEDGRFLRAAKIVYDEDGNPVMATTTPVVTPSEWMKARTAMMARGTTVERAARAESMLQGVAKCGSCGTNLYQHRQTKKLKSGTREYCYYRCQGERKGHDCASPANIDVDSAEREVGAALLFILGQSEITRLDHDPGEDYSAEIMEARRRLDELEDDYLVGKYDSPEGKRRYERLHARACDQVDRLLALPVRRASTRTVGSGETYGQRWERCDRLERRAFLLEQEFAVTVHAPGTLEHPVTGELNTAPAVVLEVPERLRGTPGAPVFTVPPGTRLG

SEQ ID NO: 14652 - protein, 573 aa, synthetic construct
MTIPPTTTGGRAALYLRVSTARQAEHDVSIPDQKRQGEAYCASRGFKLVETYVEPGASATNDRRPEFQRMIEAGTSNPAPFDVVVVHSFSRFFRDHFELEFYVRKLAKNGVKLLSITQEMGDDPMHVMMRQIMALFDEYQSKENAKHVMRALKENARQGFWNGSLPPIGYRVVAAEQRGAKTKKKLEIDPLHADTVRLIYRLALEGDGTTGQMGVKNIVSYLNVRRIFTRDGGRWGIGQVHRILTRRTYMGEHEFNKRTKTKELKPVSEVVTVPVPPIIDTETFDAVQKLLKARNPKVMPARVVSGPTMLTGLIHCAKCGGAMTIRTGKGGRYRYYACSMKARQGPTACSGMAVPMEKLDDLVADHLEKRLLQPERLETILAHVLDRRQEQSQRKRDHIAELSKRAVESDLRLKRLYDAIEAGIADLDDPALKDRIDGLKAIRDSAKADAERAQAMLDSSGAKAITPQMVRTFAKAARQRIRMEGGGYRRDHLRALAQRVEVAEGEVRIIGSKSRLLQTLLGKPGVGAVPTQGLNWRSGRPSISHPNVLILIVAMRPKTVTCHNSYHILQRLR

SEQ ID NO: 14653 - protein, 574 aa, synthetic construct
MTKLQLHVYTRISKTSQQEGSGLDEQLTRINSYIDDKKYLFDLNTIQYWQDVGVSAFKNKNIEDGSALGELLDKISTGVIGTGHALVVYSLDRLSRRSNWDEYIIQQIVKSGCVIHDVSTPIVLDRNDPMSKIIMELIISRANNESKIKSERSLSGWAAKVAHSIKTGAALTKHTPSWLRIDNGKYEVVEAEVKTIKYIFHDYIIVGLSAAMIAKKLNDSGDYVRRWRSNSVVKMLNDERLLGTLTRYREKTKIDNFYPAVIDIDIFLQAKNLLNINSSGQSKSRVAKSGGLHNIITGFTRCGCCGSKVTTTVNGKRQRFIKCRKRLDYLNCGAKSIKLVNFEQVVFQHLKQLDLSKIFKESNDDYERENLKLELASLQVDEKTIIDTIETRKLEKKKVSIQLLDGLTEIQDQIDDINESIQKKSNNNSTLDIGSIDISQLMNPDNIEIRMKLRKFIMLILNTVTFKQISKEHMLFEFNYKNKVLKHIIITDKKIENVLHEISIEGDDESHITYRIGAGTFIITEDVSANTVHLVGLTDTTSYFVLVNYIGSLGKNELVDFMFNEEIIDLYTTK

SEQ ID NO: 14654 - protein, 449 aa, synthetic construct
MQSATLTASARKIGRTAPPDNEHRVEPTIMPIRYCLYARKSSEDDERQAMSIDSQVKEMLALAKRDGMEIAEIRRESHSAKASGHRPVYNTIIQDVGKGLFTGILTWAPDRLSRNAGDLGSLVDLMDQGLLREIRCHSQKFTNNPNEKFLLMILCSQAKLENDNRGINVKRGQKARAEQGYRPCLPSLGYLTERRAGEVRSRIIIDPVRAPFVRQMFEKVAQDRMSGRDVYRWVQQSEFRTRAGKNLTLSMIYKVLHNPFYTGRFEYPVGSGKWYRGDYDPVINQQLFDDVQRHLSAGQERDWGTKEFAFTRLMTCGNCGSGVTADEKRKQTKKGLQRYVYYRCTHSRDLQCKEPALREEELIEQLIELLDHLNVNASGVKRKIDDEFERFSKFATDVLGISDKQKAQKINQRKYVEYLLKNGTVVEKRELLGCLKDRIVLKAGKIELV

SEQ ID NO: 14655 - protein, 507 aa, synthetic construct
MKRAISYIRFSSEKQSRGDSLRRQSKMVTDWLKAHPEYHLDQDLSFRDLGVSGFTGKHLQGGLGDFLTAIEKGLVKAGDTLLIESLDRLSRQDVDQASELLRNILRSGVDVVTLSDGEHYTKESLKDPLALIKSILIMQRSHEESLRKSERIQAAWNRKKELISEGIKISKRCPAWLKLNDDRKSFSVIPEKVETVKRCFQLRLEGKSIWEIVRTLNDEGHQTLNQYKAGKFGQTSVQDLLKNRSVIGYFTPKGCEEIAGYFPSIIPETDFYKVQQLSYSRYGRKPASDKPLSVNLFKGVIRCSECGHALIITGFSDTRSGIYRCPSRNENRCNAKGLSRKQTDGTLLALLSRLDRFDSDMTNTLDTLKLHREHISNNIEKLVQLSLEIEDLSAITSKLKQLKGELSQVDADIEKETQRLKSIDVGCLSDCDLTTKAGRIEAQLIIKSAVKEVVLNTAKRRCKVTFHNGKVIDLPITENPSEDVTDAIQSLSEVTERGLIDVDEVIV

SEQ ID NO: 14656 - protein, 531 aa, synthetic construct
MNEFYKRNHETTDGEPLKAIIYCRVSSVAQTKKGDGLQSQETRCREYAGFKGYPVIKVVYDRAVSGKLLNRPGIKEVLQFLKREKNADQYVVVFDDISRLARDIRTHMDLRDAIYATGAQMDCPTMEFRQDSDGLYFEGMQALNAQHYRLKNAEQTKARMRARAMGGYWPFRRPPGYKVVKVAGHGNLLVRDEPMASVIQEALEGFANGSLASQAEVKRFLESRPEFMAKRKRRELRYEDVIRFLTRPHYAGYIEVPEWGVTLRKGHHEGLITLEQYERIQQRINGNARVMARKNSGTDFILRGALACGECGNAMTACWSTSKSGKKHPYYFCFTKGCAAYRKSIPRDKVEAEFETLLRHMTPSENTFVIARAMFKHAWETRLAQATEMIAALKSEVVRLDRQIEQLLDLVVNSSSATTVSAYERRIARLEKEKLIAAEKLAQKPGPKRTFEEMFEHACNFLASPLNIWKNPSPVAQKLVLKLAFAERLQYRRDTGFRTPKTTLPFKVLGDFLSGERRMAERMGFEPTRRF

SEQ ID NO: 14657 - protein, 543 aa, synthetic construct
MTRHARGTRAAVYARFSTDLQRDRSIDDQVALCRTFAERSGFEVVATFHDRARSGASIFGRDGLMRLIEASRAQAFDILIVEALDRLSRDQEDLAGLYKRLTFQGVKIIAVHDGAADPVQIGVRGMLGSLYLLDLANKVRRGMDGVIRDGRHAGGRSYGYRPIPGKPGELEIVPEEAEVVRRIFRLYRNGTSPRSIAAMLNKEGVPPPRGRAWNASTINGNKARGHGIIQNPLYRGRIVWNRVRMVLDPDTGKRISRVNPESEWRYADAPHLRIVEDDDAEAALRRKEETTREGTLKVPRTKRMLSGLLKCGCCGGGMTIVGRDRGGQRIQCSTYRESGSCNNGGRYYVEKVERIVLDALRQQLADPDIIAAYLKRYQAQRRALAAEARRDRTRIERRLAEVEGAIKRLVDALVDGAVEKEDVAYRMAELKAERENLNAQLKLAGDESNVVELHPQAIERYRQNVAELGMIMSGSKELPWEIVEPLREVVDSVIVMPRAAREPYEIRIMGILSALTGQEIWPTGVSAIAMVAEEGLEPPTRGL

SEQ ID NO: 14658 - protein, 506 aa, synthetic construct
MRSVITYLRYSSAIQGAEGADSTRRQNDLFKQWLKKNSDAQVVASFSDEGLSGYKGKHLTGQFGDMLARIESGEFPEGTILLVESIDRIGRLEHLETEALMNRILGNGIEIHTLQDGLIYTKDALADDLGISIIQRVKAYIAHQESKQKSFRVSQKWKQRAKLALAGEQRLTKMVPGWIDPETFKLNEHAETVRLIFKLLLDGESLHNIARHLQSNGIRSFSRRKDANGFSVHSVRTILRSETAIGTLPASQRNDRPAIPNYYEAAIDASTFNKAQEILGKNRIGRTPASDNPLTINIFKGLFRCQCGASVHPTGTKNKYQGVYRCNNHLDGRCDVPPLKRKPFDRWMIDNFLGMIDVVSDGETERRIAALQHEVETVTARIKKATALLLEMDDITELKAQVKELNQKRTELQTTIDTLKRKTSLTDKELPQLKDIDLMTKAGRVECQLILSKHLKGLTLGKDSVTVTLQNDTEITIPTNPLPLNDGSPIFEIADKELLDIDAYQL

SEQ ID NO: 14659 - protein, 507 aa, synthetic construct
MKRVISYIRFSSEKQAKGDSLRRQSKMVTDWLKAHPEYYLDQDLSFRDLGVSGFTGKHLKGGLGDFLTAIEKGLVKAGDTLLIESLDRLSRQAVDRASELLRNILRSGVDVVTLSDGEHYTRESLRDPLSLIKSILIMQRSHEESLRKSERIQAAWDAKKEAAKAGIKVSKRCPAWLRLNDDRKSFSVIPDKVETVKRCFQLRLEGKSIWEIVRTLNAEGHRSMNQYKPGKFGQTSVQDLLKNRSVIGYFTPKGCEEIAGYYPSVIDETTFYKVQQLSHSRYGRKPASAKPLSVNLFKGVIRCSECGHALIITGFSDTRNGIYRCPLRNENRCSAKGLSRKQTDGTLLTLLSRLDRFDSDMTNTIDTLKLHREHISSNIEKLVQLSLEIEDLNAITNKLKQLKNELSQVDADIEKETQRLKSIDTGSLSDCDLSTKAGRIEAQLIIKSAVKEVVLNTAKRRCKVTFHNGKSITLPITENPSEDVTEAIQSLSEVTERGLIDVDVVEI

SEQ ID NO: 14660 - protein, 547 aa, synthetic construct
MKLLVTYIRWSTKEQDSGDSLRRQTNLIDAFYSKHKNDYYLLPAHRYVDKGKSGFHQQHKNQGSDFRRMFENVMSGVIPEGSLIVVENFDRFSRADIDTAIDDVRQILRKGVSILTLGDGELYDKSALTDPVKLIKHIIIAERAHQESLVKQKRIAQVWNHKTQLARELKKPMGKQAPGWLELSDDGSHYIVDEDKASLVNIIYDKRLSGMSMFAICKWLNEQGYPTINQRKVRISKTKKPDGNWSALSVKHILTSRSVLGYLPAKISTEDRKTVLREEIESFYPQIVTDSKFYAVQQLLEETGKGKTSSGEHWLYVNILKGLIRCKCGLVMTPTGIRKPVYQGTYRCNGNKESRCSYGTVSRKLLDTQLCSRLFSKLSQLHDEATDTAKLDELQRRLNIVDSELEKLTETLIQLPNITQIQEALRVKQGEKDELIVQLSREKARVKSVSSLNLSGLDMESVEGRTEAQIIIKRLVKEIVVSGNEKLVDIYLHNGNMIRGFPLDGKDDHTLTLEEATDEMQPLDDMLIFGEPVTRIYPAGDMEEVDA

SEQ ID NO: 14661 - protein, 433 aa, synthetic construct
MKVRILEPIKSPALKRKRVCAYARVSSASEAQGESLENQTTYYRSLIEANPEYEYVGVFADYGTTGTKDERPEFQKMLALARAGEIDLILTKSISRFARNTTLVLEVVRELKELGVEVVFEKDNISSLTGDGELMLTVLSSFAQEESKSASENLKWRYRRKFEQGELAVNATRFLGYDKNKHGELVINPVQAKVVERIFADYISGKGSFVIAKELNTEGVPTIAGGRWHSSTVLGILKNEKYKGDAKLQKTYSKDHLSKKKCINHGEVDSFYIKNNHPPIVSKEIWDEAQRQIALRAKAKGNIGETKNKYQNRYPLTGMLLCGKCGAPLRRRIWNSKYACKKVVWQCSNYIKNGKNACQGTSIDDMTVGRLNIQSQTIVEEVVEHGQKYYRYTSKGKPDKPCRKPAAPEKTRSRVLPGIDRSGRAAIKLRSPG

SEQ ID NO: 14662 - protein, 536 aa, synthetic construct
MGGQVYSYLRFSDPRQATGSSADRQLAYAAAWAAKRGMPLDATLTLKDEGLSAYHQRHVKQGALGVFLRAIEDGRIGNGSVLVVEGLDRLSRAEPIQAQAQLAQIINAGITVVTASDGREYNRAGLKAQPMDLVYSLLVMIRAHEESDTKSKRVKAAIRRQCEGWLSGSYRGLIRNGKDPQWVRLTSDGWVLIPERVAAVKRALELYRQGLGAGRAALVMHEEGFQLTVGGISGLQIYRTIKLPALRGVKRLSLDGENYELEEYYPRILSDAEWSDLQHLAGQRLRRRGAGEIPGIITGVGLAYCGYCGTALVAQNIMKRRRSDGSIADGNRRLQCTSYSKNAGCSAGGSCSVVPIERALLSFCSDQLNLQRLLQVGDDGKSVRQKLLVARAALDKITAQVEKVTDALLEDESGASPIAFIRKARELEEQQGVAEQNLKRLEFELAAMSSAVQPVQADRWQELAAQVRADDYAAREKVRQLIMDTFDRIVIYMRGMSAKDREGQEIDVQLLSRTGQHRLIQINRRSGDWVASEDWG

SEQ ID NO: 14663 - protein, 452 aa, synthetic construct
MKAAIYIRVSTQEQVENYSIQAQTEKLTALCRSKDWDVYDIFIDGGYSGSNMNRPALNEMLSKLHEIDAVVVYRLDRLSRSQRDTITLIEEYFLKNNVEFVSLSETLDTSSPFGRAMIGILSVFAQLERETIRDRMVMGKIKRIEAGLPLTTAKGRTFGYDVIDTKLYINEEEAKQLQLIYDIFEEEQSITFLQKRLKKLGFKVRTYNRYNNWLTNDLYCGYVSYKDKVHVKGIHEPIISEEQFYRVQEIFTRMGKNPNMNRDSASLLNNLVVCSKCGLGFVHRRKDTMSRGKKYHYRYYSCKTYKHTHELEKCGNKIWRADKLEELIINRVNNYSFASRNVDKEDELDSLNEKLKIEHAKKKRLFDLYINGSYEVSELDSMMNDIDAQINYYEAQIEANEELKKNKKIQENLADLATVDFDSLEFREKQLYLKSLINKIYIDGEQVTIEWL

SEQ ID NO: 14664 - protein, 421 aa, synthetic construct
MKLRKIESLKPKQKKLRVCAYARVSTDSLKQGESFENQVSTYERVIKSNPEYEFVSVYADQGMTGRSENRPEFQRMIADCKAGKIDLIITKSISRFARNTTTVLKYTRELKEIGVGVLFEENNINTLSSEGELMMTVLASFAQEESRSISENNKWTLKKKFERGEGMVNTARFMGYDKDETGDLVINKEEAKVVRLIFKMYLLGIGCHRIAKALNEEGVPTIAESSWHASTIKGMLTNEKCKGDFHIQKTYIPEGTHQSVKNNGQVQSYYVTEDHPAIISAEEWQQVQELMEYHRKQRNIGKGEKYQKRYPMSGMLVCPYCGKSLRRRYVYNRKVEWLCATYIHKGKEACKGIRIRDTELTGLSFSEPMVVEEVMINGEKHYGYTSKRAYDAGERAADRIEKESSSVLPRVNGPRRTVIKL

SEQ ID NO: 14665 - protein, 517 aa, synthetic construct
MRTADLYVRVSTDEQAEKGYSLRSQKDVLTKYCEQHNIKVREVYVEDHSAKTFNRPQWKKMMIHLRRHKGKIDLLLYTKWDRFSRNATDAYAMIATLKKLGIEPQAVEQPLDMSVPENKMILAVYLTAPEIENDRRGMNTKAGIRQAKKEGRWMGKAPIGYINKVAENGKRYIAFKEPDASIMKWVFERLAEGTYSAEQVLKAMREKGIQCSKNNFYNTIKNPGYCGKIRLPKFGDEDARLVQALHEPLITETLFYDVQDVLDNRRKVYGTPISTPEDLPLRGFLKCPKCPTRMLTGSASKGKRKHVIYYHCTSACGIRYNAKQVNEAFVQELMMYIPRNGYDELFVDVVTDCYNNQNRSVKEERKDFIQEINTLTKRMENGRNLMLNNDIEAVDYRVIKEECNEKISRLEARLSDLNVENSTVIDIKPIAKEAINSLRLLDEFYEKATVEGKRYLVGMLFPEKVTYDGAIYRTPYKNLAMELIYLKNKELQDKKKGQKLNKKSLSHNGWLMGNCNH

SEQ ID NO: 14666 - protein, 524 aa, synthetic construct
MQIADLYIRVSTDEQADKGYSQRDQEERLRKHCSTLNITIDRIIYEDHSAKTFDRPQWQKYLMSFRRGKVGKDKRLILFTKWDRFSRNTSEAYQMISTLSKLNILPQAIEQPLDLKVPENKLLLAIYLSTPEVENDRRALNVTYGMRRAIKEGRMMGTAPYGYINKCTEDGRKYVAIKEPEASNIVWAFNQVSKGHLPSAKVREQMNKREGRKLTRNSFLDALRNIVYCGNVILRANDDEEEKIIKGKHEALISEELFMKVQKVLRRKSNKDIFLPGGRIINEDRYPLRGLLLCPKCGKNLTGSSAKGRSKHYYYYHCTTDCGFRHNSEIVNNLFEDELTKFEFVPTFEKLLKTILVKNFSIVTNGLEDERKSISEKVSKIEQKIAKARDLYLEDKLDEDDFREVKSKNKVELDELIFKLNALKETKKDNNVEHKLGEALRAVTNISERYKNADSLDKRAIIGLIYPEKLTFNGEYFQTTKINSFAETIFLIKKEIGKQKNRQRSEKSSNVGFVTSTGFKPVTF

SEQ ID NO: 14667 - protein, 496 aa, synthetic construct
MKLAYLYVRISTDEQKRKGYSLPEQEDRLLKYCKYNNIEVKGIYREDYSAKNFNRPEWKQLFSEVKKKSRGEDKNILFIKWDRFSRNVEYAYEMIGKLRKYKTTAMAIDQPIDFSVPESTVMLAVYLAVPEAENTRRAQNTSNGIRRAKLMGRYPNKAPIGYINVTLMDGKKAIVPKEPEAEIIKWVFNQIVKSDQKISEIRKIANDKGLICSRSHFFRVIRNPIYCGHISIKLNSNEEQIIKGLHEPLISESLFYQVQSLISTKIKTTGRKEDLRGVFFLRGFLICPICNQKLTGCFVQGRSKQYPYYFCHHGCGIRINAIFLNDCYQNRLQELVLSNSSIELFKNVLEDQNIKTQKAGYLYSQKLIERKIKEEWLTLSRGRKLFIAGVLKIDDYNELKKENQVNIKNLKKEARDTVLKLSAIDRKNKIEDKALVEVFQKFSKFDTQDKKYLVNLIPPIDIDYKTGDLSLDLNPAFSKILSAKTHRKNNKKNEFH

SEQ ID NO: 14668 - protein, 509 aa, synthetic construct
MRRAISYIRFSSERQLKGDSVRRQSKLVTDWLDKNPEFYLDSSLSFKDLGKSAFSGKHLKGGLGDFLTAIEKGLVKAGDTLLIESLDRLSRQDIDIASELLRRILRAGVDVVTLSDGEHYTRESLKDPLSLIKSILIMQRAHEESLRKSERVQAAWNRKKELISEGIKVSRRCPAWLRLNDDRRTFTIIPDKVEVVKRAFDLRLQGLSFWAITRTLNDEGHLSLNQYTPKQKGWSDTAVKKLLRNRAVIGCFTPAGREEVQGYYPAIISESLFYRVQQLNTGQYGRASVSSNPLSVNLFRGIIKCSECGATIVLGGYALKRFGMYRCPNRSANRCSAKAISRKQTDATILYMLALCDRFETENTDTIDSLRLQREDLQRKISKMAELAIELDDMTIITEKLRDMKNALSKLNHDIEEETQRIKAITTGSLKDIDRTTKEGMIETQLLIKGVLKEIVIDAAKRRCKVTFHNGKSITLPITENPSEDVTEAIQSLSEVTERGLIDVDVVEI

SEQ ID NO: 14669 - protein, 685 aa, synthetic construct
MRMKQTEEKITALYERLSRDDDNAGDSNSIVNQKKYLESYAQQRGYTNCRHYTDDGWSGGNFERPAWKQLVADIEAGKVAHVIVKDMSRAGRDYLQTGFYTEVFFRQHGVHFVAIANGVDSDDQNSNEFAPFLNIMNEWYLRDLSRKQKTAIRVKGESGKPTTNCAIYGYKKDPENKYHWLIDEEAAAVVRRIFQLTIEGKGPYDIARILFDDKINTPAVYFGKQNKGIWKSKEEFPNPYNWSGYIVGQILSKPEYMGHTVNFRSHKQSYKDKNAVMNPKEDWLIFENTHEAIVDAETWELAQKLRKTPRRHDTLGEANPLTGLVFCADCGAKMMNHRSRGGTENNPYPSDFYDCSTYTLAHQKRTHACSGHYIRSKVLRELILETIRAASTFAISDRDAFLEKVRSASQLRQAEAAKETKRRLNKEKKRISELDTIIKKLYESFAVGRITGERFDSLLADYENEQKALTASVSEMETQMSAFAEDTDRAKQFLELAKKYTDFSELTTPMINEFVEKIIVHAPEKIDGDRVQEVDIHLRFIGQFELPAPELTEEEIKRQEQLKRHRIKSRERYQKIKAGEHAVGQPFMLTCKCCGQEFASKRTNTLFCGPNCRSKFYRQEAAESRSRECTCENCGKVFTTTRSDVKYCGDDCRYQAQIKRQGVRKKALRGAKIEPAVPEKETKTA

SEQ ID NO: 14670 - protein, 505 aa, synthetic construct
MDHRTVMDLAGTDAAAYIRKSRLEEGMDTQEVLSKHQKALVEYAAAHQIHLIEIYPEVVSGESLYARPQMLRLLQDVEEGRYDAVLCMDLDRLSRGRMKDQGIILDTFRESDTLIITPEKVYDLSDDIDEEYAELKTFMSRREYKIINKRLQRGLRQSIQAGCYVANAPYGYRKTVIDRKPTLEIYEPEARFVQMMFSLYAQGFGCTSVARQVNALGAKPHRSAEFNRSSVNMILRNPTYIGKIVWDQKKHIRKGARGNPKHITIYQPPEKWTITDGLHPAIVDRELFDRVQAIMAGRYIPSKRDGTVKSPLAGLVKCANCGMNMQRMVMKRYPYLLCTRPGCCASTKFELVEKRVLDSLQDSLDQLSVRKPASGVQDTSPLELSLLAVQKELAGANRQKNRLYELLELGEYDIPTFRERMEAVKGKIAALERKETETRRTIDHAKTADPQALAQRIRAVLDAYGSSDNAQRNALLKSVIDQVWYSKAKKTKPNDFDIQLDLKPF

SEQ ID NO: 14671 - protein, 503 aa, synthetic construct
MRMVGYGRVSTDHEEQRDSLEHQQAFFQDFARARGHTLVRVYADQGISGKWLKKRDGFLQMLRDAERGEFELVVVKDISRFARNTVDSLESIRRLKALGIECIFVNNSLKVLGESEFIVTIMAAIAQEESANLSKRVKFGKDITSRKGRVPPRIYGYDRLDNFTLRIVPAEAEVVREIFRLYLQGLGCRKIAQALEERGASTKLGASWNSRGVRRVLENPIYCGHYVNHKYTVSDFLSGQIQRLPPDMHYHHDRPEWAIVSPDTFQEAARLMEQRRRKSGSAPPTRYSGRYPLSTLIRCQSCGRAFTRRRVAYPSGRQYVYWHCPIHSEYAGSRCGNGTILPEEGLLDQLRAWLAAQISSPAALAEAVRLRLDARPSRPAEDPAAALRRRLDQLEGQRARYLELYAGDLLSMEELRRRLRLLAERGARLREDLDRLTRDPPRDLEAEITEQVRRVLSLEDITNGELRQLIDRITVSEKGDVSIYPARPAEEPPAAPGAFVGNG

SEQ ID NO: 14672 - protein, 421 aa, synthetic construct
MTETAPKVIVIPAKKETPQEQAQKRHLRVAAYCRVSTNSKEQLTSYENQLAYYTEKIMKNPSWTMVKVFADEGKTGTSTCKRKEFLQMIRMCRQGKIDMILAKAVSRFARNTVDTLNYTRELRELGIPVIFEEQNINSIYPESEFLIAIHGAFAQSESENTSANVRWGKRRSMKAGHVTMQYKWMLGYEKGPDGRPVINEEQAETVRFIYQRYLAGDTLRAIKSKLEAQGALNAIGKQEWTIKNLLSILSNEKYCGDALLQKTFIQDCISKKVIQNNGQLPKYLVQDHHEGIVSRDVFYAAQLEIARRRAQTGGTSKSAPTGRSKYSGKYILTNLMFCGHCGTGYRRCVWNKGGIKRAVWRCGSRLDYGAKYCKHSETLEEKPLQQAILNAINSVMDSRDALEVQLMGPWSRNWRPSPARP

SEQ ID NO: 14673 - protein, 481 aa, synthetic construct
MITTNKVAIYVRVSTTNQVEEGYSIDEQKDKLSSYCDIKDWNVYKVYTDGGFSGSNTDRPALESLIKDAKKRKFDTVLVYKLDRLSRSQKDTLHLIEDVFIKNGIEFLSLQENFDTSTPFGKAMIGLLSVFAQLEREQIKERMQLGKLGRAKSGKSMMWAKTSYGYDYHKETGTVTINPAQALTIKFIFESYLRGRSITKLRDDLNEKYPKHVPWSYRAVRTILDNPVYCGFNQYKGEIYPGNHEPIISKEEYDKTQSELKIRQRTAAENVNPRPFQAKYILSGIAQCGYCGAPLKIMLGVKRKDGSRLKKYECHQRHPRTLRGVTTYNDNKKCDSGFYYKDKLEAYVLTEISKLQDNAGYLDKIFSGDNAETIDRESYKKQIEELSKKLSRLNDLYIDDRITLEELQSKSAEFISMRGTLETELENDPALRKNKRKADMRKLLNAEKIFSMDYEGQKVLVRGLINKVQVTAEDIVINWKI

SEQ ID NO: 14674 - protein, 506 aa, synthetic construct
MRSVITYLRFSSAIQGAEGADSTRRQNELFKQWLRKNSDAQVVASFNDEGLSGYKGKHLSGQFGDMLSRIESGEFPEGTILLVEAIDRIGRLEHLETEALMNRIIAHGIEIHTLQDGLIYTRDALSDDLGISIIQRVKSYIAHQESKQKSFRVSQKWEQRAKLALAGEQRLTRNVPGWIDPETFKLNAHAETVRLIFKLLLDGESLHNIARHLQSNGIKSFSRRKDANGFSVHSVRTILRSETTIGTLPASQRNDRPAIPNYYEAAIDASTFNKAQEILGKNRTGRTPASDNPLTINIFKGLFRCQCGASVHPTGTKNKYAGVYRCNNYLDGRCDVPPLKRKPFDKWMIDNFLGMIDVVSDGESERKIAALQHEVETVTARIKKATALLLEMDDITELKAQVKELNQKRTELQTTIDTLKRKTSLTDKELPQLKDIDLMTKAGRVECQLILSKHLKGLTLGKDSVTVTLQNDTEITIPTNPLPLNDGTSIFEIADKELLEIDAYQL

SEQ ID NO: 14675 - protein, 540 aa, synthetic construct
MKTIAIYARKSLFTGKGDSIGAQVDTCKRFIDYKFANENYEIKIFKDEGWSGKTTDRPDFTNMVNLIKSKKIDYVITYKLDRVGRTARDLHNFLYELDNLGIVYLSATEPYDTTTSAGRFMISILAAMAQMERERLAERVKSGMIQIAKKGRWLGGQCPLGFDSKREIYIDDMGKERQMMKLTPNKEEIKIVKLIYDKYLEMGSMSQVRKYCLENNIRGKNGGDFSTNTLKQLLTSPIYVKSSDNIFKYLESQNINVFGTPNGNGMLTFNKTKEIRIERDKSEWIAAVGKHKGIIDDNKWLQIQQQLQQQSEKQIKSSGRQGTTSTGLLSGIIKCEKCGSNLLIKTGHKSKKNPGTTYSYYVCGKKDNSYGHKCDNKNVRTDEADSAVITQLKLYNKELLIKNLKKALVQNKKADTDNIEILESKLKEKEKAVSNLVKKLSLVDDENISNIILNEVTNINKEINDIKLQLSNETLKINEVTQATLDTEIYIKILENFNKKIDDITDPIEKRNLLKSALENVEWNGESGEFRINLIGSKKK

SEQ ID NO: 14676 - protein, 546 aa, synthetic construct
MIESMTTKNVAIYARVSTIEQAEEGYSIDEQIRVLNKFCEREGYLVYDEYVDRGISGKNISGRPAIQRLLLDAEQKKFEVVLVWKMNRLARKSLDLMNIVEKLDSKNIAFRSYTERYETETSTGKLQFQLMAAIAEYERNNIAENVKMGMIARAKEGRWNGGQVLGYDVVEISSDNRKRKDTHLVINEREANTVQLIFQMYSSGHGYKSIANYINKKGYRTKKGKTFSLNAIKIIVTNPVYAGYIRYNVRKDWNEKRRNNINPNPIIQKGEHEPIISEEVWQIAQNVYQSRSCKPNRIHDGEFPLTGIMRCPACGAGMVISRTTNTLKDGTKRVLEYYVCGAWKNKGTLVCRSNGVRTEYADAFTLDKLQRLMHSDKLIKELVKSVNSRNGKIFVPLQKEFDMYAKQMNEVEQKLSKTFDAYTDELISKAMYVEKAKRLEGQIQELKELMEPLRKQLQGNTVKVVSYEMIKEVLLNFSKAFQNALTREQRKRLLHLLIHKITINEDRKIESIQLKLNNEVLKELKIGVDDSSSDESSTSFSVLVAI

SEQ ID NO: 14677 - protein, 538 aa, synthetic construct
MNLKSAIEPHGVTNILGYLRKSRQDIEREKRTGEDTLAEQTDLMNRVLMSIELPYELKMEIGSGESIDGRPVFQECLKDLENKKYQAIAVKELARLSRGNYSDAGRIIEIINENRLLIITPYKVFDPRNVMDMKQIRFELFLAREEYEMIRERMTGARYTYAAQGKWVAGKAPYGYRYNKNTRSLEINDEQAENIRLIYDLFLNGLNGLDMSYQAIATHLSKIGIPTPRGKKTWSYFYVKSVLQNELYIGTIKFRTYERNKKGKRIPRPESEHIISENAHSPIITKEMFEKVQDKIGNKPIDPHNPLDFSPSELASICTCSVCGGKLIRNCGKQTYKKKDGTESVYVKEFLKCQKDYCMSVKYRDVEEAILEVLKQFQALDKKQIEIYFEKAMKQKEQGKTSGINEKTVQQIEQKIKELKNRMNFVYEKYEQGIYTDEMFLERKRLIENEQEELIKTKKEIQSIPDREDVPSKEIKDHMLNVLNQYNFETDKSKKNKLLRSIFEKVEVKVIEKGKGTKPAKFMIIPYFRFNTLFKKTL

SEQ ID NO: 14678 - protein, 547 aa, synthetic construct
MKLLVPYIRWSTKEQDSGDSLRRQTNLIDAFYAKHKDDYYLLPAHRYVDKGKSGFHQQHKAQGSDFRRMFENVMSGVIPEGSLIVVENFDRFSRADIDTAIDDVRQILRKGVSILTLGDGELYDKSALTDPVKLIKHIIIAERAHQESLVKQKRIAQVWNHKTQLARELKKPMGKQAPGWLELSEDGSHYIVDEDKASLVNIIYDKRLSGMSMFAICKWLNEQGYPTINQRKVRISKTKKPDGNWSALSVKHILTSRSVLGYLPAKISTEDRKTVLREEIESFYPQIVTDSKFYAVQQLLEETGKGKTSSGDHWLYVNMLKGIIRCKCGLVMTPTGIRKPVYQGTYRCNGNKESRCSYGTVSRKLLDTQLCSRLFSKLSQLHDEATDTAKLDELQRRLNTVDSELEKLTETLIQLPNITQIQEALRVKQEEKDELIVQLSREKARVKSVSSLDLSGLDMESVEGRTEAQIIIKRLVKEIVVSGNEKLVDIYLHNGNMIRGFPLDGKDDHTLTLEEATDEMQSLDDMLIFGEPVTRIYPAGDMEEVDA

SEQ ID NO: 14679 - protein, 508 aa, synthetic construct
MKKAIAYMRFSSPGQMSGDSLNRQRRLIAEWLKVNSDYYLDTITYEDLGLSAFKGKHAQSGAFSEFLDAIEHGYILPGTTLLVESLDRLSREKVGEAIERLKLILNHGIDVITLCDNTVYNIDSLNEPYSLIKAILIAQRANEESEIKSSRVKLSWKKKRQDALESGTIMTASCPRWLSLDDKRTAFVPDPDRVKTIELIFKLRMERRSLNAIAKYLNDHAVKNFSGKESAWGPSVIEKLLANKALIGICVPSYRARGKGISEIAGYYPRVISDDLFYAVQEIRLAPFGISNSSKNPMLINLLRTVMKCEACGNTMIVHAVSGSLHGYYVCPMRRLHRCDRPSIKRDLVDYNIINELLFNCSKIQPVENKKDANETLELKIIELQMKINNLIVALSVAPEVTAIAEKIRLLDKELRRALVSLKTLKSKAVSSLGDFHAIDLTSKNGRELCRTLAYKTFEKIIINTDNKTCDIYFMNGIVFKHYPLMKTISAQQAISTLKYMVDGEVYF

SEQ ID NO: 14680 - protein, 508 aa, synthetic construct
MKKAIAYMRFSSPGQMSGDSLNRQRRLIAEWLKVNSDYYLDTITYEDLGLSAFKGKHAQSGAFSEFLDAIEHGYILPGTTLLVESLDRLSREKVGEAIERLKLILNHGIDVITLCDNTVYNIDSLNEPYSLIKAILIAQRANEESEIKSSRVKLSWKKKRQDALESGTIMTASCPRWLSLDDKRTAFVPDPDRVKTIELIFKLRMERRSLNAIAKYLNDHAVKNFSGKESAWGPSVIEKLLANKALIGICVPSYRARGKGISEIAGYYPRVISDDLFYAVQEIRLAPFGISNSSKNPMLINLLRTVMKCEVCGNTMIVHAVSGSLHGYYVCPMRRLHRCDRPSIKRDLVDYNIINELLFNCSKIQPVENKKDANETLELKIIELQMKINNLIVALSVAPEVTAIAEKIRLLDKELRRALVSLKTLKSKGVNSFSDFYAIDLTSKNGRELCRTLAYKIFEKIIINTDNKTCDIYFMNGIVFKHYPLMKVISAQQAISALKYMVDGEVYF

SEQ ID NO: 14681 - protein, 638 aa, synthetic construct
MKPKLYSYVRFSSVKQREGNSLERQQDTALKIAARYNLELDTTAFHDLGMSAFKGKNAHEGKLSEFIKQIGVKVPVGSWLVVENLDRISRDDAWSALDIFKSILSKGIVVVTGMDEKVYKYADVKNNPTDLIISLLMFTRAHDESLTKKNRVEAQARSLIRHNLTREPGTPAKAIESVGQNVWWVDTKSGYVTPHSIYFAAAQKIIELKQNGETLLGIQRYLNEHYPAPKKRVYKDKTGQALTPKTEQWGKHLIRTFLNPTVHGQKIFTLDKRDESGAIIYDSESDEPLKETFIIPDYYPALMSEVDYLTLSKLDRHRAVTRSSSTYPEGNPEPEIPLLSGIGILFCGKCGSFMFKSGSSENKYRYICGSKIVQGKPCGKKGFTSYQLEHTVLQLIADHVWNNHQEDKTAWYESEIEKASEAVKKLLKLATLTDDLEELADQINANKQKKITLEREFQQYKISRSEIQTTGWDQFRNFDVHDTKNPDRKRIRLKVKQAIKRIDCYDIDGRHGHFEVTFADETKQRIVIKFNRNRSPGVSYVEAQTVNDHDLLKMQGLVLHSFIDELISPEKFAQHIKDKHEVSILNPTFITRLEDGVNRDEGNELAIKVDSTTSKSYATVNGIKYEINSLEDLETLSK

SEQ ID NO: 14682 - protein, 525 aa, synthetic construct
MSANVTIIPPRKIAGNTVDKHEDKPKLRVVAYCRVSTDSEEQATSYDTQVQHYTDYISRNPLWEFAGIYADDGISGTSTKKRVGFNDMIHDCMSGKVDMVITKSISRFARNTIDCLKFVRQLKDKNIPIIFEKENINTMEASGELLLTIMASLAQQESASLSQNVKLGLKFRYQEGKVQINHNWFLGYTKDDEGNLVILEQEAKVVRRIYREYLEGASLRDIAEGLEKDSIKNGAGHLKWNLSNIKGILQNEKYIGDALLQKTITTDFINHVRIKNDGTEPQYYVKDSHTPIIPRDIFFKVQEEMLRRANMFSGEENKKRRVYSSKYALSSLCVCSKCGDVYRRIAWNNRGVHSVVWRCCTRVENGPSACDAPTVQENELQSAIVKAINKVFSISDEVLDTLKNNIREIIAGNNLNEIETVDKRIADKQAILLTLLKAKKDYTKTADEIDELKGKKQQLLIEKAGQEDAKRRIREMEDFLKSERHDISEYDEKLVRKYIKKIKVYEDKFSVTFKSEISVDIERAS

SEQ ID NO: 14683 - protein, 531 aa, synthetic construct
MKEIIKIDSTMRKTGFEKKTRVAAYARVSSDSDEQLLSLEVQKEHYENYIKSNPCWEYAGLYFDEGISGTKIDKRESLKQLLKDCQSGQIDRIITKSISRLARNTVDCLEIVRKLTGLGIYLYFEKENIDTEHMSSELMLSILSSIAQSESRSISENNTWAIQKRFENGSFVISCPAYGYKNENKKMIIVPEQARVVKEIFNMALSGMGGEAIARVLTDKKIPTKKGGNWTSTTVNAVLTNKTYTGDVIFQKTYTDDSFNRHKNCGEKKQYVIENHHEAIISHETFNLVKEIIAWRRSENNIVCGSGKYNKLYAFSGKIRCGECGSKCKRRIIYQHNKAYGIWVCITHLEDIHACSQKSVMESYLKISFLQMLNKLKAGYVQMLTPLVESLRGVNNKDGLNKVIELEEKKLKLQEQEQVLSKLLAGGYIEMDSYYLESNQLKTEIDTCLKEKLKLSNSLNGNLTHLNEVQKLQRFVSVTEVFSEFKDEDFLDFVDGIVVKSRTRFLFILKCGLELEEEVKETWHASHMVTE

SEQ ID NO: 14684 - protein, 525 aa, synthetic construct
MNANVTIIPPRKIAGNTVDKHKDKPKLRVVAYCRVSTDSEEQATSYDTQVQHYTDYISRNPLWEFAGIYADDGISGTSTKKRVGFNDMIHDCMSGKVDMVITKSISRFARNTIDCLKFVRQLKDKNIPIIFEKENINTMEASGELLLTIMASLAQQESASLSQNVKLGLKFRYQEGKVQINHNWFLGYTKDDEGNLVILEQEAKVVRRIYREYLEGASLRDIAEGLEKDGIKNGAGHLKWNLSNIKGILQNEKYIGDALLQKTITTDFINHVRIKNDGTEPQYYVKDSHTPIIPRDIFFKVQEEMLRRANMFSGEENKKRRVYSSKYALSSLCVCAKCGDVYRRIAWNNRGVHSVVWRCCTRWENGPSACDAPTVKEEELQSAIVKAINKVFSISDEVLDTLKNNIREIIAGNNLSEIETVDKRIADKQAILLTLLKAKKDYTKTANEIDELKVKKQQLLIEKAGQEDAKRRIREMEDFLKSERHDISEYDEKLVRKYIKKIKVYEDRFSVTFKSEISVDVERAS

SEQ ID NO: 14685 - protein, 531 aa, synthetic construct
MKEIIKIDSTIRKTGLEKKTRVAAYARVSSDSDEQLLSLEVQKEHYENYIKSNPCWEYAGLYFDEGISGTKIDKRESLKQLLKDCESGQIDRIVTKSISRLARNTVDCLEIVRKLTGLGIYLYFEKENIDTEHMSSELMLSILSSIAQSESRSISENSMWSIQKRFENGTFVISCPAYGYKNENKKMIIVPEQARVVKEIFNMALSGMGGEAIARVLTDKKIPTKKGGSWTSSTVNAVLTNKTYTGDVIFQKTYTDDSFNRHKNCGEKQQYVIENHHEAIISHETFNLVKEIIAWRRSENNIVCGSGKYNKLYAFSGKIRCGECGSKCKRRIIYQHNKAYGIWVCITHLEDIHACSQKSVMESYLKISFLQMLNKLKAGYVQMLTPLVESLRGVNNKDGLNKVIELEEKIAKLQEQEQVLSKLLAGGYIEMDSYYLESNQLKTEMDTCLKEKLQLSNSLNGNLTHLNEAQKLQRFVSVTEVFSEFKDENFLDFVDDVVVKSRTEFIFHLKCGLELEEEVKETWHTSHMVTE

SEQ ID NO: 14686 - protein, 554 aa, synthetic construct
MKVVLYARYSSDNQRDASIEDQLRACRGYADTQGWTIVDSYSDRAISGASLIRPGIQELITDANAGRFQILLTEAMDRLSRDQEDIAGLFKRMSFAGVKIVTLSEGEINHLHIGLTGTMNALYLKELANKTRRGLRGRVELGKSGGGLCYGYDVVKQRDSHGEAICGERAVNDEQAQIVRRIFRAYADGKSPKSIALSLNAEGHRGPLSGAWSPSTINGNRERGTGILNNELYIGRLVWNRLRYIKDPSTGKRVSRLNPESEWVLQDVPDLRIIEQDLWDAVKARQSKTTWSQKSRGNGVHPLNALQRPTHLLTGLIKCGCCGGGFSMISKHHLGCSTARNKGTCENRLTIRRDVLEKSVLNGLRTQMMDPALFKEFCDEFTREVNRLRMEKGADLTTLKSELPKIERELNKAVQAILDGFASSALKIRMEQLEARKAEIEERLADAPSPPPLLHPNMAELYRQKIATLHDSLQNEADATQTVEAIRSLITRIKLIPENGELGIFLEGDLAAMLGFATNRKSAERHADAGVLEKFLVQFSMVAGAGFEPAAFRL

SEQ ID NO: 14687 - protein, 518 aa, synthetic construct
MPKAISYIRFSTKIQSVGDSTKRQSKYINDWLKRNPDYYLDESLRFQDLGISGFSGANAKSGAFGEFLAAVESGYIESGSVLLVESLDRVSRQDIDTAGEQLRKILRAGVEVVTLVDNEWYTKESLKDSLSMIKAMLVMERAHEESAMKSTRLRSVWAAKRERAANGEIMSKRCAAWLKVSEDRSHFEFIPENVKAVQRVFQLRLEGLSHVKIAKQMNDEGFSTLNQFKSVTGGWSQSSVTELLSNRSVIGYKVPSKSMAVKGVAEISNYYPAIITDEQFYAVQQLKQGSGRKPSSDLPLLTNLFKGVLRCSECGFIVVVAGVSAKRSGIYKCSMKSEGRCNSVGFSRLQTDRALVQGLLYNTNRLSLNRNNGSAIGSLQSELEELHKQRERLIKLAMLADDTESMAKDLKALNSQIKDAEKAVSEVHQREQSSQLETISHLDLTVKKDRIEAQIIIKRIVKEIQLNTAGKKCDVFLHNGLKLLNFPLDRVVDGEIFLEVLPVLEADEFDFDTYRMIE

SEQ ID NO: 14688 - protein, 507 aa, synthetic construct
MNQYFAYVRVSTPKQGEGVSLEAQREAIERYAAAHSLTITQWFEEKETAAKAGRPVFLSMIKALRNGEATGLIMHKIDRSARNGADWLAIGELSDAGTDVRFATESLDFRSRSGRLSADIQAVIAADYIRNLREETVKGINGRLKQGLYPFKAPIGYCDNGGGKPKTPDPLRAPLIQQVFELYASGEYSLRSLVMEMDERGLRNQGGKPLSKHGIETILANPFYTGLIRIKTTGETYQGVHEPLIPVSLFDTVADVRAGKCGKKVTKHRHTYRGLFRCTLCGYAMIPERQKSYVYYRCQTTQCPTTCVREDVLEAAVADLLERVALSPEDITRITEEIEAWNSKQTAHDPRDGIRLQLEHTKRRLDRLTDALIDQLIDKDTFTNRKQSLELERLRLEKSLAKQTEAHVEPDRIRYFLERIKSLKTMFISAIATERREIVRWATSNCLVERKNVYLEPANWLVAVEAVRSGTDGDPHSPNPRSRQEMIEALIVAERAVSATEGLLSLP

SEQ ID NO: 14689 - protein, 523 aa, synthetic construct
MAKTVRVIPATPRVFRSETAAVHGRRKTAGYARVSTDHEEQASSYEMQMAHYKNYIESRADWDFVGMYSDEGISGTNTKKRDGFNQMIEDALAGKIDLIITKSVSRFARNTVDSLQNVRKLKENGVEIYFEKENIWTFDSRGELLITIMSSLAQEESRSISENTTWGKRKQFAEGKTSVGYSAFLGYDKDFKINEEQAKVVKLIYKLFLGGRSFYAITKELEKRGIKSPSGKDKWYISTVRSILTNEKYRGDALIQKEYTADFLDKTRRKNTGEIPQYYVEEHHEAIIPPDLFDFVQSEIKRREQNGKHSGVSIFANKIKCGCCGGWYGAKVWHSTDKYRRVIYRCNKKYAHKRKPCSTRHLTEEEIKQIFVKALNSLVEVKENVIAELRSLIDDICQTRELMEERGRVEQELRVLAERLEILIRENARVAQDQNAYLKQETEIRARYLEKQGRLARLDEQIAEREGKRKTLETMIQVVYGIDGEQVEFDEELWSGLLDHVVVKEDGTAVVVFKGGIEIAVDG

SEQ ID NO: 14690 - protein, 527 aa, synthetic construct
MKIAIYSRKSKFTGKGESIENQIQMCKEYARSHFEAREFSIYEDEGFSGGNIDRPEFKRLVKDAEKKKYDVLICYRLDRISRNVSDFSNTLELLQKNNIAFVSIKEQFDTSTPMGRAMLYIASVFAQLERETIAERIRDNMHQLARTGRWLGGIYPTGFTSEPIIYIDQNMKERKLFKLIPVEEELEIIKTIFQKYLELQSLQKLETYCLLNKIKTKNGNDFQKQSLKQILHNPVYAVADEGIYEYFKTNGADICNAKEEFSGKYGVIGYNKRDLKNTRMGRYNEKSDWIVAIGKHKGVIPGRDWVRVQQIFEQNKDKAPRAGTSAAALLSGLIRCSCGSFMRVLFGPKKPNSEERYHYYVCNKKVISKGVICDAKRLNGIKTDKEVIEKIEGIITSTTFDQLESMKKKNKDKDLQNKLIVEKIDKNKKSIENLVRQIAGKEDSFAAEYLMAEVEKLAKENKTLEGHLVEDDSDRVNFNIDLFKEALLEFKSKIHIVDFQEQRILLKTIVNYVEWDDKELKVQILKF

SEQ ID NO: 14691 - protein, 549 aa, synthetic construct
MNRSGKKCVLYPRVSTEMQVDGFSLDGQKNSLKRFADREEMEIINIYEDAGKSGKSIEGRPAFKQMLGDIESGLGIDYVLVYKLSRFGRNAADILNSLEHIQSFGVNLICIEEGIDSSQTSGKLLISVLSAVAEIERENIIEQTMNGRKEKARQGGWNGGFAPYGYYLKDKQLFIQEDEAEAVRIIFDKYVNGNMGFYKIANYLNLQGIQKIKRDNGTLTQWSTHFIRMIIDNPVYYGKIAFGRRTREKVKGSKNEYRQVHQDDYILADGQHDAIISEELWTQAHEKREITGVKSPSKIGRDRAHLLSGILKCPKCGGPMYTNKHAWTNKDGTYKEIYYYVCSKARTARGKSCDYKAMLKKTDIEPLVIEAIRELIKNEDFATEIKSKIGKQIDTSTLDRELKNYEGKLREVDLNKTRLENEIDSLPEDTRFRERKLHDMTLRLDGLYDIIVELEEKIEDVKLRRKAVEQDAITLENIYTLLANFEKVYDKISDEEKKSLISSLIKEIEIFPCDESELPLKSILFNFPVYKDGGDVYEFLWDKSTHVST

SEQ ID NO: 14692 - protein, 584 aa, synthetic construct
MTATVQVIKANKTFVNRKLGQTLEQIRVAPYCRVSTDSEDQAKSYKSQIKYYSDLVKEKKEWVLVDIYADEAITGTRDDKRSDFLRMIEDCKKGLIDMIITKSIARFARNTVDTLRYVRMLKEMGIAVYFEEENINTLTMDGELLLTILASVAQQAVENTSADVKKGLKMKMKRGELVGFNSCLGYDYDKEAQTISINETEAIAVRYIYGRYLEGAGAFTIARELNDLKYKTKNGSTKWHDSSVRKILKNEKYKGDLLQGKTFTIDPITKRRLENFGEEDKFYCEDHHQAIISREDWDEVQRIMQVRGEARKTIKGTVRQKLSRQYAFSSKLECAFCGTNFSRRSWNANTPHQKTTWQCVTSTKKGKKYCEHSKGIPETVVEGAFMKSFALLVRDKSKILDEFLERVEQSFNDNSSEKKVKQIEKRIDVLKKKISKLTDLYLEEAIEKKEYQTKYTELNKELDELVETYEDLNSRMVDEIQMKKRIRKLKNMLEADEIVTEFDRQVFENLIEKVVVGEIDENGSINPYKLTFIYRTGLKDKINPPYDGSKKRKKKSSDVVCSDQANDVKTICSDQGHDTCGNCR

SEQ ID NO: 14693 - protein, 539 aa, synthetic construct
MQSKRAAIYARFSTDLQNDRSVDDQIDLCREFAAKSGFVVARTYFDKARTGASIFGRDGLLSLMDDAKANAFDVVVVEALDRLSRDQEDLPGIYKRLTHAGVEIIAVHDGAADAIQIGIRGLVSTLFLADLKNKIRRGMTGVIKDGRHAGGRAYGYRPTPGQPGVMQIHEPEAEIVRRIYAEVIAGRNSREIAGALNRDLVTPPRGATWNSSTICGSAQRGNGIIRNPLYTGRIIWNRIRMVRDPETGKRVSRPNPQEEWREADAPHLALVDNETYETALAIIEGRATRQGGISNTRRPKRLLSGILRCEHCGGGMSIHDRHKDSGAIRIRCSRATESGACTNERRYRLDKIEAAVISGLKEQLAHPELLAEYVRVYREERRAEIADAVRDRAALERKLLDLNGQLDRLMQALTRGVLPIEVIEAQYKPLEGERDRIKSQLATVSQSPAIELHPQAFGQYKRTVENLAARLNDLDDITGAEVFTSFRELVHSVVIRDRPDGRVEAEVIGHLSALIGDRAEMLGGRVVAEEGFEPPTQGL

SEQ ID NO: 14694 - protein, 517 aa, synthetic construct
MTKTVDLYLRLSIDKEGKDSLERQEADLREWAEREGLTVRKVWKDPGKSGYKRGVKRPDFDAAVAAVKAGEVSTLAVWKLDRLSRQGAGQVGTVLDDVDAVGGRLYFLKDSLDSSVPGHRMVIVMVSEQARAESANTSLRVRAKKEVQRREGKYLGGSRPFGYIVDDDRKLRQHPREAALVREAYERLLNGETMLQVCRDWNDRGIPTRRKGSHWRSSSMSVFLRSPCLAGLVPDHREQRESGYQGADIHPWRDPATGETVSLMAEGEEPIVTEGERMALLQVLDSRLRRYGRGLRAVRQPESLLGGGMVICAACGRTCNSFGNAYRCRKRDYTGDPCPRPLSVTLETLEDAVKREWAFHLAKLEPGDELLDRVAERWLARNDPAPIREREELTERLRTLEAKLDAADHDHYVRGSLSAERHARIADALAEQMARVKAELKALPEPEADLGALLDPELSLPAIMSAPVLEARALLRLAIDKVIVSAAPYPGARFHAHQRMRIVWAGEPMPETVSDAA

SEQ ID NO: 14695 - protein, 494 aa, synthetic construct
MIAAVYIRKSREDKNKPSHRLTVQREQLPAYALAQGWQVEIYDDGHASAARGKVEELHERARLESDVRSGKINLILVIELSRLSRDDSLQDYVSWLYLCSQHGVKLATPSRQLDPSQHSDWMLLLMEGGFSSVEMKVLQARMAEGRAEAYRAGKWLSGNPPMPYKYDRGAGGLIVDPDQMPTFRKMMRLAELYPASQVADRVGIPSVTVRRAISDDRLLMYQGARRDPDSGATIDGQWPAVIDHLQAERIRRNRGSRRKAPRRQYAAMLSNLDILTCGYCGHSYRAWKNGRTRVDGTRLDYYGCRHKDKSDACQSRMIPTHILEERVLTNLFGLLSKAAELQRAWEARQDSDDTPGKLADIDREIEKCHTKKQRLVEAVADGLLSPADVRQKRNEIDNTIGTLNQKRAGLLSAQAIAPDWDALKITRQAFDHLYQAEQREVIASLIAQIRIFPTYALITYRFPRNENGDNIARIHLPERQKPAGPRQVYKVKKQ

SEQ ID NO: 14696 - protein, 609 aa, synthetic construct
MQSQNEADESAPLPLDPAVYSRAPQLKRAHVAGGAGPDTAVDHGSARGKRAVLYLRVSSKRQVSTDFDPEGISLPAQRLACEQKAEQMGLEIVEEYVEPGRSGTETSKRVAFQQMLSRISDRRDVDVVLIYKLSRLHRNRYDEATTMMTLQQHNVTLVSATEHIDATPVGQLMQGILSSFNQFRSAEDGADISYKLGEKARKGGTVSRAPLGYVNVGVRVEDREVRTVQIDEHRAPLIRTAFELFATGSYSISMLVDELAVRGLTTRATSARPAGPISENQLLRLLQDPYYLGLVRHKGEVHKGRHPALIDGELYARVQEVVATRSTGERTRIHSHYLKGSLFCGRCRDVNGATGWMVMANVKARGGEYQYFFCRRTQERLCDAPYIQIPRLEQAVEMFWRKIRVTRAFLEALRAGIQRTVDDDQQTTRALHGQLTGNLAKLDAQEQNLLDLAADGLVPRDTIRKRIAAITKQRAVVSSRLENTEKKLAAVLDYIDAAASLLERPGDLYSAASDETRRALNQALFAKLYVFADEVTGAEFNEPFGALLDADALFEKQSTSAGSGGASVSDETRGLLNIASGDVSSKRHMVGPVGLEPTTRGLKVRCSTD

SEQ ID NO: 14697 - protein, 503 aa, synthetic construct
MPKAISYIRFSTKIQSVGDSTKRQSKYINDWLKRNPDYYLDESLRFQDLGISGFSGANAKSGAFGEFLAAVESGYIESGSVLLVESLDRVSRQDIDTAGEQLRKILRSGVEVVTLVDNEWYTKESLKDSLSMIKAMLVMERAHEESAMKSTRLRSMWAAKRERAANGEIMSKRCAAWLKVSEDRSHFEFITENVKAVQRVFQLRLEGLSHIKIAKQMNDEGFYTLNQHKSVKGGWSQSSVTELLSNRSVIGFKVPSKSMAVKGVSEIPNYYPAIITDEQFYAVQQLKQGSGRKPSSDLPLLTNLFKGVLRCSECGFIVVVAGVSAKRSGIYKCSMKSEGRCNSVGFSRLQTDRALVQGLLYNTNRLSLNRDNGSAIGTLQSDLEQLQKQRERLIKLAMLADDTESMAKDLKALNSQIKDAEKAVSEVHQREQSSQLETVSHLDLTVKKDRIEAQIITKRIVKEIRLNTAQKKCDVFLHNGLKLLNFPLDRVVDGAQCESPQII

SEQ ID NO: 14698 - protein, 526 aa, synthetic construct
MSPTVTKIPATRALHTGKPLSATALKRVAGYARVSTDNEDQVSSYQAQVDYYTTYITDHPGWELVKVYTDEGITGTSTAKRAGFQTMVADALAGKIDLIVTKSVSRFARNTVDSLTTVRKLKDKGVEVYFQRENIWTLDSKGELLITIMSSLAQEEARSISENVTWGHRKRFADGKVTMPFGSFLGYDRGEDGQPVINEEQAKTVREIYSLFLEGKSLREIARILTERGRLTARGKTQWSRTAVRSILTNERYKGDALLQKTYTKDFLTKELVKNNGEVPQYYVTGSHEAIIDPLVWDFVQTQLAQSKGRRSRKHVLSHSIVCGQCGAFFTPKTWHAGTKNEKRIWRCSAKYEQHTHCTTRHYTTDQIEKAFETALATMLHANGKDPLTLVEQVSADLFDTSGLEAEVEIAWAVLNAASQALADLVEKGANATLTAGEYDQKYAAATCAYDQAQAKHSQLQEQVNEIRERKTRYDFYRRSLTDLTQEQVTFTPLLFHTLIDHATAQPDGQICFTFRDGQTVTPQID

SEQ ID NO: 14699 - protein, 430 aa, synthetic construct
MARIERIRPPLQTPRRVRVAAYARISALNERSPHSLAAQVSYYMHLIESTPTWHYVGVFVDNGKSGTNQNRDGFQDLMAACRAGEVDLVLTKSISRLGRNTVDVLATCRELSALGVEVRFERENISTATTDGELLLTLLASFAQGESEANSEAVKWSIRRNYEQGKPNSHYLYGYDWDGTQFHINPREAPIVRRVFTSYLEGISPDKLADQLYREGIRGKRGKKIDAMVIRRMLENERYMGDTLMQKHYLDGIRGPQRTNKGELPKYYAKDTHPPIIDRDTFKAVQAEIQRRRTLGKGAVPSLNTGCFTGRVICGECGKAFHRKTKYTQGGSYKVWKCWSACLGKGNPCKAPTIREAHLHAATIHALQIETFSEGVVWEQIQHITVDTQTATLHFHLQSGTTVQVSLAQAKQLAENHKEENTTPDGGVFK

SEQ ID NO: 14700 - protein, 534 aa, synthetic construct
MSPTVTKIPATRALHTGKPLAATTTKRVAGYARVSTDNEDQASSYQAQVDYYTTFITDHPGWELVKVYTDEGITGTSTAKRAGFRTMVADALAGKIDLIVTKSVSRFARNTVDSLTTVRKLKDAGVEVYFQRENIWTLDSKGELLITIMSSLAQEEARSISENVTWGHRKRFADGKVTIPYGSFLGYEKGQDGGLVINPEQAKVVRLIYALCLEGKTPRAIATTLQNLGVPTARGKKRWHAATIRSILTNEKYKGDALLQKTYTRDFLTKERITNQGEVAQYYVTGSHEPIIEPAVWDYAQTLINPPTQRGTIGGKKSRKHALSGTIKCGQCGGWYGSKTWHAGTKYQRTIWRCNNKYENHTHCTTTHLTEAQIHTTFTHLVAQLVTTTQVATQLDQLIADTFNTTQAETHLAQCAARLERAREAFTALAYQNARAALTSKDYEARAARLEADYDQALADYHQAEAALTDLRERAAKYRRYQQTLTQLQGQDATQFTPVLWRTLIDHATINHNGTIVFALNDGQTISMPTPTKN

SEQ ID NO: 14701 - protein, 433 aa, synthetic construct
MTRQIKRITPPPQEKPPLVRVAAYARISAVNERSPKSLAAQIHHYSTLIQNTPGWRYIGVFIDNGKSGTNQNREGFKQLMAACRAGEVDLVLTKSISRLGRNTVDVLATCRELTALGVELRFERENISTATTDGELLLTLLASFAQGESEANSEAVKWSIRRNYEQGKPNSHYLYGYDWDGTQFHINPVEAPIVRRIFASYLEGISPDKLADQLYREGIRGKRGKKIDAMVIRRMLENERYMGDTLMQKHYLDGIRGPQRVNKGELPKYYAKDTHPPIIDRDTFKAVQAEIQRRRTLGKGAVPSLNTGCFTGRVICGACGKAFHRKTKQRFRLPDYKYWRCHTACQGKGNPCKAPNIREAHLKTATMAVLKLDEFDERAVWEQVKTILISSDELDFHLKDGTRRHVTLLETANLAENAAKTPETQTLPGRSQS

SEQ ID NO: 14702 - protein, 507 aa, synthetic construct
MKRVISYIRFSSEKQAKGDSLRRQSKMVTDWLKAHPEYYLDQDLSFRDLGVSGFTGKHLKGGLGDFLTAIEKGLVKAGDTLLIESLDRLSRQAVDRASELLRNILRSGVDVVTLSDGEHYTSESLKDPLALIKSILIMQRAHEESLRKSERIQAAWDAKKEAAKAGIKVSKRCPAWLKLNDDRKSFSVIPEKVETVKRCFQLRLEGKSIWEIVRTLNDEGHQTLNQYKAGKFGQTSVQDLLKNRSVIGYFTPKGCEEISGYYPAIIDETTFYKVQQLSHYRYGRKPVSDKPLSVNLFKGVIRCSECGHALIITGFSDTRNGIYRCPLRNENRCSAKGLSRKQTDGTLLALLSRLDRFDSDMTNTVDTLKLHREHISSNIEKLVQLSLEIEDLSAITSKLKQLKGELSQVDADIEKETQRLKSIDVGCLSDCDLTTKAGRIEAQLIIKSAVKEVVLNTAKRRCKVTFHNGRIIDLPITENPSEDVTEAIQSLSEVTERGLIDVDEVII

SEQ ID NO: 14703 - protein, 515 aa, synthetic construct
MKTAIYLRKSRADLEAEARGEGETLAKHRTTLLKIAKEMNLNVLSVREEIVSGESLVKRPEMLALLEEIEDNKYDVVLCMDMDRLGRGGMKEQGIILETFKRSNTKIMTPRKTYDLNDEWDEEYSEFEAFMARKELKIITRRMQRGRVASVEAGNYLGTHAPFGYDIHRLNKRERTLTINPEEALVVRMIFDWYANEDMGANAIRSKLNDLGYKSKLGNEWNPYSILDILKNNVYIGKVTWQKRKEVKQPDAVKRNCARQDKSDWIIADGKHEPIIPESLFEQVQEKLNSRYHIPYNTNGIKNPLAGIIKCAKCGYSMVQRYPKNRKETMDCKHRGCENKSSYTELIEKRLLEALKEWYIDYKADFEKHKQDDKLKETQVIQMNEAALRKLEKELVDVQKQKNNLHDLLERGIYTVDMFLERSNVVSDRITEITSTMENLKKEIKTEIKKEKVKKDTIPQVEHVLDLYFKTDDPKKKNSLLKSVLEKAVYKKEKWQRLDDFELVLYPKLPQDGDI

SEQ ID NO: 14704 - protein, 591 aa, synthetic construct
MNRSGKKCVLYPRVSTEMQVDGFSLDGQKNSLRRFADREEMEIVDIYEDAGKSGKSIEGRPAFKQMLYDIENGLEIEYILVYKLSRFGRNAADILNSLEHVQSFGVNLICIEEGIDSSQTNGKLLISVLSAVAEIERENIIEQTMNGRKEKARQGGWNGGFAPYGYYLKDKQLYIQENEAEAIRIIFDKYVNGNMGFYKIANYLNLQGIPKIKRANGTLSQWSTHFVRMIIDNPVYTGKIAFGRRKREKVKGTKNEYRQVHQDEYIIADGQHEAIIDEELWNEAHEKRELTGIKSPSKIGRDRAHLLSGILKCPKCGGPMYTNKHAWTNKDGTYKEIYYYVCSKARTARGKSCDYKAMLKKTDIEPLVIEAIRELIKNQDFAAEIKSRIGKEIDTSTLNRELKNYENKLREVELNKTRLENEIDSLPEDTRFRERKLHDMTLRLDGLYDTIVELEEKIEDVKLRRKAVEQDAITLENIYTLLENFDKVYDKISEEEKKSLISSLIKEIEIFPCDEAELPLKSILFNFPVYKDGGDVCGFLWDKSTHVSTWLERTYIMSTQSISLEVTFGNSPPPIFALFSIEIAKVIKAYH

SEQ ID NO: 14705 - protein, 522 aa, synthetic construct
MGTRNITVIPAKSRIGNTASAVQIPKLRVAAYCRVSTDSDEQATSYEAQVEHYTDFIKKNTEWEFAGIFADDGISGTNTKKREEFNRMIDECMAGNIDMIVTKSISRFARNTLDCLKYIRKLKEKNIPVYFEKESINTMDAKGEVLLTIMASLAQQESQSLSQNVKLGLQYRYQQGIVQINHNRFLGYTKDEEGHLVIEPNGAEVVKRIYREYLEGASLIEIARGLMADNILTSAGKEKWRQETIKKILKNEKYIGDALLQKTYTVDFLTKKRVKNDGIVPQYYVENNHDAIIPRDLYMQVQEEMERRSNIKSGNSGKKRIYSSKYALSTIVICGHCGDIFRRIHWNNHGCKSIVWRCVSRLDKTSVDCMARTIRETELHDAVIKAVNKVFGAKTEFINILEKNIALVMNQVDKNAIPEIDKKLEQLQKELFRLANNKEDYSILVDEIYRLRDEKEAAMTKNAGYASQKQRMVDMTKFLKLQKCIVEYYDEQLVRKLIKGITIYDEKITVTFKSGLIVDMEI

SEQ ID NO: 14706 - protein, 521 aa, synthetic construct
MKKVTKIETAVVTGLRKKKLRVAAYCRVSTASEEQMESLTAQKEHYEKYIKENPEWEFAGLYYDEGITGTKKEKRKGLRAMITACELKQIDFIITKSISRFARNTLDCLEMVRKLIELGVFLYFEKENINTQSMQSEMILSILSSMAQDESSSISENNKWGVKTRFKNGTYKISYPPYGYANTDGKMEIIPDEAEIVRDIFKCALAGKGSYTIARELNERNALTKKGGKWTGTSVRDILSNEKYTGDVLFQKTYTDSQFNRHANRGEEEQYFVPNHHEAIICHKDFDAVQAVIRQRGSEKNIDKGSSKYLNRYVLSGKIICGNCGRHFKRRTHYTAKKSYIAWTCQTHIEHKEECTIKYISEDGINRAFVLMMNKLKFGYKSVLKPLKNGLKAMSGESRITVLADLNERIEKNADRKRVIAELMGKGFLDAALFTKELSDIAAEAEMLKQEKKRLESSATGNHQQLSELDALIHYISNKPEIVKFEDAIFERFIENIVVYSRDEIGFCMKCGITLRERMVN

SEQ ID NO: 14707 - protein, 659 aa, synthetic construct
MLKVAIYSRKSKFTGKGDSVENQIEMCKQYIINHLEGDVDFLIYEDEGFSGSTINRPQFKKLIQDIKLKKINYLVCYRLDRISRNVSDFSSTLELLQNYNVSFISIKEQFDTSTPMGKAMIYIASVFAQLERETIAERVKDNMLELAKNGRWTGGKIPLGFTSKRKKYRDKSGLEREFSILEINKEEMDFVKFLYEKYLEVGSLHKLEVYMTENQIKSKNNILFEKSTLKIILQNPIYVKANAAVIGYLESNGWNIYGEADNIHSLLTYNKTRQVIRNGKRTKSLNPESERFASVSNITGALEPELWLKVQNQFDRNKDTFPRLGKTHNALLTGKLKCGRCKEYMLVQHGRVSKLTGEKLFYYVCSLKRKSHKKFCDNKNAKAAELESLVLLSLKKLGNEQKQFMDRLKENYNSKLKDDSKSEKMLLDKALTEKKNQIDNLLNMLSKSKDIEDVMIDKIKSIKNECIEIEKRLTVLDDESKKDKVEKINLDLIENILCDCAVIDELPRVKQKQIINTLIDVIYWYGDKNNNGKVFIKFIGSDKDDFEEIELPDIDFSNTMLQFCSPSTCSMNKTATYRNVFKDIENSTSTVYYTLPERTIAQKIYKLRMIKGYTQREFAKVCSIGYSSLCKYEIGKSKPKRVNLEKICQTFNMSIDYFL

SEQ ID NO: 14708 - protein, 546 aa, synthetic construct
MIAAIYSRKSKFSEKGESVENQIEMCKEYLRRNYSKVEDIRIYEDEGFSGGNINRPEFKKLLIDAKKNKFNVLICYRLDRISRNVADFSNTIEELQRHNIDFVSIKEQFDTSSPMGRAMMNIAAVFAQLERETIAERIKDNMLELAKTGRWLGGTPPLGYKSEAVEYSNQYGKDKKMFKLSIVPEEIETVKLIYKLYLEKRGFASVATHMCKNKYKGKNGGEFSRATVEQIIINPVYCISDENIFKWFKEQDTTTYGVPDGMHGLMVYNKRKESGKKPNSIDQWIVSIGRHEGIISSDMWIKCQDILRDNKAKTSPRSGTGNKFLLSGMVVCGECGSGMASWSHYNQKRDFMERYYRCNLKNRASNRCSNKMLNAYKAEEYIENYLLGLDMESLISTYNEKDKPKADKDSIVKKLSKLKKQVDDNNKIIKGLVRKLALEENIELIQTLKEEIGDTKIENNELQKQITELTNSMEDYEVKEDFIKMIEEALINFKKFYKLVDVDSKRILIKSLVKNIIWHGENETLEINPLISNKSTPQGIVRRRNY

SEQ ID NO: 14709 - protein, 634 aa, synthetic construct
MKLEHFSHTEPQIYSYSRFSNIRQEKGRSLARQKKFIDEVSAKFNLKINKDLVMTDRGLSAFHGHHKTKGALGVFLAAVEKQLIKPGSVLIVESLDRLSREQPYIAQATLASLVNADIVVVTAADEKIYSKETMAKDPLGTMILSVLEMVRAHKESLRKTEASIDFLHGQIATHEEGGVSDLAGPLPFWISRKQRPHPKIKTGFELNEHEEIIRLIVDMHFKQGMGLRPISVELLNRGIKPPSQLKHSPANSRKLKNDVWGVSTLSHIVSNQALCGRYVVNLNYQKDGKKHVEDYVLRSYYPAIMSEEEFDTFQAIKKRRYGSNKGDKSKRNGLVYLLTDYGNKSVCAKCGRSIGSQPQKQKHGIRRRLHCSKHKETANCCKSIIQDYIEDAFLISVARHIDYNLINTQVKPADIIRNSDRLEEIDLEMANVIDMRRTVKDEKIKLKLKFDYEALENEKEDLIKQKLEFKQFKIAPNDIKKFIRTVNDARDYKNNEARTFVKSILMQCIRKIEVHMEKKKLECYGYPNLFENAIVNVVDVEFYTDKKLSIFVSAETNTLLFSKISDEFADESLGSFTEEQLKAWNDVGFDNFQNLGERGTLVNENENSTENLWFASDLAEAFMNEIINQSEDES

SEQ ID NO: 14710 - protein, 580 aa, synthetic construct
MSTKVAIYARYSSANQTEQSIEGQIRDCYSYAERNDFTVVAEYIDRAISGLTDDRPDFQRMIEDSKKREFDFILVWKLDRFSRDRYDSAIYKRELKKNGVRVLSVMENVGHGDESIILESILESMAEFYSRDLSKKVKRGLRETCLKGNFPGGFVPLGYQVADRKIVPDPEIAPLIRRAFERFAAGVPTGRIVEELNAAGVRGNQGRPLTYSTVNKILKNRKYIGEFIHGENRLVDAYEPLIDPETFERVQARISGNKRAPAAGKADEPYRLRGKIFCGYCGSALVGESGRGKLGAVYHYYACAQKKKHRACRKMNERKGFLEWYVAEQTTEYVLNPERLDYIARGVIRSLRNDDKTKDIFRIRKKIDALESEIISYLDMLPTAPPATRERLFQRIETQTAQKETAETELARAELSARTQLNEEDVIKWIKNFCVGDLLDPEFQQRLIDTFINAIFLFEDKIVIYYNVKNGKQVSYFEMISDLNDPDDDLNPDVPSHPSPPDDPPGSDLLPSTPLKNRADLIFRGCALWEYRFVRFTARVFHIFVICQSQNTDRILKPPNVVLGDFNIIYQTINGQIKEA

SEQ ID NO: 14711 - protein, 544 aa, synthetic construct
MVNNLGKAAIYARVSSERQAEKDLSIPAQIKALRKYALERGWDVVVEYVDEAESARTANRPAFKEMIAMAKKKEKPFDTILVWKLSRFARNREDSILYKSLLRKRGISVISINEQVDESPAGHLLEGIIEVIDEFYSINLSQDTVRGMKENASRGFYNGGFTPFGYKRTKVKIGMADKTKLIPDENEANVVKKIFEMAVGGLGGKEITKSLNAAGTRTKSGKQFSTTAINHILRNEVYTGALVWRFRNNGYGNSRKAASNDIIRVPNCHEAVVSTEDFGRVQQLLTRRRPVSQHPRTISSQYLLSGLLHCGKCGAAMSGCWAKSGKYFYYDCVQHQKKGKEVCNCRLMSKDKLESFVLERIRENILTDENIKQLVQLVNEELVKNSGYFEEQLSEVGQQLGQVKSKLSKLYAALETGKIDLEDLAPRIKELRSQQIELEEKRNGLLDEMNEESPQSLNIKTIQEYVSSMKALLASSSFIEQKSFLRSFVKRIELNEPHVVIDYTMPLPINGLTTTEEVLCIDKLGSRGRTRTYDQAVNSRPLYH

SEQ ID NO: 14712 - protein, 638 aa, synthetic construct
MKPKLYSYVRFSSVKQREGNSLERQQDTALKIATRYNLELDTTAFHDLGMSAFKGKNAHEGKLSEFIKQIGVKVPVGSWLVVENLDRISRDDAWSALDIFKSILSKGIVVVTGMDEKVYKYADVKNNPTDLIISLLMFTRAHDESLTKKNRVEAQARSLIRHNLTREPGTPAKAIESVGQNVWWVDTKSGYVTPHSIYFAAAQKIIELKQNGETLLGIQRYLNEHYTAPKKRVYKDKTGQALTPKTEQWGKHLIRTFLNPTVHGQKIFTLDKRDESGAIIYDSESDEPLKETFIIPDYYPALMSEVDYLTLSKLDRHRAVTRSSSTYPGGNPEPEIPLLSGIGILFCGKCGSFMFKSGSSENKYRYICGSKIVQGKPCGKKGFTSYQLEHTVLQLIADHVWNNHQEDKTAWYESEIEKASEAVKKLLKLATLTDNIEELADQINANRQKKITLEKEFQQYKISRSEIQTTGWDQFRHFDVHDTKNPERKRIRLKVKQAIKRIDCYDIDGRHSHFEMTFADETKQRIVIKFNRNRSPGISYVEAQTVNDHDLLKMQGLVLHSFIDELISPEKFAQHIKDKHEVSILNPTFITELEDGVTRDEDSGMAIRVDGITSKSYATVNGIKYEINSLEDLEKLSQ

SEQ ID NO: 14713 - protein, 553 aa, synthetic construct
MSTITKIQGYQHDVKQLRVAAYCRVSTDNFEQLESLENQRAHYQKYINNHPNWELAKIYYDEGISGTKMTKRNALKELLTDCHNHRIDLVVTKSISRLSRNTTDCLQIVRELQQLNIPIIFEKEHINTGAMASELFLSILSSIAQDESHSTAGNLRWAIRKRFASGKFHVSSAPYGYSIEDGNLVINHTEAKTVRQIFQRFLSGTSASQIAKELTQKQVSTKRGGQWRSNTVINILRNSNYTGDMLCQKTYRDDQYHRHFNQGELAQYLIEDHHPSLINHENFNRVQVLLKEAVKKRHIETGSHKYQQHYLFSGKIICGQCGTIFKRQTRPHKIYWACQQHLRSAQQCSTKAVSEASLKAAFCNMINKLVYSKKFLLQPLLEGLKEEANVNSDGQLISLTKQIKANDHKAETLTELMHAGLLDKAIYVNQTARLEQDTYQCQEKIKQLNGQNTDSANDFEDVRTLLGWCHQGKQLTEFDEGVFQEFVQQIVVNSSNKATFILKCGLKLPEKLNKNATIDGHFYRDIIKQRYNDPIKQTEYLYSIIESEGDLIG

SEQ ID NO: 14714 - protein, 525 aa, synthetic construct
MGKVRIIPAHQQKGNSVQPQQSRQPFEQLRVAAYCRVSTDYDEQASSYETQVAHYKELIQKEPTWEFAGIYADDGISGTNTKKREQFNQMIAACKAGKIDLIVTKSISRFARNTIDCLKYIRDLKAINVAIFFEKENINTMDAKGEVLITIMASLAQQESESLSQNVKMGIQYRYQQGKVFVNHNHFLGYTKDAQGNLVIEPAEAQVIKRIFYSYLDGMTMKQIADSLKGDGVLTGGKTTNWQSSGVARILKNEKYMGDALLQKTYTVDFLNKKRVKNQGIMPQYYVEDDHPAIIPKSVFMQVQQIIKRRRNGITTKNGKHRRINGKYCFSQKVFCGKCGDILQRNMWYRPEKVAVWRCASRVRRSKTGRRCMIRNVKEPLLKEATVDAFNQLIESHDLASKQIKANIMKVIKSSKGPTLDQLDKQLEEVQMKLIQAANKHQDCDALTQQIMDLRKQKEIVQSRETINEVKLHIIDEINEFADLHKYGLVEFDEGLVRHLVEKITIFQRYMEFTFKDGEVIRINK

SEQ ID NO: 14715 - protein, 550 aa, synthetic construct
MKVAIYARYSSDNQRDASIADQFRLCRLHAEKQSWRVIEEYSDHAISGASMIRPGIQALMADAMRGRFDLILAEAMDRISRDQEDIAGIFKRMSYADVKIVTLSEGEVTHLHVGLKGTMNAIFLKDLADKTRRGQRGRVEAGKSGGGNAYGYDVVKKLDARGEPIRGDRSINPQQAEVVRRIFRDYAAGQSAKAIAFALNKEGIPAPTGGDWGFSTINGNPKRGNGILNNEMYIGKIVWNRQRFIKDPDTGKRQARPNPESEWVTQEVPELRILDDDLWAAVKARQDRHKIAPDAKGRPDLPKVHTRRRPKYLFSGLTRCSCCGGGFSQISATLIGCSTARNKGTCDNRLNIRRDELEARVLTALRTKLVDPELFAHFCEVFTQEMNRLRMEARSGIGSAEAEIAKIDRELARLITAIKAGGPIEAVVEDMKRLEHRKSELRSFLAEADEPPPMLHPSMALQYRKRVQQLYDALQGDDDARRVEAAETLRTLVDQIILTPAGDRLEIDVQGDLAGILAISAQSKNPAALATGAQVKMVAGVGFEPTTFRL

SEQ ID NO: 14716 - protein, 547 aa, synthetic construct
MKLLVPYIRWSTKEQDSGDSLRRQTNLIDAFYSKHKEEYYLLPAHRYVDKGKSGFHQQHKAQGSDFRRMFENVMSGAIPEGSLIVVENFDRFSRADIDTAIDDVRQILRKGVSILTLGDGELYDKSALTDPVKLIKHIIIAERAHQESLVKQKRIAQVWNHKTQLARELKKPMGKQAPGWLELSEDGSHYIVDEDKASLVNIIYDKRLSGMSMFAICKWLNEQGYPTINQRKVRISKTKKPDGNWSALSVKHILTSRSVLGYLPAKISSEDRKTVLREEIEGFYPQIVTDSKFYAVQQLLEETGKGKTSSGEHWLYVNILKGLIRCKCGLVMTPTGIRKPVYQGTYRCNGNKESRCNYGTVSRKLLDTQLCSRLFSKLSQLHDEATDTARLDELQRRLNTVDGELEKLTETLIQLPNITQIQEALRVKQEEKDELIVQLSREKARVKSVSSLDLSGLDMESVEGRTEAQIIIKRLVKEIVVSGNEKLVDIYLHNGNMIRGFPLDGKDDHTLTLEEATDEMQSLDDMLIFGEPVTRIYPAGDMEEVDA

SEQ ID NO: 14717 - protein, 547 aa, synthetic construct
MKLLVTYIRWSTKEQDSGDSLRRQTNLIDAFYSKHKNDYYLLPAHRYVDKGKSGFHQQHKNQGSDFRRMFENVMSGAIPEGSLIVVENFDRFSRADIDTAIDDVRQILRKGVSILTLGDGELYDKSALTDPVKLIKHIIIAERAHQESLVKQKRIAQVWNHKTQLARELKKPMGKQAPGWLELSEDGSHYIVDEDKASLVNIIYDKRLSGMSMFAICKWLNEQGYPTINQRKVRISKTKKPDGNWSALSVKHILTSRSVLGYLPAKISTEDRKTVLREEIEGFYPQIVTDSKFYAVQQLLEETGKGKTSSGEHWLYVNILKGLIRCKCGLVMTPTGIRKPVYQGTYRCNGNKESRCSYGTVSRKFLDTQLCSRLFSKLSQLHDEATDTAKLDELQRRLNTVDGELEKLTETLIQLPNITQIQEALRVKQEEKDELIVQLSREKARVKSVSSLDLSGLDMESVEGRTEAQIIIKRLVKEIVVSGNEKLVDIYLHNGNMIRGFPLDGKDDHTLTLEEATDEMQSLDDMLIFGEPVTRIYPAGDMEEVDA

SEQ ID NO: 14718 - protein, 506 aa, synthetic construct
MRSVITYLRFSSATQGAEGADSTRRQNELFKQWLRKNSDAQVVASFNDEGLSGYKGKHLSGQFGDMLSRIESGEFPEGTILLVEAIDRIGRLEHLETEALMNRIIAHGIEIHTLQDGLIYTRDALSDDLGISIIQRVKSYIAHQESKQKSFRVSQKWEQRAKLALAGEQRLTRNVPGWIDPETFKLNEHAETVRLIFKLLLDGESLHNIARHLQSNGIRSFSRRKDANGFSVHSVRTILRSETAIGTLPASQRNDRPAIPNYYEAAIDASTFNKAQEILGKNRIGRTPASDNPLTINIFKGLFRCQCGASVHPTGTKNKYQGVYRCNNHLDGRCDVPPLKRKPFDRWMIDNFLGMIDVVSDGETERRIAALQHEVETVTARIKKATALLLEMDDITELKAQVKELNQKRTELQTTIDTLKRKTSLTDKELPQLKDIDLMTKAGRVECQLILSKHLKGLTLGKDSVTVTLQNDTEITIPTNPLPLNDGTSIFEIADKELLEIDAYQL

SEQ ID NO: 14719 - protein, 546 aa, synthetic construct
MNAISTKAAIYARFSTELQSDRSIDDQVALCRAFAEREGLEITAVHSDRARSGGSRFGREGLDALMEDARAGRVGVVIVEALDRLSRDMEDLAGIHKRLTFQGVQIRAVHEGAVNTVLVGLRGLIGQLYREDNVHKIRRTMAGIARDGRSAGGRAYGYRPLPGKPGERVIVEEEAAIVRRIYAEYLAGRTPRDIACGLTKDAVPAPFGARWNASTIVGSRARQNGILHNQLYAGRQVWNRVRMVRDPDTGKRVSRENLPEEWTITDVPALAIVDSDTFAAAQARLLARGGARPWEKRRPRRILSGLLRCGACGAGMSTMGKDKSGRTRIRCTAQAERGDCPDPATFYLDTVEKAVLDGLRGELVHPTIMTEYVREYHAERQRLAADTISRRADIERRLAAIDKEAERVTDWLVKGVGDVDRLDRRAKELMVEESALREQLASSGEAPNIVTLHPQALKRYEQQLGELHSALGRALEHGVQEAADAVRDLVSSITLARATDGGIAIDIEGRLNALLGPVAYPNSRHTAVSGGVMVAEEGLEPPTRGL

SEQ ID NO: 14720 - protein, 553 aa, synthetic construct
MSTITKIQEFQRNVQQLRVAAYCRVSTDNIAQLESLENQRQHYQEYIRRHLNWQLARIYYDEGLSGTKTQQRKALNELLADCNNHRIDLVITKSISRLSRNTTDCLQIVRQLQQLNIPIYFEKERINTGEMASELFLSILSSIAQDESHSTAGNLRWSIRKRFADGSFRVSSAPYGYFIQDGNLMINPHEVRIVKTIFNHFLQGQSTSQIAKQLNIRQIPTQHGHRWWSSTIINILRNINYTGDMLCQKTYRDDQYRRHINHGELAQYLIEDHHPAIVSHQDFDRAQDLLKHIAQKRHIEVGSHKYQRHYLFTRKLICGYCGTTFKRQTRSNRICWACQKHLHSATQCPVKAISEEGIRNAFCTMMNKLVFSKKFLIQPLLQKLREQINADTDGKLNQFTKLIEANDQKAATLTKLMQEGLIDKSLYINQTAKLEQSSYQYQEQIKQINSNQTDNANNLEDFRDLLRWCQQGQLLTRFDPKLFQTYVRSVKVLNQYEITFQLKCGLNLEEHLTKKAMVNEHFYRDVIHQRFNEPVKQAEYLYSTIKSEVDLIE

SEQ ID NO: 14721 - protein, 525 aa, synthetic construct
MSKVHIIPAHQQRGNSVHRLPDEPQSEKLRVAAYCRVSTELDEQANSYETQVSHYKELIQKDPSWEMAGIFADDGISGTNTKKREQFNKMIAACKAGKIDLIVTKSISRFARNTIDCLKYIRDLKAINVAIFFEKENINTMDAKGEVLITIMASLAQQESESLSQNVKMGIQYRYQQGKVFVNHNHFLGYTKDDQGNLVIEPEEAKVIKRIFYSYLNGMTMKQIADSLKADGILTGGKTKNWRSSGVAKILKNEKYMGDALLQKTYTVDFLNKKRVKNEGIMPQYYVENDHPAIIPKSVFMQVQQLIKQRRNGITTKNGKHRRLNGKYCFSQKVFCGKCGDILQRNMWYRPEKVAVWRCASRIRRSKTGRRCMIRNVKEPLLKEATVEAFNQLIEGHELASKQIKANIMKVIKNSKGPTLDQIDHQLEKVQMKLIQAANQHQDCDALTQQIMDLRKQKEKVQSRETNQQAKLHSLDEINKLVELHKYGLVDFDEQLVRRLVEKITIFQRYIEFTFKDGEVIKVKM

SEQ ID NO: 14722 - protein, 591 aa, synthetic construct
MRNLSHDSRAVLYLRVSTKDQAQRGGELEGFSIPAQREACRRKAESMGATVISEFVDAGESARSTDRPELQRMLLMLSSEAVDFVIVHKVDRLARNRVDDVEINVAIQKTGARLVSVTENIDETPSGMLMHGIMSSIAEFYSRNLANEVVKGMQQKVQSGGTTALAPIGYENVRKVVGGREVRTVQIDRERAEHIVWAFSAYSSGEWSLRNLAAALESRGLVQKATAKRAERPLRPNRLQTILRNRYYLGFVSWKGVEHVGQHEPLVSPEVFEQVQKVLDAHRQSGERPQKHHHYLIGSLHCARCDSKMIYSVSKGNGGAYQYFVCLGHHSKTSDCALPYLSVETVEKQVVTAWHREKSKWNELAVRAIESTLADDLRAHRDEAAQQHGAFTRRIEKIQRERLQWAEKAMDGLVPDDIARNKQSQLGRQLGSLQEQQALLDKTNADYSGTLARVANLIRNCGDIYERASDRLRRDLNQSWFNQLRVDETDGDVSVSATDRTRLMATLHQAGPGVIHAPTIDSPPPRDISLSTFFSDNENGEDRSPRRICRVRGANEHLLVELRGLEPLRKQGIHAGHDIFIASYVTVDAID

SEQ ID NO: 14723 - protein, 428 aa, synthetic construct
MSTDQDEQLSSYENQVSYYRDYILKHEDYELVDIYADEGISATNTKKREAFNRLIQDCRAGKVDRILVKSISRFARNTLDCIKYVRELKELGIGVTFEKENIDSLDSKGEVLLTILSSLAQDESRSISENATWGIRKKFERGEVRVNTTKFMGYDKDENGKLVINPEQAEVVKHIYQQFLKGYSPESIAKELNTNGIKGWSGKANWYPSSILKMLQNEKYKGDALLQKTYTVDFLTKKRTENDGQVNQYYVTNNHEAIIDTEMWDTVQEELARRKDFREKHKLKTYIMQSDDNPFTTKVFCAECGSAFGRKNWTTSRGKRKVWPCNNRYKVKGQIGCQNNHIDEEMLEKAFMKAVELLQEHRADVVVKWQKLEKGTNLLHKHYAKQMYQLLDLEKFDGTIMNKVLDHISISEVGQIIVIFLEGTEVEL

SEQ ID NO: 14724 - protein, 521 aa, synthetic construct
MKVPVWCYARISTLKQIDGFGIQRQINTINQFLQCVELDHRLPFTLDVDNVTQMVAEGKSAFRDKNWNEKTKLGQYRKMVMDGVISDSVLIVENIDRLTRLDPYMAIEIISGLVNRGTTILEIETGMTYSRYIPESITVLVMQCNRANGESKRKSIMMQKSHANRYGKVSKVRPRWFDVVEIDGIKQYRPNETAKAIQRMYNDYINGIGAAHIVRTYGNTDNGKAWTLVTVLRALSDKRVADDARYPPIIDKKLYDSVQALKAATNKKGNTHQKNMLNIFSGMSRCPVCNQSIIVKRNSHGNLFTVCLGKRTNKTCEARSISYFALERPLLTAIRGLDFSEVYKHEDKNVLTLRDQWIQNERDIAAFRERLNKASRHEKFAILDELEIMNREQEELTIRLKSVDVPKDIQLTFDNDKLDLDTNYRIELNNRIKKLIQHINIVREDVSKSSYTIYCTIKYWTDVISHLVIIDVNIKRTGTGGTNTLTTTLRSVSSLNMDGTVSGNPDSDAWEYWKSFLDKLK

SEQ ID NO: 14725 - protein, 507 aa, synthetic construct
MKRAISYIRFSSEKQSRGDSLRRQSKMVNDWLKAHPEYYLDQDLSFRDLGVSGFTGKHLKGGLGDFLTAIEKGLVKAGDTLLIESLDRLSRQDVDQASELLRNILRSGVDVVTLSDGEHYTKESLKDPLALIKSILIMQRAHEESLRKAERIQAAWDAKKEAAKAGIKISRRCPAWLKLNDDRKSFSVIPEKVETVKRCFQLRLEGKSIWEIVRTLNAEGHRSMNQYKPGKFGQTSVQDLLKNRSVIGYFTPKGCEEISGYYPAIIDETTFYKVQQLSHSRYGKRSVSDKPLSVNLFKGVIRCSECGHALIITGFSDTRNGIYRCPLRNENRCNAKGLSRKQTDGTLLALLSRLDRFDSDMTNVIDALKLHREHISNNIEKLVQLSLEIEDLSAITIKLKQLKGELSQVDADIEKETQRLKSIDVGCLSDCDLTTKAGRIEAQLIIKSAVKEVVLNTAKRRCKVTFHNSKSITLPITENPSEDVTEAIQSLSEVTERGLIDVDEVII

SEQ ID NO: 14726 - protein, 413 aa, synthetic construct
MSVKKIRVNKQKHKKRVCAYIRVSTTNGSQLDSLENQKQYFENLYSIRDDIDFMGIYHDRGISGSKDNRPNFQAMIEDCRRGKIDVIHTKSIARFARNTVTVLEISRELKAIGVDIFFEEQNIHTLSSEGEVMLSVLASIAEDELRSMSGNQRWAFQKKFQRGELVINTKRFLGYDVDENGELIINPEEAVIVKEIFSLYLEGNGTHRIAKQLNEKGVATVTGAKWHDTTIRQMLSNEKYKGSALLQKYFHDGVNGPKKLNQGEFEQYLIEDNHEAIISKEDWQRVQDKLNSRRWQQGKNKTYKFTGLLKCQHCSSTLKRQVSYKKKIVWCCSKYIKEGKVACQGMRVPEVDISNWEITSPVTVIERDGNGEKYYSYSGQESADQRSSSGQEENQGSRILSSVHRPRRTAIKL

SEQ ID NO: 14727 - protein, 430 aa, synthetic construct
MSTDQEEQLSSYENQVNYYREFISKHEDYELVDIYADEGISATNTKKRDAFNRLIQDCRAGKVDRILVKSISRFTRNTLDCIKYVRELKELGVGVTFEKENIDSLDSKGEVLLTILSSLAQDESRSISENATWGIRKKFERGEVRVNTTKFMGYDKDENGKLIVNPQQAETVKFIYGKFLEGYSPESIAKYLNDNEIPGWTGKANWYPSAIQKMLQNEKYKGDALLQKTFTVDFLTKKRVQNDGQVNQYYVENSHEAIIDKDTWELVQLELERRKAYREEHQIKSYIMQNDDNPFTTKVFCAECGSAFGRKNWTTSRGKRKVWQCNNRYRVKGQIGCQNNHIDEETLEKAVVMAVELLSENVDLLHGKWNKILEENRPLEKHYCTKLADLINKSSWEFDSYEMCQVLDSITISEDGQITVLFLESSEVEL

SEQ ID NO: 14728 - protein, 547 aa, synthetic construct
MKLLVTYIRWSTKEQDSGDSLRRQTNLIDAFYAKHKEEYYLLPAHRYVDKGKSGFHQQHKAQGSDFRRMFENVMSGVIPEGSLIVVENFDRFSRADIDTAIDDVRQILRKGVSILTLGDGELYDKSALTDPVKLIKHIIIAERAHQESLVKQKRIAQVWNHKTQLARELKKPMGKQAPGWLELSEDGSHYIVDEDKASLVNIIYDKRLSGMSMFAICKWLNEQGYPTINQRKVRISKTKKPDGNWSALSVKHILTSRSVLGYLPAKISTEDRKTVLREEIEGFYPQIVTDSKFYAVQQLLEETGKGKTSSGEHWLYVNILKGLIRCKCGLVMTPTGIRKPVYQGTYRCNGNKESRCSYGTVSRKLLDTQLCSRLFSKLSQLHDEATDTAKLDELQRRLNTVDGELEKLTETLIQLPNITQIQEALRVKQGEKDELIVQLSREKARVKSVSSLDLSGLDMESVEGRTEAQIIIKRLVKEIVVSGNEKLVDIYLHNGNMIRGFPLDGKDDHTLTLEEATDEMQSLDDMLIFGEPVTRIYPAGDMEEVDA

SEQ ID NO: 14729 - protein, 499 aa, synthetic construct
MKIRRVQPTQTLQKKLRVAAYARVSVDTLHHSLAAQVSYYSSLIQKNPAWEYAGVYADEGITGTSTTHRTEFKRLIADCNAGKIDLVLVKSISRFARDTVDCLHTVRKLKEKGIAVRFERENIDSMSEDGELLLTLLASFAQEESRSIGDNIRWGVRRRFAEGIPNGHKPPYGYRWDGEMFCIVEVEGKIVKEIFRRYLAGESAYAIAKSLAWRGVTGRQGRPIEQTTVKDILSNISYTGTMALQKNYISEGHIRKRNKGELPLYLVDGVFEPLVSKDDFDEAQEIRKMRAERSANRNPVLMPFSGMVKCGCCGGGFSRRTAGKYRRWGCNTRERKGRESCDSRPIKEEELVAAVRTVMEKDDFDATELRHKVSKIVIHNDCVEFHLTNGRIKKIARTYSGQRGSNPFTNKVYCASCGSKCERDTWTKGTKVWSCSQPRTKCRLKQLPESELKEAAESFFGDGYEGKIVQNVERITISDDEVIFQLKEGGAYRWQRQCG

SEQ ID NO: 14730 - protein, 523 aa, synthetic construct
MAKTVRVIPASPKIFRSEVTAEPRRRRTAGYARVSTDHEEQASSYEMQMAHYKNYIESRADWDFVGMYSDEGISGTNTKKRDGFNQMIEDALAGKIDLIITKSVSRFARNTVDSLQNVRKLKEHGVEIYFEKENIWTFDTRGELLITIMSSLAQEESRSISENTTWGKRKQFAEGKTSVGYSAFLGYDKDFKINEEQAKIVRLIYKLFLGGRSFYAITKELEKRGIKSPSGKDRWYISTVRSILTNEKYRGDALIQKEYTADFLDKTRRKNTGEIPQYYVEEHHEAIIPPDLFDFVQSEIKRREQNGKHSGVSIFANKIKCGCCGGWYGAKVWHSTDKYRRVIYRCNKKYAQKGKPCSTRHLTEEEIKRIFVKALNSLVEVKENVIAELRSLIDDVCQTEELMEERDSVEQEIVVLAERLETLIRENARVAQDQTVYLKQENEIRARYLDKQGALEKLDEQLAERESKRNILETMIQVVYGINGDQVEFDEALWGGLLNYIVVKEDGQVVVVFKGGIEIGVDG

SEQ ID NO: 14731 - protein, 496 aa, synthetic construct
MKIRRVQPSTVLQKKLRVAAYARVSVDTLHHSLAAQVSYYSALIQNNPAWEYAGVYADEGITGTSTTHRDEFKRLIADCNAGKIDLVLVKSISRFARDTVDCLHTVRRLKEKGIAVRFERENIDSTSEDGELLLTLLASFAQEESRSIGDNIRWGVRRRFAEGIPNGHKAPYGYTWDGEMFRIVPAEGKVVKEIYRRYLAGESAYAIANSLAEHGIMGRQGRPIEQTTVKDILSNCSYTGTMALQKNYITEGHIRKRNKGELPMYLVEGTFEPLVSKTDFDKAQEIRKRRAERAVNRNPVLPFSGMVKCGCCGGGFSRRTAGKYRRWGCNTRERKGRESCGSRPIKEEELVAAVRTVMQKDEFDAAELRRKVSKIVIHNDCVEFHLTNGRIKKTARIYNGQRGSNPFTNKVYCASCDSKCERDTWTKRTKVWSCSQPRTKCRLKRLPESELKEAAESLFGDGYEGKIVQNVEWIAISDDEVIFHLKEGGAYRWQRQ

SEQ ID NO: 14732 - protein, 535 aa, synthetic construct
MAKTVRVIPASPKIFRSEVTAEPRRRRTAGYARVSTDHEEQASSYEMQMAHYKNYIESRADWDFVGMYSDEGISGTNTKKRDGFNQMIEDALAGEIDLIITKSVSRFARNTVDSLQNVRKLKEHGVEIYFEKENIWTFDSRGELLITIMSSLAQEESRSISENTTWGKRKQFAEGKTSVGYSAFLGYDKDFEINEEQAKIVRLIYKLFLGGRSFYAITKELEKRGIKSPSGKDKWYISTVRSILTNEKYRGDALIQKEYTADFLDKTRRKNTGEIPQYYVEEHHEAIIPPDLFDFVQAEIKRREQNGKHSGVSIFANKIKCGCCGGWYGAKVWHSTDKYRRVIYRCNKKYTHKGKPCNTRHLTEDEIKQIFVKALNSLVDVKENVIAELRSLIDDVCQTVELTEERNRAEQELGVLAERLETLIRENARVAQDQNAYLKQENEIRALYVEKQGHLARLDEQIAEREGKRKTLETMIQVVCGIDGEQLAFDEELWSGLLDHIVVKEDGAVVVVFKGGIESGVDGCRGLFYLRKQSG

SEQ ID NO: 14733 - protein, 507 aa, synthetic construct
MKRVISYIRFSSERQAKGDSLRRQSKMVNDWLKAHPEYYLDQDLSFRDLGVSGFTGKHLKGGLGDFLTAIEKGLVKAGDTLLIESLDRLSRQDIDIASELLRRILRAGVDIVTLSDGEHYTRESLKDPLALIKSILIMQRAHEESLRKAERIQAAWDAKKEAAKAGIKISKRCPAWLKLNDDRKTFSVIPEKVETVRRCFQLRLEGKSIWEIVRTLNDEGHQTLNQYKAGKFGQTSVQDLLKNRSVIGYFTPKGCEEIAGYFPPIIPETDFYKVQQLSYSRYGRKPASDKPLSVNLFKGVIRCSECGHALIITGFSDTRNGIYRCPLRNENRCSAKGLSRKQTDGTLLALLSRIDRFDSDMTNTIDTLKLHREHISSNIEKLVQLSLEIEDLSAITSKLKQLKGELSQVNADIEKETQRLKSIDVGCLSDCDLTTKAGRIEAQLIIKSAVKEVILNTAKRRCKVTFHNGKVIDLPITEDPSEDVTEAIQSLSEVTERGLIDVDEVII

SEQ ID NO: 14734 - protein, 506 aa, synthetic construct
MRSVITYLRFSSAIQGAEGADSTRRQNDLFKQWLKKNSDAQVVASFSDEGLSGYKGKHLTGQFGDMLARIESGEFPEGTILLVESIDRIGRLEHLETEALMNRILGNGLEIHTLQDGLIYTKDALADDLGISIIQRVKAYIAHQESKQKSFRVSQKWGQRAKLALAGEQRLTRNVPGWIDPDTLKLNEHAETVRLIFKLLLDGESLHNIARHLQSNDIKSFSRRKDANGFSVHSVRTVLRSESVIGTLPASQRNDRPAIPNYYEAAIDASTFNKAQEILDKNRKGRTPASDNPLTINIFKGLFRCQCGASVHPTGTKRTYQGVYRCNNHLDGRCHVPPLKRKPFDKWMLENFLGMIDVGNDGESERKIAALQHEVEIVTSRIKKATALLLEMDDITELKAQVKELNQKRTELQTTIDTLKRKTSLTDKELPQLKDIDLTTKAGRVECQLILSKHLKGLTLGKDSVIVTLQNDTEITIPTNPLPLNDGTSIFEIAEKELLEIDAYQL

SEQ ID NO: 14735 - protein, 617 aa, synthetic construct
MTLSPLPSGLDMGELHKLAATAAQIQRTSTPDNADGLVPAISYLRVSTKDQATRNGLEEGLSIPAQREAAQRKADQLGAVIVKEFIEPGESAKTAQRRALQDMLDYVTENPVQYCIINKVDRLARNRLDDAIIHATLRDANISLVSVTENIDETPSGMLMHGILASMAEFYSLNLAQEVLKGMTQKASMGGTPAKAPLGYLNVRTTDAKGHEIRDVTVDPERAELITFAFTAYATGNWTLSSLATELEARGLTTRPTPSFPSKPVTTKALHKILTNPYYQGSVTFRGVTYDGAHDPLVDTETWLRVQTELAAKNQRGEKPRTHDHYLKGTLYCSCGAKMMIECPTGKSGITYEYFTCSGRRKKNGCTRSAILTDRIEDRIDSTYGANGLTPDEADRVREVLGAVFDQLEATTDHERALLTTQKEKLDAELLKLVQAHYADAIPLDLLKSEQERIRTTHDAIEHRLENLATSYEDTREGLDQLADILTDLGDVYTRCEPAERRILNRALFDKIILDDEETVRYQPDQAVQAALDCVIPGHAPIAEAEASDPEDTSNPARLSAGQGSKMSLLVEHRGFEPLTSSMPWKRATNCANAPEFGLSAVSGTSLSEWSIGDSNP

SEQ ID NO: 14736 - protein, 467 aa, synthetic construct
MKCVIYRRVSTDMQVEEGISLDMQKLRLEQYAKSQGWVVVNDYCDEGYSAKNTERPAFQKMIKDMKKKQFDIILVYRLDRFTRSVSDLHSILKIMDEYNVKFKSSTEIFDTTTATGRMFITLVATLAQWERETTAERVRDSMHKKAELGLRNGAKSPMGYDLNKGNLYINHTEAEIVKYIFEMFKTKGIISIVKSLNSRGIKTKRGKIFNYDAVRYIINNPIYIGKIRWGEDILTDIAQKDFETFIDKDTWYTVQQVQDSRKRGKVRLHNFFVFSNVLKCARCGKHFLGNKQVRSNNRIVMSYRCSSRHHKGTCDMPQVPEDVIEKEFLNLLEDAIVDLDDTEEKPIELSNLQEQYNRIQDKKARLKYLFIEGDIPKNEYKKDMLTLTQEEHMIQKQLANVTDTASSLEIKELLNHLKDEWYNLNNESKKAAVNAIVSSITVEVTKPARVGKNPIAPVIKVTDFKIK

SEQ ID NO: 14737 - protein, 689 aa, synthetic construct
MTSTDLIPTALLARKAVVYVRQSTQSQVITNLESQRRQYDLVDIARQRGFSDVEVIDDDLGRSASGTVARPGFDRLVALLCAGKVGAVFCFDASRLARNGRDWHHLLELCGLVEARVIDHDGVYNPCRPNDRLLLGMKGSISEFELGVLRARMLDAARSKARRGELRLSVPFGYIWHREAGLGLDPDLRLQEVIRSIFTRFHELGSARQVLLSMTKDQIHFPRPRDEGRMTNFVWIPVRYRNVIGILKNPFYAGVYVYGKSEKRTAIVDGRARRSYGHGKPVGTWEVMIRDHHEGYISWDEYERNQQQLALNNYGRSGGTKSGRGGKALLSGLLTCGRCGRRLSVAYTGNPQSPVYRCYKQNLMMGLPRCMTFGGSKVDAAVARELLRAVEPLAIEATFEAERMHRERQEDQRHIHDLERQQARYEASLAERRYAACDPDNRLIAAQLEKNWETALRRVRDLEVRRPAESPSTIEVDPGTFANLADNLQAAWESPDVTMRVRQQLLRTLIADIVVDVDDEVRDVVLTIHWKGGQHSELKVRKPQTGEHGCATTEDALAVMRSMAGRWSDEHIAASLNRMGMPTGQGKTWTAHRVASVRRVRAIHAYKSAGKDGEWLTMTEAAAVLGVTNHRIRHLINTNVLSAEQVVPGAPYQIRASDLTSATVQAAIARKGRPCRIPDTETLPMFTDT

SEQ ID NO: 14738 - protein, 515 aa, synthetic construct
MKTAIYLRKSRADLEAEARGEGETLAKHRTTLLKIAKEMNLNVLAVREEIVSGESLVKRPEMLALLEEIEDNKYDVVLCMDMDRLGRGGMKEQGIILETFKRSNTKIMTPRKTYDLNDEWDEEYSEFEAFMARKELKIITRRMQRGRVASVEAGNYLGTHAPFGYDIHRLNKRERTLTINPEEASVVRMIFDWYANEDMGANAIRSKLNDLGYKSKLGNEWNPYSILDILKNNVYIGKVTWQKRKEVKRPDAVKRSCARQDKSDWIIADGKHEPIIPESLFEQVQEKLNSRYHVPYNTNGIKNPLAGIIKCSKCGYSMVQRYPKNRKETMDCKHRGCENKSSYTELIEKRLLEALKEWYINYKADFEKHKQDNKLKETQVIQMNEAALRKLEKELVDVQKQKNNLHDLLERGVYTVDMFLERSNVVSDRITEITSTMENLKKEIKTEIKKEKVKKDTIPQVEHVLDLYFKTDDPKKKNSLLKSVLEKAVYKKEKWQRLDDFELVLYPKLPQDGDI

SEQ ID NO: 14739 - protein, 532 aa, synthetic construct
MKRAVIYARYSTDLQNDKSVEDQIRLCKAHAAKHSFEVVNEFYDRAKSGASMFGRPGLADMMQAAERGEFDVLVAEAPDRISRDIADLAHVHKQLTFRGIEMNCVNGGEMSTVQIGMYGLVGQMQREEGAKKVKRGMVGVVRSGRNAGGKAYGYRPVAGKPGELEIIEEEAAIVRRIFDLYAAGVSPRTIAGTLNAEGIPAPRGRHWNASTINGNGQRENGILRNMIFTGKIVWNRVRMVKDPSTGRRVSRINDEADYETVDAPHLRIIDDTLFQTVRARKNIAKAQGRTASRSKRLLSGLLRCGACGGGMTMVGPDRSGKRIQCSTHRESGVCQNGRRYYVERIEALVLSRLRSQFADTSIIEAYVSAYQDEQKRLRSTAIRDRANATRLLEEANEEISGIIRMMAKGLVDENEGTAMLAPLRARRDQQKAILESVEEPPNVIELQPKAVRRFRENIESLAQIVGENEGEPPIELVAPFRHLVAAVVVGQSENGQPYEINIKGYLSSLISSELSVIKMVAEEGFEPPTQGL

SEQ ID NO: 14740 - protein, 600 aa, synthetic construct
MLILKKDERLSSEEIMNLIGKINGLIYVRVSTADQAEKGYSIESQIEMCKDRAIKKFGYKENELIVLVEPGGMGDDPNRPALNHALHLLEKGLGKKIFVLHPDRLTRDNTLQGIVSRKIWSMGVDIEFIEFEVDPTNPESMLMYNIQGSIAQYNKAKILANSKRGRTAKAKKGEFPSFKRLYGYTFNKETDKPEINEEEKAVLIQMKDMLLYEGMSSNEIAKHLSKIGVPAPEGETWHQASVSRMFNNLDYTGDFYYGKTKVVQVNGEKKQVPRPREEWILIKIPQIWSHETRDMILEALKKNTRNSGRKSNDYLLKNIVKCGRCGGSCGSGITSKTKSGIYKYYSCSNKRRKSYINGLKIINCEGKNWRVDIVDEVLWKWVVKLLRNPEFFVEEFTNKTGTQQKIEQITASIGDNEKRLSQVEQEITNYVLLFGKGKIDEAMFDNLTSSLNERKDQLRQDLILLSNTLESLKETSDKKGKIMKYIKSINKLLESKMETRDKRKVISLLIEKVILNEDDTMQIILKNDSSKKTKPLNGLEMTNKETTSNNPHKNQDLIQTYGGQTARIHSHSCWLLQGNGSFSFFKPRPAIKISNQHQLS

SEQ ID NO: 14741 - protein, 472 aa, synthetic construct
MEDSSNKSVGIYVRVSTDEQAKEGFSISAQKEKLKAYCVSQGWANFKFYVDEGKSAKDTHRPSLELLLRHIEQGIIDTVLVYRLDRLTRSVRDLYTLLDYFDKYNAVFRSATEVYDTGSATGRLFITLVAAMAQWERENLGERVKMGQNEKARQGQFSAPAPFGFIKEGKSLVKNHEQGEILLEIIDKVKKGYSTRQIANYLDDSGLLPIRGYRWHPGTILTLLKNPILYGSFRWGDEIIEDTHEGYISKDEFDRIQEILKERSIVKKRDSYSVFIFQSKIVCAGCGNRLASERSKYFRKKDKQYVETNNYRCQTCAQNRKPSIMGSEKKFQKALVKYMQNVTPKLEPKIPEEKKHDYEKVHQKILNLEKQRKKYQKAWSLDLMTDEEFEQLMYETKEALKSAQNELAAAHSSDSQNSQIDIERAKEIVKMFNENWSVLTNEEKRSIVQELIKHINFTKEDGEIIITHIEFY

SEQ ID NO: 14742 - protein, 495 aa, synthetic construct
MRYAEYLRKSRADDPSEPIEVTLARHREALRQCMAKHALVVAPEDVFEEVASGDSLYARPQMLKLLEAVEQGVYDGVLCMDIQRLGRGSMSDQGAILDAFKLSGTKIITPNKVYDLSDENDETYTEFETFLGRQEYKMIKRRLRRGIKATVESGGYIANAPYGYEKTRIGKTPSLKPNPEEAPFVRMIFDLYLSGMGCQRIADRINSLGAKPRRDVQFSRTTIRNILQNPVYTGHIVWDRKTHIRPSRQSGGKHITIYNPQESWTIVDGLHQGIVPQETFEQVQGIFAKRHRSPSFTGVIENPLAGLIVCGNCGHNMQRQADKRGGPMLLCQKRGCIVSSKLHLVEEALISRLREEMNELVQNAGSESPGEDNTAQTLKAIERQIATAKAQDSRLYDLVEQGVYDTDTFLQRHAALSQRIADLEKARTDIRPREQLNVPKMAERIQEVLDSYFDMDSQQRNELLKSVLEKVIYKKEPGAKPAEFHLTLFLLPIYL

SEQ ID NO: 14743 - protein, 503 aa, synthetic construct
MNNRIDAIYARQSVDKKDSISIESQIEFCKYELKGGSCREYTDKGYSGKNTDRPKFQELVRDIKKGLIAKVIVYKLDRISRSILDFATMMELFQQYNVEFVSSTEKFDTSTPMGRAMLNICIVFAQLERETIQKRVTDAYYSRSQRGFKMGGKAPYGFHTEPIKMDGINTKRLVVKPEEAANIRLMFEMYAEPTTSYGDITRHFAEQGILFNGRELIRPTLAQMLRNPVYVQADLDVYEFFKSQGTVLVNDAADFTGMNGCYLYQGRDVKPGKAQSLKDQMLVLAPHEGIVPSDIWLTCRKKLMNNMKIQSARKATHTWLAGKIKCGNCGYALMSIFNPSGRQYLRCTKRLDNKSCPGCGKIITAELEAVVYRQMVKKLDSYKTLTGRKKAAKANPKITALQVELAHVDSEIEKLLDSLTGANNVLLSYVNVKIAELDGRKQELLAKMAELTVEAISPEQVSQISGYLDTWKNVSFDDKRRVVDLMITTIAATSDSLNITWKI

SEQ ID NO: 14744 - protein, 555 aa, synthetic construct
MDIHTIRQQLKTRPIYDLPLRVTFYARVSSEKDEQLNSLGNQIAYYQELIRKNPAWEYVEGYIDEGLSAATTKNRENFHRMVEDGRAGVFDFIITKEISRFARNTLDSISYTRELLNAGVGVFFQNDNINTLDEDSELRLTIMSGIAQDELRKLSSRVKFGHAQAIKNSVVLGNSRIFGYIKDGGRLVIDEDEARMVQELFELYATGEHSMKQIETIFWEKGYRNHNGNRIAHTTMSGIISNPKYKGYYVGNKVKVVDLFTKKQKFLPPEEWVMFKDETGEIVPAIVDEELWEQANQVLHKRSEDVKNRQGICNHANLLTGKLICTHCGVAYYRRDSVSRDGKKNSKWVCSGKIKNGADACPSFAIYEEEIKPLLFQVFSKTEADAEALVEEYVEVYKSLQDDGDTARQIEDMRKRIELAQKKKSKLLGFNAMGELSDRDFLAMNKACDQEISEAEKQIYELEQSQLSRGELKKHIDTIRRVLHEAKRDAAEGIINKEFVDKYIDKIYVTPEEGRMLLQIKIFTGETTDKYLQNLRGRAGHTFKKMIESYEKGLK

SEQ ID NO: 14745 - protein, 501 aa, synthetic construct
MNIREDAIYGRQSVDRKDSISIESQIEFCKYELRGGNFRQYTDKGYSGKNTDRPKFQELIADIKRGLIKRVVVYKLDRISRSILDFATMMETFQAYNVEFVSSTEKFDTSTPMGRAMLNICIVFAQLERETIQKRVTDAYYSRCQRGFHMSGAAPSGFQLEPTTIQGIRTKMMKPDPETADIARLMFEMYAQPSTSFGDIARHFADEGILIYDKELTRGFISQMLRNPIYAQADLDMYEFFKSQGTVVINEAADFAGTNGCYLYQGRDVQERKNKHLKDQILVVAPSEGLVSADVWLHCRKKLMANTTFQNGRKAKNTWLAGKVKCGRCGYALMSVGNPSGVQYLRCSKRADNKSCPGCGTLRTREFERFIYGEMVKKLAQFQTLTGKREKVNPKLTALNVELARVEDEIEKLLNTLTGASAVLISYANTKIEELDAQRQTLSKEIAALSAETMSPEQIERLSVYLNRWEEIDFDDRRQVADGLISQIRATGECVAIEWKI

SEQ ID NO: 14746 - protein, 541 aa, synthetic construct
MSTTSPSRNVTVIPAKPQGSAPGQPTKKKLRVAAYCRVSTDKDEQLNSFEVQKTYYTEKITSNPNWKMAGIFADEGITGTSMKKRDQFMRMLRHCREGRIDLILVKSVSRFGRNTVDVMRTVRSLREKNITVMFEKENLDTSQMTSELMLAFFSAFSQSESESIRENIIRGNAMAYAQGKVSVSPTMFGFTKDSNGEIAVDEEQAQVVRMIYNDYLDGMTPGDIKKKLERLHIKTSFGRDTWNTTVILSLLQNEKYMGDALRQKTFKPSLFSNRSKVNNGELPKFYVSDCLPVIVEPDLWQQVQEEVARRRAKRASTEKAKNPLEGRHRGKYALSDILICGKCGSPYRRTTWAKKGKKKIVWRCGTRLDYGTQFCNESPTIEERSLHTAIVNGIMNQYINVSADMELLKANLDRALAPQVPGGEADIRTRISELTQQKQDLVARCMEENDITKYELLLTKIVEELEQLNQRLKGIESQQKDRAVTETRMAEISELLKQFADSGLQYDDVLTRRLVSAIRVKSDEEIEITFKDGKTRTEMIE

SEQ ID NO: 14747 - protein, 507 aa, synthetic construct
MPQVQRIDPIMLPNEKESVAAYCRVSTNSADQLNSYNSQIAYYTKLINENPDWELYDIYADAGITGTSIEKRDEFQRMLADCREGKIKRVLVKSVSRFARNTTELLETTRKLNDLGVVVIFEEQGFDTSQVLGEMQLALFAMAAQEESFSISKNMRWSYQKRMQNGTFACCLPPVGYDLKNGTLTENHDAGIVKEIFKRYNSGEGMTKIAAYLNEQYPDGKSWGRTAISKVLRNEKYIGDSLLQKGFTSDTLPFVRKENKGERPQYYVEGTHTGIIDKRCFESSSTLRERRLHEKSKGKEHLFTHRLLCATCGHHMRQVTSNGKSYWLCAGRAGQVTDCDYFRLAEDSIIIASLNMMTKIFLNQDNIILPTIAHLREIEYTQSGSDTKLSELDLSLAALNDKSLTLQKLNTKGFISPEEYRFQSEALAAQRKRITAERNKKLNGLQSHSAIEKLEELQAILSSWPGLPTEFDIDQFDEVIEKIIPTADNKLTFRLHCGLELTEEIPS

SEQ ID NO: 14748 - protein, 498 aa, synthetic construct
MLGAIYARYSAGPNQTDQSIEGQVADCQAYAERNGIQIVEIYADRHISGKSIVGRNEFQRMLHDAEQHRFECVIVWKIDRFGRDRQDIALSKMKLKKAGVRLLYAEESVPEGPEGIILESVLEGLAEYYSADLRQKIVRGMRETAKKGQYCGAPLPIGYTVDDEKHIIVDEEKAAVVREAFWMHNAGAQTKELVELFRKHGVTGQRGKPITQAVIYRMLRNEKYLGRFEIQGVEILTDPIIDLATFEEAAKHFGTPRNNAAGRAKVDYLLSCKCFCSYCGAMLNGESGTSKTGKVYHYYKCGAKKRGEKCELKPIPRDHFEDRVIEATVEDMLTEDMIEKLTVRILEIQEQEDALDPAAAYRKQLDSNRKRQRNILDAIEEGTGARGLAGRLAELEAEEEELLVEIERAEMKKPRLTSEAVGAWLRSFRNGDTKDAAFRQRLVDTFIARIEVRNGQAMIFYNIQEKGPHSKVRVRSEWWRWRESNPRPKEGRRGFLRA

SEQ ID NO: 14749 - protein, 517 aa, synthetic construct
MTVTDISREPQKPTIIRLAAYYRVSSKSADQLHSFAAQIRYYKDYERKNPQYKLVDVYADEGLSGTDMKKRDEQNRLIRDCKLGKIDRIITKSVSRFARNTQELLVALRSLKEMGVSIYFEEQGIDSDKMNMEMLVTFPGMAAQQESVNISDHLRRSYQMRMESGEFNCCAPAYGYDLVDGQLVVKVDEAAVIRRIFDLYLQGTGKQNIANILNAERVPRRYAQKKWYHSTVNYVINNERYMGDALLQKKFTTDTLPFRKKKNRGEKPQFYVENSNPPIVSREVYMAAQELQKLRNISYKCAGGYPLTGILRCPECGRSFRRLLLNSTAYWLCSGGAAGATDCKSRRVRENAVYDTFCLMVDKLSAHRQDLLVTLIHQLEMMQNRGGESQEKIRQIDKQIADLSAQNLVIARLHTNGVLNATDFAAQSSVISNKINALRLDRKKTLAEDKDDELIDTLKSLDDTFAEYVSGASFDQHLFEQIVQSITVVDNARLTFHLIGGLALTEQIPENARCRTA

SEQ ID NO: 14750 - protein, 548 aa, synthetic construct
MQPTMTAPQKVVRKIPAKIDIAEEIKQAHRQLRVAAYCRVSTAQEEQLNIYDVQVRYYTEKIRSEPKWAFVGIFADRGLSGTSTKKRDEFNKMIKMCRRGKIDMIITKSISRFARNTADVLKYVRMLKEIGVDIFFEEQNIHSTQPGAEFYITIYGSIAQSESENISANVIWGKNQSAKEGKVPFQYKRFLGYRRGPDGKPEIDPEQAEVVKRIYERFLAGDSMTTIANDLTADGIPTPTGSGKWVPGTIQSIISNEKYAGNAVLNKTYVVDCISKKVRRNDGKARPMYFVENNHPAIIDPATFGRAQEELARRTGKRKVKQKGTKTEQGRYSSKYALTELLVCGECGTPYRRCTWTVKGEKKPVWRCINRLDFGKRYCHHSPTMEESVLQEAVMAAIMRTAKQSADVLGTLKLHIGMGLKNDSGEDNSLDIQIRIAEIDAQFKAMLQAIATDTVEDFDEQRATALMSEKNSLEQQLAQLDNAQQEKENEESRLDEIFTILDGLENHPMEYDDRLVRQVLECVVVESKERIKVIFAGGLEVEQAIEKA

SEQ ID NO: 14751 - protein, 480 aa, synthetic construct
MASKPNQELETRFRVLYIRVSTEAQAEEGYSIGAQQERLEAYCRAMGWKNYQLYIDPGFSGSNLNRPKMQQLIADVQAGKVCAVVVYKLDRLSRSQKDTLYLIEDIFIPNDVAFVSLNENIDTGTPYGRAMIGILSAFAQLERENIYQRTRMGMLERVKQGYWMGGGGVPYGYDYDRNQGILVPNPQQAEQVRKMYDLYLKGYSAQKIANMLGLHYDKIVTQILTRKSNTGVICYKGEEYPGLHEPIISEEIYNLTQIKMRERSEKSRVPTKGTHLLAGLVYCGECGARMRYVKWGKNGYKLYCYSKDNSKPHMKRADSCDSEPCWADQIEDLVIQDLFNISANLERSTKDDTAPPVNPLQELESQIAQTEAKVKRLYNLYAIDGNDMLLDTIEENKRQLALLREQLIMEEETRTRAKHIDLVRERVVSIRSAWGMLSMQERQTVLRDCIDRIIIHKNKVEIFYTFLKDKGKAGTAKYVA

SEQ ID NO: 14752 - protein, 560 aa, synthetic construct
MKTKLYSYIRFSSMKQADGSSFERQKRTAKEIAAKYDLELVTSYQDFGVSAFKGANSKTGALSRFLDEIGRSVPVGSWLVVENLDRISRQSVIEAQELFLSIIRRGITIVTGMDGKVYSKESVNANPIDLLLSVMLFARANEESQTKRNRTNSSALLKVKAHQENPQNPAVAIEEVGRNIWWADTSSGYVLPHPVYFPVIKKIVELKQNGYSNGRVLDYLNERIAPPNYTTNKDTPKKWARSMLARMFSNRALLGIKEITIEGVTYELKDYYPRVMEDAEFYQLKKTIGLRSFSYPTKSSPVITLLSGAGLLRCGHCGASMVKRSGASKERLAQYRYMCDGADSRRTNCDHPNWGFRGDQLDKAVLQLLADKIWIAEDKANPIPGMQAQIEDISRKIDNLISLSAMTGATKELADQITTLNHEREAIYNQIKVIEENMYSVDSQGWEKLAQFDLEDVCSEERLKVRLKIKEAVKSIKCYKIDTNYNHFVMEYIDGKTQRIVIERSRRNRKGRIFVDVKTINDRQILESNGLVLHPCLEMLTDKNWKPEEEQPGLLQEFGI

SEQ ID NO: 14753 - protein, 506 aa, synthetic construct
MRSVITYLRYSSAIQGAEGADSTRRQNDLFKQWLKKNSDAQVVASFSDEGLSGYKGKHLTGQFGDMLARIESGEFPEGTILLVESIDRIGRLEHLETEALMNRILGNGLEIHTLQDGLIYTKDALADDLGISIIQRVKAYIAHQESKQKSFRVSQKWEQRAKLALAGEQRLTRNVPGWIDPDTFKCNEHAETVRLIFKLLLDGESLHNIARHLQSNDIKSFSRRKDANGFSVHSVRTVLRSESVIGTLPASQRNDRPAIPNYYEAAIDAATFNKAQEILDKNRKGRTPASDNPLTINIFKGLFRCQCGASVHPTGTKNKYAGVYRCNNHLDGRCDVPPLKRKPFDKWMIDNFLGMIDVGNDGEAEGKIASLQHEVEIVTTRIKKATALLLEMDDITELKTQVKELNQKRTELQTTIDSMRRKTSLSDKGLPQLKDIDLMTKEGRVECQLILSKHLKGLTLGKDSVTVTLQNDTEITIPTNPLPLNDGSPIFEIADKELLDIDAYQL

SEQ ID NO: 14754 - protein, 458 aa, synthetic construct
MMDVAYCRTSVRRDYKVSIEMQKEVIQQHVTHDISKWFIDDGLSGSTINRPDFARLIEWVTSSTQSRTLYVTRYDRLSRNVSNALDFLELCQTHHVEVVSVLEPIPSSLGDKQAAQLLFVQILFSLAEFTRSVTIENINQGLAQKKLEKKVLSAKVPFGYRYQEGKIVPHPSEARVVRQIFSLYTSTSMGYQKIAQQLQKEGKTFRGKPFKKHHVAAILRHSVYTGRIGHNSKNLTPYLSHDVIPIIQPDIFQQAIEKRSRRLPKKRDTREYSLRKKISCPYCDRKLSPKMQSDSIYHHTYHYYACGHEDCVGYRLDASKIEKEVLTSIKTYLTETDNLTTLLDELKKQLSQVAKQKEATVSDLMKQKSCIFDQYEQGTLSKKEMVQQLDILTKQLNDVTSITLTEEQLEERVTQLLHLSDNTIQDVIWSYIDHIQVTPDKQLKEVLLYGIRIQSDVV

SEQ ID NO: 14755 - protein, 553 aa, synthetic construct
MAFGFNQTLSDSLDQPKAALYLRVSTTEQAVHGYSLAAQEQVIRQFCLQRGYDVYDVYADEGISGKRTENRPAFQKMMADARENLFDMVIVWKLSRLGRNNRDILNTTEELYKHNVSFYSISEQFDISTSTGRLMLQLLGSFGEFERNQISENVQLAMRSLVRDQKRFAGGRMLGYVSTVDDEGRKQLAIQEEEAVIVRKIYQDYANGKGYRAIANDLNRLGYQTVKGNSFSTVAVKDILMNKTYGGYLEYAKYVNWEEKRRKGKNPQPIVVEGTHEPIVDKDLFESVQTRMKVAKKQPQWNERGENLLTGLLRCPECGGPMAASNTTNTLKDGTKKRIRYYSCANFRNKGASVCHANSVRADKAEQFVADRLQEVIQVPEILEGLVKALNKEINQQACQAEQESHTLQQQLTDIQTKQAKWQQVLDDKPELYSDLKERLEQLESDTIMIQQRQREIERLKQTKKQPIQVTDISRILEAIQQFINKSSKKEIKQVYQSFIKEITFNKETKDQFQLHLYFDEAIVNQLNTIYQKAISRGDMAIFVYKDRIGFRL

SEQ ID NO: 14756 - protein, 561 aa, synthetic construct
MEEVEYKNVEETLKLPVVAYCRVSTNKQEQESSYENQHRFFKERATKTENEVLVKIYADKGISATSLKKREEFKQMLYDAGINEYRGRDEFTYEIDHKRKPKFRKIYVRNTSRFTRDASIITILRALLKNGVHVHFLDIDLIYDDTSKEFMLNMFINFAQQESIDKSKKVKDGNVVMASVGSIRVGGYGIYGYEYSSFTKKLSIIKKEADVVCKIYELYLKGYGVRRILNYLQDNGIKPRSGKERFSINSVRRILTNEKYYGCNVRNKYDSGSVFAKHYPKLKDKEEWIYHEGVIPPIIRKDTFLKAQEIGNNKVHKISQKGVYKGTSEFAGLITCPKCKASYTRNVDKGRVFYNCSTKKSKGVHACDNINISEDKINEGINKLLETGVKKKFDKYKETMTQLLKDMVRSKILAQIDKDNEAEVRVIQEQVDKLTRQKNRLIELYLDENMDKVLLDEKANSINIELEILNKKINELSKSNQEIYDELHEFDCMIDEIKQIQISEVSNREELLQLIHIKIERHSENSKKPVAKIFFKYDEPIKKLSSKYKILEGISSVILHT

SEQ ID NO: 14757 - protein, 507 aa, synthetic construct
MKRAISYIRFSSEKQSRGDSLRRQSKMVTDWLKAHPEYYLDQDLSFRDLGVSGFTGKHLKGGLGDFLTAIEKGLVKAGDTLLIESLDRLSRQNVDQASELLRNILRSGVDVVTLSDGEHYTKESLRDPLSLIKSILIMQRAHEESLRKAERIQAAWDAKKEAAKAGIKISRRCPAWLKLNDDRKSFSVIPEKVETVKRCFQLRLEGKSIWEIVRTLNAEGHQTLNQYKAGKFGQTSVQDLLKNRSVIGYFTPKGCEEISGYYPAIIDETTFYKVQQLSYARYGRKPASDKPMAVNLFKGVIRCSECGHALIITGFSDTRNGIYRCPLRNENRCSAKGLSRKQTDGTLLALLSRLDRFDSDMTNTIDTLKLHREHISSNIEKLVQLSLEIEDLSAITSKLRQLKNELSQVDADIEKETQRLKSIDVGCLSDCDLTTKAGRIEAQLIIKSAVKEVVLNTAKRRCKVTFHNGKTITLPITENPSDNVTEAIQSLSEVTERGLIDVDEVII

SEQ ID NO: 14758 - protein, 523 aa, synthetic construct
MRQVITYLRFSSKPQERGDSIRRQKGLFERWLKDNPDAKVVDEFSDEGASAYHGHHLKGDFGRMLQNIQDGRYLSGQTVLLVESETRLNRQKARNTENLVDLITGKGVDVICLESGKIYTSTNIDDLDTSIQLKIAAHIAHQQSKEKSIKVSAAWEHRAQLALEGKQQLTKNVPGWIDPDTRKLNEHSSTVVTIFDLLLSGESLHNIARYLQANNIKSFSRREKANGFSVHSVRTILRSESTVGTLAASKRNDRPAIPNYYEPAIDVATFNKAQEILSKNRVGRAPASDNPITINLFKGIIRCQCGASVHPTGVKATYQGVYRCNNVPDGRCNVPTIKRKPFDKWMLDNIIGFLERSDGNNTDKRKAEIEYQISLVTSKLKKATTLLLELDDVTELKEQVKELNIQRSNLQSELDELNQRETLSDKPLHHLSEIDLTTKAGRVEAQLILSKFVQSIELQREMIIITLRNGTVIGKSRDLSPVLSRDLMKQVVSSPSPTDIDMFSVITSDEEFRKSGKQVTKRS

SEQ ID NO: 14759 - protein, 636 aa, synthetic construct
MKLPDDTEPSLVVPTSDSTVGALSGIDSRYMALDTGSESNADHSRVLAANRESIVTSKSMKRAALYARVSTETQQKERTIESQLFELKKQIVAAGHMLVKEYTDDGYSGKYLDRPALDELRTALKADTFDVVYFHAVDRIAREPIHQNIIVGELLKHKKRIIISGKDYEENPENRFTLDVLGAVAKFERAKILERTRRGALHRLRSGQLTSHGQKTYGYTYVRKTPTQPCALVINEDQAAVVRSIFEMFASGRYGLNAITRFLEKSGAPTYKGKGLWYAQNVRFMLQNPTYVGTRYFNRLASVNDVSGDGKRPKGNKRVLRDREDWIAVKVPAIVSQELFDKVQERLRIVRERYRQPAVPHLLGGLVRCVECGRMYSSSRFYVPREHPSGKVSVYHRAVYRCNRHLNDNTHDPARVKPCRNSVIATHILENTVVDIIRDVMFDAGKLGCCIEGTDRADDGSAARELARIAGETKRLDEERRQNIELYATEQRTATEYLNVNIALDEVLDRLKREKADAASTLREAAARDVLGASIRHFCATARVRFEECADFDAKRRFLRDHIDRIMFNHGKIALVGSVPLGSVATKETELHFRIEGEIDRATIRSKSLRRLWRDERSTSWVPGTHAEEPSDEPAA

SEQ ID NO: 14760 - protein, 529 aa, synthetic construct
MLVIKSKVVEIIRACAYIRYSSDNQRDESLEAQIRAIKEFGKSNGYEVVKVYQDKAKSATTDKRPEFQQMIKDSGNDVFDAVIVHKLDRFSRNKYDSAQYKRKLKQNGVKLISVTENLDGSPESIILESVIEGMAEYYSKNLAREVMKGMRETAYQAKHTGGLPPLGYDVNSDKKYVINDREAESVRLIYEMYVTGYTQSQMVDELNARGFKTKVGAMFKSNSINSVLSNEKYTGVYVFNKSAKKDAFGKRNSHLQKDSSEIIRIEGGMPKIIEKELYDKAQEILRSRKKSKAVNKAKESYLLSGIIKCGECGYSMYGNRRKPKDKPLYVSYRCGCRKRTSSNVCNNKEIRKEYIEEYVLTELEARIFNDKAIPILVEGINENLRKQNKGDEDKKSVFQKELEEVEKQINNIVTAITNGFMQEEFKIKMEELKDRKIYLEGKLIELEANQSVTKVTEEDIRGLLSGFKEYVITKNIPECKNFIQNFVKEVIVYKTHVEVVFNVGLNLGEDNKYKFSSKSSIWSIRKKHN

SEQ ID NO: 14761 - protein, 534 aa, synthetic construct
MKAAIYSRKSKFTGKGESIENQIEMCKKYASDNEYDEIFIYEDEGFSGGNINRPEFKQMMKDAKSHKFDVIICYRLDRISRNVSDFSTLIDKLKLLNIGFISIKEQFDTTSPMGTAMMFISSVFAQLERETIAERIKDNMYELAKTGRWLGGTPPFGFISEQCLYSEANGKQKKMFQLTPVESECELIKYMYEKYLSLGSLGKLQKHLLSKEIKTRNNATWDIKALQLILRNPVYVKSDEVVLSYLESKGAKVFGEVNGNGILSYNKKDSKDKYKDISEWILSVAKHNGLIDSSLWLLVQKKLDKNKSLAPRLVSNDSSGLLSRVLYCKKCGGKMIQKKGHASVKTKEPFRYYVCLNKMNFKSCDSKNIRADILEKHVADKIIDETSDAGSLIKAIDDYKNKLQLDSSKSTNLNSIKKQIALKQTQINNLMENISKNPKLFDLFNSKIEELNSELKSLKFKKFEAESVKENNSNALKEIDASTQMLLNFKKLWIYADFSTKKLLIENIVDSVYYNANDKTADVKLICFKKKGAL

SEQ ID NO: 14762 - protein, 505 aa, synthetic construct
MDRICIYLRKSRADEELEKTIGEGETLSKHRKALLKFAKEKKLNIVEIKEEIVSADSIFFRPKMIELLKEVETKRYIGVLVMDIQRLGRGDTEDQGIITRIFKESHTKIITPQKTYDLDDDLDEDYFEFESFMGRKEYKMIKKRMQGGRVRSVEDGNYIATNPPFGYDVHWINKSRTLKANSKESEIVKLIFKLYIKGNGAGTIAKHLNDLGYKTKFGNNFSNSSVIFILKNPVYIGKITWKKKDIKKSKDPNKVKDTRTRDKSEWIIADGKHKAIIDSNIWNKAQEILSNKYHIPYKLANPPANPLAGLVICSKCNGKMVMRKYGKKLPHLICTNTKCNNKSARFDYIEKAILEGLEEYLKNYKVNVKGNGKKANLKPYEQQLNALSKELIVLNEQKLKLFDFLEREVYTEEIFLERSKNLDERINTSTLAINKIKKILDDEKKKNNKNDIVKFEKILEGYKETKDIQKKNELMKSLIFKIEYKKEQHQRNDDFDIRLFPKLLR

SEQ ID NO: 14763 - protein, 569 aa, synthetic construct
MTDIKDVFKHHKSRVDKIDTIEEKTKKDSYGVLIRVSDVKQVTKDSIPMQRERAYKFIKERDGILYKEYIEEAVSASKNSIKQRPVLQELLKDIEDGKINKVIAYKRDRLSRIQKDWLTILDTIFKNNCDIEFTSAEEQPISSNPMVRGIMEPVLGFLANMESNNTSMRVKETRASIAAKGRWTGGTLPYGYDLNKNKEIVVIKEVIPSLIEIEDLYLNGIGVGSITRYMNGHEVKHLGKRKKGADIKRVVYKGRKTYWTESAVEGVLFNPFYAGIIEYSKEGNKHLQYDQDKFVREKGFHEAIRTLDKQEKIYEMKSKKSISAPRKFSTTFLLTGLVYCSECGSPIQSRTVLKKERNNEKYCYYVCASKQNKDKTSRNEMCPSKNFKQNILEDFVVSKLLEMFDGFNKDNLKEEILKGIDQGKSTIETDIVSAQAELKELQSELVSIMNLMKRVSPESPLYEEIITDYEKSYTETLLKKKEIEEKLESLQQSIKENNDKEIEQNIVLDALKNFSIVFKEASQVQRKTLLDSIIKRIDISQDGKLNILCNFELPKDGESYVHSINRRPV

SEQ ID NO: 14764 - protein, 510 aa, synthetic construct
MALHENSRIAVYSRKSREDRDSEDTLAKHRNELEYLIKRENFKNVQWFEEVVSGETIDERPMFSLLLPRIENGEFDAVCAVAMDRLSRGSQIDSGRILEAFKQSGTLFITPKKTYDLSIEGDEMLSEFESIIARSEYRAIKRRTINGKKNATREGRLHSGSVPYGYKWDKNLKAAVVVEEKKKIYRMMIKWFLEEEHSCTVIAEMLNELKVPSPSGRSIWYGEVVSEILSNDFHRGYVWFGKYKKSKSNNSIVQNKNLDEVLIAKGHHETMKTDEEHALILNRIEKLRTYKVAGRRLNMNTHRLSGIVRCPYCHKAQAIEQPKGRRKHVRKCLRKSAERTKECEETKGIHEEVLFQSIMREIKKYNESLFSPTEQDVNDDSYTAQLIGLREKAVKKAKGRIERIKEMYLDGDISKTEYKEKLKISQETLQKAENDLAELIASTEFQNALSAETKKEKWSHHKVQEMIESTDGMSNSEINLILKMLISHVTYTVEDLGDGTKNLNIKVYYN

SEQ ID NO: 14765 - protein, 503 aa, synthetic construct
MNNRIDAVYARQSVDKKDSISIESQIEFCKYELKGGSCKEYTDKGYSGKNTDRPHFQELIRDIQKGLIAKVVVYKLDRISRSILDFSNMMELFQQYDVEFVSSTEKFDTSTPMGRAMLNICIVFAQLERETIQKRVTDAYYSRSQRGFKMGGKPPYGFHTEPIVMEGIHTKKLVVNQEEAAHIRLMFEMYAEPKTSYGDITRYFAEQGILFYGKELIRPTLAQMLRNPVYVQSDLDVYEFFKSQGTAIVNDAGDFSGMNGCYLYQGRDVKPDKLHNLKDQMLVLAPHEGIVPSDIWLACRRKLMNNMKIQSARKATHTWLAGKIKCGNCGYALMSIVNRVGKQYLRCTKRLDNKSCVGCGKIYTAELETVVYQQMVKKLEGYKTLTGRKKAEKANPKIAALQVELARVDSEIEKLVDSLTGANNVLLSYVNVKIAELDSRKQELVKKIAELTVDTISPEQVKQVSGYLDTWDSVSFDDKRRVVDLLITTIAATSDKLNITWKI

SEQ ID NO: 14766 - protein, 553 aa, synthetic construct
MEKVDSQESSPIRRAVGYFRVSTGRQAESDLSIPDQRKQALEYCNRKGWELVNEFVEPGQSATDDNRPALQEMIAQATSHGCPYDVIVVHSYSRFFRDSFAMEYYIRKLAKANVEVVSITQELGNDPAQVMMRHIIGLFDEYQSRETAKHTLRSMKENARQGFYNGAPLPLGFKAVEVEVRGQRVKKKIVVDLTESETVRLIFQLYLRGDGTRGALGCKALVSWLNERGYRTKTGARFGVGSVAFILKNRSYTGEFLFNRMEAKTRKLKPASEQVSVSVPAIISLAEFEAVQTTLHARNPRVTAPRTVTAPTLLSGLAFCSQCNSSLILRTGTSHTGKVHRYYSCRANLRSGKFACEGVSIKMETLDTEVVQHLSERMLTVERLTELISSISLARTEKSAGASRRLTDLTSELGDTEARLKRIYLSIENGTAEVDDLFRSRISQLQTERQRIVDALARLRATTKVVEVVTPEAILKFSDLMRENIATGEPSFRRAYMRSVIERIIVGSDTIKIIGLKSTLGSAIEADSLPYIPVRSFERKWRPLQDSNLRQPA

SEQ ID NO: 14767 - protein, 689 aa, synthetic construct
MMNEKIRPHHLERKAILYVRQSSAHQVLHNRESGALQYAMHGRLTALGWSRIETIDDDLGRSAAGGVTRAGFDRMVAEVCLGKVGAVAAREVSRFARNSRDWQQLIEMCRVVDTVLVDQETVYAPRQGNDRLLLGLRGSLNEYELDLLRQRSLSARYEKARHGELVVAAPVGFVKVGDRIEKDPDRRVQEAIIMVFDKVAELGSARQALMWFLEHGLDLPAKRNNGDVVRRRPNYATIHRMIENPIYGGAYAYGKSGVAPGFGPSPVRPGARRKPREEWLALIPGSHEGYVSWERAEAIRTMVSDNVPTSRHHGAPKHGELLAGLVRCRRCGRKLTVRYTGTKHNIPRYSCWRGLLDNGEPRCIAFGGLRADDAIEEALLRVVEPGAIAAAAEAEAQAASRRDQVQNALGRDLEAARYAADRAFRQYDAADPENRLVAAELEMRWNRALAYVTEIESKIAAHDAATPKSSPASATDLQALAADLRSVWSAPTTDAKLKKRIVRTVIQEVVADIDDEASEIVLLAHWIGGAHTELRLPKRRRGQRNSTSADIIVAIRQLVLIASDDQIAGILNRNSLVTGHGNRWTRERVTAHRSHHKIPVFRLAPDGNEPLLNLNKAARLLGVAPKTLRLAAEAGEIEGVHPLPDGPWIFSRSELGKPLAQQIAHRARQNPKYPAGSHPDQQNLFPSTT

SEQ ID NO: 14768 - protein, 517 aa, synthetic construct
MYRPTNLDVFIYLRKSRKDIEEEKKAAESGTLYDTLQRHRDNLLAVARKEGHNILGIFEEIVSGESIAERTEIQKLLRELETGIADAVLVMDIDRLGRGDMLDQGILDRAFRYSGAKIITPTEVYDPESENWELVFGVKSIVSREELKVITKRLQGGRRDAAAKGKSITKKPPYGYLRDEKLKLYPDPDTAWVVVKIFEMMRDGHGRQAIAAELDKLGVKPPDEKRTFWSPSSITAIIKNEVYMGHIIWGKVKYIKQNGTYRRKKMPPERWYVKENAHEPLVSKELWEAANKAHTGRWRPSTIENKSLSNPLAGLLKCEICGYTMWYQPRKDRPNPIIRCASPRCKGVQKGALLPLVEERILQSLAEFVDQFEVQEQMLEKRERQSVIPLKQKALEKKEKELKELTTQKDNLHDLLERGIYTVEVFLERQQSVAERIKKTQEEMAQLQQEIEKEQLKEKNINEYIPTVKKVLEAYLQTDDVEKKNRLLKSVLEKATYLRKPEWTKKDQFLIQLYPKI

SEQ ID NO: 14769 - protein, 564 aa, synthetic construct
MLILKGDQRLTTEQIMTLIGKVNALIYARVSTTDQAKKGFSIESQLERCKERALSKFGYKESELVALIEPGGMGDDPNRPALNHALYLLEKGLGKKFLVLHPDRLTRDNTLQGVVSRRIWGMGVDLEFIEFEVDPNNPESMLMYNIQGSIAQYNKAKILANSKRGRLTKAKKGEFPSFKRLYGYKFNTVTDLPEYNEEEKEILLEMKDMLLSKKMSSNEIAKELSRRGVAAPNGKTWFQSTVSRMLQNEDYTGDFYYGKSKVVQLNGKKKQISTPEEEWILIKIPPIWDHDTRDQIIKQLKANFKGRSRSTRDYLLKGKARCGRCGGACGSGITSKTKSGVYKYYSCRNKNAKAYQNGREIYKCQGKNWRVDIVDDAFWKWFKKLIKNPQKFLEQFLEETSNEKSIEEIKNKVARLEKQLEDIDSEMANYVILFGKGKIKESMFDELTKPLELNKEHLENELDILQSQLNTNKKAEDKNQKTIEYMSSFAEMVDKDLSMAEKRQFLDFFIEKVTLYDDDHMEVVWRSSSLNDENNQSVDFNKADRGAESDNQHKRLNHLQAYGR

SEQ ID NO: 14770 - protein, 484 aa, synthetic construct
MKTLKYAVYVRVSTDRDEQVSSVENQIDICRYWLEKNGYEWDPNAVYFDDGISGTAWLERHAMQLILEKARRNELDTVVFKSIHRLARDLRDALEIKEILIGHGIRLVTIEENYDSLYEGGNDIKFEMFAMFAAQLPKTLSVSISAAMQAKARRGEVIGKPGLGYDVIDKRLVINEKEAEVVREIFDLSKKGFGYKKIASILNDKGIYTKSGQLWSDTTIAKVLKNQKYKGDLVLNRYKTVKVDGRKKRIYTPKDRLTIIEDHYPAIVSKELWNEVNNNRVSQKKVKQNMRNEFRGMIFCNHCGGSITVKYSGKCSKKNKKEWVYLKCSNFLRFNQCVNFNPIYYDEIREIIIYRLKQKEKELEIHFNPKIHEKREAKSIEIKKDIKLLKAKKEKLIDLYVEGLIDKDVFSKRDLNFENEIKEQELELLKLMDQNKRVNEEQQIKKAFSMLDEEKDMHEVFKILIKKITLSKDKYVEIEYTFSL

SEQ ID NO: 14771 - protein, 447 aa, synthetic construct
MKKVAIYCRESTEKQDIDSLVSLCERQAIKLGFQEYKIYKDVKTGYSNERTEYINLIDDIKSKKINVVITYESARLGRDELEHHILYKIFKDYGVKVYNMSHGWVDPNNEDDLFLEGLLNLLDAREGRKTARRVRDRMKEICQSGRWTGGPAPFGYYLKDKELFIDEEKAIIVREIFRLYLEGIPSSKIAAIYDFEPRQIRRMLSNPVYAGKLKYHQVRVENKKKIESKEYEVFDGIHEKIIAEETFHIANTMIKNTSTTRFTYHAIFRNLLYCNCGNKLYPAVGYGRRTYRCVHNCLRVVYEDEVLVDVIESIEDILNRIDLDNIDSQKKELEERIVFYKKNLTSLKTQIENLTRKYISGQVSEELYDKLNSELSEKVKFATSEIEKLNAKSFHVDSSVSNKKIILKYLEKIKKEEDKDKMNQFFSLIIDKIVFINGYRFIIYMKI

SEQ ID NO: 14772 - protein, 447 aa, synthetic construct
MKKVAIYCRESTEKQDIDSLVSLCERQAIKLGFQEYKIYKDVKTGYSNDRTEYINLVNDIKSRKINVVITYESARLGRDELEHHILYKIFKDYGVKVYNMSHGWVDPNNEDDLFLEGLLNLLDAREGRKTARRVRDRMREICQSGRWTGGPAPFGYRLKNKELFIDEEKAIIVREIYRLYLEGMPSSKIAAMYDFEPRQIRRMLSNPVYAGKLKYHQVRVENKKKIESKEYEVFDGIHEKIISEETFHIANTMIKNTSTTRFTYPAIFRNLLYCNCGNKLYPAIGYGRRTYRCVHNCLRVIYEDEVLVDVIESIENILNQLDLDTIDSQKKELEERIVFYKKNLTSLKTQIENLTRKYISEQISEELYDKLNSELSEKVKFATSEIEKLNAKSLHVDSSVSNKKIILKYLEKIKKEEDKDKMNQFFSLIIDKIVFINGYRFIIYMKI

SEQ ID NO: 14773 - protein, 499 aa, synthetic construct
MINVVGYARFSSDNQRQESIDAQVRAIEEYCLKNGYNLIKVYKDEAVTGTSFKDREQFLEMIDDSKNKLFEFVIVHKFDRFARNRYDHIICEKKLNNNGVKLLSVLEQLNDSPESVILKSVLQGMNEYYSLNLAREVKKGLKENALKCIHTGGIPPLGYDIGEDRKYIINEIEADSVRLIFKLYNEGMGYASISDYLNSLGRKNKRGLPFRKTSIRDILLNEKYIGVFVFGKKDAHGHLTGNEIKIDNGLPAIVDKEIFYLVEAKMKKRKTGTRSTAHIPYYLTGVCYCGECGGKFSGGYRAKNRNGDITYGYTCINRKAKVNDCKNKPIRKELLEDTVFNLIKKEIFTEKRIQSIASKVVKTIEERNLAKGTQLEKIEKELGKLKEQNEKLLSLFLKGRISDELFNKKHNELSTEITFYKQEMMKYTSDKKIDRETVLKFLYTFKENFKKEQTKKALIETFVKEIKVYEKHVEIVLRLFPLYIDSSGGSGGNRTRVRN

SEQ ID NO: 14774 - protein, 604 aa, synthetic construct
MKKVFVYHRVSSDQQLDGSGIARQAELLEGYLERTGICAEMDDPAPVVLSDQGVSAFKGLNISEGELGAWMEQVRNGMWDSSILVVESIDRFSRQNPFDVMGYINALMAHNVAIHDVMANIVISRSNSKDLPFVMMNAQRAYDESKYKSDRIRKGWAKKREQAFNKGTIVTNKRPQWIEVENDKYVLNYKAAVVKEIFALYQTGMGCPTIAKQLQTKEGEQYKFNRPWTGELVHKILTNRRVTGKIFISEIIRNHDDIENPVTQKKYDMDVYPVVISEDEFELVQELLKSRRPNAGRVTVKKDGQEEVLIKSNLFSGIARCTECGGPMYHNVVRAKRTPKKGDPKIEEYRYIRCLNERDGLCENKAMTYETVEHFVVEHLLGMDLNTVIKEQEFNPEIEVIRIQIDQVKDQITNYENGIERRKSAGKAVSFEMREELDDAKLELEQLLARQASLATVQVDLPVLQDVNVTELYNVNNVDIRTRYENELNKIVSNIRLKRNGNFYTIDIIYKQNELKRHVLFIENKKKEQKLISEVIIENVDGAKFYYTPSFVISVKDGEIRFQQTKEDLTIIDYSLLLNYVDAVDRCDAVGVWMRNNMSFLFTK

SEQ ID NO: 14775 - protein, 538 aa, synthetic construct
MSLIERLALRVALYGRFSTDKQKETSITDQMSVCERFAQGLPASEVILRCSDEGISGSTRVESRNGGRKLMADAMADRFDVLIVEALDRLSRDQVEQETIIRRLEYRGIRVIGVADGYDSTSSSRKVQRAVRGLVNELYIDDLRCKTIRGQTGQVERGFVAGGKSYGYDIVRSERGSDYQVNNDEAATVRFVFEKFAAGWSTLQICDDLNRRGIRSPRGGTWMRSALYGSPNKGSGMLNNSSYIGVYIWNRSQWLKDPDSGKRVREDRPEHEWKTEHRPHYRIVSDELWHAVRARMGADRLNSGTKGRSAPPRTLFAGVLRCAHCGGALTAINPRYYGCVTRKERGRHACEGVSVFREQTDERLLGVLRDELCSDATQADIDAAVRRYFGNDDTDRDAARLAKAKVDALTKEMDNLTQTIAELGMSPMLVQRFKHTEAERQALEQMLSNRKIGSDQYAEVAQRVRRRTADLKELLAGSTGEARQIIATLFGPITVEKRDEAYYASFDDVSERLITTTLGNVSTKMVAGVGFEPTTFGL

SEQ ID NO: 14776 - protein, 517 aa, synthetic construct
MRAVVYARYSSEKQDSTSIDDQLSVCRARANRDGFDIIGMHHDGAVSGSTQVGSREGGKALLADAMAARFDVLLLEGLDRLSRDQVEQESIVRRLEHRNIRIIGVCDGYDSEAPGRKVMRGVRGLINEIYLDDLRAKTHRGMSGQFERGFIAGGSLYGYDIVKSEQGSHYVINETEAAVVRWIFQAVAEGKGFRAIALRLNEDGVIAPRGGKWSVSGVYGSPVKGTGMINNSLYAGIYTWNRSQWVKDPDTGKRKRIERPESEWKRVDMPDLRIVDKATWAKVRHRIDSGRDEYGRKVSARPMKSLLGGILRCPHCGGPMAGRDRNYYGCSVHHNVGPSACPDYRLNRTLVEKRMLTIVRKDLLSPSAARLYEKEFRQHLKANSNAGKVRQARERLAEVEKEITRMIDAIVSVGASPALSARLKAAERERDTLNEIAGSGDQIVEVPDIRGIFKRQLLNLGEALKREPEIARAAMGQIFGKVALELRGNEVWGQIKTSPALLKVSGDAFEDGSGDRI

SEQ ID NO: 14777 - protein, 507 aa, synthetic construct
MKRVISYIRFSSERQAKGDSLRRQSKMVNDWLKAHPEYYLDQDLSFRDLGVSGFTGKHLKGGLGDFLTAIEKGLVKAGDTLLIESLDRLSRQDIDIASELLRNILRSGVDVVTLSDGEHYTRESLRDPLALIKSILIMQRAHEESLRKAERIQAAWDAKKEAAKAGIKVSKRCPAWLKLNDDRKSFSVIPDKVETVKRCFQLRLEGKSIWEIVRTLNDEGHQSMSQYKPGSFGQTSVQDLLKNRSVIGYFTPKGCEEISGYFPPIIPETDFYKVQQLSYSRYGRKPASDKPLSVNLFKGVIRCSECGHALIITGFSDTRNGIYRCPLRNENRCSAKGLSRKQTDGTLLALLSRLDRFDSDTTNTIDTLKLHREHISSNIEKLVQLSLEIEDLSAITSKLKQLKGELSQVDADIEKETQRLKSIDVGCLSDCDLTTKAGRIEAQLIIKSAVKEVVLNTAKRRCKVTFHNGRAITLPITENPSEDVTEAIQSLSEVTERGLIDVDVVEI

SEQ ID NO: 14778 - protein, 548 aa, synthetic construct
MKKELIKVSCYCRVSTNKDEQEQSFEAQQKYFKEKLSKDNGYDLVEVYADRGLSGTDFSKREQFNKMLEDCGIIKKEVKARETEIRKQFISIDYVADADIKPKFTLIYVKDSSRFARNTEVNRIISRLRDKGVYVYFEDLNKSTENPSEKMLIDFMFSMNEQESISRSAKVRFGNMQSAKDGKVRSIKLYGYQYNKEENSLRIINDEAEIVKLIFKLRLEGNGGRAIATILNSKGIKNRKGNEWRPNTINSMLQNPTYCGKVVRNRWYSSRMYGKDIVKLNDTNEWIVEDSNKVDKIIDEETFTIIQDMIEKNRNKVGRPTGKYHGRSEFAGKIKCEKCGKYYVRNTDRGRVFYNCSTKKQSGLKKCNSRNIQEYEIENLINPYLEKDGYKNLTKKYIDILIEKEEEKKASLYRDACTDEINNIKEEVFKYKGKLSKLTDILLADDSESVRDVFNIKKKEINNKLKELDSELDKLTTTDKQKEELVEKMNLYIKALNEAYKKIPTQITREDFINNYLYEIRVSESGELNLLTYTHLGFEEIMNLMEKY

SEQ ID NO: 14779 - protein, 553 aa, synthetic construct
MKKSAIYVRVSTNHQIDKDSLPLQKQDMINYSKYILGIDDYEIFEDAGYSGKNTDRPDFQRMFKKIKDGEFTHLLVWKIDRISRNLLDFCSMYDDLKKYGCTFVSKNEQFDTSSAMGEAMLKIILVFAELERKLTGERVTSVMLDRASKGLWNGAPIPLGYKWNTDIKFPVIDDEEKHTIELIFTEYKENKSTSYIRNLLNSNNIKTKRNGSWTTKTISDIVRNPFYKGTYRYNYREPGRGKKKKENEWIVLESNHPYIIPTDLWEECNKIMDENAKRNNAQFRDNSKVHIFSGLLKCGECNNNLYAKQDKANQDGFRPSLYVCKTRYNGLGCTQKTISENIVGTFVLTLISNMINLSNINKKQLSLDLLEHELLKGKCFDNVIGIKEINDILASLLYAPKNLFTPQNRNEKSNNGVISLNSLSSNLKKYERALEKLEDLYLFDEADMSKKDYFLKKQKIENNITEMRKKIDETAITDSSSHNYNFILNAATLEFSRKLISEKINMKSLIQDVGRDLIKEFVNILINKIIVKDRQIISLEFKNGLVTTFMYNS

SEQ ID NO: 14780 - protein, 481 aa, synthetic construct
MKVDGTTSSGLRVAIYTRVSTDHQAEEGFSMEVQHEKLMEYINRNKLMLFKFYSDPGVSAKNLNRPGIKELLRDFDDDLFDIILVHKLDRLTRNIGDLHNLVEMINDRKKKLISYTEDIDTSTPAGRMFVYFLGVIAQMYRENLGEEVTKGMRKRVEKGMHNISVDLYGYTRDTNGDLMIKEEEAQWVRWAFEHYVSGMGSTEISIQLNNMGIIRNRGGRWEQSNVIKMLENMHYIGKVHCKFKRDDDTTISEGKHEPIITDDLFEKAQRVLQRRRDGMISNNSYEYVFGGIVKCGVCGATYTGRYSINRSPSRKVNRHYVCSNNVKHKTCHQAGISEIKLAKLLFDSIQLIGKNYTRKDMPKKERSEYDEIQKAIKASEDRRERWQLAYGDGNMPYEDFSKRMRAEMERIQELEKKLSTIPQQVVSYLTPESAATQINDLKYNWNYLDQNTKKEIMQSLFQQIVILKTGDSWEISKLTLA

SEQ ID NO: 14781 - protein, 507 aa, synthetic construct
MKVFIYLRKSRKDIEEERKRGDTYDTLNRHRETLFALIKHEGYDLALEPFEEVVSGESVIERPEMQKLLKLIENGAVDAVVVMDLDRLGRGDMFDQGLIDRAFRYSGTLLITPTETYDPESQEWELVFGIKSLVARGELKAITRRMQGGRRHSAKEGKSISKKPPYGYSRDEKLILHPDEDTSWVIEKIFQLVANGSGRQAVSNELDKLGISPPNPERDFWSPSMVTSIVKNEVYKGDIVWGKFSYKKRHGKYEKKRVDKKDWIIKEDAHEAIVSRELWEKANESHSGRHRPPSYNLDKKLSNPLAGVLKCDICDRSILAQPRVNRRSAMMRCVNPKCKGVQKSSYLDIVEERVLQELENFIRKFEVDSPVEKKDNIIPIKEKVVAKKKKELAELRIQKNDLHDFLEKKVYDIKTFLERQDIVLGKIKDVESVISELEEEIQIEQMKIKNTVEYIPALRNVVEAYRYTDDIEKKNRLLKSILEKATYKRKKDWSKQDEFEIHLYPRI

SEQ ID NO: 14782 - protein, 450 aa, synthetic construct
MKRVALYMRVSTEQQAKHGDSLREQKETLYEYIEQHKDLKVVNEYVDGGISGQKINRDEFQKLLQDVKENKIDLILFTKLDRWFRNLRHYLNTQEILEKHNVSWNAVSQQYYDTTTAYGRTFIAQVMSFAELEAQIDSERIKAVMANKIAQGEVVSGKTPLGYSIENKKLVINDDAPIVIDIFNYFLSSGSLRKTVYYLGSQYGIVRDYQSVKNMLTNKKYIGELRNNKNYCPPIIDKKLFYAVQKALPKNLKTNAKRDYIFKGLLKCSDCQGSVAGQTIKARYKKKDGTESIYERTCYRCVKRRNNKLRCTNKRAFYEKNLERYIFEATKQKFEQIQINYSKKQPKIIKKKNSKKNIENKLDRLKKAYLNEVIDLAEYKKDREALMKELNEIEVEPAKIDIKNVEFILSKEFDEIYKESSEEEKNALWRSIIDNIIVFPDGNITVNFLI

SEQ ID NO: 14783 - protein, 515 aa, synthetic construct
MKTAIYLRKSRADLEAEARGEGETLAKHRTTLLKIAKEMNLNVLAVREEIVSGESLVKRPEMLALLEEIEDNKYDVVLCMDMDRLGRGGMKEQGIILETFKRSNTKIMTPRKTYDLNDEWDEEYSEFEAFMARKELKIITRRMQRGRVASVEAGNYLGTHAPFGYDIYRLNKRERTLTINSEEASIVRMIFDWYANEDMGANAIRSKLNDLGYKSKLGNDWNPYSILDILKNNVYIGKVTWQKRKEVKRPDAVKRSCARQDKSDWIIADGKHEPIIPESLFEQVQEKLNSRYHIPYNTNGIKNPLAGIIKCAKCGYSMVQRYPKNRKETMDCKHRGCENKSSYTELIEKRLLEALKEWYINYKADFEKHKQDDKLKETQVIQMNEAALRKLEKELVDVQKQKNNLHDLLERGVYTVDIFLERSNVISDRITEITSTMENLKKEIKTEIKKEKVKKDTIPQVEHVLDLYFKTDDPKKKNSLLKSVLEKAVYKKEKWQRLDDFELVLYPKLPQDGDI

SEQ ID NO: 14784 - protein, 484 aa, synthetic construct
MKYAVYVRVSTDRDEQVSSVENQIDVCRYWLDQHGYDWDENSIYFDDGITGTVLLERHAMQLILEKAKKRELQMVLFKSIHRLARDLKDALEIKEILIANGIRLVTIEEGYDSHYEGKNDMKFEMFAMFASQYPKTLSVSISAALSAKVRRGEHTGGRLPFGYSDRDKKYIINEEEAEIVREIYDMYSKGIGYIGIAKILNERGIPSKTGGKWQMSSVQRIIKNPIYKGDYILNQYTTVKISGRKKQIKNPEEKWTIFKNHHPAIVSEKQWELVNKPRSAKKRRPALWNEFRGIMFCAHCGSAMQVIYSAKKKKDGTKEEWRYLKCSRYKRYGRDECVRHAPIQYREFREFILDNLKEKEKQLETEFNLNEEISNADKKNKLQREIQRIEEKRKKLIDLYMEELIEKEEFLSRRNELEKIIKEKEVQFVSMEDKNEVKRTQDEFRKAFALLDENKNLYEEFKRIIDRIEIFENGDIKIVYRIEM

SEQ ID NO: 14785 - protein, 429 aa, synthetic construct
MRFAIYSRKSVLTGRGESIENQVELCRSYLAAHYPGVRPEEVAVYEDEGFSGKDFQRPQFRRMLEDIRRARPEALVCYRLDRVSRSVGDFADLIRRLEGWGVAFLCIREKFDTSTPMGKAMMYIASVFAQLERETIAQRVRDNMCLLARTGRWLGGTTPTGFRAERTAEVIVDGRARTACRLVPDPAEWGRAAAIFRLFLARQSLSGLSRALAEEGITARAGRPFSLPGLRELLQNPVYCAADGDAWDYFAALGADLCFPRADCDGRRGLLAYQKRDYSGGRAPRNPVDRWIIALGRHPALVSGATWRAVQELLTPERAPAVHNRRALLSGLLFCARCGEKLLPKARKGGAYDYICRAKLRRGAAACSCPNLSGAAADQAALDALSAQFPRLAPRLEKLAREEQRAACRILLQRADWDGAALAFTLCRL

SEQ ID NO: 14786 - protein, 549 aa, synthetic construct
MAPVSSDFLLSLGIESIINYLRKSRADEEHERRTGEDVLKAQKELMDRVLEPLGIPYDQRPEVGSGDKISTRPVFQGVIDDLRIKKYQAIAVKEISRMGRGSYTDMGVIYDLIVENRIFILTPYKLYDPRNPSDLRQIRFELFMSREEFETTRERLFGGRVNNAIAGRWVAGPAPFGFDYNKDTKKLTINENEASIVRMIFDYYVNGVPQPDGTRRDVSFRALATYISKKTLIRTPKGKKEWHPHQLQQLISSERYKGTMRFRTTQRVNGKVVKRPEEEHIIVPDAFPAIIDPITWEKAQGKLLDSAHKPRNKMDFSPCELAGLCVCRKCGRRMVRQYSVQNYKTKSGAVSKYHKEFLWCTSAGCTFIKYRSVEEDLLEVLRHFSNLDKDILQEQLNLIIAVEQKDNRQEDISAYIEQRSKELKNRMRFIYEKYETGKYTDEMFDERKAEIDSELQELAILEEEANRQLPEKKNEIDIDVVKNNLTSVLEAYQAAEDKSDRNKILRSVFDRVIVELTERGRGRIPAKYVLYPVLRPGLVARDFFSLMSK

SEQ ID NO: 14787 - protein, 540 aa, synthetic construct
MAQAATTKKVVVVPIKTMDIVEGIQSIQKKKVAAYCRVSTDSEEQKESYTNQVNYYTQYIQNNLEWEMADIFADEGISGTNTKNRTHFNRMIQDARNGKLDLILVKSISRFARNTLDLLKYVRELKSLGVAVFFERENINTLDTTGEVLLTILSSLAQDESRNISENSRWGILRGFQNGKVFCNTTRFLGYDKDEHGELVINEPEAEIVRRIYEEYLEGKSYQAIARGLMRDHIKTVTGGDTWWDSSITLILTNEKYYGALLQQKTVTVDFLTHKRIKNKGQEQQYFIEDNHEPIVSKEIFEAVQKEKKRRAKLKGSVMGESKRYSSKYALSSKVCCGCCGAIFKRRTWNSNNPSKKVVWQCKTYVNEGKTACDAKSVDEQVLHSAFVRLFNRMYENKKRLIKTLKANIESVLSSRVEQEPLLNIEGQMQQLKSDLKELVNLKLRNQIDEIIYDEETNRLSSELNELRQQMLILEEEEDQKAKIKERVDEIIRVLISRQDILKQFDDNLFNALVEKITILSPAHFVFTLKSGMSIDEILD

SEQ ID NO: 14788 - protein, 580 aa, synthetic construct
MGGASDILRVAPYARVSTDTEEQLSSYKSQVAYYTELVNKRGDWQLVDIYADEAVTGTQVNKRENFQRMIDDCMNGKIDMVITKSISRFARNTLDTLKYVRMLKEQNVAVFFEDENINTMTMDGELLLVILSSVAQQEVENISSNVKKGLKMKMKRGELVGFQSCLGYDYDVQTKKISVNEKEAEIVRYIFERYIAGYGAHMIAKELTAAGHKTRAGRSNWLDSAILGIVKNEKYKGDLLQGKTFTVDPISKRRLENYGEEDQFYIRNHHEAIVSEEVFEKAQAILHRRGARLRGVEKGKRNKYSRQFAFSSKLECAFCGSNLSRRNWHSGTNHTKVIWQCVTATKKGRKHCPHSKALFENVIEGAFLESYRRLCSNHTDVLDELMGNMEIVLNNQHHIRQLNKVKNEIKLLEQKRCKLIDLCLDEKIDRATYESRYGELEVHLSKLLAEQAQLEKGSRQEIDLEKRLEHLRKVLQKHEVLSAFDRNVFESIVEKVIVGDFADSTQPEPHRLKFIYKTGFTNTVESKMFKQKKSYVNERGEAPSLAVNDTCGVLFTIGQERLIVKVYWRIQQRSNNCHYR

SEQ ID NO: 14789 - protein, 572 aa, synthetic construct
MAKKKPLPNLNGLIAGYLRISDVKFPDGCVSVPDKEAFLDKLRQIRMSELMQDAERDGCTIDIWYDDIGISGRGEYLAKRIAYQEMLRDAKAKKLRAVYARDLSRLGRDLIEQENFFLQLEAQAVDVRVADLPTSGDEAARTLVRQQLGSLNQYMATKNGQVIKQTNLERVRTGQWVGRTRDQLGLRYNKATKFFDYDPETADLACLVYETFIACHGFARATALTLNQMLRDGKARAAIGPRGGMWSGSTVLRIIKGPIYRRKIQYEDLLIDSEDKIPAVVPQDLVDEVDRLLLVRAPLNEVGAAKRKAGRLEHTFGGMLFCIHCGRRMIALRNPGSRAGRGPVLWLSWICCQGGDGERGLCDCKFSIQQFRLDALVSEGLRQAFEIYEREHFKSGKTPKPKPVKPLSTFSEMMAKLDQRRDRLLDLLESCEPEAVGTINERLKAIANERIKLKEQPEVTAELAADTTIETLSRRQLTSLSKKLETVWETPDDMLSHAKHDLLKTLQVRVMINILPRAAKKRKDGNTRRYPGLLSAQLHVGILGMAGEHSLEITETQDAYNAYIQWKCCRRW

SEQ ID NO: 14790 - protein, 576 aa, synthetic construct
MNKSYMMPESGSETHIRVAIYVRVSTVYQIDKDSLPMMKQELTAYCKYILNTEDFVIFEDAGYSGKNTDRPAYQKMMSQIREGLFTHLLVWKIDRISRNLLDFANMYAELKELGVTFVSKNEQFDTSTAIGEAMLKIILIFAELERNMTSERVTATMINRASNGVWNGGRVPFGYSYDKPTQTFSIDPEENKIYNDMIEIYESNQSLVHTARKLNEMGYCSRSGNLWSPVSVWAILRNPWYLGIYRYNYYKIPGRKAIKDPSEWVIVENHHPASIDQERFNRIQATLDKNARYRNTPGRKAKQKRVNVFSGLIWCAECGAAFRASPGNRHASGYRPSKYGCPNVWKTKTCHAKYTSDVVLGEFLLNYILNILNAQKNFTDIHSLEDLQKHLLRGSTFSNVDHVDPDGLASLFDMLEKYSGSDPVLLKSAKSKPKVDPELKRIRTEQKRQQRALDRLNDLYLYSDDSISEREYLVRKQQITDRLQEINEAIGMMSQDLWEHTMDDEAFIQQASSFILTQQLTDKEYIYYENLAKALDPEILKNFFSSILDSIILRSGRPETIVFRNGLSHTFTYKDS

SEQ ID NO: 14791 - protein, 596 aa, synthetic construct
MKKQRKVEKDNRGVAIYARKSRITNKGDSIGVQFKQCADYAKKELGLDEEYEFLQYEDKGLSGYFSDRPDFQRMLHDVQDGKIKAIVCYKLDRVGRKTADLIRLMDFLEMYHVDLLICSNGINTASGLYKIFIQIFAVIAEFERDTLTERIVDNMMELAKDGRWLGGNTPMGFTVCRVTTGSGKGKSAYSYLESLPEEKRMVQRLYEIFRTTRSIQTTAKQMNEEGFHTPSGAAFNASTTRLVLRNPIYCTADKRSYNYFIEHDGNVFGDMTEFDGTHGLSAYNKTDQEKYEGSDSTFISPKYVQTIESKPVSEWIIAVGRHEGFISSEQWIEVQELLDAIAEKYNRPHRKTNALLAGLVHCPHCGRRLSVISESDRWTNGKPRFKYVCPGYHKKECNFKAVDGVLLDEFVVQQLSDLSDENSERFRSILEIKIEEVLEQSQTVQEHNLIKKKRDKLKADIAAQTRNLREADGSIKQFIQEDLQNLAEELREAERQISKLDEGRKINMIAIRDLGMTKERLLSFAEYAKDAQPEVLVTLIQTIVERIYIVDKDDERYCHIFIKGCSGEDYTGFFQTAGYIEQNTVPVCDSEQCCIV

SEQ ID NO: 14792 - protein, 609 aa, synthetic construct
MRKNDDIIAIYSRKSKFTGKGESIGNQVELCKEYVRVHYGDTAVDKVAVYEDEGFSGGNLNRPDFKIMMDAAKKRKFKAIIVYRLDRISRNISDFASLIEELARLDISFVSIKEQFDTSTPMGRAMMYIASVFSQLERETIAERIRDNMHELAKTGRWLGGTTPTGYASEAVKSITIDGKSKKACKLKLIPEEADIVRMIYDLYIETDSLTLTEAALIKQGIKTKNNIYFTRFSIKAILQNPVYMIADEDAYNFFIQNDTDLFSEKDAFDNKHGIMAYNRTDQEKGRATKYLPASEWIVSVGKHPGLVLGKVWVQIQESLERNKSKSFRKPRSNEALLTGLLFCSCGERMYPKMSKRKTADGKVIYTYVCKMKERSQRSVCNSKNANGNTLDMAVIEQIKMLEEDRDTFIAQLEQSRRFYTGNRMDYEQRLDDMRKETADTEKKINSLVDSLVDMGDSPAKAHVTKRIEQLNEEYQSLEKRIQELEGLTTQHALSDIEFDLMRQLLTVFKDGIDEMTIEQKRAAIRTIVRKVIWDGVNAHVVLFGVQDDEIEYPEIASVASDNTDDEDENEELVAFSDVDYEDDDTEDDRLGKTNPLSASKTHWGENSK

SEQ ID NO: 14793 - protein, 525 aa, synthetic construct
MYLEISNPMDYHVALYIRLSKEDESEGPSESVTNQKSLLNEFVQQHRLSVYDTYIDDGWSGTSFNRPAFQRMIGDIETKKVNMVITKDLSRLGRDYIMTGHYMERYFPEKRVRYISLLDGIDTGIESTANDITPFRAIMNDMYAKDISKKIKSVKHDKQQKGQFIGGKPVYGYKMHPTEKNKIVIDEAVAPIVRRIFAMALTGMSCRRIAMVLNEEGIPTPATYCGWQRRQKGPYSGLWSSERISDMLKNETYIGNMVQGKSVKISYKSQKCIKQEQSKWIVVENTHEPLVDKETFHKVRQLLNSRKYTRSRKYDFLLKGLIFCHECGYPLAVINRKTTTGEDRLFFVCRTYQRFTKAGVCTCHCIKEQVVTDAVIEKVREICQAYLHPHRLQTIAKETIQTDKKELKQEYAIHAVRNKISNLTNNLDKMYMDRLSGLLTETDFERMYQRMKIERTTLEEKLKELERLKESPISSDTLSKELVQRFLQSAYTSRELLVSLIERIELTETKQIIIKFRFPELEAIS

SEQ ID NO: 14794 - protein, 458 aa, synthetic construct
MKKRDNFNAMMERCLQKDGDIDLILTKSISRFARNTVDCLSCIRKLKERNIAIYFEKEHINTLESTGELLITILSSQAQEESRNISENVKWGLKRKYEKGEMLVRRMFGYGKSTDGQLYIIPEEAEVVRLIYGKYLEGESLNSIARILKEKGIKTIRGNTEWNVNSIRTILINEKYIGDAMAQKTFTIDYLTKTRKENQGELQKYYVENTYEAIIPREVFYKVQEKLHQRANIYKKSSKLKTESKGKHSGKYALSKITICKECGCEYRRQIWSKYGEKKAVWRCENRLRNGTRYCKESPTIEENVLHRAVLHAINQVLENKGDFVQTFRKNVVTALTHDTEDSEYAEEKKNLQKAMAELIQQQAKQNGDKTAFEECCQAITAQIEALEIKQIKAASRGEKSREMEDIGRFLDKTNCVLTEYDDKLVRQLIQNINVVNARKIEVVFKSGIIVEKMLPEY

SEQ ID NO: 14795 - protein, 577 aa, synthetic construct
MGLPPRYAVSYARFSHKRQQTGTSIERQEETLSAYLKDNPDLVVMGDFSDKGVSGFRGKHAEKGALSRLLELLEGDRWPHPRVLVIENVDRLGREPLLDALDRFQRLIRAGVMVVVCDMNRLELDRESLNREPWRLDMVIHAMRRAHDESKRKSELVAAAWKFRIRKAVQSGAAVKGYVGPPWVSVDPVTKAYGIITAQDRAAADTVRQIFDWRATGLSVHGICKRLNAAGTPFFRANTAPGQVRQGFHQPYISELLKNRQVLGEHAFKAGEVIQSYFPAVVTPELFHRVQQSDTARDHTRGRKGAELSNLFTGMAKCSHCGGSMQMGRNRAGPNATKFLFCSQSKRRFQCASGGKFVNYRHLEKAVLDHLPSIPWIDIVRAETPDDPRPAMDHAIAEVEIAMAETKAIRDRAQDLVLRGHEEPFLATVVEKTAELKAMTARHETLVADRQAADQEWSNRPGLLSTAIECRDAMESLDPVERFNARTRLAEALRQIIGDFACDAPGKTVRLKIGLTFSMVFVMQFRKPPVVVAEIVGADGRAMRVPMPTRGEAGHRWLANQVVERSQMMSEAELALA

SEQ ID NO: 14796 - protein, 505 aa, synthetic construct
MKKAIAYLRFSSLQQAKGDSARRQKKLIDEWLSHNPEYYLDPVTYEDMGLSAWRGHHAVRGAFAVFMVAVEQGLVGHDTVLLIESLDRLSREKIGEATGRLRAVLEAGIDVVTLSDNVRYTRGSLDDPFAIIRAILIAQRANEESELKSRRMRAAWAEKRKAAAAGTIMTTKCPYWLKVNDARNGFDVLEERAEVIRSVFRMRLEGMSFARISCALNAQGKENLKGKVSQWNSSSIERLVRKKAVIGYLVPSHQCTSTDAGEIPGYYPPIMSEEDFARAQLMYREPESRRDGNFNPYLINIFRGLMRCGLCGHAVILTGISVKGYGYYVCSMRRQNRCEAVTIRRDLTDRYLISGLVQEASATGGRVSAEDMLRPLTARHLQLTGSLHNVIRAIEIAPDVTELCERAKSLSGEIRRLEVEMAGVRQMRECASVRPLNLQDISARQACQRTARSLIREIRMHTGAKTCDVFLNNGMKIHNHPLYRQVGWSSILDAMAFLGEKEIFL

SEQ ID NO: 14797 - protein, 629 aa, synthetic construct
MKDHPSYPASQPATKPLRTAAYCRVSTDNEEQLTSYKTQVAYYTYLILKDPRYEFAGIFADEGITGRSLKNRTDFKKMIDECKAGNIDLILCKSISRFSRNTLETLKTIRLLKSLPRPVHIYFEKENIHTEDADSELMITIFGSIAQEESINIGNSIAWGKRSQAKRGIIKVGTANYGYRIGEKHRWLIDEEEAKVVRRIYANIQAGKNYTQIITALTQDRIPTPQGREIWSLSTVKEILTNVVYKGDYLYQKYFMLDTLEEKVATNQGELPQYYIEGHHEAIIDPEEWEAVQAIIEERSTAFKTRNHKKYSKNNDKNEAFIDKFQCGECGNGFTHQRTVERRGDDEGYEVHRWVCRLAQKYYAVDGCSSHRFQQTYFEQHFINMLKELHQNEEFQIEVEKVISHTELSDQELKQEAEIQKRVEQLNQALYETVDEELHQDGQDSKRVDDLSGELVNLHKQLKAFSDRKKLAEQYKHEVKELMKQVNKMHEEQQYVFPAELYSQFVEQATVYKDGKVVYHFSMGIDWSTDERYESYRHQLLEEKKARRQSKRKEKRAEFLKGPEVTALLEYCEEPRLWGEILEFMNTVMTISASYFRKIIVLPLIEEGKLQKKLLPERQRKHKYYMVKK

SEQ ID NO: 14798 - protein, 586 aa, synthetic construct
MTTGKGFFMLNEFQKGMWVRTLWDPVKEREESPLLGEKQVKVAAYCRVSTTFEEQLRSIENQVSHYTHLIREKPNWKFVGVYVDNGTSGASAKGQRGLQRLLRHCEEARVDFILTKNVSRLSRNAEELLSIVEKLNKLKVGIYFEKEHIDTSVQYNKFLLSTYAALAQEEIETISTSTRWGFEKNFKKGIPRYNKMLGYDLVEKDGQNTLQVNEEGSAIVRLIYDLFLQGMTMAEIARELMRQGIKTSVGKDLWRGSTVKHILTNVTYTGNKLTRVRTKDLFTNRTTKHMRDEIAIENCHPPIISMEVFEQSQKRLEEIKPNKKQTKPKRQKHCLSGRMNCHQCGHRLSNYPTRGVNYWKCDTSYIGVCDFTSIREDRLRGMLLEGIKQKFDMTNPSVLDEAKKVLKEINQKDHFEFHRLRWMAELDLAKEGKGDLDKVEQEYKAFEQHIARIEDDRPYRNKTLSWLDTVKDVGEFLEEITIEKLRAWMMRVVIYSPNDYSIEWIDGTETIVGDIPENPKLDTIPQNQTMKKSKKQKEHEPQYQIIDENGNLKERSEEGMQGLMEREVIRIEPGTGKGILKTIEKT

SEQ ID NO: 14799 - protein, 553 aa, synthetic construct
MSGQSSSRVRIIPAKARTGRTEANPDGQKKRIAVYARVSTDSEMQASSYDLQVAHYKEYVRKNPSWILADVYADEGISGTSTKNRVEFNRMIQDCEEGRIDYILTKSISRFARNTLDCISIIRKLKGRKNPIGVYFEKENIDTLDSKSELFLTILSSMAQEESRSVSENTKWGVQKRFQQGIVHMPTTFFLGYDTTEDGEIYINEEQAEVVRRIFREFLDGKGCPRIAKGLTRDGLKTGKGNKTWTSDAVYKILKQEKYQGHCLAQKTVTIDYLTHKRVRNRDIQPQYFVKNTHPAIISEDTFEAAQQEIKRRSLMMRDPDNKYRQHFSGHSPFSNQYFCGECGRPVIRRRLTSSRKGEKYYISAWQCRVTAGRDPDYKECKTSYIQETDLENAFMKVVREMKGNLDTVIEEARQAIEKASLSPPEQQRLEELNTQIEAITDRISDLAAKESATRDAIYDATLRHLIYEQEILQQERDSLEENMQEQLYLEKQLQSLIDLLEETEELEDFDVTLFKSTIERGIIYKERMVEFQFKCAVKRILCAKERKTPKKK

SEQ ID NO: 14800 - protein, 533 aa, synthetic construct
MAEALFGSFGQSAEVLSLKDSLAEQPKKLRVAAYVRVSSLSDEQEGSFDNQKTHYTQLIRSTPGWKMVDIYVDQGRTGTSMAKRPGFNRMIRHATEKKIDIILCKSVSRFARNVLDAINTVRELTELGVRIIFDKENIDTGDMASEFILTMLSATAQEESRSISENINWALAKRFERGEPVFVRKLGYQKNEQKEWIIIEEEASIVREAFQEALNGKTPAQIAKQFIKKKYKKINGRTDWSSTTVRLILLNRDYTGDVVCQKFYTESHLSHKRLVNDGERNQYFIENHHEPIVSRETFKAVQRQLEKRRKPNRGTSVNRYPLSSRIQCEKCGGNFHRFICKGIVRWRCENNVKSKDLCTMGSIKEEVLKEAMQEAFLGRYRIARFMYDMERMQKDLTRAVAARDFSYNRLHLDLEQILLEENIALINANGAEADRTDEKLEKLSRKRISIEKDLKIKENWWELLDQDHAFREEAIAKLKEIDTVRAPAKLIQKEIKDISFLRAWVVRVKAKSPMSFCMQWIDDKETNIDLRKE

SEQ ID NO: 14801 - protein, 570 aa, synthetic construct
MSAAARGNLKTAAIYARYSSIMQKDSSIEGQKLVCGKLAKRNGLDVTEVFFDKARSGKSIAGRDGYAAMVAAIRRREFNVIIIEDLSRLSRDAIDTGMLKKICNYNRVEMLTQKGWQTDKDIAIHGLVSTLDNESRAINVRRGQTLCLSNGGVPGAPAYGYRAVPGKPGEHEINPETAKIVVRIFEEYASGRSPRAIAADLTSEGIPSPASHRDSRYKGNTIWNSQAFVGGMYAKGIIGNRKYIGEIEWNTHSTEENPDTKRKVKRCNPKGDHIKEFNSALRIISDELWNAAQKVRQQRAVKKFGPGGKVVRRPVTPRGEHLFGGLLRCGACNGPMRIANTSRSGTSRVACAAAHQHQTCSHSKSYDIDTLREGMAEKMVTHLTTDEAIDAAFEAFREERKLGATNDSQRKALERKLNALSLEIARLVEATMKINNPPAEFYKKIDTKEMERASLEEQIKHLGPAMADGNVLPFPPKFKDAYRKNVMEVHELLTKSPQSAEARIALANLIDSIVVHPTAKRMPYEITPYARLAAITGQSPLPARRSTQEVIAAQGLGYSDNAKQGKSVSS

SEQ ID NO: 14802 - protein, 518 aa, synthetic construct
MPKAISYIRFSTKIQSVGDSTKRQSKYINDWLKRNPDYYLDESLRFQDLGISGFSGANAKSGAFGEFLAAVESGYIEAGSVLLVESLDRVSRQDIDTAGEQLRKILRSGVEVVTLVDNEWYTKESLKDSLSMIKAMLVMERAHEESAMKSTRLRSMWAAKRERAANGEIMSKRCAAWLKVSEDRSHFEFIPENVKAVQRVFQLRLEGLSHVKIAKQMNDEGFSTLNQFKSVTGGWSQSSVTELLSNRSVIGFKVPSKSMAVKGVSEIPNYYPSIITDEQFYAVQQLKQGSGRKPSSDLPLLTNLFKGVLRCSECGFIMVVAGVCAKRSGIYKCSMKSEGRCNSVGFSRLQTDRALVQGLLYNTNRLSLNRDNGSAIGSLQSDLEKLHKQRERLIKLAMLADDTESMAKDLKALNSQIKDAEKAVSEVHQREQSSQLETISHLDLTVKKDRIEAQIIIKRIVKEIRLNTARKKCDVFLHNGLRLLNFPLDRVVDGEIFLEVLPVLEADEFDFDTYRMIE

SEQ ID NO: 14803 - protein, 518 aa, synthetic construct
MPKAISYIRFSTKIQSVGDSTKRQSKYINDWLKRNPDYYLDESLRFQDLGISGFSGANARSGAFGEFLAAVESGYIEAGSVLLVESLDRVSRQDIDTAGEQLRKILRSGVEVVTLVDNEWYTKESLKDSLSMIKAMLVMERAHEESAMKSTRLRSVWAAKRERAAKGEIMSKRCAAWLKVSEDRSHFEFIPENVKAVQRVFQLRLEGKSHAKIAKQMNEEGFYTLNQFKSVKGGWSQSSITELLSNRAVIGVKVPSKSMVVKGVSEILDYYPAIISEQQFHAVQQLKQVAGRRPSSDLPLLTNLFKGVLRCSECGFIIIVSGVTAKRSGNYRCSMRYEGRCNAKGFSRLQTDRALVQGLLYNTNRLSLNRDNGSAIGSLQSELEHLQKQRERLIKLAMLADDTESMAKDLKALNSQIKDAEKTVSEVHQREQSSQLETISHLDLTVKKDRIEAQIIIKRIVKEIRLNTAQKKCDVFLHNGLKLLNFPLDRLVDGEIFLEVLPVLEADEFDFDTYRMIE

SEQ ID NO: 14804 - protein, 584 aa, synthetic construct
MTKHKIHVYTRISKTYQQEGSGLDEQLSRIDAYIKSKPEFLGSEITYWQDVGVSAFKNKNIHDGQLAEFIKQVESGSIGSGHALVIYSLDRLSRRSSWDEDTIQKLVKNGVDIHDVSTPVVLKRDDPFSKIIMELIVARGNNESKIKSERSIAGWEKRLKETREQGKVFTRKLPRWLSTDENGYVVITEQAELIKRIFLEYTNGLSSPMIARRLNEEGIKSTGRSMWRPNTITKLIKDERLRGYLRRSTDQALIPDIFPVVIDEEIFVLANRILKNNATGIKGRPRENNITREVNNILTGIVRCGKCGARVTTSKNSRGVRYVVCLNRRNYEMCGQKSIKLDEFEKIVISHAQQVDMSKVFSYDKVDTSRESTLNSELSNLEIDEKNCINDIDARKKAKKTASLVLANTLVEIQDRIEEIKQQLLELKIKEPLPEIQHFSINDLINPSNIELRMSLRKFLTQAVDKITFRSLDNNILIEIKYHNNVYRHILITDKKVKEVLHEVDIVKNGEVINYTTNGFLITENEHENTCIFHGIYNVHYTDYFLLANYIGSLKNKHWIVDKMYETENMSIVMTNEKQKSHYN

SEQ ID NO: 14805 - protein, 476 aa, synthetic construct
MDRNKVAIYVRVSTQGQVDDGYSLDEQVDLLTNYCKLKEWTLYDVYVDPGISGKNMHRPEIERLTRDAKRKLFDIVLIYDLKRLGRSQKENIVLVEDVFNPNGIRLVSFTENFDASTPVGKMVFGMLSAYAELDRANIAERMMMGKIGRAKAGKAMSWGMPPFAYNYNKETGDLELDEVKAPIVEMIYSEFLKGASVNKIVQKLNSMSYHGKNHEWKHHAVTVIIDNPVYCGMMKYMGQTYQAKHTPIIDKKTFELAQLERKKRLSKYHDADWLGPFQRKYIGSKICYCGLCGAHLKSEKDKKNKLTGIRSISFFCPNTRSRGTGECTNPRFKQSVLEGYILNEVAKLQQNPEKLKDIKPAEDNELHNKIATYKKKIKQNSSKLSKLNDLYLNDLITLDDIKQQSKSLLNENEFMEEQIKLLSATTREDELRKKIDTFLAFPDILTADYDTQKQAVELVISRVEATKEGIDIFFNF

SEQ ID NO: 14806 - protein, 476 aa, synthetic construct
MDRNKVAIYVRVSTQGQVDDGYSLDEQVDLLTNYCKLKEWTLYDVYVDPGISGKNMHRPEIERLTRDAKRKLFDIVLIYDLKRLGRSQKENIVLVEDVFNPNGIRLVSFTENFDASTPVGKMVFGMLSAYAELDRANIAERMMMGKIGRAKAGKAMSWGMPPFAYNYNKETGDLELDEVKAPIVEMIYSEFLKGASVNKIVQKLNSMSYHGKNHEWKHHAVTVIIDNPVYCGMMKYMGQTYQAKHTPIIDKKTFELAQLERKKRLSKYHDADWLGPFQRKYIGSKICYCGLCGAHLKSEKDKKNKLTGIRSISFFCPNTRSRGTGECTNPRFKQSVLEGYILNEVAKLQQNPEKLKDIKPAEDNELHNKIATYEKKIKQNSSKLSKLNDLYLNDLITLDDIKQQSKSLLNENEFMEEQIKLLSATTREDELRKKIDTFLAFPDILTADYDTQKQAVELVISRVEATKEGIDIFFNF

SEQ ID NO: 14807 - protein, 526 aa, synthetic construct
MTEKNIMVIPARKRVGSTAAKEKIKKLRVAAYCRVSTETEEQNSSYEVQVSHYTEFIKKNNEWEFAGIFADDGISGTNTKKRDEFNRMIAECMDGNIDMVITKSISRFARNTLDCLQYIRQLKDKNISVYFEKENINTTDAKGEVLLTIMASLAQQESQSLSQNVKLGLQYRYQQGKVQVNHKRFMGYTKDEDGNLTIVPEEAEIIKRIYREYLEGQSLVGIGRALEKDGILTAAGKPRWRPESVKKILQNEKYIGDALLQKTVTVDFLTKKRVKNEGHVPQYYVENSHEAIIPKELFLQAQEEIHRRSNIYTGEGKNKRIYSSKYALSAITFCGDCGDIYRRVYWNIHGRKEFVWRCVTRIEQGPEVCKNRTVKEDELYGAVMTAINKLLAGGNNMIKTLEENIHAVIGETTEYQISEINNSLEEKQKELIKLANKGQDYDHLADEIDELRDKRQTLLVEDASLNSENERIDELIEFIRKNKFRTLEYDDKLVRKIIQNVTVYEDHFVISFKSGIEMEICKCCDI

SEQ ID NO: 14808 - protein, 508 aa, synthetic construct
MKKAIAYMRFSSPGQMSGDSLNRQRRLIAEWLKVNSDYYLDTITYEDLGLSAFKGKHAQSGAFSEFLDAIEHGYILPGTTLLVESLDRLSREKVGEAIERLKLILNHGIDVITLCDNTVYNIDSLNDPYSLIKAILIAQRANEESEIKSSRVKLSWKKKRQDALESGTIMTASCPRWLSLDDKRTAFIPDPDRVKTIELIFKLRMERRSLNAIAKYLNDHAVKNFSGKESAWGPSVIEKLLANKALIGICVPSYRARGKGISEIAGYYPRVISDDLFYAVQEIRLAPFGISNSSKNPMLINLLRTVMKCEACGNTMIVQAVSGSLHGYYVCPMRRLHRCGRPSIKRNLVDYNIINELLFNCSKIQPVENKKDANETLELKIIELHMKINNLIAALSVAPEVTAIAEKIRVLDKELRRASVSLKTLKSKAVSSLGDFHAIDLTSKNGRELCRTLAYKTFEKIIINTDNKTCDIYFMNGIVFKHYPLMKTISAQQAISTLKYMVDGEVYF

SEQ ID NO: 14809 - protein, 509 aa, synthetic construct
MRRAISYIRFSSERQLKGDSVRRQSKLVTDWLDKNPEFYLDSSLSFKDLGKSAFSGKHLKGGLGDFLTAIEKGLVKAGDTLLIESLDRLSRQDIDIASELLRRILRAGVDVVTLSDGEHYTRESLKDPLSLIKSILIMQRAHEESLRKSERVQAAWNRKKELISEGIKVSRRCPAWLRLNDDRRTFTIIPDKVEVVKRAFDLRLQGLSFWAITRTLNDEGHLSLNQYTPKQKGWSDTAVKKLLRNRAVIGCFTPAGREEVQGYYPAIISESLFYRVQQLNTGQYGRASVSSNPLSVNLFRGIIKCSECGATIVLGGYALKRFGMYRCPNRSANRCSAKAISRKQTDATILYMLALCDRFETENTDTIDSLKLQREDLQRKISKMAELAIELDDMTIITEKLRDMKNALSKLNHDIEEETQRIKAITTGSLKDIDRTTKEGMIETQLLIKGVLKEIVIDAAKRRCKVTFHNGRAITLPITENPSEDVTEAIQSLSEVTERGLIDVDEVII

SEQ ID NO: 14810 - protein, 521 aa, synthetic construct
MKVPVWCYARISTLKQIDGFGIQRQINTINQFLQCVELDHRLPFTLDVDNVTQMVAEGKSAFRDKNWNEKTKLGQYRKLVMDGVISDSVLIVENIDRLTRLDPYMAIEIISGLVNRGTTILEIETGMTYSRYIPESITVLVMQCNRANGESKRKSIMMQKSHANRYGKVSKVRPRWFDVVEIDGIKQYRPNETAKAIQRMYNDYINGIGAAHIVRTYGNTDNGKAWTLVTVLRALSDKRVADDARYPPIVDKELYDRVQALKAATNKKGNTHQKNMLNIFSGMSRCPVCNQSIIVKRNSHGNLFTVCLGKRTNKTCSARSISYFALERPLLTAIRGLDFSEVYKHEDKNVLTLRDQWIQNERDIAAFRERLNKASRHEKFAILDELEIMNREQEELTIRLKSVDVPKDIQLTFDDDKLDLDTNYRIELNNRIKKLIQHINIVRENVTKSSYTIYCTIKYWTDVISHLVIIDVNIKRTGTGGTNTLTTTLRSVSSLNMDGTVSGNPDSDAWEYWKSFLDNLK

SEQ ID NO: 14811 - protein, 547 aa, synthetic construct
MKLLVTYIRWSTKEQDSGDSLRRQTNLIDAFYSKHKEEYYLLPAHRYVDKGKSGFHQQHKNQGSDFRRMFENVMSGVIPEGSLIVVENFDRFSRADIDTAIDDVRQILRKGVSILTLGDGELYDKSALTDPVKLIKHIIIAERAHQESLVKQKRIAQVWNHKTQLARELKKPMGKQAPGWLELSEDGSHYIVDEDKASLVNIIYDKRLSGMSMFAICKWLNEQGYPTINQRKVRISKTKKPDGNWSALSVKHILTSRSVLGYLPAKISTEDRKTVLREEIEGFYPQIVTDSKFYAVQQLLEETGKGKTSSGDHWLYVNILKGIIRCKCGLVMTPTGIRKPVYQGTYRCNGNKESRCSYGTVSRKLLDTQLCSRLFSKLSQLHDEATDTAKLDELQRRLNTVDSELEKLTETLIQLPNITQIQEALRVKQEEKDELIVQLSREKARVKSVSSLDLSGLDMESVEGRTEAQIIIKRLVKEIVVSGNEKLVDIYLHNGNMIRGFPLDGKDDHTLTLEEATDEMQSLDDMLIFGEPVTRIYPAGDMEEVDA

SEQ ID NO: 14812 - protein, 506 aa, synthetic construct
MRHVITYLRYSSATQGAEGADSTRRQNELFKQWLRKNSDAQVVASFNDEGLSGYKGKHLSGQFGDMLSRIESGEFSKGTILLVEAIDRIGRLEHLETEALMNRIIAHGIEIHTLQDGLIYTRDALSDDLGISIIQRVKSYLAHQESKQKSFRVSEKWKQRAKLALAGEQRLTKMVPGWIDPETFKLNEHAETVRLIFKLLLDGESLHNIARHLQANNISSFSRRKDANGFSVHSVRTILRSETTIGTLPASQRNDRPAIPNYYEAAIDAATFNKAQEILDKNRKGRTPASDNPLTINIFKGLFRCQCGASVHPTGTKNKYQGVYRCNNHLDGRCDVPPLKRKPFDKWMIDNFLGMIDVGNDGEAEGKIASLQHEVEIVTTRIKKATALLLEMDDIDELKIQLKELNQKRTELQTTIDNMRRKASLTDKELPQLKDIDLTTKAGRVECQLILSKHLKGLTLGKDTVTVTLQNDTEITIPTDPLPLNDGTSIFEIAEKNLLNIDTFQL

SEQ ID NO: 14813 - protein, 449 aa, synthetic construct
MNKVAIYVRVSTTMQAEEGYSIDEQIDKLTSYCKIKDWAVHDIYKDGGFTGSNIERPAMEKLISDAKRKRFDTVLVYKLDRLSRSQKDTLFLIEEVFGKNDISFLSLNESFDTSTAFGKAMIGILSVFAQLEREQIKERMLLGKIGRAKTGKAMMFSKVSFGYTYDRLKDELVVNQAESIIVRKIFEAYLGGLSLNKLRDYLNNNGIYRGDKPWNYQGLRRILSNPVYIGMIRYRKEIYPGNHQAIIDIDDYNKTQEELKKRQITALEFSNNPRPFRAKYMLSGIAKCGYCGTPLQIILGSKRKDGSRNMRYQCINRFPRNTKGVTVYNNGKKCNSGFYEKADIEEFVINQIRVLQLNSNKLDNLFDKHPSIDIKSIERQISSLDNKLKRLNDLYLNDMIDLEELKKQTQLLRQQKTMLEDELLNNPAITQEKNKKHFKEFLATKDITK

SEQ ID NO: 14814 - protein, 484 aa, synthetic construct
MNKVAIYVRVSTTMQAEEGYSIDEQIDKLTSYCKIKDWAVHDIYKDGGFTGSNIERPAMEKLISDAKRKRFDTVLVYKLDRLSRSQKDTLFLIEEVFGKNDISFLSLNESFDTSTAFGKAMIGILSVFAQLEREQIKERMLLGKIGRAKTGKAMMFSKVSFGYTYDRLKDELVVNQAESIIVRKIFEAYLGGLSLNKLRDYLNNNGIYRGDKPWNYQGLRRILSNPVYIGMIRYRKEIYPGNHQAIIDIDDYNKTQEELKKRQITALEFSNNPRPFRAKYMLSGIAKCGYCGTPLQIILGSKRKDGSRNMRYQCINRFPRNTKGVTVYNNGKKCNSGFYEKADIEEFVINQIRVLQLNSNKLDNLFDKHPSIDIKSIERQISSLDNKLKRLNDLYLNDMIDLEELKKQTQLLRQQKTMLEDELLNNPAITQEKNKKHFKEFLATKDITKLDYETQKNIVNNLINKVFVKSGYIKIEWKIPFKKA

SEQ ID NO: 14815 - protein, 539 aa, synthetic construct
MSRTKKYVAGLYCRLSKDDGNSVESMSIWSQKVMLKQFAESNSIAIYDYYVDDGYSGTNFERPSFKKMITDIENGKINCVITKDLSRLGRNYLQSGAYIEMYFPQKNIRYIAVTDGIDTLNSNQNDIMPFKNILNEMYAKDTSKKVKSAIQSRMREGTYIGSKAPFGYLKDPNNKRRLIIDEKTKPIIELIYKLCLEGKGTQLISQELMKRKIPRPSAFVENAEKLYGLTEENKYQWSHRMVLNVLRDPVYCGNMARNKRPTLSFKNSKRMYIPKSDYIYARNTHEGIVSEEIWEQVQTMVDKRKCNNKKGLYYDNIFQGLVRCPKCGYALTPKTDYRLKKKELIDFVHFSCSTYKKYGVSACSSHRIEARDLYNIVLEDIQYHGSMALSDKEDFVEKIIEKIEVEKIDEGKELSNKLELKKNQLAELDRSYEQLYEDRLEGNITERNFNLMNVSISKKQDKLIEEIKVLEGDIEVSFETEDNYKKFMNNISKYAKIKSLNRYILNQIIDKIYVYDKEEIDGQISQKVEIHYKFIGKLN

SEQ ID NO: 14816 - protein, 577 aa, synthetic construct
METLKIDRSKPLAIAYVRWSSTVQGGDDKDSYDRQTSPLEFFTSSTGVPVVETIIDPGQSAFTGENSKKGKLKGILDRIESGEIRKGDFLVVESIDRITRMRVLDGVALIQDGILKKGVKLYTTTDNKIYSYEDPDKDFENLLMISLIAKRANEESEIKSKRRRSAWNKAKTKATDGVPFNARNVPYGLRHNIETNSFEVVEEEANEIKKIFEGLKYEGVSNTLKKVNLTSKRKWSRKTVHLMLTNRYPIGSLMSQKRDGKKKVFERYIENYYPAILTHKEFQDALQAMKLRGKVKDYGRNTEGYLNIFKHCVKCAACGQTLMFEKSINQKGVKYGYFHCFTRKETLSHCDVPRFRFDFAFGTLLQLVRQLTCENEDFDIHPWASEMPADYNSTMADDEIDMENFENQFLSLLSKSTATEAIKSELYEAENELAKTKSLYENMTASFSQYKDGRIPSFFIRQMADAELAYENAKADIDALSAQIDNAESSLEIYSYRDIIELYSSDEGRLKLNHFFKSNGLKFIFNYEAKTRTVFMAVRDKKDDEIYRVGKKFTLHNPLKEFGIDNLNEHMNAVLKI

SEQ ID NO: 14817 - protein, 531 aa, synthetic construct
MTVKNSLPRAFSDVFRDDETINVYSYIRFSSKAQKLGFSEVRQLEQLNRFFEQYPTARQVERYEDLGVSAFKGKNLKSGQLAKFVERIKSKEILPNALLLVESFDRISRVGGYDALELIISIIQADCAIYTLFDNRLYSKRKKDSSVDISLIQNILERANDESRNKSDRISDAKARNLLKGENGGIITKRCPFWIDHADGKFVLNEHAEAVRRATELCFDIGFQSIAKELNQEGHPRKYSAKTISNILHQHAIYGSYIAMEWDAGKPIQVKKEIKGYYPALISESEFHRISAKLKERQDPSLAGRKAQEFRNILRGLVFCKCGSTFRYHSQRSLYVDLVCLASTVGKCSYATPGKGVRHRYALVESIFLAYQSLIPFHQIIVKTDDIKALEKEHEEISGLIILKEKALGNNFAILEQSSESAQKYILSRINEVSHELDKLKADEHKLSLKINSMHLASKSDFNVVEIYRLLITERGRIKINNFLHSQKVKLIINPIKKKFFELDIYHNEEKLDTIDVTPDGYTARYKPHLK

SEQ ID NO: 14818 - protein, 526 aa, synthetic construct
MTAMKAAIYVRVSTTRQAESDLSIPDQVSQCRSYCDRQGWQVVDVFTEPGASALDEDRPAFQEMIFKATRFDHPFDHVVVHSLSRFSRDALHSELYVRQLRKAGVELVSITQDIGQDGSGEFIRKVLNIFDEHQSRENAKHVHRAMLENARQGFWNGARPPFGYDTVVKEMRGAKEKKVLVVNEDEARTVRLIFNLAAGERGRPLGVKAIATHLNERGISRRGVRFSTGGVHDLLTSTTYIGQHHFNRNDSRNRSARPPSQWIDLQVPAIIDEQTFNAVQGLLQSRNPKRVAPRVVNGPTLLAGIARCGYCGAALIQNTGKGGTYRYYCCSRKLKEGPLSCQGIRMRMERLDDIVIGEILEHVLNPARLTVLLEAYLKSATERADRNKHEIDRLRQKHRDTQAALTRLLSLVESGLMEAEDPALKERLLGLKLQRDELAVEIKDLQQRLSSSEPEITAEKIERFAMLLRDKLANGTPEFRQAYARMVMREVSVRDDEIRISGSKAILAKATSQGLGKTDCAPLIRR

SEQ ID NO: 14819 - protein, 548 aa, synthetic construct
MRTNRKSAAGKRAVFYARYSTDLQKDRSIDDQVALCREYAGRNGLLAGRVYSDRAQTSSSLIGRDGIMQLMADARNGDFDVVVVEALDRISRDQEDLAGIFKRLSFGGVEIVAVHEGVADAMQIGIRGLLGTMFLADLKHKVRRGMAGVVADGRTAGGNAYGYDLVPGKPGERTINEEQAAIIRSIFEMYLCGMNPREIARRLNADGVLPPRGSKWNASTINGNKGRAYGILQNALYNGQIIWNRVTMVRDPDTGKRVSRENPPEEWKFSEAPHLAIVPRDVFEAVQKRKADRSIAHGDHRRANKPKRIFSGLLRCRKCGGGMGSKGVHGGAIRIRCSRYSESGSCDNKKSYRLDRIETGVIHGMLNLLQKPEATQEYLARFFAQQRRTNDGAAKRAGEIERRLIKMTGEQDRLISLFTNGTLPMERVEGRLKELQAERDRLGEELKDAQKLVPAVEIHPAALRQFVRKLERVKQTIENEGTIFDPDAFSSFRAAVSHIVVGDGKDDSAYEVDVVTYIAALTGQTDLVGYGGRLLVAEEGFEPPTQGL

SEQ ID NO: 14820 - protein, 551 aa, synthetic construct
MKLLNRTTLDAKNTDSLRAALYLRVSTGRQAENDLSIPDQRRQAQEFCKARGWQVVIEFVDAGLSGTDDRRPELQRLLDLAAGGDSPFDVVVVHSFSRFARDHFALEYHVRRLRKNGVKLVSITQDLGDDPMSVMVRQVFALFDEYQSKENAKHVLRAMQENARQGFWNGAAAPYGYAIVAAEQRGAKTKKRLAIDAVEAEVVRLMFRLVHEGNGTSGPLGIKALACYLNERGYRTRRGARWGIGPLHALLTSPTYKGEYRFNRKVWKTKEDKPEADQIMVAVDPIIDPGLFDAVQARLKSRNPKQTPPRVVTGPILLTGLATCASCGGGMTLRTGKSGRYRYYTCATCAQQGKSACPGRSIPMDKLDQIVTDQLTASLFTPERVRAILGGLMARQASRSEDHAQRLTALQNKVADCEGRLSRLYEAIENGIADASDPTLKDRLASLKTERDQAKAAKDRAFAELQPETRITEEKISAFAALMRENVANGAIPFRRAYLRSVIDQVEVDDTEIRIHGRRDVLERLVMGNGATPAGVPSFVRKWRTRQDSNL

SEQ ID NO: 14821 - protein, 532 aa, synthetic construct
MKRAVIYARYSTDLQNDKSVEDQIRLCKGHADRQGLEVVNEFYDRAKSGASMFGRPGLADMMQAAERGEFDVLISEAPDRVSRDIADLAHVHKQLTFRGVEMNCVNGGTMSTVQIGMYGLVGQMQREEGAKKVKRGMAGVVRSGRNAGGKAYGYRPILGKPGELEIIEEEASIIRCIFDLYASGVSPRSIAGILNGEGVTAPRGKQWNASTINGNGQRGNGILRNTIYSGKIVWNRVRMVKDPSTGKRVSRTNDESELETVDAPHLRIVSDELFSAVQARKQETTTSGPKAPRSKRILSGLLRCGSCGGGMTMVGADRGGHRIQCSNHRESGVCQNKRRYYLERIEALVLGRLRSQFADTSIIEAYVSAYQEEQKRIRSTALRDRANAARLLEEAKTEISEIIRLMSKGLIEENEGAAQLVPLRKQRDQQQAILDSVEEPPNVIELQPKAVRRFRENIESLAQIVAEKNGEPSPELVGPFRQLVAAVVVQPTENGQAYEMGIKGYLSSLVNTELSVIKMVAEEGFEPPTQGL

SEQ ID NO: 14822 - protein, 518 aa, synthetic construct
MPKAISYIRFSTKIQSVGDSTKRQSKYINDWLKRNPDYYLDESLRFQDLGISGFSGANAKSGAFGEFLAAVESGYIEAGSVLLVESLDRVSRQDIDTAGEQLRKILRSGVEVVTLVDNEWYTKESLKDSLSMIKAMLVMERAHEESAMKSTRLRSMWAGKRERAANGEIMSKRCAAWLKVSEDRSHFEFIHENVKAVQRVFQLRLEGLSHVKIAKQMNDEGFSTLNQFKSVTGGWSQSSVTELLSNRSVIGFKVPSKSMAVKGVSEIPNYYPSIITDEQFYAVQQLKQGSGRKPSSDLPLLTNLFKGVLRCSECGFIVVVAGVSAKRSGIYKCSMKSEGRCNSVGFSRLQTDRALVQGLLYNTNRLSLNRDNGSAIGTLQSELEQLQKQRERLIKLAMLADDTESMAKDLKALNSQIKDAEKAVSEVHQREQSSQLETISHLDLTLKKDRIEAQIIIKRIVKEIRLNTAQKKCDVFLHNGLKLLNFPLDRVVDGEIFLEVLPLLEADEFDFDTYRVIE

SEQ ID NO: 14823 - protein, 540 aa, synthetic construct
MPKAISYIRFSSKIQASGDSTKRQNKYIYEWLKNNPDYQLDESLRFQDLGISGYSGANAKSGAFGEFLAAVESGVIQSGSVLLVESLDRVSRQDIDTARERLRKILLAGVDVVTLADNSWYKKESLNDPLSLIKAVLIMQRANEESATKSKRLRSAWDAKREDAAKGKIMTRRCVAWLRVSGDMSHFELIPDNVKAVQRVFQLRLEGLPFVRIARQMNEEGFYTLNQRNPVKGAWSHTTVKALLDNRSVIGFKVPSNCTVTQGVKEIPNYYPAVISEEQFYAVQQLKQGAGRRPSSEKPLLTNLFKGVMRCGECGFVTVVNCATEKWHGVYRCSMRYEGRCDAKSINRRLADKALVQGLLYNTNRLSLNRGNGSAIGSLQSELEQLQKQRERLIKLAMLADDTESMAKDLKALNSQIKDAEKSVSEVHQREQSSQLETISHLDLTVKKDRIEAQIIIKRIIKEIRLNTAGKKCDVFLHSGLRLLNFPLDRVVDGGQWIEILPLIDGDEFDFEGFTTKPRHIALEEAPEWVKELEFNSKIQ

SEQ ID NO: 14824 - protein, 532 aa, synthetic construct
MTPRLSLVSTITSQEPVPAIGYIRVSTWREEKISPELQKKTILEWARRHNRIIVRWIPDLDKTGRNFKRRIMEAIVAVEKQEAREIAVWKYSRFGRTRHGVAINLARVNRVGGELQSATEEVDATTAAGKFHRGMLFEVAAFESDRAGEQWKETHDWRREHGLPAAGGRRAGYTWHRRIGPDDKPQEERYEPNDAGPAYGGLFLRYVNGEGYMPLTNWLNHNGYKNTRGKPWTHESLRWYMDSGFAAGLLHVHRPDTCQGLEEPCKKRAHYIHIPGAHKPLIGLPKEGEEKGEEEQAEEAKAIWDAYLLARERTKKTPPRARQPKYPLAGLTWCGVCEASRAGVFNAGDTSNKYRCKAYERDRSCTGAYVRRSYAEEKTYEWLQSVAGEVDANPAPLPEVEEGKPDLKKVKAQLDARLLKVQAGIDNANTLHALGDLDRDEFLRTKATLKKQREKIEKQLSELEFEEVKAEGAAPYLPAVRNLLEEWDTLPVSVVRGILASLIDRVHMFPGPHIEITPVWTSERWSSLELTA

SEQ ID NO: 14825 - protein, 530 aa, synthetic construct
MIAAIYSRKSKFTGKGESIENQIQLCMDYAKNLGINEFLVYEDEGFSGKSMDRPKFKEMLKDAKDKKFDYLICYRLDRISRNVSDFSTLIEDLNKLNISFVSIKEQFDTSTPMGRAMMYISSVFAQLERETIAERVRDNMYELARTGRWLGGMPPYGFISTQITYYDENMNQRKMYKLKVDEDTIEIVKLIFDKYLELRSLSKLYKYMYENGIKGTRGGNLDPSALSLILKNPAYVKADKSVVDYLRKSNIDVMGDTDNIHGILTYAKNTDSPIAAVAKHKGVIDSDKWIEAQRLLNANKAKAPRAGTGSKALLSGLLKCSKCGSNMRITYKNSKSGTIYYYICGTKKSLGVSACDCRNIRSDKAESKVIDELKNKSIKSIMSSYKDSKLENSKNRKNIKTEINSINNQIKEKETYIDNLVMQLAKVTESSASTFIINKLESLNNDLSNLKSQLESLNTMSMENKQVDININMLIDNLNKFNKEIDTSDINKKRLLLSTVVDYMTWDSDTDTIKVNLIGINPSNTIALDK

SEQ ID NO: 14826 - protein, 456 aa, synthetic construct
MDNIKRVALYIRVSTEEQVLHGDSIRTQTEALEQYAKDNAFIVVDKYIDEGYSATNLNRPNLQRLLADIKENKIDLILLTKLDRFSRGVKNFYKILDTLEKHKCDWKTILEDYDSSTASGRLHINIMLSFAENEASQTSERIKFVFNNKIQKKEVISGKVPFGYEIKNKHLVIKEDEAEIVRESFDTYIKFSALTKTIQHINSKFNMRHMYKWMQKLLKNKIYIGIYERENILIEDYCEQIISEEQFYFVQSLLKKNKRVSKNKFDINYIFAGMIICSCGRKMSGSYHLNPYGTLYLHYRCSLSYGAKLCSNTSRLGEKKVEAFLLENVKTELYNAILKHESNNKKSSNKNDTEKLKNKLKKQIEKLQDLYFDDLISKDNYRFKYKKLNDDLLELEKKENEEKVVINDLQKMKNFLKINFEDDYVNMSSLEKRTLWTSLIDRIEVQKDGNLVIKFL

SEQ ID NO: 14827 - protein, 507 aa, synthetic construct
MKRVISYIRFSSERQAKGDSLRRQSKMVNDWLKAHPEYYLDQDLSFRDLGVSGFTGKHLKGGLGDFLTAIEKGLVKAGDTLLIESLDRLSRQDIDIASELLRNILRSGVDVVTLSDGEHYTRESLRDPLALIKSILIMQRAHEESLRKSERIQAAWDAKKEAAKAGIKVSKRCPAWLKLNDDRKSFSVIPEKVETVKRCFQLRLEGKSIWEIVRTLNDEGHQSMSQYKPGKFGQTSVQDLLKNRSVIGYFTPKGCEEIAGYYPAIIDETTFYKVQQLSHSRYGRKPVSGKPLSVNLFKGVIRCSECGHALIITGFSDTRNGIYRCPLRNENRCSAKGLSRKQTDGTLLTLLSRLDRFDSDTTNTIDMLRLHREHISSNIEKLVQLSLEIEDLSAITSKLKQLKNELSQVDADIEKETQRLKSIDVGCLSDCDLTTKAGRIEAQLIIKSAVKEVVLNTAKRRCKVTFHNGKLIDLPITETPSDNVTEAIQSLSEVTERGLIDVDEVII

SEQ ID NO: 14828 - protein, 529 aa, synthetic construct
MRKVYSYMRFSRPEQAKGTSIERQSSFAEQYALEHGLELDKSLTMMDKGLSAFHGVHKTKGAFGQFLAAVTAGKVPSGSVLVVESLDRLSREDPLIAQAALTDLILSGITVVTAADNQVYSREEIQQNPFKLIMSLVVMIRANEESETKQRRSNAFLKSALNQYQANGKIRRLGSDPSWLDFNKDNDTYSFNERVEVIRRILNLYNQGIGSLKIARQLTEERIPTLSGKRSAWGQTTVANIVKSNALYGMKRINVQGVEYDLEDFYPALITKSKWLALQQHRTKRSKSMHGRGEVVHLITGHGKGFTTCGYCGGGLGAQTQKQYKRSGVYSKTVTRLHCLTHKETSSCCSSVFLEPIESAVLFAACIGVEPQSLVPTVNNVNYSALIDEVENKVKHIVEQVTAGAPWDLFKDAHDRLKLEKQKLIKERDSQKPEVNQSDLQKWVNKLVELADKARANDKEARLKCRTLINSICKSIVIKLRGHDLKSEPVVTITFVTDEQFEFKVGKNGAVQFVDNGMAVNRRLKPLLA

SEQ ID NO: 14829 - protein, 523 aa, synthetic construct
MEKIKAVAYGRYSSDNQRDESIDAQLRAIDEYTRKNNIQIVKTFIDRAKSATSTNRPEFQNMIKFCESDTSGITMVIVHKLDRFSRDKYDSAMYKQKLKLKGIRVVSVLENLDNSPESLILESVIEGMAQYYSANLAREVAKGQKENALKALHNGGDAPLGYDVAYDKTYTVNEEEAQAVKIIFDMYVKGYSYSNIIDELNELGYKTKRGNKFGKNSLHGILSNEKYTGVYVFNKTQRKGVNGKRNGHKQKSEDEIIKVEGGMPQIIDKETFNQAQEMMKRRKKSPGAHKATTTYLLTGIIRCGECGHAMQGNKRKDKYGNDYISYRCGCRKQKRDCKNREIKRDYLEIFILQELEKNILNDDAIPVLSKALNEKLKESKDNNAELLKSLENKLEKVNKEINNILNAIMNGIVNSMLKEKLDELEQVKLNLDLKMSELKIEHKDIDTVGVTEEQIKAMFSKFRKFVLDRNIPECKKFIGDYIKEVIIYKDYIEVIFNVVFSFVDDKITHDLHITVEREKIVLK

SEQ ID NO: 14830 - protein, 474 aa, synthetic construct
MKCIIYVRVSTDEQAKHGYSIASQIEKLEAYCISQGWGIIDILVDEGYSAKDLNRPKFTFMMDQIKKGGIDVLLVYRLDRLTRSVLDLYEILKILDENNCMFKSATEVYDTTNAMGRLFITLVAAIAQWERENLAERVRLGMEKKTKLGKWKGGITPYGYKVINKELVINKDEESIVKTIFELSKSSGFYTIAKTLSARGYGTRKGSDWHVDTVRDIANNPIYAGYLTFNENPKQYKKPPREQTLYEGVHERIIPRDDFWALQDALDKRRGSGGKRETSNYYFSSILKCGRCGHSMSGHKSPNGKTYRCSGKKAGKQCTSHIIKEDNLVKTVLNNLNGLFENIKGNINISNAPEAKIKQLEIELKNNQKLLKKQKAMFEADVIEIDELIQKTDSLREIEKRILAELKTIKKVGPSKVDEIKYISENIHTLWEYANDYERKQMMTTLFSQLIIDTKDEYKIGTGKAREIIIVSAK

SEQ ID NO: 14831 - protein, 533 aa, synthetic construct
MPKVSVIPAKQVQVINGIKDKKKKRVCAYCRVSTDTDEQLTSYEAQVTYYESYIRGKPEYEFAGIFADEGITGTNTKHRTEFKRMIDEALAGKFDMIITKSISRFARNTLDCLKYVRLLRDKGIGVYFEKENIDTLDSKGEVLLTILSSLAQDESRNISENSRWGIVRRFQQGKVRVNHKRFLGYDKDENGELIIDEEQAKIVRRIYKEYLEGKGIRAIGKDLERDNILTGAGGRKWHDSTIQKILRNEKYSGDALLQKTITTDFLTHKRVKNKGEVQQYYVEDSHPAIISKEMFRMVQEEIKRRASLIGYSEKTKSRYTNKYAFSGRIVCGNCGSKFRRKRWGPGEKYKKYVWLCANHIDNGLKACSMKAVSEEKLKAAFVRSINKIIENKEAFIKTMMENISRVSESKEDRSELKIINESLEELKEQMMNLVRLNVRSSLDNQIYDEEYERLEEEIKQLKEKKAGFDNTELIKKEGIQEVKEIERILRDRQDIIKDFDRELFMQIVDKVKVISLVEVEFIYKSGVVVKEIL

SEQ ID NO: 14832 - protein, 515 aa, synthetic construct
MRTAIYLRKSRADLEAEARGEGETLAKHRSTLLKIAKEMNLNVLAVREEIVSGESLVKRPEMLALLEEIEDNKYDVVLCMDMDRLGRGGMKEQGIILETFKRSNTKIMTPRKTYDLNDEWDEEYSEFEAFMARKELKIITRRMQRGRVASVEAGNYLGTHAPFGYDIHRLNKRERTLTINSEEASVVRMIFDWYANEDMGANAIRSKLNDLGYKSKLGNEWNPYSILDILKNNVYIGKVTWQKRKEVKRPDAVKRSCARQDKSDWIIADGKHEPIIPESLFEQVQEKLNSRYHVPYNTNGIKNPLAGIIKCSKCGYSMVQRYPKNRKETMDCKHRGCENKSSYTELIEKRLLEALKEWYINYKADFEKHKQDDKLKETQVIQMNEAALRKLEKELVDVQKQKNNLHDLLERGVYTVDMFLERSNVVSDRITEITSMMENLKKEIKIEIKKEKVKKDTIPQVEHVLDLYFKTDDPKKKNSLLKSVLEKAVYKKEKWQRLDDFELVLYPKLPQDGDI

SEQ ID NO: 14833 - protein, 530 aa, synthetic construct
MNKYDQARLEDVVQPGKRIVFYARYSTEKQEYDMQKHSVETFLQRYGCQIYKEYVDRATSAIKVPFEKREDLQNLIRDAEKGKFDVVVTYKNDRIARRIEEHQLFREKMRELNIHVVVSSSSELYTVGEVVSQAVKDGLTRIEAALIQDRTKDTFHSKTKRGTWLGGKAPYGYTYRVIEENDGGRKTRKEYFKDEEDQQEAVMEIFRLFEIGYGFQQIANEIHSRKLDENMKWTKEKIRYIITNPFYCGFISMNRYDNGVLNDQSQWVEGTPKNMTPLFKREHWEYIMRLFEERKKRKVHSRDYSTPFLLRGILNCDQCKELMLAKNQQSGGEKYKGKKKKEQRRIYECKKCDFKLQANMIHERFRKDYLPYVLEQVTQRKKEQVESAIEERLKTEMHSLKGSMKKLDEEIAKLNQQIEALNVEMKSYYDKETIDKKVLEFMSIIMSHRTNKIHELYTVKDKKVGLQERIDRIAKTMQQKKYLPPQHLIHEFAKENVDTQKLRAFLLQFFKCIHVARDGNLVLSINEHLM

SEQ ID NO: 14834 - protein, 490 aa, synthetic construct
MKVLESYAVYVRVSTDRDEQVSSVENQIDICRNWLERNGFNWDEKRVFKDEGISGTLFVDRPSIQLLLQKAKAKEINMVVFKAISRLARDLKDSLEIREVFLAHHVRIISVEEGYDSIKAGKNDMAFELWSLFSAQYSRTLSSSITAALAVKVRRGEHIGKVPYGYNRENQKLVINEEEAQAVQMMYKWYREGWGYKKITNELNRLGIKSKTKKNWQMTSVQRILQSPIYKGTFILNQYTSVKVCGKKKQIRNPKEKWFIFPNHHPKIVEEEIWNQANRKKNKKNKTKITAWNEFRNLAKCAVCGSNMVIVQSHLKKKSGERTEWKYLKCSQYRRAGKHGCVNHVPIQYGDFRQFIINLLMEKGESVTLKLQSNVEKGQEKKIKKLQQLISTNQQKKKALLDLYLEELINKEEFEKKRNDLEEEIIKADHELLVIQNGNHVQIDIQTIKQAFEQLQKQEQDLIHVFQTLIQKVNIHQNGTVDIIYAFESP

SEQ ID NO: 14835 - protein, 542 aa, synthetic construct
MQQLKQKRVGIYVRVSTEIQSTEGYSIDGQINQIREYCDFNNFIVVDVYADRGISGKSMNRPELQRLLKDANEGQIDSVMVYKTNRLARNTSDLLKIVEDLHKQNVEFFSLSERMEVNTSSGKLMLQILASFSEFERNNIVENVFMGQTRRAQEGYYQGNLPLGYDKIPDSKHELMINQHEANIVKYIFESYAKGHGYRKMANALNHKGYVTKKGNPFSTSAIAYILSNPFYIGKIQFAKYKDWNEKRRKGLNNNLVVADGKHSPIISQELWDKVHSRMKQVSQKPQVHGKGTNLLTGIVHCPQCGAPMAASNTTNTLKDGTKKRIRYYSCSNFRNKGSKVCSANSVRADVIEKYVMDQILEIVKSDKVLKQVVERVNQDSQIDMAALNHDIAYKQQQFDEINTKLKNLIQTIEDNPDLTSALKPTIHQYETQLNDITNQINQLKQQQNQEKPSYDTKQISNILRHIFQNIESMDKAQLKAFYLTVIDRIDIRKDGSHKKQFFVTLKLNNEIINQLFNNTSLDEVLLSTSSLFLPQILYFQI

SEQ ID NO: 14836 - protein, 559 aa, synthetic construct
MLAIYTRLSREDDDSTSIKNQIREGKAFAKLHNNKSFEIYNEGEGISGTLSVENRPALDQLIKDIISKKITVIWMRNQNRLERSTYTYHYFIKYAKENNISVYFGDKGKLDYNDPTTYLQGSILSAINQYAADLQSHQTKKSLLDNAKEGKFHGIPPYGYKKNENRVVVIDEEEAKVVRRIYALSLEGNGQSKIAEFLTADNIPTRYNKIGKGTLTTTNKFTKEKTTTKKSNITWSGNTIRGIITNTVYKGEKLYKGEIFKIEPIISAEYWQQVNDNLKNNRNTSGAKTNTYNYLLKGLIRCGKCGRNFYGRTRKDKKDHYYMCSSKRIKNENCGNRSINIDFIENFIWNQFFTNGLLRDRIEAYYDNSDEKQLLKQFAGELKKHNTDKENLLKEKSQTTKYLVKGILEEDEADQQLIRIRKQLNEIETKILNTESNIDFYKNKSQSVEEITADLTNIKKDATFNDKEILVNNYIQNIKVLFQYDNYIIDVEGYGLNTRIIYEVDRNYKYISEVDKLYYRWLEERKKGTIKLKFEEYIDNDINNSSFYQMPGEKKITIK

SEQ ID NO: 14837 - protein, 483 aa, synthetic construct
MNSRQPHGAPLRAPRAVLYLRQSTYREESISLELQETAGRDYCERQGYDVVAVEQDPGISGRTWNRPAVQRVLGMIEAGNADVIVLWKWSRLSRSRRDWAIAADKVDVAGGRIESATEPIDVATSAGRFARGVMTELAAFESERIGDGWREAHARRVAAGLPATGKPRWGYAYDREAKIHRPDPTTGPVLADLYRRYLAGESVYALVRWLNTEGHRTSAGYGPNGGGGLWTDRSLRRVMDSGFAAGLITVDGEQRPGAHDPLITPDTWDAYRLARGNRSVQRGSERSQYLLSGLVFCACGSPMNAGQFGRGREPKYRCRDAHKKGTHDGGYITARYVEGEVLAWVRDLAAGVDQAASAGLDELAARRARRDPLGDIVRQRQALEARLVRLTRQHLEDVIPEGPYIELRDELTEQIDALAARELEASVAATRAPAPEIARQLVADWDVLAVEHRRAMLRQMIACVVVTPGRPRGSVHVVPLWEG

SEQ ID NO: 14838 - protein, 541 aa, synthetic construct
MSSDNSALPVRAYSYVRMSTTKQLRGDSLRRQLERSRAFADEHSLLLDDSLQDLGVSAWKGRNFKHGALGRFLAMVENGEVPRGSYLLIESLDRLSREAVPDALTLFMAIINAGITIATLGEDRQVYSRDTLNGDWTKLIIGLAVMSRGHEESQTKSERVRAANKRKRERAREGRGHITSVTPAWIDAVRTGSNSYSFTLNDNAAAVKAIYEMASRGMGATAIARRLNADGVPAFKSRDGWYQSIIKSLLRRYDVIGTFQPHRMQDGKRVPDGDPIEGYFPAAIDNELFLQVQARRSNLGRPGRKGESFANLFTGLCHCVHCGGPMTIKFSRVKGNENGRYLICSNYVRGQRCTEGNRHFRYEPLEAAILDHVRELDFSTVLQRQRTDEAVIKMDETIAGLAISIEEQQRKEQRLAAAIEEDGQSLESLVALLRQRQSERHAAELELQDRQRERQRLSARNRDTANTRDQLAALRRAWETAPDAIARYVFRAEAHAAVTELISDICFDSADLSAVVVVGNGITAYRIKDGKISGVFQPFSE

SEQ ID NO: 14839 - protein, 555 aa, synthetic construct
MDLSKLCTYYCRVSSDKDEQVNSIGTQTSGLIAYAKEKKMIIADSGVFCKKNQEDELRQGYIDEGFSGAKSKKYRRAYQQMILDAKRGLFKTILTKSVSRFGRNVKDMLTTIDELETYGVGVWFEDIKAYSLNGSDKVKIQLFATLAEEESRSKSDSVQWAKKEAAKRGVWAGREPYGYNIYKMGTYPIKDKEMKGKLVINPKEQEVVIKIFDLYLNGWGVNKIAKYLEVDEKIPSKRGGTWTGSHVAGILQNNIYTGHTTLHRTRRVNINMGLIEKVPEHKQIRFDDESLRVISDETFHLAQKERESRPKVKNMMKGVDSRYSSAHLFSNLLRCSNCGGSMRKKVQKTSRQTHHYYYCRNHEMYGNEVCRYRNLQREEELLEWVKSELIIFIEDTNNDHQENLDILFEARYENVDFYKLISQLEVQLSDLESDKDANFRLYSKDIIDEDEYRVRNNKIRVELEKIKSQIQRYQNINEEIEMLIIEYDRFLNELKNIDLDNLSNTILKKIFFSINIFTTRFPGNKEEEEVRAIHWKFMGLDPIDIINERVDKYIK

SEQ ID NO: 14840 - protein, 500 aa, synthetic construct
MALDATLTLKDEGLSAYHQRHVKQGALGVFLRAIEDGRIASGSVLVVEGLDRLSRAEPIQAQAQLAQIINAGITVVTASDGREYNRAGLKAQPMDLVYSLLVMIRAHEESDTKSKRVKAAIRRQCEGWVSGSFRGLIRNGKDPQWVRLTADGWELIPERVAAVKRALELYRQGLGAGRAANVMHEEGFQLTEGGISGLQIYRTIKLPALRGVKRLNVEGEDYELEDYYPRILSDAEWSDLQHLAGQRLRRRGAGEIPGIITGVGLAYCGYCGTALVAQNIMKRRRTDGSIADGNRRLQCTSYSKNGGCTAGGSCSVVPIEQALIMFCSDQLNLQRLMQPSDDGQSVHRQLVAARVAVAKITGQLSKITDALLADESGAAPLAFIRKARELELQLKDAEQSVSTLEHEVVVMSAGAAQPVQAERWVELSEQVSVGDYSAREKVRQLVMDTFSRIVIFMRGVGASDRTGKFIDVQLFSRTGQHRLLRINRKNGEWVASEDWA

SEQ ID NO: 14841 - protein, 515 aa, synthetic construct
MKTAIYLRKSRADLEAEARGEGETLAKHRTTLLKIAKEMNLNVLSVREEIVSGESLVKRPEMLALLEEIEDNKYDVVLCMDMDRLGRGGMKEQGIILETFKRSNTKIMTPRKTYDLNDEWDEEYSEFEAFMARKELKIITRRMQRGRVASVEAGNYLGTHAPFGYDIHRLNKRERTLTINSEEASVVRMIFDWYANEDMGANAIRSKLNDLGYKSKLGNEWNPYSILDILKNNVYIGKVTWQKRKEVKRPDAVKRSCARQDKSDWIIADGKHEPIIPESLFEQVQEKLNSRYHVPYNTNGIKNPLAGIIKCAKCGYSMVQRYPKNRKETMDCKHRGCENKSSYTELIEKRLLEALKEWYINYKADFEKHKQDDKLKETQVIQMNEAALRKLEKELVDVQKQKSNLHDLLERGVYTVDMFLERSNVVSDRITEITSTMENLKKEIKTEIKKEKVKKDTIPQVEHVLDLYFKTDDPKKKNSLLKSVLEKAVYKKEKWQRLDDFELVLYPKLPQDGDI

SEQ ID NO: 14842 - protein, 515 aa, synthetic construct
MKTAIYLRKSRADLEAEARGEGETLAKHRTTLLKIAKEMNLNVLSVREEIVSGESLVKRPEMLALLEEIEDNKYDVVLCMDMDRLGRGGMKEQGIILETFKRSNTKIMTPRKTYDLNDEWDEEYSEFEAFMARKELKIITRRMQRGRVASVEAGNYLGTHAPFGYDIHRLNKRERTLTINSEEASVVRMIFDWYANEDMGANAIRSKLNDLGYKSKLGNEWNPYSILDILKNNVYIGKVTWQKRKEVKQPDAVKRSCARQDKSDWIIADGKHEPIIPESLFEQVQEKLNSRYHVPYNTNGIKNPLAGIIKCSKCGYSMVQRYPKNRKETMDCKHRGCENKSSYTELIEKRLLEALKEWYINYKADFEKHKQDDKLKETQVIQINEAALRKLEKELVDVQKQKSNLHDLLERGVYTVDMFLERSNVVSDRITEITSTMENLKKEIKTEIKKEKVKKDTIPQVEHVLDLYFKTDDPKKKNNLLKSVLEKAVYKKEKWQRLDDFELVLYPKLPQDGDI

SEQ ID NO: 14843 - protein, 487 aa, synthetic construct
MAYAVYVRVSSDKDEQVSSVENQIDICRYWLENNGFEWDENAVYFDDGISGTAWLERHAIQLVLEKARKKEIDTVVFKSIHRLARDLKDALEIKEILLGHGVRLITIEEGYDSHYEGKNDMKFEMYAMFASQLPKTLSVSITAALAAKVRRGGYTGGFVPYGYEIIDGKYAINEEEAALVREIFELYAQGFGYIKIANTINDKGARTRKGAPWTFSTLCKMIKNPAYKGTYIMQKYGTVKVNGRKKKVINPKEKWVIFEDHHPAIISHELWDKVNDKDPNKFKKKRRVSTTNELRGITVCAHCGTAMSKRNSINVSKNGTATEYSYMICNWSRTTARRECVRHVPIHYKDLRVLVLSKLKEKERELDKEFCSDDNQLHVKLRKLKRDINDLKFKRERLLDLYLEDERIDKDTFTLRNAKIEKEIGLKEMEIRKASNIEIQMKEKQEVRDAFALLEESKDLHSVFQKLINRIEVAQDGAIDIYYRFEE

SEQ ID NO: 14844 - protein, 449 aa, synthetic construct
MLKRAALYIRVSTDQQAKHGDSLDAQIATLKDYVSTQDNLTIIDTYIDDGISGQKLYRDEFQRLLEDIKKNRIDIILFTKLDRWFRNLRHYLNIQEILDNSGVTWLAVSQPFFNTDTAYGRSFVNQSMSFAELEAQMASERIKAVFENKIRKGEVVTGSVPFGYKICDKKLIPNENAPIAKDIFKHYSIHNSIRLTVEYLFNEYDITRSSRTIKHMLRNRKYIGEVSGNKNYCPPIVDKETFEKVQNLLDKNISSIAKRTYIFSGLVVCSCCGKKMTGRYRKRKYIKKDGTVMYYTKKVYRCNGNTYKRNKCPNKINIPEEILEEYLLNNIKADAENFEAKQKKIAVSAPEKNNNSKILKKIERLKKAYLNEVISLDEYKKDRKELEQMIVQVKPKETIVFKSNWFKKNIESTYRDFDEEEKRFVWRSVLKNLIVDPHGKITINFLTKN

SEQ ID NO: 14845 - protein, 544 aa, synthetic construct
MRDQTTTIRRAAIYARYSTDMQRERSIDDQVALCREYSRKNGLRVIQSYSDRAQTSASLVGREGIMSLIDDAKARKFDVVIVEALDRISRDQEDLAGVFKRLSFANVEIIAVHEGVADAVQVGIRGLLGSMFLSDLKHKVRRGMAGVVNDGRVAGGNAYGYDVVLGKPGERTINEEQAAVIRRIFREYVGGASPRDIAGRLNAEGVPPPRGSKWNASTINGSKNRSYGILVNALYNGQIVWNRVHMVRDPDTGKRVSRFNPESEWKIAEAPHLAIVDRETYDAAQARKADRTRLVEQGASTKKAKRLLSGLLRCSICGSGMASVGFNGGRLRVQCSQNRESGSCDNNRKYNAERIEHAVVTGILSKLEDEEAAERYIREYVAERRANIDNATRSASQIEAKLAKVAGEQERLITLFQTGVLDLDRVKPRLTELEEQRKALEDEAASAREAVPVIELHPAAVERFIKLLSRAKAEYENYEMLKDPEKIEAMRELISHVIVSDSAANGYELDVFTYLSALTGDYAPGGLGGALVAEEGFEPPTQGL

SEQ ID NO: 14846 - protein, 522 aa, synthetic construct
MKRAIIYVRVSTTRQADEGISIDAQTDQCKKKAKELGASVLQIFRDEGITGTSAVKRQAFQRAIHYCAVNDVDYFIVWSTSRFARNKLDAASYKLLLRESGTRLVYASMNIDSDTDEGWFTDSIMEIMDEQVSRQISRDTRRAMLKNAEEGWFNGGRAPFGYQITSQGKRRKLVPNDAEKTLVQEAFRRFASGEGAIAIARSFTGRGYTRRGAEWQAASLSHMLKNRVYIGQTVYNKRSGNKPNPPEEWIIRQTHEPLVSEKDFEAVQKRYRPDYKQTGSPSSRFLFTGLLRCGHCGKAMSIETATSKTKRRYNYYNCSGFKKGCNCISRRISAEKLDDYLLNIVVDKLLTQEVVSDFIGEAYRKYVEKRTNNAEQRKLLQQELTELRRRRNTLFELVESGLSGSDSRSLLERVAGYDEREQTLLIELDKLAGAPDVDAIPEIDVDSALRTLKTILLNTANEKKLRILLQSFIRKIDINPTEVVIHYNPERIINDSIGVHSTESWHAHGESNPGYRRERAMS

SEQ ID NO: 14847 - protein, 474 aa, synthetic construct
MRAVDYGRVSTDEQAKEGYSIPTQKEKNTNFIKSQGWDHVDSYIDDGYSAKNLNRPNMQKLIEDVKLKKFDVVVFYKLDRLVRSVSDLDALLKIFDKHNIAIRSVTEPFDTTTAIGRFLITLVAAIAQWERETISERVSVNMEKKVKMGLWPGGMAPYGYKVVDKELAINSDEDIVVKKIFIMLRTLGFYTVAKKLTELGYKTTNGGEWHVDTVRGIANNPVYAGYLTHNTNSKDSKKPPGEQKLYEGIQPRIIPREEFWELQDILGKRRGTGGKRETSNYYFSSILKCARCGHSMSGHKSAGKKTYRCSGKKAGKNCTSHIILEDNLVKTVFSIFDELVGDIVGSTDVSDVSNDKIKEMENELKSIEKLLKKKKTMYENDIIDIDELIEESEKLREREKEIIRELKTIRQTNKQDDKDIKFLSENIESLWINANDYERKQMLTTIFSQIVIDTKEGYRRGTGIPREIVIVSVK

SEQ ID NO: 14848 - protein, 547 aa, synthetic construct
MRALIVVRLSRVTDATTSPERQLEICEELCRQRGYDVVGIAQDLDVSGAVDPFDKKKRPNLARWLAGEHTDEAGNPAVFDVIVAYRVDRLTRSIRHLRKLVDWAEDNDKLVVSATEPHFDMTSPFAAVLIALIGTVAEMELAAISERNASSKRRDIRLGKYRGGTPPWGYRPERDGDGVWRLVHDVEQVKVIHEVVRRVLAGDPLNRVAHDLTRRGIPTVKDRAAQLQGKPMKGTGWNVTPLKRSLLSEAMLGYAVSGGKPIRSEDGSPVVRSEPILDRKDFDALRVELSSRSKRGDPTKRSTSLLLRVIHCGVCGEPAYRFNGGSHSQYPRYRCRSMSKTTRCGNRTVRLDEADSAVADVILSMIGDSERLERQWDSGSDNSAELAELDAELIDVTSLIGTPAYRAGTPQRTALDARIESLAARQAELSKESVVPAGWTWQPTGELFADWWERQDVTARNVWLRSMGIRLDFDRTGLRLDLGDLQTLTGQLRPDGAVAEWQRTFDALTANGIAGIEIGTDRNYRVHLQDGSVVLVDSDGNVQKGDG

SEQ ID NO: 14849 - protein, 596 aa, synthetic construct
MSKIIPYGYLRVSSLEQVKHTRGLDSQDDAVRTYINNHSDIFDTEKTVMMSDAAMSAYSGKQISDGELGRFLGDVEAGKIPTNSALVCFSIDRLSRQNPWIGTKLISTLIGAGIEIHSVAERQVLKSDDPVGAIMSTIYLMRANNESVIKSERAKSGYAKRLNESIEGKKILTRQMPRWLYELDGLYTINAEMKCVIDFTFDSYIAGQSTGYIASELNNKGWLYGDTKWRGSYVAKLIRDERLIGTHIRYSKQTKGVKREIIEKIPNFYPVAVDVEKFHLANNMLTNVAENIRGRTRVTYGDKTTLKNIFNTVLKCGVCGGDTSVVQNTRVKIVDGVKKYIPYKMFLRCRNKYELRRCKQGDIRYEIIEQAVLKHMKDLDIASLLTKPVDNTVELYRSELAQCIADESQFREIIEQRKSAGKRVRPDTTNALEEILDRIDELNRLIESHVEDNFIPNFDVDLNKIADVKNVAERSLIKKGISTVAKNIVYKRIDNFILLEIIYSNLNTKHILVIDNKSSRVVVNFSIDYGEKINIYTCNTFTMIYNKKKSTFKIKRSTMIDYGHMLNFIDYVSDAECRSAKDFLEVNFNKISFKKI

SEQ ID NO: 14850 - protein, 547 aa, synthetic construct
MRTAIYARFSSTLQREASIEDQVRLCQNRAHTEGWSVVQVFSDMALSGASMHRPGLQSLIDLAARGGLDVILCEALDRLSRDQADVATLYKQLDFHNVRVVTLSEGEVNELHVGLKGTMNQMFLKDLAAKTRRGLRGRVEAGKSGGGNAYGYAVVRRLGADGLPVTGEREIIPEEAKIIRRAFEEFAGGYSPKAIARRLNEDGIPGPRGALWRDTAIRGHRIRGTGLLNNELYLGRLVWNRLRYVKDPATGKRVSRLNPESDWIIQEVPELRIVSDALWASVKARQTKIDATPAVQGIRKSKFWEKRRGPHLLTGKLACACCGGTFAAVGRDYLACSNARKLGTCDARKSIKRAVLEEAVLDLLRNRLMQPEAVAEFVAAFTRTANAERASEKASRQQTARALKETERKLLGLYDAIADGFRTPGLLQQLEELEAKKAELEAELQAPSPAPLRFHPGLAKLYRKKVSELSGALRDEAIRTPALEVLRGLIERVVVRHEGVNGSLVLELEGAITAMIEQAQPGALHGVDACSVKVVAGVGFEPTTFRL

SEQ ID NO: 14851 - protein, 687 aa, synthetic construct
MSTKLTEQHLQRQAYVYVRQSTMGQVRWHQESTERQYALRDKAIGMGWTTEQIVTLDGDLGVSGAQTTGRNDFKRLVADVSMGDVGAVFALEASRLARSSLEWHRLIELCAMTQTAVIDEDGCYDPGDFNDALLLGMKGTLAQAELHFLRARLQGGKLNKARKGELRFPLPVGLCFDDQDRTVLDPDDEVRGAVHMVFSLFNEVGTAYGVVHRFGDKGLKFPKRSYGGAWDGKLIWGPLCESRVLSILSNPTYAGAYVYGRYQSKKQVDANGEIQTRSCEVPMESWRVNLRDHHEGYVSWDEYLQNRERLDRNRTNSEQTLLSGAAREGLAMLQGLLLCGCCGRKLTVRYKGNGGIYPLYECNWRRREGVATKSCMFVQANVLDPVVCEAVLAAMIPAQVELAVESVRQLQERDQSVGQQWQRRIERAGYEAQLAQRRYEEVDPSNRLVASTLEQRWNNALEELQKLEEQYAQFHSKEACIVSDEQRQMVLALAKDLPRLWNAKTTSSKDKKRMLRLLIKDITVEKRREERQAILHVRWQGGATNDIVVQLPAPIAEQLRYPAEMVEKIRALACTMRDKDIVAELNAQGLRSPKGKKFTAPMISWVRYRHRIPCADLKRSNELTVNEVMVRFGISRNVVYYWIECDVVEARQLEHGTPYWITLTRSKEKELEDWVRNSTRIDTPVNP

SEQ ID NO: 14852 - protein, 587 aa, synthetic construct
MSHQNICALYARVSSPKQAKDCTIDSQIQALKERIVSDGGQLIDDMVFSDAGVSGATLIRPELERLRDAISIGAVDHLYIHSPDRLSRKYAHQALLMEEFASAGVVVNFLNHKVGTSPEEEMLLQMQGMFAEYERAKIIERHRRGKLHRARVGSVNVLSGAPYGYRYTRKQLDGKPAQYVIDLEQAKTVRQIFNWIGVDRFSIGTVCRRLGEANIPTKTGKSHWDRSVVWSMLQNPAYMGKAAFGKTKAGALMPRVRPQKHSAETPKKPHSTHRVQRKDWIEIPVPPIVSQPLYEAVQAQLDENRKRARVGERGAKHLLQGLTVCGHCHYAYYGKRVSPSTAKGKFQYAYYRCIGTDAYRFGGQRICDNSQVRTQTLDELVWAEVINALENPERLKKEYERRLNVLEKKEHERHDITALKQQKAQLKKGASRLIDSYASDVIDQQDFEPKIKQIKARITEIEEQIEQGDQSQSAQRELFLVINHLEEFAKTINVNLSTTDFITKRDTIRALVKRVEIYKEEVVVIFRIDPTPSHSVSSGPQTKSDKGDHFMHSCKGSKWAALRNTVSTLLIELVIDNSSSQVEFDQS

SEQ ID NO: 14853 - protein, 557 aa, synthetic construct
MKRMEQIAPPPTAKKTVLNVAAYARISMETERTPISLSTQISYYQKLITSTPGWNFAGVFADSGISGTTTKRPQFQELLTLARAGKIDIILTKSISRFSRNTVDLLQIVRELKDLGVEVRFEKEGISSMTGDGELMLTLLASFAQAESEQLSANVKWRVEKQFEKGLANGFRHYGYTNSPDGTDVEIIEHEAALVRRIYRLYLEQVSCERMEEIFAAEGILGRSGEPITSEVLRSWLKAETFTGTLILGRHHSPHFGEHSVLNKGEKPMYRVEDAIPAIISKELFEAVQQERARRRELGARANWSIPTTCFTSTVKCGICGRSFSRSGKYNTAHEIHYVWSCRTKRDGYKRSGGRRCTAKNIPQAILEEHLAPHLGLEVFDPEVYESLVETVVMLPDQKIRINFKDGRQVELAWKSNRRERSWSPERRAAWGEFQRQKWQDPEYRERTIASRKKKAKPRKPLSDGARKSMRDAWTPERRQAQAERSKAMWAARTEEERAEHIRKCQEGITEEAKQRKSEKLKAAWTPERRARTAEIARQTRAREKRKREEAMKAGEI

SEQ ID NO: 14854 - protein, 527 aa, synthetic construct
MARKVTQIPATRALHTGTSLTETKARRVAGYARVSTDHDDQVTSYHAQVDYYTQYITNHAGWQLVKVYTDEGITGTSTTKRAGFQQMVSDALAGKIDLIITKSVSRFARNTVDSLTTVRALKEKGVEVYFEKENIWTFDAKGELLITIMSSLAQEEARSISENVTWGHRKRFADGKVTVPFSRFLGYDKGEDGNLVVNPEQAALVRRIYDMFLDGMSIGSIARTLTNEPDTFTAAGTKRWSITTLRSILSNEKYKGDALLQKSYTADFLSKRQVANQGEVPQYYVTGNHEAIISPAVWDFVQSELAKTAKFRRTQHRTRPFSSTLVCEECGHFFGSKTWHAGSKYEKVIWRCSQKYEAQTRCATGHVDNDRLEQMLVEAVRQNLQSRKKLESEQVLLRAVDTSELELEAAGLVAQIDQAAAKLNELIARNARVAQDQDEYERQFNKAHKLHQDLLVQHGEVLAQIQDMNNQLAAFRYYQGQMGSLQVGGLKFSPYLCVTVLDSASVSADGIVTFKFRDGSTQAVAIK

SEQ ID NO: 14855 - protein, 456 aa, synthetic construct
MDNIKRVALYIRVSTEEQVLHGDSIRTQTEALEQYAKEKNYIIIDKYIDEGYSATNLNRPSLQRLLADIKENKIDLILLTKLDRFSRGVKNFYKILDTLEKHKCDWKTILEDYDSSTASGRLHINIMLSFAENEASQTSERIKFVFNNKIQKKEVVSGKVPFGYRIESKHLVIKEDEAEIVRESFDTYIKFSALTKTIQHINSKFNMKHMYKWMQKLLKNKIYIGIYERENILIEDYCEPIISEEQFYFVQSLLKKNKRISKNKFDINYIFAGMIICSCGRKMSGSYHLNPSGTLYLHYRCSASYGAKLCSNTSRLGEKKVETFLLENVKIELYKTILEHESNNKKSSNKNDTEKLKNKLKKQIDKLQDLYFDDLISKDNYRFKYKRLNDDLIELEKKENEEKVVINDLQKMKSFLKINFEDDYVNMSSLEKRTLWTSLIDRIEVQKDGNLVIKFL

SEQ ID NO: 14856 - protein, 560 aa, synthetic construct
MSKEKIKVYLYTRVSTSIQIDGYSLEAQKSRMKAFALYNDYEIVGEYEDAGKSGKSIEGRVQFTRMMEDIKSGKDGVSFVLVFKLSRFARNAADVLSTLQIMQDFGVNLICVEDGIDSSKDAGKLMISVLSAVAEIERENIRVQTMEGRIQKAKEGKWNGGFAPYGYQLIDGKLIINEEEAIAIRTIFDQYVNTSIGANGLSKYLENHGIRKIPRQNGKNPLFDAGLIRKILKNPVYNGKIAFGRRTLEKVHGTRNEYRQVEQDDYLVAEGIHEAIIPDELWQAAQVKLKAQAKKYEHVNKGKNMRTHLLSGIVKCPICGAGMFGNKSIKYKKDGTKYKDFYYYGCKHRLMNRGHKCTYNKQIREELLDDAVAEVIIKLVSNPKFASMIQEKINMKVDTSAIENEIDNYQNELRKSHSTKYKLIEEIDNLDVEDKHYKRRKNDLDDRLYRMYDKIEELESQLIEAKAKKETIEVEKLTGDNIYKVLIYFDKLYKVMNDVERRQLIEALISEIQIYEEKQPNGQWLKSITFKLPIIDEDLNISLENDEQVECVVLMSRVEK

SEQ ID NO: 14857 - protein, 520 aa, synthetic construct
MNEAQQKKAVIYARVSSAQQTTRTDGLSSQEQRCRLYCEHKGYEVVEIFKDDMSGSVAKRPGMDAMLSYLRKTRKHSHVVVIDDISRLARGIEAHIQLRAEIGSTGASLESPSIEFGEDSDSKLVENLLACVSQHARQKNAEQTLNRMTARVERGFWAFQAPWGYRYGPCPSGGKMLHRSEPVASVIAEALEGFARGRFSSQAEVMRFLESQPAIPKQRDGTMTIERVHQILTQPLYAGIVTVPNWNITPRMGQHEPLVTVETYNAVQEKLNEKPRAPVRADLNEAFPLRGFVCCASCDQPMTANWSKGKNGHYPYYLCRHKGCPDYAKSVPRAKIEDAFETLLQSLTPARQLVELATDAFRNLWNRQIMKAGETKKAIGDELGSIDKKVAQLLDRIVEAESAAVIQAYERRVAELESRKLLLREQLLACDKPVKDFDESFRTALQFLASPWNLWKSQSLTDKRIALKLTFPNQLAYDRKSGFRTPDLAIPFNLLGDISMLEKGMARPAGFEPTAPRLGI

SEQ ID NO: 14858 - protein, 588 aa, synthetic construct
MAEIIKIEAKKSPLPNRKKVAAYARVSMETQRLHHSLATQISFYSDLIQKNPEWDYAGVYADEGISGTSVEKRPEFMRLMKDCKAGKIDLILTKSISRFARNTVDLLKVVRQLKDLNIEVRFEKEKINSLSDDGELMLTLLASFAQEETISISNNVKWTIRKRMSEGNPNMRNNVYGYRWKDDTLIVVPEEAKIVRRIFQNFLDGKSRLETEREFAEEGITTRKGNRWTDSNIKVVLTNVTYTGNLLCQKEFVEDPITKKRKKNRGELPQYFIANTHEAIIDKETFDYVQEEMARRRALGPRANKSLNIYCFTGKIKCELCGKSYMRNVRNNRAKHSNLGNKVISWVCGSSKKKYSTCSAKAIPDRILKTCCAKVLGLEDFDDAVFNEQIDKITVPKQGVLIFHFKDGHSVTETWENNAKKESWDDAARKRASEYRRTHAMKRSDVTCFSTKIRCEHCGCNFRAQTQNCSTSPSGKRRYWRCAEHNGCNTRGLRDDLLRSLTAEVLGLDAFDDASFLSKIDHISVLSREDLIFHFYDGKEIARKLIQPTHEGHKWTEEQHAKFKASIKECYASERHKPIRKEKLWPNK

SEQ ID NO: 14859 - protein, 526 aa, synthetic construct
MAKQVTTIPASIKPFSKTPLTTSRKRRVAAYARVSTDSDEQFTSYEAQVDYYTNYIKARNDWQFAGVYTDEGITGTNTKKREGFKRMVKDALDGKIDLIVTKSVSRFARNTVDSLTTIRKLKEHGTECFFEKENIWTFDSKGELLITIMSSLAQEESRSISENCTWGQRKRFADGKVTVPFKRFLGYDRGKDGNLVVNPKEAKIVKHIYAMYLQGKTYHLIAKALTEDGIPSPAGKPRWNPSNIKSILTNEKYKGDALLQKSFTTNFLTKEHKINEGEIPQYYVTGNHEAIIEPEVWELVQREMERRKNEKGRHSGVRLFSGKVYCGECGTRLGSKVWHSNDKYKQVIWQCNRHCKKNSPCKNGMHLTDKELKAAVLSATNKLIENKDEILNSFQKIVGGVYDTHTLEGEKAKLESEMDVCAKMIEDLIRQNAAIPQDQSEHQAKYEDLERFYNEKKAALAKVEGKLKKMQATKADIKFCLKQLQKQDRLLQTFDEQSFCALVDHITVYSKNDIRVTFRNSTEIRL

SEQ ID NO: 14860 - protein, 527 aa, synthetic construct
MGNPSKALLYCRVSGKKQTRDGSGLHSQEYRCRQYADTKGYSVEAVFPDDVSGGGDFINRPGMVALLAYLDARPDERFVVIFDDLKRYSRETEFYLKLRRTMTERGAVLECLNFEFQDTPEGKFVETISVAAGTLEREQMARQNRQKAQARIEQGFSIRSVPPVGFKYVPYSGGGKILVHDEPHASIIRNALEGFASGQFQTQSEVVRYLESEPEFPKDRPDGTIIQQTVKRMLEQILYGGYVAMPSWGVSMREAKHEGIVSKETFWRIQERLKQRPVKPARKDTSDDFPLRGAVSCAECGYSLTGGWSKGKCKHYAYYSCHHHGCDQRGKGIPKAKLETCFEEVLHSLQPTRQYLNLIKAMFVRAWDAQAKRLEAATKLHAAKAREIEAEIGMVLDKMLEVSNPRALSAFEGRIAELEKKKLIALDKASRKPVPARPFEEMFELALRFLASPYDCWKIGGSEARSLVIRLAFSEPLSYVRDTGCLNTKKSSVFSLLEGGCESALKMVPAEGLEPPTYRLQGGCSTS

SEQ ID NO: 14861 - protein, 525 aa, synthetic construct
MEAGRHHAGATGRRLTDNPDRLMKTCFAYVRVSTARQGEGVSLDAQRDAIEAFAERNGITVTRWFEEKETAAKSGRPVFRQLLKLLKARKAEGLVIHKIDRSARNFADWAKIGELSDAGIDIHFATESLDFRSRGGRLTADIQAVIAADYIRNLREETRKGIRGRLKQGLYPFGAPIGYLNNGGGKPKTLDPERAPLVRETFELYASGEYSLHALRAETERRGLRNRGGKPISKLCLEKMLDNPFYCGLCRLRRTGETYEGIHQPLISISLFERVQAVRADRGKKKSTRHDHRYRGLFQCGSCGRCMVAERQKAHVYYRCHTRLCTTPMIREDRLERAIMSTLCHLAPSDASVDALLGAIETLRDEKQYAQRTAGFDMQLQRLEERLRRLTDALIDQLIEKQDFETRKRALLEEKRHICELRARVVDGDRVLDEIANMVRTAQNLAKSFEHADRKECRELIRIAFSNRTVSAKEVELKPSNWLKAVDDAAYGIVGGPDRLTSRTLIQELLEILLVEMPWPCGTSV

SEQ ID NO: 14862 - protein, 537 aa, synthetic construct
MNVILYARVSTDDQSERGTIEGQLEFGKKYSELHQMNLVKIYQDDGISGTLELGDRNGGAELLSDIKNQKIHADVILVYKLDRLGRSARVILNAIHELDQHGIKVKSMTEDFDSGSPSGRFLVTMLAAVADLERETIIERMWHGANRAARKGKWLGGIVPYGYYVDEEGYLQINKTPLPKLEKSEADIVYMMYHLIGEKGHSAREVAKLLNSMAVPTSYIKDNRKVKRGKRKVKTSGYWRSSRVRSIIYNTTYKGMHYYGKRSNKNREIIERQVPAIVSPELWEKAVNTIKNHNLSSYESRDEKNLLRGLIKCGMCGRKYYALYYNGGKEKPPKYYFVCSGKVGESSVYDKCRSKNVPKVWLEELVWQDIVKFMDKPKSVIQEIVRELNIEKENSTNKNADLEIGILKNTIEAKENEKQSILDLFRKKLITPEDVEFQLKKINDEKQELLEKLHRWQAENKQNQDVKNRLSSAEKVLQELRKKINKDLSYREKREIIHSLVSDIVVHTIKTPGKKRDKANIQINYVFSIGQNYTDTD

SEQ ID NO: 14863 - protein, 548 aa, synthetic construct
MKHMRQKVLIYCRVSTRRQLHEGSGLTSQEKRCRIHAEQQGYEIEAVFPDDVTGSGNFMDRKGMVAMLEHIKCHPNTSYVVIFDDLKRLARDTKYYLILRETLDALKVRVECLNFTFEASPEGEFYETVIAAGGQLERKQNARQVQQKVSARFEAGYWGLAAPLGYKMQMDKKKPRILIRDEPIASYIQEALEGFACGRFQTQSEVARFLETCPEFPRTRNKGRQVHRDLVKKLLTKSVYAGMVELKCRGIGLREGHHEGLITMTTYQKIQNRLNGKTVAPTRKDLNQDFVLRGAVCCTDCNNPLTANWSSGRNKKYPYYLCRTKGCVSYGKSILREKMESQFETLLKQLTPAKSLMKTATKMFKSLWDNETKDKNRRKQDLQKHIKQLDREKEKIIDKLIKTDIESVIAAYEKRIQDIELDKVVIEEKLSNLGKESASFDKNFRTAKEFLSNPYRLWDRGQYLGKRAVLKLAFPQHLIYDRKTGFRTAAIARPFRLLEGLKKGDSEMAEREGFEPSIPFTVYSLSRGAPSATRPSLRSRCQLNNYTI

SEQ ID NO: 14864 - protein, 691 aa, synthetic construct
MSEKIEAIHLQRKAVLYIRQSSPFQVLHNEESRRLQYAMQQRMRSLGWKDIEVIDEDLGRSASGSVVRSGFERMVADVCLGKIGAVAAREVSRFARNSREWQQLVEVCRVVDTLLIDQETVYAPRRSNDRLLLGLKGSLNEYELDLLRQRSVEARREKARRGELIISAPVGYLKTGTTRGKDQRIEKDPNTRVQQMINLVFRKCFELGSARQALMWLLEEDLQMPTRDKAGVLKWKRPTYGMVYQILTHPVYGGAYAYGRTEHQPSYEGGFVDSKTRRRSREEWIALIPEHHEGYVSWEEFERLQDLISSNNLRSGRGAARKGSALLSGMLGCQQCGRRLAVAYSGVGAKVPRYCCHRGYLDNGEAKCIAFGATSVDIAVAEQIFRVVAPAAQEAAMLAHQKTTERDNEILQALEGELKSARYEASRAQRQFDAADPENRLVTEELERRWNASMQHVSDVEARIDQQRNDRSSIDDPDLQGLMAVVADLDAVWNNPDADIRIKKRIVRTLIRDIVADVDNDVSEVILTIHWVGGVHTELRLPRRRRGKSTATSAEAVDAVRSLARICSDDLIAGLLNRNGLPTGRGNRWTRERVTSMRNYHKIARWTAQAQSDQGWMNLTDSAKHLGISTRTLRLAIERADIKGQHPLPDGPWIINRSELETPAAKAVVRKAKTRNRNPAVPDPKQQSLEF

SEQ ID NO: 14865 - protein, 630 aa, synthetic construct
MKKCFIYHRVSSEQQRSGTGIERQEQNLNAYVERTNLLSEMDDPEAIIISDQGVSAFKGLNMSEGELGRWMEQVRGGMWDDSHLVLESIDRFSRQNPFTVVAYLSELVNHNITIHDVSLNMLINRSSSAMLPIVTMSAQRAYEESKLKSDRIRDGWKRRREQAFKQGTIVTNKRPQWIDVVDDRYVLNEKVAVVREIFRLYQTGIGTPTIAKMLNERGSEWLFESSRLWRGESIHKLLRNKRVTGSIFISEIIRDYNSTFNPVDQKLSEMDVYPIAISKEEFDLVQELLKSRRSGVKVTGGKFLKKFYDPGTNKPYLDRDGNVIELEVDTGKEITQSNIFNGIFRCARCGEAMYHNVVVTKRDSKKRGKFTEEYRYIRCIAERDALCENKALQYEVVEKFVIEHIKNLDFTKILRPNENNPEIELVRLKIEDEEAHIEEYKQNIERYRNSGKKIPFAVLVELEESEDRLKELKVRQSTFTEVQVDTDYLKTVDPSVLFDVKNIEVRSRMAAELSKILDGIQLYRTGKHYVITINYKKVEVLKHVLFVEAKKVPELVSCVAIERFGDTVAYSTPSFSIAVDGGTSPRLINVEGEPLSIIDWSLLLNYVDAVDPNDDVGIWMRDNMNFVFTN

SEQ ID NO: 14866 - protein, 495 aa, synthetic construct
MKTFIIYARYSSDLQNPKSCEDQIQLCTEYVERQGGYVAQAFSDDAITGKTMKRQGIEKVLEVIQARPGVILLCEALDRISRDQSDILFFFKLLKFNDVELHTVQDGRLNKPGLTIKAYLSEAYTDDVAKKTKRGQVAAVKRGKVASGICYGYNVCKKYDEKGEPIRGLREINPDQSEVIKRIYKEYSEGLLLSEIVETLNKDGIPSPSGKLWKINTLLGNRQKLIGILNNPMYVGQIVFNKERHIRDPITGKRLKKLNPREEWVFKDMPSLRIIDPETEKKVRLRQDRLLVTKGNRTRTTNPLTQKLFCKCCGSSLNLQKKERYFCIQHTKHKNCKNKKSISLEKLMEEISIQLRKALKNNRHHNLYKVQKFISDQKQEITVEQNKYKVQLSNLYEFVAKGTLTPSIKKKIAEYEHRLAVIKSRSEKTLTPAGRATRPLEDYLKRGALLYKDIEFQKDFASLITEIRVDEFQNIFVNPNYEAILKWSISELSNP

SEQ ID NO: 14867 - protein, 508 aa, synthetic construct
MRVAAYARYSSDAQREASLEDQLRNCRAYATREGWRAPEVFTDAAISGARQDRPGYRALLEAAHRFDVILVDDLSRLSRDSVECQQAVRRLTFAGVRLIGVSDGVDTGRKSHKADVGLRGLMSELYLDDLAEKTHRGQAGRALAGASAGGLPYGYQVAGVGERAIDEAEAAVVRRIYADFIAGRSPREIAKALNAEGVPSPRGGTWALTAIRGDPRRGIGILANPIYVGRQIWNRSRWVKHPETGRRIRQERPESEWVVTECPELAIVTPEQWEAAQQLINGRKRPGTANSGRPPRHLLSGLLRCGCCGGPLVVVDRYRYGCARAKDRGTCREPVHVPIRDAEAAMLAGIREQLLSDDAFQRFQRAVKAALQRQAPDTAAARRRLQGAQRERDNIMAAIRQGIITPSTKAALQAAEAAVADAEREIAAAAAVEPARILPRARERYQALVADLGNRARGNTRAREAVATLIGTATVTKENGDLVAEIAASRSQITVVAGAGFEPATFGL

SEQ ID NO: 14868 - protein, 464 aa, synthetic construct
MATQKILRCAIYIRVSTAEQMMHGKSLEAQKEYLVRYAKEHGMIVVGVYADEGKTARKELKKRKAIHSLLEDVKAGKIDVILFWRLDRWFRNMSDFYKVQDVLDEYGVRWISASEPGINMETRDGRLQLNVVLSIGQNEVDTTSERIKFVNEASIRQGKVIFGDKNMPTGYMVGVVDGQKRMVKNPDEEDLVSAFFDYFEKHQSKQGTLRYIQQNYDPEFSHTMLRTMLASEFYKGTYRSIPYCPAYLSEDRWARIQKISNRNVKHTPSGRVYLFTGLIRCPVCGQLLAGTGSSSIINRKTKEKRSYCYYRCNRAMIDQLCSNRHRMSQNLLEKYLLDNLETEYKKYRIRCEKIEEQKAKIRKTRTPEKLQSELERLNLLFQKGRVQWEYYSSEYDRIEKEIRELSTIRPEPERDFTYLEELLQADLGTIYAKLTPENRRAFWRSTIREIQLNEDFTVKSVDFL

SEQ ID NO: 14869 - protein, 479 aa, synthetic construct
MQDLRFAIYARISRDRVGAGLGVERQQEDCESLVQQLGGTVAASFSDNDISAFSGKHRPGYEALLQSIKAGEINAVAAWHQDRLLRRTIDLENYIDVCQPLNVATYTVKAGQLDLTTPSGRAVAKTLAAWASYEVETSTDRVKAAKLQAAKSGLPSGGNRAYGYEQNGMVIIEDEAAVVREAIKRFTSGDSWNRIAMDFNARDIPTAKGNTWNAINVHNIANRKRNISIRTHNRDEYPAQWPPLIDMETWEDLQVAIKRGQAIYGKRTHARKHLLTGFIFCGLCGNKMTIINAQQRDGSYSPAFSCRRKNPRGEETGCGKVKRKKDPVEDLVIDCIMYRLDTPDLAEMLANSKSDTGELKALMRDHEAQSLRLQEILNLYSTGGMTFDEYKTAKVAASARLDALGRELDKQSSCNTIGLIPAGQSVREAWDKADLPWRRQLVDTLIDKVLIFPKQPGDNKARYKQWRFEPSRIEISWKV

SEQ ID NO: 14870 - protein, 507 aa, synthetic construct
MLQPRELKGRTAISYARWSSGKQAQGDSLARQTKNAKAFCASYGLTLDSELVDDGVSAFKGGNLDLAARLGKFIADVKAGLIPSDTVLLLENLDRFSRIHPMDAQPVLADLLKTGLTLVTLQDQRVHTYADYRENFASLMMSLMSMQAAYEYSAKLSHRVGEAWSRKAQKAREAVASGVGRVKVAKLPFWIDRETYDFNARADDARLIFELAKEGHGQQAITQILNTRGIPSPAGNSWAQAVVGDVVRSPAAYGCLVLKGEEVPGYFPALISETEWLATRQRTKARQHNRQVGRTSNLFSRMVHCGHCGCSMALTSSKKGGVSWGYFICTGKSFKSRDCTAPNWPYAQFEREMLDRIGFLAVPVPQEQTAPDHLEALDDAIAALEFKRENALAGALDAETADIRKAFSGKADELTRQIEAKRREIVAIRENDARFRESAVAVTDFEMDQEEIRRLAKEDRKGAKGLISNLVARIDLESDSKALRRAVVTMRSGYSHALVFDGTGEPD

SEQ ID NO: 14871 - protein, 535 aa, synthetic construct
MARPRVNKRAKTASERPRSRKRAVLYARVSTPEQEREGFSIPAQLAVLKEYAAQHGIAIAQEFVDVETAKKAGRTNFEEMLRFLRSHPAVDVVLVEKTDRLYRNIRDWVTIDDLDVEIHLVKENVILSRDSRSSEKFMHGIKVLMAKNYIDNLSEETRKGMLEKARQGLWPSFAPIGYQNTVSAEKKRIIVPDPTTAEMVSRLYEWFESGRYSLKDVSKMARDAGFVNPKTQRPVGVSTIHVILRNRIYTGSFHWLGRLYQGVHEALVPLETWENVQEILDGRSYSNIPVNVTSFRFSGLVHCGHCGSVMTAEIKKAKYIYYHCSRFKGKCPEPYVREEVLAERFVEALSKLRVDDVILSLIRQGILEAHGDERRERDETIARLRAEADRLQARLDTLYIDKVDGTITAEFHDRMSATWREERLRCLNDIDRLYSAEDALVDDGVALLGLATNAHRTFAERPNGDQKTLLNLLISNCSWAHRELTVQYRHPFDILVEIPDDGSSGSGPKKQPIQNGSLSRIRTYGRSINSRELYR

SEQ ID NO: 14872 - protein, 522 aa, synthetic construct
MARPRKPKITTTAQGRTSGGQKAVLYARVSTAEQEKEGFSIDAQVALIREYADRMGFVVAHQYVDVETAKKTGRTQFEAMLKYLRSHPGVRHLLVEKTDRLYRNIKDWVTLDGFDIELHLVKEGTVLSRDSRSSEKFMHGIKVLMAKNYVDNLSEEARKGMLEKAKQGIWPSQAPLGYLNVVGPQGKKIIVPDPDLAPIVSRLFEWFETGDYALKDVTQKARAAGLRYRRSQKPVGTSTVHYMLRNRLYAGAFEWGGRLYQGTHEPLVTRETWENVQEVLDGRSASNVRAEPLRFAFTGLITCGHCGCAVVAQMQRGRYIYYHCSGFRQKCPEKYVREETLADAFSEQLSRLHMDDEIFALIERAIRESHGDKSRERLETLARLRGEADRLQQRLDKLYVDHLDGRITAEMHDRMAATWREERAGCLRRIEILNNAEDAYVDDGIALLNLARKAHSTFNLQSQSAKNSALNLLVSNSTWANGQLSAAFREPFDMLEKMSLGASASEPPAGPGGSDNPEWLPE

SEQ ID NO: 14873 - protein, 540 aa, synthetic construct
MAQAATAKKVVIVPIKTMDIVEGIQSIQKKKVAAYCRVSTDSEEQKESYTNQVNYYTQYIQNNLEWEMADIYADEGITGTSTKNRTHFNRMIQDARNGKLDLILVKSISRFARNTLDLLKYVRELKSLGVAVFFERENINTLDTTGEVLLTILSSLAQDESRNISENSRWGILRGFQNGKVFCNTTRFLGYDKDEHGELVINEPEAEIVRRIYEEYLDGKSYQAIARGLMRDQIKTVTGGDTWWDSSITLILTNEKYYGALLQQKTVTVDFLTHKRIRNKGQEQQYLIEDNHEPIVSKEIFEAVQKEKERRAKLKGSVMGESKRYSSKYALSSKVYCGCCGAIFKRRTWNSNNPSKKVVWQCKTYVNEGKVACDAKSVDEQVLHSAFVRLFNRMYENKERLIKTLKANIESALSSRVEQKSLLDIEGKMQQLKSDLKELVNLKLRNQIDESVYDEETNRLSSELNELRQQMRILEEEEDQQAKIKERVDDIIQLLNSRQDILEQFDDNLFNALVEKITILSPAHFVFTLKSGMSIDEILD

SEQ ID NO: 14874 - protein, 496 aa, synthetic construct
MAQAATAKKVVIVPIKTMDIVEGIQSIQKKKVAAYCRVSTDSEEQKESYTNQVNHYTQHIQNNLEWEMADIYADEGITGTSTKNRTHFNRMIQDARNGKLDLILVKSISRFARNTLDLLKYVRELKSLGVAVFFERENINTLDTTGEVLLTILSSLAQDESRNISENSRWGILRGFQNGKVFCNTNRFLGYDKDEHGELVINEKEAEIVRRIYEEYLDGKSYQAIARGLMRDHIKTVTGGDTWWDSSITLILTNEKYYEALLQQKTVTVDFLTHKRIRNKGQEQQYLIEDNHEPIVSKEIFEAVQKEKERRAKLKGSVMGESKRYSSKYVLSSKVYCECCGAIFKRRTWNSNNPSKKVVWQCKTYVNEEKAACDAKSVDEQVLHSAFVRLFNRMYENKERLIKTLKGNIESVLSSKVGQEQLLDIERKMQQSKSDLKELVNLKLRNQIDETVYDEETNRLSSELNELRQQMLKLEQEEDQNERIKERVDEIIQLLN

SEQ ID NO: 14875 - protein, 521 aa, synthetic construct
MATARRVTMIPAVETFTTVSSEGNLRLKRVAAYARVSTDNEEQLSSYEAQVDHYTRYIQSNNQWKFVEVYADEGISATSTKKRDGFNRMIKDALAGKIDLIITKSVSRFARNTVDTLTTVRKLKDKGVEVYFEKENIYTLDSKGELLITIMSSLAQEESRSISENVTWGQRKRFADGKVSLPYKQFLGYEKGEDGLPKIVESEAKTVRLIYKMFLEGTAGTTIAKYLSDSNIPSPAGKKVWSESTIRSILHNEKYKGDAILQKSFTVDFLTKKKKVNEGEVPQYYVENSHPAIISAEVFDLAQAEFERRRSDRGLRRSNSCFSGKIICGECGGFYGSKTWHSNSKYRKVVWRCNHKYDNNEKCKTPHIYEDNLKELFVKAFNEMIENKDEILRDYKEIIEVLGDTSKLEKEKLKLENEAEVLIELLKKHVEKNAHTVLNQEEYESKYNELANKYEEVKNRVEEVEKKIFDQKIKFNSIKEFIGKLEEQEGLITEFDEMLWNATIDKVEVDLKYGVKFYFKN

SEQ ID NO: 14876 - protein, 406 aa, synthetic construct
MERTIKVIQKGISKIPSKKRVAAYARVSSGKDAMLHSLSAQVSYYSNLIQNNNEWSYLGVYADEAVTGTKDNREQFNKLLDECRNKKIDMIITKSISRFARNTVTMLETVRELKELNVDVFFEKENIHSMSRDGELMLTILASFSQEESRSVSENCKWRIRKGFEQGELINLRFIYGYRIDKGKIEIYEEEAQIVRMIFQDYLDGYGCTSIAKKLREMKVKKLRDGKWSSERVADIIKNEKYIGNALLQKKYVKDHLTKKLIKNRGIVPQYYAEGTHPAIIDSEIFERAQQIMKANRIKYKCEPGKKNYIFTSKIQCGICGKNYKHKDRSGRSTWVCSNHHKYGNEGCEAKPIYEEQLIKLLNQVLEIKEFDEEVFKETIEKIEVEENRTITVILKNGKVIKKGMV

SEQ ID NO: 14877 - protein, 546 aa, synthetic construct
MAAKARVYSYLRFSDPKQAAGGSIDRQLEYAARWAADHDLELDASLSLRDEGLSAYHERHVRQGALGVFLRAVEDGQVHAGSVLIVEGLDRLSRAEPLQAQAQLAQIVNAGITVVTASDGREYNRERLKAQPMDLVYSLLVMIRAHEESDTKSKRVKAAIRRQCQGWIAGTWRAPIRAGKDPQWVREGEGGGFELIPERAAAVRLVVEMFKQGHGAVRTIRELSERGLAVTESGRMAASHIYKILANRMLVGEKSVEVDGETFRLEGYYPALLSAAEFAELRYLAEQRGRRKGKGEIPGVVTGLGITYCGYCGAAIVAQNLMSRKRMADGRPAPGHRRLHCVTYSTGAGCKVSGSCSVVPVERALMLYCSDQINLTRLLEGDAGTATVSAQLARARQRVAELEAQVQRVTDALLLDDGEAPAAVLRRVRELESQLASERRHIDSFEHQLAASASNVAPAAADAWRELVNGVEHLDYDARMLARQLVADTFSRIVVYQSGFQPDVADGTIGLLLIAKRGTTRLLHVDRKTGEWRAAEDVNLPDRHPM

SEQ ID NO: 14878 - protein, 520 aa, synthetic construct
MNSKVIVIPAKKKKGNSIKESEKKKLRVAAYARVSTDSDEQATSYDTQVDHYTNYIKKNPDWEFAGVFSDEGISGTYTKKRAGFNKMIEEAMEGNIDYIITKSISRFARNTLDCLKYIRKLKENNIPVYFEKENINTMDAKGEVLLTIMASLAQQESQSLSQNVKLGFQYRFQQGQVQVNHNRFLGYTKDEEGKLVIVPEEAKIVKRIYREYLEGASLRDIKEGLEKDKIVNGARNKKWHVSNLNQILTNEKYMGDALLQKTYTVDFLNKKRVKNDGIAPQYYVENSHEAIIPKEIFMRVQEEMDRRANMVSGKGKRRIYSSKYALSSIVYCSKCGDIYRRIAWNNRGKKYTVWRCCTRVTHGPEACEARTIREEDLQAAVVEAINQLITESSELKEIIRENIEKAITGDGSSGIEEIDKEMLAVQEELLKVANAKKDYTDLADRVEELRNEKEKILLDLAEEKNEQSRLMELEEFIDNQEFEIDLYDEELVRKLIDKIVVYEEDLKVVFKSKLEIIINK

SEQ ID NO: 14879 - protein, 520 aa, synthetic construct
MKKITKIEANQKEESTLRVAAYARVSTDEEAQLVSLKTQKAHYEKTIAENKSYTFAGLYFDEGITGTKKECRDGLLKMLKDCEDGKIDFILTKSISRLARNTTDCLEIVRRLLDLNIGIYFEKENIDTRTMESELMLSILSSLAESESRSISENNKWSIKKRFQSGTFIISSPPYGYENIDGKMVVNEEEGKIIKEIFEQYLSGKGTHKIADDLNKRKIKGQKGASWHGSTINGILKNEKYTGDVIYQKTYTDDNYNRHKNKGEEDQYKIIDNHEAIVSREDFQKVQGLIKIRAIAKGNGEDTKRYQNRYSLSGKIKCGECGSIFKRRHHYNGKDKYIAWTCSEHLRDVNKCSMKFIKDKDIKLAFTTLVNKLIFGKDSILMPLLESLKRVDSKEEVEKINKIEESLKQLKERKEVLSKLITSGVLDASIYTKESSEISSEESYLLKEKERSKKAILGNDEEIRELEKLIGILGKGEMIDHFEDDLFEEIIAHIKVVNRETLDFHLKCGLVLREEVKGDV

SEQ ID NO: 14880 - protein, 561 aa, synthetic construct
MAAPKKTKYKVYSYLRFSDPKQAAGSSAERQMEYAARWAAEHNMQLDASLTLRDEGLSAFHQRHVKQGALGVFLRAVEDGRIQPGSVLIVEGLDRLSRAEPIQAQAQLAQIINAGITVVTASDGREYNRERLKAQPMDLVYSLLVMIRAHEESDTKSKRVKAAIRRQCEGWVAGTWRGIVRNGKDPHWVQLGKDGEFEHVPDRVLAVRTMIDLFLQGHGSTEITRILTERNLFVSNAGNYSTHMYRIVRNRALIGEKPIAVDGEEFRLEGYYPPILSTEEFAQLQDAMNTRGRRKGKGEIPSVLTGLSITTCGYCGAAVVSQNGTWRSTSAKGVVRRLSCSTYQYNTGCPIGGSCDSEVVERALMRYCSDQFNLTRLLEGDDGTARRTAQLAIARQRASEIEAQIQRVTDALLSDDGAAPAAFMRRARELEAELEQQRREIEALEHQIAASTAHEIPAAAEAWAKLVDGALALDYSARMKARQLVADTFRQIVLFQRGFAPIDDAAADRWKRDGMIGLMLVTKRGGMRLLNIDRQTGAWQAEDNLDLSGSPVGGLPLPPEI

SEQ ID NO: 14881 - protein, 552 aa, synthetic construct
MNYALVYSYLRFSDPRQRAGSSIERQTAYAARWAAEHGMALDTSLNLRDEGLSAYHRKNVTRGALGVFLKAVETGRVPRGSVLIVESLDRLSRADVDIALKQLLDIIHAGITVVTVGDNSKEYSNESVRRNPVDLIVSITVMMRAHEESHTKSRRITAALRRQCEGWNAGTWRGKLGAGANPSWVRWSVERRAFELDPREAAAMRALIGLYRDGHSPRGAFEYMGRLGIAIPSGVSNNARMYALMKNRNLVGEKTVEADGQTFVLPGYYPALISEAEFASVQYLRSQRGRRPGKAEIISIMTGLGIAACAHCGSAMANQNIMTRSRMANGLPQDGHRRLRCTGEEKAVERCRAGSCSIVPVERALVTYCSDQLNLAALFVDDDEKSRGLNDALALARAAAADTQRKLDKFMVAAASDDGETPASLLAQVRRFERQLAAEKIRVTEYEHELEALHRHSQPAAAEVWADLREGIEMLDPASRTKARQLIADTFRRIEISLVDPRMIGLRLISKRDIVRILWIDRKTGERRDQITVENTTHPALGVARRGLKRVA

SEQ ID NO: 14882 - protein, 555 aa, synthetic construct
MLMTSDKLRRVAIYVRVSTEEQAEHGYSIDAQLKTLTDYSKLYNYEIYREYVDRGISGKSMDNRFELQQMLQDAKNNLFDTVLVWKFNRLARNAEHLSQIVNILNKNNVAFMSMTEQFDTSTSHGKFMLHIMGAVGQLERDTIVDNVKMGHKQRARTGKHNGKLPLGYRSVEDIVNGVRSRESKVEIVPEEEVIILKIFERFATGRGFKSIANELNHEGYVTRSGGAFSISGVKEILDNPFFVGRIRYGRYENWSEKRRKGLNTKLETFDGIHPAIVSEELWNKVQYLRKKKSVVSLKRFDGEFLLTWLIRCPKCGAPMVANRTQNRKKDGSKVTRLYYSCSNFRNKGSKVCSANSIRKLEAENYVIERLKEVLAKPQILKAIVKNINERKTKRVKPLQQELEHILVKITELEGKRRKYFDMYEMNGLDKTMFSKRLDDIGEELERLHVKKTEQAAEMKDDHAEPVSYEVVRALLNKFDKLLDSSSFDQRKTLMHLVIRQITIKDSKTIDQIDMNFDENTVHHFLNADPSVNYAEGSFAVQMKRETLGRSISIAI

SEQ ID NO: 14883 - protein, 515 aa, synthetic construct
MESTVALYIRVSTDEQVDGYSIDGQMDMLKAYCRRHNLTIYKSYIDAGKSAKSIQGRPLLQQLLLDAQQGCFQNVLVWKLNRLSRNHSDLLHMVKILNKSNVGIKSVTEDINTDTTMGSFVVQVLSAIAELEREQICDNVRLAVQERNRQGCWNSGNMVLGYRWHKNPDPGQQQLEVVEPEAEIVQTIFTMYADGLGYKAITNRLNAAGYRTKKGLAFGIATVRGILTNPNYIGKIRIGTSQRHTGAEVQLVEGEQEAIIALELWEQVQAKLRSRSNPPSKTIKRHFPLSGLLKCPECGCGMVAAHTKSYNKNGTIRKNYYYVCSIYRSKGSAACSLNAIRADDMEHWFSQQIQELVTKPPLLNQIIAAVNDKRDLSRKPLEDEKRGLIKELATFDQRQQRCFELFEEEHIPQEVLVTRLKELEEQKAVKQEALRGVEEKLANQQIQLVDSNKILTALNNLWAMVQTSSHEQQKKLFKSLFDKITLPPDKDISKAVLHGSASLNHILLTNDTEEL

SEQ ID NO: 14884 - protein, 555 aa, synthetic construct
MLTIADKVRRVAIYVRVSTEEQAEHGYSIDAQLKTLTDYCKLYNHEIYREYVDRGISGKSRDNRFELQQMLQDAKNNLFDTVLVWKFNRLARNAEHLSQIVNILNKSNVAFMSMTEQFDTSTSHGKFMLHIMGAVGQLERDTIVDNVKMGHKQRTRTGKHNGKLSLGYRSVEDIVNGVRSRESKVEIVPEEEVIILKIFERFATGRGFKSIANELNHEGYVTRAGGAFSISGVREILDNPFFVGRIRYGRYENWSEKRRKGLNAKLETFDGIHPAIVSEELWNKVQYLRKKKSVVSLKRFDGEFLLTWLIRCPKCEAPMVANRTQNRKKDGSKVMRLYYSCSNFCNKGSKVCSANSIRKLEAENYVIERLKEVLAKPQILKAIVKNINERKTKRVKPLQQELEHILVKITELEGKRRKYFDMYEMNGLDKTMFSKRLDDIGEELERLHVKKTELAEEMKDDHAEPVSYEVVRSLLNKFDKLLDSSSFDQRKTLMHLVIKQITIKDSKTIDRIDMNFDENTVHHFLNADPSATHAEGSFAVQMKREIQGQCISIAL

SEQ ID NO: 14885 - protein, 502 aa, synthetic construct
MKMKSVLYARVSTEDLEQNNSYIQQQLYQDDRFEIVKIFSDKASGSSVDGRESFLEMLKYVGISKEGNNYFVEHRTEIECIIVANISRFSRSVVDARLIIDALHKNNVKLFFVDLNKFSDDADIFLQLNMYLMIEEQYLRDVSKKVKAGMQRKQSTGYILGSNKIWGYNYVTKDDGKGYLVPHETESLMVKNIFKEYIAGAGTRTLAKKYKLSSSTILGILKNTKYCGYMGYNLKSDSPTYVKSPFIEPLISTEAFEEVQRIIKGRCNSESGRGRRIKVRNLTGKIKCECGANYHYKQRETEWCCGREGVEGRTKGCGSPQFNTKLIIPYLEKNMDNIEKNLQFNLNREIKDINVGSFDRLNQRKEELIRQQDKLLDLYLDEDKLKNISKEMLERRSKLIKEEIEEVEEKLVILNDMNSHLNNLRRIKVEYKNEIKNIRRLIEEKNLDEIEKLISKIQLETIVNIINFRKELKIKEIQFSCFNELYNTNFIFAPEPKKVWDK

SEQ ID NO: 14886 - protein, 570 aa, synthetic construct
MKTVAIYSRKSRFTGKGDSIENQIEMCKEHIKKFVSPNVEFLIYEDEGFSGGNTNRPAFQRLINDIKYGNINLLICYRLDRISRNVADFSSVLDVLQEYKVDFISIKEQFDTSSPMGRAMIYIASVFAQLERETIAERIKDNMLEMAKKGKWTGGKLPLGFTSKKIAYIDEEGKKRFKVTLEHDSKDLEFVKFLYEKYLELGSLHKLETYTHENNIRSASGKIFEKSTLKIILQNPIYVKADENVFNYFENKGWSVYGEPDGLHSLLSYNKTETAKKDGKLTKRNKDEAESLVAVSDVKGFIDSSLWLKVQYQFKKNKNTFPRLGKTHNALLVGKLFCGNCGTRMIIQHGRTSTKTGIKTFYYVCSLKKTSKKKLCSAHNVKTDFLENLVLDSLEKLYYKKDFINDSLKINLKENKDNIKEINTTKKLIELNKNKINSLIEKLSLDFDNILSDILIPQIKKIKIENDVLESNLEELKLKKQESEMNRIEIDLITSLLNKCKNIKELTRTEQKQIIDCLVDSIYYYSNDNGNDKIKIKFINDIDSINTLLSDEEKRQFEKLSFYSHSMSSI

SEQ ID NO: 14887 - protein, 502 aa, synthetic construct
MKKVAIYSRKSVLVEGSVSIETQINMCKDYINNKFHNAKFRVFEDEGFSGGNTNRPAFQKMLRMAQLNEIDIVVCYKVDRIARNTLDFLKILELFKENNVELISISEGFDPNTQMGKVMLTLLASFAEMERTNIQQRVKDNLLSIAKKGKWTGGSPPTGFKNGLNGGLEWNKQDMILDVFNMKYEKEKNSNIIKYIKEKYNHNFLGGTLATTLRKPIYVKSSPSVSLYLKTKGYIVQGDEDNIHSYLTYTDKETKYAIVSDIVGLIEPSIWISINNDMDKNISREGNRFSEKFWLTKTVRCKYCGQTFCGQTKTTKTKYYNKYGEEKIYISTYSYYSCRDAVRGKLKTCKNTKRVKQEILESKVSELIHLLKDKKTFNSSYFSNKIDNSSKIDTIKKQIKSIDKTINNLTDKIALLSNEASLIFISKLEELVKEKSILKDNLLQLELQELNSNTKKDSSLVYNNILAFNDDLSVDDKRKIAMSLFKEIIYDPETDSLDVTFM

SEQ ID NO: 14888 - protein, 502 aa, synthetic construct
MKKVAIYSRKSVLVEGSVSIETQINMCKDYINNKFPNAKFKVFEDEGFSGGNTNRPAFQKMLRLAQLNEIDIVVCYKVDRIARNTLDFLKILELFKENNVELISISEGFDPNTQMGKVMLTLLASFAEMERTNIQQRVKDNLLSVAKKGKWTGGSPPTGFKNGLNGGLEWDKKNMILDVFNMKYEKEKNSNIIKYIKEKYNHNFLGGTLATTLRKPIYVKSSPSVSLYLKTKGYIVQGDEDNVHSYLTYTDKETKYAIVSDIVGLIEPSIWISINKDMDKNISREGNRFSEKFWLTKTVRCKYCGQTFCGQTKTTKTKYYNKYGKEKIYISTYSYYSCRDAIRGKLKTCKNTKRVKQEILEFKVSELIHLLKDKKTFNSSYFSNKIDNSSKIDTIKKQIKSIDKTINNLTDKIALLSNEASLIFISKLEELVKEKSILKDNLLQLELQELNSNTKKDSSLVYNNILAFNDDLSVDDKRKIAMSLFKEIIYDPETDSLDVTFM

SEQ ID NO: 14889 - protein, 488 aa, synthetic construct
MKNIAIYIRKSVKGDDNSISLEAQTEVIKNYFKEKCNFTIYKDDGFSGGNTNRPAFQKLMIDAAANKFNAVACYKLDRIARNTLDFLTTFNTLKEYGIDLICVEDKYDPSTPAGRLMMTLLASLAEIERENIRQRVKDSMMKLAREGRWTGGTAPFGYKIININGAKYLELEDETNILYIFNEFINGKGINKLAKEFNCDKKTISRILHNITYLQSSIDASTYLNKVLDYEVVGTPNNCGYLPYGKHKNVNGKKVKNEGMKLATVSKHKAVIDLDTFIQAQNKLKTFEGNYAPRISSKSFLAQMVQCKCGTNMIIVLGHKRKDGSRSIYFSCPSKCGNKFANIDKIENDVFLTLKDINFFEKINNSNNNINKDYSKIKEPLLKEIEEKKKILDGLVSRLALVDASLTNILIDKMEALNLEINNLQEQLNELEKEEISSSYNKEDLILKEKNRQNFIKDFDKMNMKERQTAIKNVINKIIWTGDSIIIQ

SEQ ID NO: 14890 - protein, 516 aa, synthetic construct
MLEEGQKLKCALYVRTSTTEQKDSLELQARYKNNNFDIDKIYSEEVSGRDILKRPEQIKLLNDCGIEVTSVQKQAVFITNDKKPLYDCIIVSNTSRWGRNVVQVKQIVEALHKKGVKLWFDDLGKFSDSKDLSLTLDMLFVLDENYSQTISQKVKSAMDKRKKEGYILANSRLIGYDRTEEGTLIKNKDSNMVKSIFEDYAYKNLAIRKIAEKYEISTSTITTLLKNAKYAGFMVYGIKKHGWDFSKLEIVKSDKIEPIISEELFWKVQEVRRSRSRIVEGSRITRNKIGVNNNTHSLSSKILCTNCGKNFHYKDRGYWICGTHSKYPKKCPMPTVRENKILRHLKSPYGLKAIRNGLETRLEVELKKLQLESIEPIKNELAELKGKSSKLLDLYMDSLIDKTTFEKRNKLLKGDIEKLENELKIYSDKENYRIKLLELQKEAKSLLDEYEKILESSEPEKIFDRVSKIEVGKIMDIKKGKEVSYIKSVRFNDFKILEDHQLFNELTKKEEKNKSW

SEQ ID NO: 14891 - protein, 580 aa, synthetic construct
MKKVEIIKANRSLSDRNKNNMRSILRVAAYCRVSTDSDDQLNSYNSQVSYYTDLIRKNNEWDFVDIYADEGITGTQISKRTNFQRLINDCMNGEIDMVITKSISRFARNTLDTLKYVRMLKEKNIAVYFEDEKINTLTMDGELLLVVLSSVAQQEVENISANVKKGLKMKMSRGELVGFQGCLGYDYNVDDKSISINREEAEIVRYIFNRYIEGAGGRLIGNELEQLGYKTKRGSSTWHESTILGIIKNEKYKGDVLLGKTFTLDPISKRRLENYGEEDQFYLREHHEPIVSEEIFDKAQAIRLKRSIPRGSHEVEGFKRQKYSRKYAFSCMLECAFCGGTLTRRSWHSGTNHSKVVWQCVVSTKRGKKYCEHSKGIPEKVIEDAFVESYKKLCGNNKEVLEEFLMRLSNTLNESNVEKEFLEIEKQIDVLDKKRKKLIDMRLEEIIDKESYEEKYDDLTVEIKKLSKKKQTLKASLINENTIKARLKEFRKTLERNEVLEKFDRYVFESIVDKVIVGTTNEDGTVDPYKITFVYKTGFNDKQDGNKFRNNKSLKACSKDKNDNKKECSHAKDDTRRKCS

SEQ ID NO: 14892 - protein, 502 aa, synthetic construct
MKKVAIYSRKSVLVEGSVSIETQINMCKDYINNKFPNAKFKVFEDEGFSGGNTNRPAFQKMLRMAQLNEIDIVVCYKVDRIARNTLDFLKILELFKENNVELISISEGFDPNTQMGKVMLTLLASFAEMERSNIQQRVKDNLLSVAKKGKWTGGSPPTGFKNGLNGGLEWDKKDMILDTFNMKYEKETNSKILEYIYERYNHRFLDGTLATTLRKPIYVKSSASVSLYLKTKGYIIHGEEDNIHSYLTYTDNDKKYAIVSDIKGLIEPSIWISINKDMDKNICREGNRFSKRFWLTKTIRCKYCGKTFCGQTRTTKTKHYNKYGEEKVYISTHNYYACRNAVSGKFKTCNKIKRIRQEILEGKVSELIYLLKDKDFFNSSYFANKIDNSSKINNINKQIKSIDKTINNLTDKIALLSDEASLIFISKLEELVKEKSILKNNLLELELQELNSNTKKDTSLIYSQVLAFNDNLSVDDKRKIAMNLFKEIIYDYETDSLDVTFM

SEQ ID NO: 14893 - protein, 495 aa, synthetic construct
MKRIAIYSRKSVYVENSESIETQINMCKAYFTRQFKDCKFEIFEDEGFSGKNTDRPAFKRLMNLCKLKKFDAVAVYKIDRLARNIVDFMNIYDDLEKLEIKLISITEGFDPTTPIGRMMMVMLAGFADMERMNIAQRVKDNMISLAKKGCFTGGKINRGYCLEEKSDGKKYLKLENPEFIKFTFESFDKGFSLLEILRMQKDKFGSYALGSTMSVKRMLRSPVYVQSSSNVSDYLRNKGYEIVGNENKNGYLPYGVTVNEPCAIVSKHKAVIEPLLWLRVNSKLDKVRENAIKKDSKCYWLTGVLKCPICGENYVLANSRKKTYYTCSTRLKRGANRPNTCTNSKYVDATGIEAIVENTISKLFNKDTFNSSYSKNEIIYEDNTLELEKKIKTHERSIKSLVEKLTLIDNSAAKYLTDKIEELTKEISEIKIKIEENKLNKLENELNKSTPEIIYNNIINFVSSNSPQEKRRYLKLIFKSIYYNPETNNIEVDFI

SEQ ID NO: 14894 - protein, 552 aa, synthetic construct
MKVALYARYSSDNQRDASIEDQLRLCRLYAEKQGWTIADSYSDRAISGASLLRPGIQELIHDATRGRFTVVLAEAMDRLSRDQEDIAGLFKRMAFAGVKIVTLSEGDVTHLHVGLKGTMNALFLKDLADKTRRGLRGRVENGKSGGGLCFGYDVVRQFAASGEPIRGDRTINPAEANVVRRIFADYLAGKSSRTIARELNKEGVVGPQGNEWGPSTIHGNPKRGVGILNNELYVGRLVWNRLRYLKDPDTGKRVSRHNPESEWIIQDVPELRIIEQSVWDAVKAQQQKLAYEPSAPGQNALNERRRSKHLFAGLMKCGCCGGGYVLISKDLLGCATARNKGTCDNRMNIRRDVLEASVLNGLHTHLMEPSLFREFCEEFTREVNRLRIERSSSIVGQRKELTKVQRDLERAIQAVLDGVPGAQLKDTIGALESRKAELTEVLAHAEEPPVLLHPNMAEIYRQKISALHHRLQDEDGKAEAAAIFRTLVDQVTLQPEESELAIVLRGDLAAILTFAAGKKKPDLLKEARLLTSVITPGSVVAGTGFEPVTFRL

SEQ ID NO: 14895 - protein, 519 aa, synthetic construct
MKKITRIEQASKGKTEPKKLRVAAYCRVSTDSDEQLESLETQKAHYESYITSRDDWQFAGIYYDEGISGTGKSRRPELERLMQDCKAGKIDMVITKSISRFSRNTTDCLELVRKLLAQNIPIWFEKENINTGSMESELFLSILSSMAADESLSISLNSKWSIKKRFENGTFKISYPPYGYDWDGETMAINPEQAQIVRRIFSETLAGKGTAAIATELNREQIPTKRGGNWSPSVVRGMIANEKYCGDCLYQKTWSDSAYKRHLNHGEQTQYLQQNHHEPIVSREDWEAAQKLISQRADEKNISKGDEKYQNRYAFSGRIICGECGATFKRRINYTTDGSYAAWSCKTHLANKSKCSMLFIRDNDLKLAFGAMMNKLIFAHRLILKPYAESLKRSSTSQTLSRIQHLETGLAENADKRKTLTKLMAQGFIDQVIYSQQTAELLSQADDIRKQIDALKNTTSNEATVLVQAEDLLRFTEKSPMLEAFDDQLFTRFVERIVIRSRHEAVFHLKCGLTLTERM

SEQ ID NO: 14896 - protein, 522 aa, synthetic construct
MANVTIIPARRQVGNNVKQAEQPKLRIAAYCRVSTDSDEQETSYETQVSHYTEYIKSHSEWELAGIFADDGISGTNTKKRDEFNRMIDECMAGNIDMIITKSISRFARNTLDCLKYIRLLKDKNIAVWFEKESINTMDSKGEVLITIMASLAQQESQSLSQNVKLGLQYRYQQGKVQVNHNHFLGYTKDSDGHLVIDPEQAEVVKRIYREYLEGLSMKKIAEGLEQDGILTGAGKTKWYDSTINKILRNEKYMGDALLQKTVTTDFLTKKRVRNSGALPQYYVEDDHEAIIPKEIFMQVQAELVRRRKVHTGPNGQKRIYSGNNCFSQMVVCGECGELYRRVHWNNHGCKSIVWRCISRLEPSRAAMNCISRTVKEDLLQEVTVKAFNRILTDSDGFLRQMQENIAKAIMAADTMSPDGIQARLDELQKELIRKANSKQDYDAIADEIFTLRGQKSQAEADTRSREETRKRIAELQDFIGSQQSEITEFDESLVRKLIQQITVYDDHFTVRFKSGLEIDINE

SEQ ID NO: 14897 - protein, 521 aa, synthetic construct
MKKITKINELERPLLSKAKLRVAAYARVSTDSDEQLVSLKAQREHYETYIKSNSEWEFAGLYYDEGISGTKKEKRPELLLMIRDCENGKIDFIVTKSISRFARNTMDCLELVRSLMDIGVYIYFEKENLNTGDMESELMLSILSGFAEEESASISQNTSWSINKKFQNGSYIIGSPPYGYANVNGEMVIVPEEAEVIKRIFAECLSGKGGSIIAKGLNRDKIPTRRGKHWSPGTVIEMLRNEKYKGDVLFQKTYTDSNFNRHINNGEKDQFYCKNHHEPIISREVFSKAQKLIAERAKNRNKSIAKNTYQNRYVLSGRIICGECGSKFRRKTNYSAGRSYIAWSCIGHIEDKESCSMLFLRDGEIKATFTTMMNKLAFSHKLILEPLFKSISQIDEESDRERMDAIDKRMEQLTEERNTLIGLMTKGFLEPALFNKERNVLDIEVKNLTAEKTNLVMSFTNGTSQSDEVKALLDYVSVEKFDGNYTDEAFEKFVENIIVNSRDELIFKMKCGLSLKEKVVR

SEQ ID NO: 14898 - protein, 597 aa, synthetic construct
MPKITKIEPKIKALPQRKKVAAYARVSMETERLHHSLSAQVSYYSELIQKNPEWQYAGVYADEGITGTSTMKRPEFQRMLADCEAGKIDIILTKSISRFARNTVDLLETVRQLKELGIEVRFEKEHINSLSGDGEVMLTLLASFAQSETESISNNVKWGIRKRMQAGIPYANGHMNVYGYRWEGDEMVIVPEEAAIVRRIYQNFLDGKSRQETEKEFAAEGIKTRAGAPWVDSNLKVILTNVTYTGNMLYQKEYVTDPITKKVRKNHGELPQYYVENTHPAIISKETFDYVQAEMARRRELGCFGNKALNLNCFSTKIKCGLCGRSFVRSTRRNRAKMSRLGEKYTFWTCTSHKKTNCSSCSSGIIREDVLKEECAKVLSIPEFDEDIFSERVKQITVPETGTMIFEFTDGTTLEHHWYRNAKKEAWTEENRQRASQYRRRHPATRDDITCFTTKIRCEECGCNYRKQTCVMADGHRNAYWKCADKKNHPGKSLREDHLKEIITEVLGIDEFDENIFLERIDHISVRDLTHLTFHFKDGSTAERDYEFSKEGVPWTDERREKQTEAIRDSFTPERRQKISENMKRIRSEKHWSSKRK

SEQ ID NO: 14899 - protein, 527 aa, synthetic construct
MEQQKKVTTIPASRTRFSSTPITEKKKRRVAGYARVSTDHDDQFTSYEAQIDYYTNYIKGRDDWEFVNVYTDEGISGTGIKKRIGFQTMIEDALAGKIDLIVTKSVSRFARNTVDSLTTIRKLKENGVECYFEKENIWTFDGKGELLITIMSSLAQEESRSISENCTWGQRKRFADGKVTVPFHRFLGYDRGPHGELVVNPEEAETVKRIYRLFLQGLTYNGIARQLTNDGIKTPGGMDHWSISTVKSILGNEKYKGDALLQKSYTVDYLTKKTKMNEGEIPQYYVEGDHEAIIAPETFDLVQREMKKRGNGVMYHSGVHVFSSKIRCGQCGSFYGSKVWHSNSKYRKTIWRCNHKYDGGKKCTTPAIDDSEVKTAFLSAVNKLLETKSEVIANGKAMLPLLFKTDELEAERDRLMDEAQVVADAVQKNIEENARTALDQSAYQKRYDDLADRYDKLKARIDELSEKIEETQSRKAGYEDFLKAFENTSDSLTEFSLDAFNGLVDHLTVYAKDDIRFTFRNGQEIRA

SEQ ID NO: 14900 - protein, 520 aa, synthetic construct
MRKVKIIEPLANETSNIEKLNVAVYCRVSTDNTKQLDSLDAQIRHYESYIKSNNKWTLAGVYYDEGMTGTSKDKRTGLLNLIKDCKEGKVNLIITKSISRLARNTADCLELVRSFTELGVYLYFEKENINTQSMESELMLSILAGLAENESLSISENTKWSIRRRFQNGTYKVSDPPYGYDARNGKLVINEEEANIVRHIFSETLAGKGGQKIANELNKRNIKSKRNSKWTANTILGMLQNERYIGDALYQKTYMDSNYKRHTNYGERDMYYIRDNHSPIISREDFEATALVLEQRSKEKNITKEDSKYLNRYAFSGKINCKHCGANFRRRTHTSGRHPIAWCCFTHISNIKACPMKYIPDSSFKHAFITMFNKLVFGYEKILIPLYTSLQNFNNEDNLKLLEDIEIQLKENHQQRDVLVELLAKNYLDPAIYRESNNKLLQEAKKLQEEKNTLNRMITSSSEELKELNKLLLFLAKADMINNFEDKLFNDIVKDISVFSREEININLKCGLSLKERLVI

SEQ ID NO: 14901 - protein, 524 aa, synthetic construct
MVSDKKVTVIPARKTKERTKDNKNPKLRVAAYCRVSTENEEQASSYETQISHYTSYIKNRPNWKLAGIFADDGISGTNTKNREGFNKMIDDCMTGKIDMIITKSISRFARNTLDCLKYIRMLKDKNIAVFFEKENINSMDSKGEVMLTIMASLAQQESQSLSQNVKMGIQYRYQQGEVRVNCSRFLGYTKDKNKKLVIVLEEAEVVKRIYREYLEGNSMLKIKRRLEADGILNGAGNKIWHTSNISKILRNEKYIGDALLQKTYTVDFLTKKRVKNNGLIPQYYVENNHEPIIPKDIYMQVQEELAKRRSPYTSPSGNKRTYSSNHCFANIVICGTCKEIYRRVHWNNRGKKSIVWRCVSRLENTGQFCDARTVHEKDIEESIIKAINNILNKKDCYLPILKNNIASVLNNEKNKELDNIENKLNDLQQKLLSLVHSSSNYDEIAEEIHQLRDKKQDLLLKNARQEEVNKRIEEMTNFLNEQDTTLIEHDETLVRRIVEKVWIYEDKFTIEFKSGLAADVNEQG

SEQ ID NO: 14902 - protein, 521 aa, synthetic construct
MKKITKIDGNKGTSIIKPKLRVAAYCRVSTDSDEQLVSLEAQKSHYETYIKANPEWEYVGLYYDEGISGTKKENRSELLRMLSDCENKKIDLIITKSISRFARNTTDCLEMVRKLLDLGIYIYFEKENINTQSVESELMLSILSGLAESESISISENNKWAIQRRFQNGTFKISYPPYGYDNIDGQMVVNPEQAEIVKYIFAEVLSGKGTQKIADDLNQKGIPPKRGARWTATTIRGILKNEKYTGDAILQKTYTDSHFNRHTNYGEENMYLVENHHEAIISHEDFEAVDAILNQRAKEKGIEKRNSKYLNRYSFSGKIICSECGSTFKRRIHSSGPRKYIAWCCSKHISNITECSMQFIRDEDIKTAFVTMMNKLIFGQKFILRPLLQGLRNQNNAASFRRIEELETKIVNNMEQSQVLTGLMAKGYLEPALFNKEKNALEAERERFLAEKDQLTRSVNGNIAKVDEVDRLLKFATKSKMLTAYEDELFEDYVERIIVFSREEVGFELKCGITLRERLVN

SEQ ID NO: 14903 - protein, 522 aa, synthetic construct
MTTRNVTVIPARKRIGNSANAEELPKLRVAAYCRVSTDSEEQATSYEAQIEHYTNYIKSNPEWELAGIFADEGITGTNTKKREEFNRMIEECMQGKIDMIITKSISRFARNTLDCLKYIRQLKEKNIPVYFEKENINTLDSKGEILLTIMASLAQQESQSLSQNVKLGIQYRYQQGKIHINHNRFLGYTKDKDGNLVIVPEEAEIVKRIYREYLEGSSMLQIARGLEADGILTGAGNPRWHTSTINKILRNEKYIGDALLQKTYTVDFLSKKRVPNNGIVPQYYVENSHEPIIPREIFMQVQEQLVKRRCVHISKNGKKRNYSNNHPLSQMVFCGNCHEIFRRVHWNNRGKKSIVWRCVSRLENTGLFCTASTILEDTLKEKIIEAINVAVSGKNSFLAILKKNIETVLSVDLDETTADIDKRLEELQTELIQKANSKEAYDNIVNEIYRLRDLRQETLSRNALRQDMRDRIAEMTDFLNTQTSDIAEFDDKLVRKLVEKATVYDDRLVVEFKSGLEIEVNL

SEQ ID NO: 14904 - protein, 522 aa, synthetic construct
MRKVTRIDGNNALQAFKPKVRVAAYCRVSTDSDEQMASLEAQKDHYESYIKTNPDWEFAGIYYDEGISGTKKENRTGLLRLLADCENKKIDFIITKSVSRFARNTTDCIEMVRKLTDLGVFIYFEKENINTQRMEGELVLTILSSLAENESLSIAENSKWSIRRRFQNGTYKISYPPYGYDYVDGKLFINKEQAEIVKRIFSEALDGKGTQIIADGLNSDKIPTKRGSHWTATTIRGILSNEKYTGDVLLQKTYTDENFKRHYNHGEKDQYMIKDHHEAIISHEEFEAAQEILKQRGKEKGVIKGSSKYQKRYPFSGKIKCAECGSNFKRRIHGSGDRKYIAWCCTKHIKDASSCSMKFVREDAIHQAFVVMINKLIFGHKFILRPLLQSLKKTNYSDNITKIQEIETKIKENTERVQVIMGLMAKGYLEPALFNTQKNELLKEAVLLKEQKEAIKRAIDGGMTALVEVEKLLKFTMKAEKQIDKFDCEIFENFIEEIIVFSQEEIGFKMKCGLNLRERLVK

SEQ ID NO: 14905 - protein, 454 aa, synthetic construct
MYTALYLRVSTMEQADNNFSLAAQESKLRAYAEAKSLDNIKVFVDPGYSGSNMNRPALTQLLELVKRNQVSNILVYKLDRLSRSQKDTLNIIEDYLLPHDANLISLSESFDTSTSFGRAMIGILSVFAQLERENFKERSRMGMLQRAKEGKISGYGGKIFGYDYINGELIINDYEAMIVKKIYNYYIKGLGVTKIFMQLQKEHPGIIKSSHHIWQILRRRTYTGDFDYMDESYEGIHEAIIDKSIYDQVQVLRNSRNSKQKSDAVYMLTGLTYCKCCGYKMQGTVSASTYKDKHYKRRYYRCNTNKRNKVNNNPFRCATKSIKKDELEHVVISQIKALDIDLKIDDIQTNTIDTKAIDKRLNELEKQSEKLLNLYIEDSISKSILDKKIEEINIEIEALQNVETEDNQTKLQALEIAKEFNFDKATDYEVQNLIHLLVKRIDVDNSSVDIQFIF

SEQ ID NO: 14906 - protein, 416 aa, synthetic construct
MEICKLPPKPAQLRLTRVAAYVRVSRESERLTHSFSAQVSYYNKLITNTPGWEYAGVYSDYATTGTSISGRGEFNQMIEQALAGSIDIILTKSISRFARNTVDLLSTVRALKAAGVSVRFERENLDTANAEGEVLLTLLASFAQAESESISANAKWGIRKKYKDGLLHSRHPYGYRYHHGQLDIIEEEAVIVRRVFAEFLDGISPEKTCKQMNQEGLRSRGGGKFSASVTRDWLENPTYIGTAILQQYFSAHAGDNTPTLNRGELDKYIVEDSHPPIIERSVFDAVQAELARRRATGGRGLTPTGGSSALTHRITCTICGRNYHRRTRRLAHSTYKYWWCETATKGKGNPCHAHQLREENLHTIILRLLGLHAWDDQQVVDRIKRIEASPDWLLTIHLSSGNTTMIDYLTGEEVTA

SEQ ID NO: 14907 - protein, 521 aa, synthetic construct
MKKITNIDGNKGTSIIKPKLRVAAYCRVSTGSDEQLVSLQAQKSHYETYIKANPEWEYVGLYYDEGISGTKKENRTELLRMLSDCENKKIDLIITKSISRFARNTTDCLEMVRKLLDLGIYIYFEKENINTQSMESELMLSILSGLAESESISISENNKWAIQRRFQNGTFKISYPPYGYDNIDGQMVVNPEQAEIVKYIFAEVLSGKGTQKIADDLNQKGIPSKRGGRWTATTIRGILKNEKYTGDVILQKTYTDSRFNRHTNYGEKNMYLVENHHEAIISHEDFEAVEAILNQRAKEKGIEKRNSKYLNRYSFSGKIICSECGSTFKRRIHSSGRRKYIAWCCSKHISQITECSMQFIRDEDIKTAFVTMMNKLIFGHKFILRPLLNGLRSQNNAESFRRIEELETKIKNNMEQSQMLTGLMAKGYLEPALFNKEKNLLEAERESLFVEKEQLTNSVNGNFTKVEEVDRLLKFTTKSKMLTAYEDELFEDYVERIIVFSREEVGFELKCGITLRERLVN

SEQ ID NO: 14908 - protein, 523 aa, synthetic construct
MAVSRNVTVIPAIKRVGNNKNSESKPKIRVAAYCRVSTDSEEQASSYEIQIEHYTNYIKKNKEWELAGIFADDGITGTNTKKRDEFNRMIEECMAGNIDMIITKSISRFARNTLDCLKYIRQLKDKNIAVFFEKENINTMDSKGEVLLTIMASLAQQESQSLSQNVKLGIQYRYQQGEVQVNHKRFLGYTKDENKQLVIDPEGAEVVKRIYREYLEGASLLQIARGLEADSILTAAGKAKWRPETLKKILQNEKYIGDALLQKTYTVDFLSKKRVKNNGIVPQYYVENSHEPIIPRDLFMQAQEEMVRRANLRSGKGGKKRVYSSKYALSSIVYCGYCGDIYRRVHWNNRGYKSIVWRCVSRLEEKGSECTGPTINEETLQTAVVKAINELLVNKEPFLSTLQKNIAAILNEGNDNATDDIDSKLEELQQQLLIQAKSKNDYEDVADKIYRLRELKQNALVESAEREGKRQRIAEMTDFLNEQSCELEEYDEQLVRWLIEKVTIHANRVEVEFKSGISIDVKN

SEQ ID NO: 14909 - protein, 603 aa, synthetic construct
MTTANRSLQSSELGTNRPGSLDSTANSIAGLEHLAVNTAKATSQTTHGTAVLYLRVSTTRQLNTGADVDEDGNSIATQREWAGDAARELGAAVVEEFVDPGHSAQSIEKRPEFKRMMRYIDEHPDVKYVVIYMRSRVFRNHLDAAVTKIRLREKGITLVSAKEKFGDGYMGDAMEAITDIMNEVQVRQSGEDIKVKMAHKVQRGGSVGRAKLGYLNVRKEFDGRLVNTIDLDPDRYPILQWAFEQYATDQYSIWQLCSLLEDQGLTTRPSAKRPSRPLSPSALAKILRDPYYAGTIRFKGALYAGRHQAIIDKTTFLDVQQILDRRNRKGNRDITHFHYLKGMLACGQCLAEGRNSRLVYSQNVGNGGTYEYYLCAAKQRGNCTVGTMRMDDIEAAVARAVTAERFHSEAADTIRQEVSRAMEGLQASDRELKDGLRKQLASLESQEDRLIDLAAEGTVPSSKLRGRLNEVTLQKASIKERLAKTETHLRSGAERVLAYVDLLENPGDLYESLAGNTRRDLLAAFFNRLIVHVEEDGVHIRPVRTDVNEALHDWQANATSTNEKAPRVSAEGSSFSTIQRDNLSNGLSNSQLVGMTGFEPATP

SEQ ID NO: 14910 - protein, 515 aa, synthetic construct
MASAERPARARAIGYARLSRASNDDSTSIARQREHIEKLAAARNFELIDIAEDIDVSATKTRLERTGLNRVRAALKSGAADYVLVWRIDRLARSVVDMGTLLDEGVRFISQSEPDFDTSTATGKAVIQVLQVFAELEAQTTGVRTRDMHRYLREQGRWTGGPRPFGYDVVDHPSGQGKALAIRADEAAVVRRMVDAILDGRTAYRVMHDLNDEGIPTSTGGRWSPRAVTKILTGDHILGRAPASRLINGTRVRDVVRDERGIPVTRWEPIVSIDDAERVRAILTPTHTPGRAEATRRARADRRIEMLTDLLPCASCGRPMVYKVRTSTGDPVYQCLVKSRGGDCAKATVVRADLAEAEVTRQFLAIAGHLRVTRAVVTAHDAAELTVVREALRSALSRVETEPDTDLAVLLERVAKLRQEADRLASMPQEAQVQLIESEDTFADVWDRYTPQERQAALAGSPFVIELDAAARRGHWDPSRIRLIPRETAAQGATERGEGESRGPGHGTVRPPRSK

SEQ ID NO: 14911 - protein, 517 aa, synthetic construct
MEKVCMYLRKSRADIEAEARGEGETLMKHKKALLKVAKLQELNIVKIREEIVSGESLFHRPQMQELLREVTDGLYDAVLVMDMDRLGRGDMEEQGLIQKVFQQSKTKIITPRKVYDLTDEWDEEYSEFEMFMARKELKIINRRLQGGRVRSVEEGNYIGTRPPYGYEIHKSETGRTLVPHPEQKDIVRMIFDWYTSPDKQLGSNKIANRLNDMGIKTYTGIKWTSPSVLTILKNAVYKGTIEWKKKESKKSKEPGKVRTVKMRPQEEVISVKGKHEPLVSEEVFKRAQEVLGAKYHVPYQLENGITNPLAGLIRCGKCGSSMVLRPYTNQKPHLMCYNKFCDNKSSRFEYVEEKFIEAVRIWLEQYKVVWATRKKKDTGNAEIRLKELAINSLEKEHSELETQKSRLHDFLERGIYDVDTYLERSKNLADRMDEIKVSLEKTKKELHSEKQTVKSQKEINPSVVENALKLYHRTEDPAKRNTLMKSIVQIATYTKEKTQRNDQFSLEISPRIRGNQG

SEQ ID NO: 14912 - protein, 487 aa, synthetic construct
MVVRASKGIEAPVRQKVALYIRVSSEEQAVSGFGLDVQRERLTAFAKSQGWDDVELYMDDGYTGTNTNRPALKRLIRHVEAGKIHTVVVYKLDRLGRKQKDVLELLEDVFEKNGVAFKSATEPFDTSTPLGKAMLGILAVFGQLERDMIIERTTSGRRERVNQGMWHGGRIPFGYHWNKEAKELEIKPDEAAIIREIYKRFLQGQSRLAIAEWAQSRTTARKMTHTDIRDILVRPLYAGKLLNAGLIVEGNHDAIIDEDTWNMVQAENVRRKEGATPVGEYLLTGLLQCGICGGPVVHVKRRTKRNGKDYLYELYACQKQHIRTKDRAASCKNKYHNRAKVEAFVIEDIRNLSLLDPKRLDAILEQQTNTQDSTDTRNALQHRLETIETGIENLYDAIQSGAVKASALGNRITRLEEERESVQLQLDDLDDAPEIKNTAAARKMLQDLHKMWDFLTEEEQKQLIRKVVTRVVLHSDSSPEIVLNLAK

SEQ ID NO: 14913 - protein, 451 aa, synthetic construct
MKRAALYIRVSSDQQAKFGDSLREQQDTLNEYVKSQKDIIIHSVYVDDGISGQKLERDEFTRLLNDVRNDQIDLILFTKLDRWFRSLKHYLNTQDTLEKHEVNWLAVSQPYYDTTTAYGKTFINQVMSFAELEAQMTSERMISVFNNKVKMGEVISGTTPLGYSIENKKLVPNDQAPIVKKIFEFYDEHANLNKTSKYLLEEFGIQRNTQTIRELLKNTKYIGVFRDNENYNEPIVSKALFESVNRQIKMNKKSNTKHEYIFSGLLVCEECGRKMNSGRKAYYSAKRKDGTRTRYPHVSIYNCRYAYEVPKCSNTKVLKEHILEEHLLSEIPILLKQKVNSINQKKNNDNEKQKRQQALENKIERLKAAYLNEIIGLDEYKEDRASLVSQLEKIEKIEVPTIETSIYAKFADINLNEHYETLSVSERKQFWRSLVKEITFNKDRQIKIDLI

SEQ ID NO: 14914 - protein, 546 aa, synthetic construct
MKTANRPLTSINSSELSNNLTDITVLYARLSADDGSLGDSNSIINQKNMLETFAQDNGMKNLVFFVDDGISGTTFKRPAFEQAIELVNKGRVKNFIVKDLSRFGRDYLKVGMFTEMMFPEKDIRFIAINDNVDSNNEDDNTLAPFRNMFNEWYARDCSKKIKAVKHAKGNAGEKMCANPPYGYFKDPENKKKWIVDDMAAKIVKRIFSDYKKGFSLTQIAKQLKQEQILTPSCYKNSLGIKARKIRHADPCFWNVDIVGKILARQEYCGHTVNFKTYKKSYKTKKLLFNPEEKRKVFYDTHEAIIDQETFDLVQTMRKAGRRRRTKHNKVGLFSGIAHCVDCGSRHLFSAGQGYYACAGSKSRLIDCNNAHGISEKTLSKVVLDDFNHISQFVANHEKKFVENMQKQFELSNAKAMRQDKQVLEKAKVRFSELDNIIQKLYEDNLNGKISDDRFMKLSDNYEKEQTELKLFIEKANQRLDEQTKQSKDISQFVGIVKKYFEPKELTPEMMRELIGKIELGQPEKIDGVRHQTVKIRYRFVDELTIN

SEQ ID NO: 14915 - protein, 451 aa, synthetic construct
MKRAALYIRVSTDQQKLGDSLREQAETLHEFVKYQKDMIVYSEYIDDGISGQKLQRDEFTRLISDVKSGKIDIILFTKLDRWFRNLRHYLNTQETLEKYNVSWNAVSQQYYDTSTAYGRTFIAQVMSFAELEAQIDSERIKAVMDNKIKNGEVVSGKVPFGYSIENKKLVINEKAPLIVDIFNYYNDSGSLRKTVHYMENELNLSRDYQSVKNMLTNKKYMGVHRGNENFCPPIIDKELFNSVQLKLSKNIKNNSKHTYIFTGLIRCGECSRAFSGQVLRTNYIKKDGNKSVYTRKCYRCPKHRNSSKACSNKRVVYEHTTENYLLENIQNEVERYLVDYSKTEKKINKTVDIEKKINQKLERLKKAYLNEIIELDEYKIDREKLMAELKEATKEPTPSPKDNVIMLKKIMSDNFSNIYSNMNEEDRRAIWRSFIKDILVFPDGKIEIKFL

SEQ ID NO: 14916 - protein, 576 aa, synthetic construct
MTTAQIPATFKRTKLAPYVGYIRVSTWKEEKISPEIQRAAILEWAKRNGSEITEWIEDLDTTGRNFKRKIMRAIEIVEKGKEKGIAVWRYSRFGRDRAGNAINLARVESIGGQLVSATEPVDATTAIGRFQRGMILEFAAFESDRIGEAWAETHQHRRAQGLPATGRPRFGYIWHRRWDARTEKLQDEKYEPHPEVGPIVAELYRMYTHPTKPKGFATLCGWLNNNGHRTTRGTLWTTQTLTRYMDGGFPAGLLRIHDDDCKCNGRRTNGSCPNYFLAQGAHEELIDYDLWQKYRARRTEVQNTPPRARNAIYELTGVVRHDACRGGTSMTTNRWRNAAGEVINLNGHAYRCSQRAASGGAKCEGIWIRRVPVEKEVEKWLMREAAPGVDNAPPTEKDEPKVDERALAKLARAKLTAEYETAEAALTRLIMDQAEHPEKYPAGAFERARDTYVQRQERIKRELEKQADVAEAPRRSDFDRLVVSIAAEWKTFNTSERNAMIKQLVRRVVLSRKKDENGEPIPGGEGVAVTVHPLWEPDPWERARICRGPFGTATAGLWLSAELWTRPDTWEQIPPR

SEQ ID NO: 14917 - protein, 604 aa, synthetic construct
MVVSTLVKGEPGSSPLSTESMNTASQQSSPLAGTVYTETLRGVRCVRLSVLTDETTSPERQREADDTAAAALNIDFGDGDQLREAVDLDVSASTFSPFDRPQLGGWLARPDEFDALVWWRFDRAIRSMAHMHELAKWARDHRKMLVFAEGIGGGRLVFDFRNPMDPMGELMMLMLAFAAQVEAQSIKDRVTGAMAAIRKMPLRWRGSRPPYGYMPAPMPKEHGGIGWTLVPDPDAVKVIERIVRELLEDKTISAIAAGLNADKIPTPRDHWAIKKGRATGGKTGGVKGLVKDAFKWNPAVITRLLRNETLLGWKMHKGRPVRDAQGNPIMSTENPIMTREEFDRIGAVLDSRSIDNKERTDTDALLLRVIHCDSCGGRMYLNRQESKKNQAPVYKCNFHARGEHCEAPAHVRGDWVDEYVTTEFLRLVGTIQTTRVVEIPGYDPEPELLATVAEFREHQEQKGRQKSKHAARAWQERADALDARIADLETREKREPQRVVTPTGKTFADEWAEKDTAGRRAMLIEAGVHLNVRRGTRGGWRKLDTRRLDFTMSGELDPAVEALAGEASALESEARGDSPAPGSTIRMTDPAPASTEPAGELVAA

SEQ ID NO: 14918 - protein, 579 aa, synthetic construct
MTTTPLRLRPLEEQPASASRRKRGLIYVRVSKARDDMISPELQVGHALALARSENIDVIADPIMDLGESGRQFEERRIEEIKQMARDGQFDVLILWIWSRFGRNLRESLQHLDALMDYGVEVRAAKEDFDGKTTIGRFAIAQMLNIAELESNQKADSWRDTFERRRNKGLPHSNRGRFGYYRCETCPKWEFGKKLETCPKCRNGILKVDPVTGPVLAQLYRDYAAGISVRKLVADLNRRGIRTFTGKPFTSGDLHAILDSGFGLGYVRYLIPELSHQVVTNDDGSTRRKRVNRQRDVTAFLYYGGAHDAVIDDPSKCERIWDAYAKRRMAQSGQSFFSNRPRYSLSRHLRCSGCGGRMQTALRNKKYRRPLVDGLPNPLDVTFRCANHIDAKSCPANGTYVSLAVAEKWFLEWLDRQAQMSEREAEALAARTAALRTQNDGDQALLRRLEDVQSQLQGLRTKDDKLTDAVLAELVSADSARRKRTELDTQRQALIREQTELRTKLKEVPVQQPRPPQGDLLTARKIYLAAGQADRRELVSKLVREIRVNKGRSGPEKLHVYPLWEAPPPWVPREPSSDS

SEQ ID NO: 14919 - protein, 490 aa, synthetic construct
MTKRRPRASLYARLSVAADAENVSLDGMVADMRALAEREGLEVLEPVHVDDGKSGGFRDRDEFTTWLDDARSARADVLVAYHTDRLTREGLNVAASILDVVEGKNPETGRPAHRPVRLLDCFGIDSAHGDAFRFKFVIQAEVGRSERERIRQRSRDRARRLSRAGRWGGGAVPFGYRAVDNPEGPGKVLTVEPAEAAAIRDAADAVLSGDPLNRVARRMNHEGIKPRRAAAWSRVTLTKVLTSEHVLGRVSEGGRPLRDADGEILTPWPPILTVAQVAALRAELAPNPSAPYSGGRQPTRLLSGLLSCHACGSTLQVARRKSRTANPEPVIMYRCTTRSQGGVCEAPVATTAAPIEDHVSARYLAAAGPMPMYRERTIVSGAEELATVEAELRDILADMATAATPENFARLQALQVRREELAEQAPERRTEMVPTGRTMAEHWQRSMVDDRRALLADAFAVMILRPGKRGPKGFDAERLVMHWADTVDSE

SEQ ID NO: 14920 - protein, 510 aa, synthetic construct
MSDDRENWPFVDLLLRKSKRVRDGELTLSIRAQEDRGRAWADANRYRVRKVWKENLSAWSDVERPKYDAAMDAVLNAEVPALWCYALDRFSRKGAEAVVPILGKARVVFDYEGLDSMNERDRKWIIDKAEQARDYSNRLSYNVSSTKAKQRNEGRWLSRAPFGLKVNKKTGKLSPDKKKSKKRSYSYWDIVLRIFAEISEGKSARALARDFNSEGIKTAWGNAWRAESIRYIVINPVYEGWLTVSIKGRPTAYRNEEGKRVKVAAKKSEMIPKALAEKARRVLSGHQILDNTPREGRSKHLLAERVGCLSCKYAMTLNGVSYVCSGPDCGLPATVMRSLLEKYVLKLWFARLDNAEPDDPILAVVAQRWHALTRPKEAKGMREATAALREAKSALDKFHADDRAGFYEGRSAKYRIPAKVKAEERLTAAEKRVEKLSGGAVDITFLMWGHAAKAWEKADDALKRELLGLAIDRVYVAKAAKKGVRFDGDSRVVIEWAQLEEEDEEPMLAV

SEQ ID NO: 14921 - protein, 559 aa, synthetic construct
MHRDDYPALRSLGFEDDELKELGLWLPAVGSPAELAEMYVRRSKKKDSLSALREQVRRMCAHAAKEGKQIRHVWFEQKSASKSYVRREEFEKATAAVTEVGLSKALYVYKTSRLSRRGMGQVGLLLDTFEEQGAYIFVVSEGLDSRSSRTVLAFLSEQARDQVKDLGDFVKLGMDSHKADGKWTGGVTPYGLRAVKGEGRLEHDPKEYPTARRIAEYLLDRKTPAWIAETLNKEGLKTRHGRNWQATGIIALAHAVTWAGLVAQRERMLDKNGQWTGKYHRGGTPLLDKNGEPISCGKGVITFAEHVKIKAILASRAQKNGPVGNRARGKREISNLLSGIMHCGRCTAKEVSSGPAYRCYTRTNEGAHVCEGVSIGRDRADDAVTQAWFGHILSLSPESATLHEIAREWLAYKDPDKESRKAQVTAALESAVSREMKLNKEFFVLGRMTEEMFDSMRVQVGEQIESLKVELAELTREADLSPLMDPEALVALWNGAGIAGQRALLRAALTTKGITLLPSAGRGHRVPAIDRLEFHWREASDPAWDTAFEAGVRLVQATR

SEQ ID NO: 14922 - protein, 480 aa, synthetic construct
MLRNRASLYVRLSKAAGETNASLEGMIKELRELCAKEGLREVALHVDDGLSGGFRDRPEFQKWINDARQEYADVLMTPHVDRLTREGLNVAASLLDVVEGKDSASGRIVHHPVRLLDAKGIDSSHGDSFRFRFVLQAEVARSERERMRDRTRLSVRRLRRAKRWPGGSPPYGYKVIPNPDGPGQALGLHLEEAATIREAARAVLAGDALTLVCRRLNHHKLRPRRAAEWSRVSLRRVLTGDAVLGRITVNGALLRDDNGEIEEAYPAVLTVDQSVALREALAPDPTRPKSSGRHPARVLSGLLYCHGCPSKMVVARHSGNPVYRCQTRSQGRVCEAPVSVSARLIEDYVTGVYLNAAGSLPYLREEVHVSNASELALVESDIAEAVRLLASEATAEGFARLQQLQARKAELADQRPERLVTFVDTGMKTRDVFEAALVDDQRAMLDAAFEEIVIGPGRRGPKRLSPERVTIRWAADEPDV

SEQ ID NO: 14923 - protein, 496 aa, synthetic construct
MTQEIDLYLRKSAITRQRERALTFRAQEERGRRWADQNGYTVRKVWADNLSAYTDTVRPKFDKAIGALLADEVPALWCYAADRFSRKGAGAVIPLLDEGKRIVFDYERLDSADPRDRRDIINRAEEAREYSSLLSHRVRDTKTQQREEGAWLGAAPYGFEIADTETRKLRHGKTWPILIRIFEATAAGKSARTIAQEFNDEEIPSPDGIHWGGSTIHRMIQGPVYEGWQAVALKKGGRSVPYRNKKGERVSVLADGVKPVPADLVKRARLAVAGHIPVAPEYQRGKVKHLLSGLLRCASCGGGTAIHGRSYRCYNYTVGKPCSEPASAMRSLIEAYVFAEWMSAILRSDLDDADPLMIAVAERWTALTKPEETEEHRQALAAVKAAEKALERLAEDRKAGIYDGAMGRFYPRLVAEAEVDLVAAENRAAEFGGAVDLTLFDDMDMLNARWEAADDAMRRDLIRLGIDKVTVTRGLRGKPFIGDERCVITWATPAEG

SEQ ID NO: 14924 - protein, 500 aa, synthetic construct
MLDDLPLAGYLRISDADLAEIRRAVRSGVLTPEEAAEEERRGVLRQREDVLELADGRPVLWYEDNNLSAFKRNVKRPDFERMVRDLGRPLRKRPAMLGGMLAYDIDRVYRQPRDLERVIDIYEDSKHHLVFKTLSGLNFDLTTADGRFSARMMVNIANKSSEDTKRRVIRGNLADAKKGKSHAMGLVFGWQDDDSSKLNPETASVRRAAVGKYLAGDRVATIMKWLANEKNVINPATGKHFTWGGTKAMILAPRNWGIRTYNEEIIYDDQNEIVMGNWEPIFPTLDTWFQVQALKGRDAKLTTSEASVSYLLTAIARCGRCGAGLKGKPKWKKGARTPDYQYNCNKQRPEQCGALGIDGKKLDDLVRDLVWALVLRASKQKQVAVTAEPWQGASELAELEADIKELQELWAAKKIRAASFVTTLDDLTARRNDLLTSKALHSVPAGTRAITEELLTHGWAGLSIERQRTIVRKVLKAVVIHPAASRGGRFDPSRAEPVFC

SEQ ID NO: 14925 - protein, 530 aa, synthetic construct
MLRAVTEAGAGDEPVPAIGYIRVSTWKEEKISPELQKKTIKEWARRRNRVIVRWIEDLDKTGRNFKRKIMEAIVAVENDQAREIAVWKYSRFGRSRHGVAINLARVERIGGQLESATEEVDATTAAGRFHRGMLFEVAAFESDRAGEQWKETHDWRREHGLPAAGKRRAGYTWYRRIDPEGKPQEERYEPNDAGPAYGGLFLRYVNGEGYMPLAAWLNRNGYLNTRGKPWTHEALRWYMDSGFAAGLLHVHRPDTCQGLEEPCKTRAHYIHIPGAHKPLIGLPQDGEEKSEEQQAEDAQAIWDAYLLARERTKNTPPRARQPKYPLAGMTWCGRCKTGRAGVFNAGATANKYRCKTYAKDRSCKGVYVRRSYAEEKVYDWLVKLANEVDENRVPLPELNHAKEDRAKQKAQKEAELLKVQAGIDNANTMHALGDLDRAEFLRTKETLKNQRAKIEQDLLKLEDEDVKADGSTPYLPAVRNLVEEWDSLPVPVVRGILATLIKRVELFPGPYIEIEPMWTTERWSSLELAV

SEQ ID NO: 14926 - protein, 541 aa, synthetic construct
MTQQHIPATFRGSTDDEDGEPWLAYIRVSTWKEEKISPELQREAITQWARRTGRRIIGWIEDLDVSGRHFKRKIMKCIERVEAGEARGVAVWRYSRFGRDRTGNAINLARLQQAGGELESATEPVDASTAIGRFQRGMILEFSAYESDRAGEQWRETHDHRRYKLRLPAQGRKRYGYIWHRRFDPATGTLQEEKYDPDPETGPVVAELYRSYVAGFGFSKLCGQLNADGHRTTQGHLWHTETLTRYMDSGFAAGLLTVHNPECRCRKTDGTCKNHVFIQGAQEELIEFDLWEAYRQRRKEVAATAPRARVGIYELTSLPKCSGCRGGTSMNTGRRNGINVPGFAIRCSNRAKAGPLACDGILVERAFVEGEVRQWLTDKAAEGIDAAPQAHTATAEKAANEEAARRTTARARAQAEVDKQRQALARLRAENAANPDDFGPGEYEEAADVIRKKRAEAQQLLDSIPEEAEPLPDRAEFVPLIDSTVEEWESLNTRERNLILRKLIRRVAITRLGPGTANHRVEVHPIWEPDPWPDPKKATER

SEQ ID NO: 14927 - protein, 523 aa, synthetic construct
MTPERAILLLRISYRKPDGEAGETEGTPHLTAVPAERRQTLSKGIGRQEEDGRALAARLGWTITKVIVEDDTSAFKRRKVQLPDGSTGLRTVRPGFREAIDLLASGTNDGLIADDLDRVARDPRDLEDLIDVVESRTPNIPVTSVTGSLRLDSDAGIAMARVMVTIANKSSRDTARRVARKHLELAAEGKPGGGGFRPYGFTAKDRTLIQAEADVVKEIAARILGDWDGWTTEQHAKIDPNVGETLTSIAKDLNRRSIPTATGVPWSDRSVRSVVSKASVAGLREHRGEVVGKAVWSAILEPARWEQVVARLAGRNRVVDLTLQRWLTGALRCPFCRFMLVGAQGNRGPQSVRYWCATPEGGCGKIAIKASLAEGEVERQILELLAQPDVLASLRTLADTEVTETARASLAEDEDQLRQMARMWARREITFIEYTEARRIVEARVKESRALLVSRAPRVLRTLLAGNVAEGWKRLSPADKREVVLALVPGYDVMPHDPTMGNRFDPGRLVPFPEEPAEGDASG

SEQ ID NO: 14928 - protein, 540 aa, synthetic construct
MPKAISYIRFSTKIQSVGDSTKRQSKYINDWLKRNPDYYLDESLRFQDLGISGFSGANAKSGAFGEFLAAVESGYIEAGSVLLVESLDRVSRQDIDTAGEQLRKILRSGVEVVTLVDNEWYTKESLKDSLSMIKAMLVMERAHEESAMKSTRLRSVWAAKRERAAKGEIMSKRCAAWLKVSEDRSHFEFIPENVKAVQRVFQLRLEGLSHVKIAKQMNDEGFSTLNQFKSVTGGWSQSSVTELLSNRSVIGFKVPSKSMAVKGVSEIPNYYPSIITDEQFYAVQQLKQGSGRKPSSDLPLLTNLFKGVLRCSECGFIVVVAGVSAKRSGIYKCSMKSEGRCNSVGFSRLQTDRALVQGLLYNTNRLSLNRDNGSAIGSLQSELEHLQKQRERLIKLAMLADDTESMAKDLKALNSQIKDAEKAVSEVHQREQSSQLETISHLDLTVKKDRIEAQIIIKRIVKEIRLNTARKKCDVFLHNGLRLLNFPLDRVVDGAQWLEVLPLIDGDEFDFEGFITKPRHVALEEAPEWVKEMEEQSNQP

SEQ ID NO: 14929 - protein, 649 aa, synthetic construct
MLRPICYERVSSIQQIEGGGGLDDQRSVLEAYLDRNAALFNNDRVFIRDMGVSAFRNSNISPESQLGIFLQDVQNRKYGEGDALIVMSLDRISRRSSWAEDTIRFIVNSGVEVHDISASTVLRKDDPHSKLIMELIQMRSHNESLMKSVRAKAAWDRKIKEAIKEGKVISNRMPVWLVNEGGKYAINEEKVELIRSCFKMYAAGMSTGEIVKHYKQKGVLLQMVTVSNWVRDRRLLGEHKRYNDEVYRGVYPVVIDDELFLTANRMMDRVGLEKKKPREDLLLDHEVVKKIFRLFEDGVGTGSIVKQLEAGWSTVNVLRVLRDKKVVKMKIIDNLTFERVNQKLSLNGVANRIRKDLSIAQDDYITNLFPKILKCGCCGGNIAIHYNHVRTKYVICRTREEKKACDAKSIQYIRIEKNILETVKNVDFEQLMKKEETNSSPVDILREELSSLREEEKAFITRIEERKKKGLLTGIMLSDGLTEVQDRILQVEDELIELQDIREIPKLDFNIDEVLDPMNVELRARIRKELRLVLKAIRYRVIANAIFVHLDYFNDYLTHILVINNKRGGGEMLTEFIIEQRNDVRIYKSDSFSLTYTEGDKLPAFSTLDSKPINFIEYILLRDYIRELEGEESVTAIWMDRNENFLFQS

SEQ ID NO: 14930 - protein, 520 aa, synthetic construct
MKKITKIEGNLANSFIKPKTRVVAYCRVSTDSNEQLVSLQAQKAHYETYIKANPEWEYAGLYYDEGISGTKKENRSDLLRMLSDCETGRIDLIITKSISRFARNTTDCLEMVRKLIGLGVHIYFEKENINTGSMESELMLSILSGLAESESISISENTKWAIQRRFQNGTFKISYPPYGYQNNDGQMIVNPKQAEVVKYIFAEVLSGKGTQKVANDLNQKGIPSKRGGRWTATTIRGILTNEKYTGDVILQKTYTDSHFNRHTNYGEKDMYLVENHHEAIISHEDFEAVDAVLNQRAKEKSIEKRNSKYLNRYSFSSKIICSECGSTFKRRIHSSGRKYIAWCCSKHISNITECSMQFIRDEDIKTAFVTMMNKLIFGQKFILRPLLNGLRNQNNAASFRRIEELETKIENNMEQSQMLTGLMAKGYLEPALFNKEKNSLEAERERLLAEKDQLTRSVNGNFAKVDEVDHLLKFATKSKMLTSYGDELFEEYVEKIIVLSREEVGFELKCGITLKERLVN

SEQ ID NO: 14931 - protein, 523 aa, synthetic construct
MAVSRNVTVIPAIKRIGNNKNSESKPKIRVAAYCRVSTDSDEQASSYEIQIEHYTNYIKRNKEWELAGIFADDGITGTNTKKRDEFNRMIEECMAGNIDMVITKSISRFARNTLDCLKYIRQLKDKNIAVFFEKENINTMDSKGEVLLTIMASLAQQESQSLSQNVKLGIQYRYQQGEVQVNHKRFLGYTKDENKQLVIDPEGAKVVKRIYREYLEGASLLQIARGLEADGILTAAGKAKWRPETLKKILQNEKYIGDALLQKTYTVDFLSKKRVKNNGIVPQYYVENSHEPIIPREFFMQVQEEMVRRANLRGGKGGKKRVYSSKYALSSIVYCGQCGDIYRRVHWNNRGYKSIVWRCVSRLEEKGSECTAPTINEETLQTAVVKAINELLANKEPFIQALQKNIATVFNEEKDNITDDIDSKLEELQQQLLVQAKSKNDYEDVADEIYRLQELKQKALVENAEREGKRQRIAEMTDFLNEQSCELEEYDEQLVRRLIEKVTVFDDKLTVEFKSDVEIDIEI

SEQ ID NO: 14932 - protein, 499 aa, synthetic construct
MALDATLTLKDEGLSAYHQRHVKQGALGVFLRAIEDGRIASGSVLVVEGLDRLSRAEPIQAQAQLAQIINAGITVVTASDGREYNRASLKAQPMDLVYSLLVMIRAHEESDTKSKRVKAAIRRQCEGWVSGSFRGLIRNGKDPQWVRLANDGWELIPERVAAVKRALELYRQGLGAGRAATVMHEEGYQLTAGGISGLQIYRTIKLPALRGVKRLSLEGEDYELEEYYPRILSDEEWSDLQHLAGQRLRRRGAGEIPGIITGVGLAYCGYCGTALVAQNIMKRRRSDGSIADGNRRLQCTSYSKNGGCSAGGSCSVVPIERALLSFCSDQLNLQRLLQVGDDGKGVRQKLLVSRATLEKITTQLGKITDALLADESGASPISFIRKARELEGQQGVAEQDVKRLEFELAAMSCVAQPAQADRWEELAAQVFADDYEAREKVRQLIMDTFERIVVYMRGMSAQDRKGQAIDVQLLSRTGQHRLIQINRRTGEWVASEDWG

SEQ ID NO: 14933 - protein, 403 aa, synthetic construct
MKTVTKIQQRVSPFQSKKKVAAYIRVSHSNLEHSFSNQVSYYNDFIQNKREWEFVGVYADFAISGKSQKERPEFRRLISDCRNGKINCILTKSISRFGRNTLELLETVRELRRLEIEVVFEKENIRTLSVDGELLLTLLASFAQEESTSLSQNIKWRVKERFKQGLPYIPQAIYGYRWNGEKYIIKPHEAEIVRKVFTWYLDGLGVPSIAKKLNDMGETTRLGNIFTKSILYEFFKQEAYFGRLVLQKTYRNDFNRSPKRNTGQRTKYIVDNAHEAIISKELFDKAQAEKKIRSKGRCYRKCYDDAFFKDKVFCQQCGRDMLITKEKKFGYRYNCRTRQQYGISTCPSKTLSERRLVRTVKEQLGDYLGSIQKVMFDSSSNQVTLYFDDDNIQILTLKRGQLK

SEQ ID NO: 14934 - protein, 521 aa, synthetic construct
MKKVITIEPARPVHQVEETSVFTRRRVAGYARVSTDHEEQATSYEAQMKYYTDYINSRIDWEFVKMYSDEGITGTNTKSRMGFKEMINDALDGKIDLIITKSVSRFARNTVDSLSTVRKLKEHGVEIYFEKENIWTFDSKGELLITIMSSLAQEESRSISENVKWGKRKQFERGKVSIPFKSTLGFQRGEHGELVVNQEEAKLVRYIFHEFLTGKNCNTIAKSLTEKGILTPMGKTKWTFGTIKRILQNEKYKGDALLQKTFVTDFLTKSTKVNEGELPQYYVENNHEAIIEKEVFELVQVEFVKQKQRKSSKTLFSGKLICESCGAAFGSKVWHSNSKYRRVVYRCNHKYDGDKKCKTPHVIENEVKQWFIEAMNQVIENKAEILANLEALRKVVANTSELDSEISRLETELTDLTSEVEQLISDNTRTIQDQTSYQNTYNQLASQYEEKKAELERLKVEKADKQKRAVKVKDVIDTFTHQQCLLTAFDEKLWNTMVEQVIITKEKSAIFTFKSGQEIII

SEQ ID NO: 14935 - protein, 521 aa, synthetic construct
MKKIITIEPAKQVIHKVKLPSFTKRRVAGYARVSTDHEDQTTSYEAQMTYYTNYINSRSDWELVKMYSDEGISGTNTKKRLGFQEMVEDALDGKIDLILTKSVSRFARNTVDSLSTVRKLKEAGVEIYFEKENIWTFDSKGELLITIMSSLAQEESRSISENVTWGRRRQLAEGQVTFSYSQVLGFKKSDTGGFEIDHEEAKIVRYIFHQILLGNNPNKIARELTAQGIPTPQGKRKWSYSTVKRMLRNEKYKGDALLQKSFTTDFLTKSTKPNEGELPQYYVENNHEAIIKREVFDLVQVELDKLEKKRQTSNIFAGRLFCGDCGSAFGSKVWHSTSKYKRTIYQCNAKYKGEHKCRTPHVTEEEIKGWFLSAINQLLSNRDEIIANTELLIDMEKDTSPLESRIDGLEHHLETIRQDIEDLVDRNARKAQNQELYQEQYDILVTAYQEKQKELQEATTALEEQKGKRLSLDGFIQELKQQDDLITDFNQELWQTSVERLDIKVDKHISLTFKNGVRIDL

SEQ ID NO: 14936 - protein, 478 aa, synthetic construct
MLTQRPSSENGLKSGGGLLAAQDERHTLERPAFQRLMQDVDAGRVDVVVVYKVDRLSRSLLDFAKVMERFNAAGASFVSVTQNFSTADAMGRLTLNMLMSFAEFEREMISERTRDKVAAARRKGKWTGGRAPLGYEVKDKRLVVNEYEAVVVREAFELYLQHQQASVVSRLLNETGRKTKRYEAQSGTTRAARKWTTQDMLRLLRSPLYAGFVPYGDEMHPGEHPAIVDRATFHQVQDILEGRGPCIQYHGRNPDYVLRGLLRCGMCGEAMTPGSTRKGTREYRYYRCVTRDKQGKEGCRASPLPAAALEDFVVARLREVSVGGGFATQVHARLTSRLEEKHKALRAERAQLPKDLAKRAGESAKWVESLAKLEGPARRIVEEKLTAAEEESAGMKKRLAEVERALDAMEGEKLEAAWVAQALADFDAVWDALTAANRGRLLQALVGRVVVDEETDRVDVHLAHAGESATPVREEVAA

SEQ ID NO: 14937 - protein, 515 aa, synthetic construct
MRKSKSPPSDVKRCAIYTRKSTAAGLEMEFNSLDAQRESCVAYVRRQPGWVLVDESYDDGGFTGANMERPAFQRLLQDVDAGRVDVVVVYKVDRLSRSLLDFAKVMERFNAAGASFVSVTQNFSTADAMGRLTLNMLMSFAEFEREMISERTRDKVAAARRKGKWTGGRAPLGYEVKDKRLVVNEYEAVVVREAFELYLQHQHASAVARLLNEKGRTTKRHEAQSGATRAARRWTTQDVLRLLRSPLYVGFVPYGGETHPGEHPAIVDRATFHRVQDMLEGPGLQYHGRNPDYVLRGLLRCGLCGEAMTPGSTRKGTREYRYYRCCTRDKQGKEGCRAAPLPAAALEDFVVTQLREVSVGEGFAAQVHARLTARMEDRYKALRAERAQLPRDLARRAEESGKWVDSLSKLEGPARRLAEEKLTAAEEEVAGMRKRLAEVERALDAMEGEKVEAAWVAQALADFDAVWDALTATNRGRLLRALVGRVVVDEATGRVDVHLSHAGEAVALGREGVAA

SEQ ID NO: 14938 - protein, 526 aa, synthetic construct
MDEDGEPWLAYIRVSTWKEEKISPELQRDAIAQWARRTGRRIIGWIEDLDVSGRHFKRKIMTCIERVEAGEARGVAVWRYSRFGRDRTGNAINLARLQQAGGELESATEPVDATTAIGRFQRGMILEFSAFESDRAGEQWRETHDHRKYKLRLPAQGRKRWGYVWHRRYDAGTGKLQEERYEPDETTGPVCAQLYVDYVNGTGFSALCGKLNRAGHRTTQGTMWSTETLSRYMDSGFPAGLLTVHDPECRCRKTNGTCKKHVFIQGAQEELIEFDLWERYRQRRKEVAATAPRSRVGMYELTSLVKCAGCRQGTSLNTSKREGRNVTGFAYRCSKRAKSGGTACVGILVEREHVEKEVFKWLKKEAAAGIDKAPATKATPEKDRAEAQAANMTARARAQAEVDKQRQALARLRAEHAANPDDFGEGEYEEAADLIRKKRAEAQKLLDSIPDVVPLPHRSEFVPLVVGIVKEWKTFNVAERNMTLRKIIRRVAVTRSGPGVENHDVTVHPLWEPDPWPDPKKKATER

SEQ ID NO: 14939 - protein, 690 aa, synthetic construct
MMDGDLLPPAILQRKAVVYVRQSTPAQVELNTESRRRQYELVEVARRRGFRTVDVIDDDLGRSASGMVARPGFEKLVAALCAGEVGAVLCFDASRLARNGRDWHHLLELCGLVEARVIDLDGIYDPCLPNDRLLLGMKGSISEFELGVIRARMLDAARAKARRGELRISVPIGYIWHREVGLGLDPDFRLQQVIRLIFERFRQLGSARQTHLSLAAEGVFFPRPSDGKRLTSFDWTAIRYRNVIGLLKNPFYAGAYVYGKSEKRIELVDGRARKSYGHGKPPEAWDVLNRDHHAAYIDWAEYERNQMLLAANAYGRAGGQKSGRGGRALLAGMLTCGRCGRGLAVAYAGAPPGRPTYRCDRPNLMLGLPRCLSFGGSRVDAAIASEILRVVEPMAIEAALEAERMHREGEAERRRVAELDLQQSEYDASLAERRYAACDPENRLIAAQLEKHWEAALRRVEACRARLAATDTPDPTAPMPDFEGLAADLYAAWSAPGVTTRSRQQLIRALIPDIIADVDDATREVVLTIHWQGGQHSQLRVRKPRTGEHGCQTPEQALVVMESMATRFSDADIAATLNRMGVRTGQDKTWTSHRVASIRRVRGIHAFRSAEKDGAWLTMREAAAKLGVTSHVVRRMIQDGILPAEQVVPGAPWQIRADDLENDDVIKALRQKGRPRHTVSRDQLQMFPDT

SEQ ID NO: 14940 - protein, 697 aa, synthetic construct
MMHAKITVEHLARSALVYVRQSTMSQVLGNLESQKRQYQMAEAARDMGFAEVRVIDEDLGRSGSGQIARPGFQRLVAEVCAGTVGAVYCIEASRLARNGRDWHHLIDLCALTGALVVDPEGVYDPRLMNDRLLLGLKGTMSEYELSLLRQRGLAARDAKASRGELRFTLPPGFCWSEDDRIEMDPDERVQQAIRLIFAKFRELGSGRQVFLWLRAADIHLPVALRNGALRKIAWRKPAYHSVMQVLHNPIYAGAYAFGRTGNRTGVVDGQARKTSGHHRAIADWSVLIKDNHEGYLDWRAYEENRRMLEENAHMQKRAARKSGRGGQALLSGMARCARCGRMMRVFYKTGTDLSHRYQCRGDDGHVGAGLCIGAGGGGIDALVASQLLEAVSGQAVQAALLAGQQAAKAQETVRLAVEKELDEARYAAELAERRYEHVDPAKRHVARTLEARWNVALERVAAVEHKLAALGAELRAKPGVDPAVLMRLATDLPSVWNAVGTDARARQRLVRLLIEEVVIDIDAEENEFILLIHWIGGRHTEVRLARRKTGRFPPGRPLTAREVLRKLAGHWPDRELAVTLNRMRCRTEDGETWTTVRVAELRDKLAIPPYDPDAEVPKTLSVDAAAKRLGVCVASVHKLIRSQILPATQIMYSAPWKIPVDALETEAVRIGLQEIAVRRPRQALEKVADRSMPLPGF

SEQ ID NO: 14941 - protein, 451 aa, synthetic construct
MKAAIYIRVSTQEQVENYSIESQRERLEAFCKAKGWTIYNTYIDGGYSGANTDRPALQEMLSNLSEFKAVVVYKLDRLSRSQRDTLDLIEEHFLKNDVDFVSVTETLDTSTPFGKAMIGILSVFAQLERETIAERMRMGHIKRAQEGLRGMGGNHDPSGYIRKNGVLEINDKEARHIQLVYDLYERYHSITKVQEYLKSIGEPVWRFRRYRDILSNRLYIGEVSFAGKFYKGLHDSIISKDQFERVQSLLSRHKGFNANKAKASLLSGLITCGECGEPYMTYQSTDKTKRGPVKYRYYTCRARRFPSEYDKKCMNKTWNQKKLDVLIKSEIKKLSLNKQYDKKEKELINYDLLIKRTDEKIERLIALYAEGKFNVELLEKQVNNLNSEKEELLNKKNKQEMDTTSEFSSRKLNQYAIILENAEFKECQAVIQKLIDNIIIEGESIRIDWVF

SEQ ID NO: 14942 - protein, 585 aa, synthetic construct
MKVALYARYSSDNQRDASIADQLRMCRLRAEKEGWTVVEEYTDHAISGASMILRPGVQALISDSLRGRFDMIMAEAMDRLSRDQEDIAGIFKRMTYADVKMFTLSEGEITHLHVGLKGTMNALFLKDLADKTRRGLRGRVEDGKSGGGLCYGYDVVKKFDDRGEAIRGDRTINETEAGIVRRIFADYLDGKSSRTIAMSLNHEGVAGPQGSEWGPSTIHGNPKRGTGILNNELYIGKLVWNRLRYIKDPDTGRRVSRLNPESEWVVHEVPDLRLIDQDIWDAVKARQSRLAYDVVETSPNPLNDRRRPKHLFAGLVKCGCCGGGYTMISKDLLGCATARNKGTCDNRLNIRRDALEASILNGLRKHLMDPALFKEFCTEFTREVNRLRIERGADLEGWKRELERVDKELDKIVDAIVQGFPLSKLKDKSEKLEARKAELTEKLANADEPPPLLHPNMAALYAQRIGQLYEHLQDEDGRSRAAETFRSLVDQVTLVPDNGELAIVLRGDLGAILRFTAGKKNPDFLAEAEALDNLLSQGSLVAGGRNRRSLLNGGTNAKTSATGSAEVSQKSLVAGAGFEPAAFRL

SEQ ID NO: 14943 - protein, 540 aa, synthetic construct
MAQAATAKKVVIVPIKTMDIVEGIQPILKKKVAAYCRVSTDSEEQKESYTNQVNYYTQYIQNNLEWEMADIYADEGITGTSTKNRTHFNRMIQDARNGKLDLILVKSISRFARNTLDLLKYVRELKSLGVAVFFERENINTLDTTGEVLLTILSSLAQDESRNISENSRWGILRGFQNGKVFCNTNRFLGYDKDEHGELVINEKEAEIVRRIYEEYLDGKSYQAIARGLMRDHIKTAAGGSRWWDSSITLILTNEKYYGALLQQKTVTVDFLTHKRIKNKGQEQQYFIEDNHEPIVSKEIFEAVQKEKKRRAKLKGSVMGESKRYSNKYALSSKVYCGCCGVIFKRRTWNSNNPSKKVVWQCRTNVNEGKAACAAKAVDEQVVHSAFVRLFNRMYENKERFMKTLKANIVSVLSSKPGQEQLLDIEGQMQQLKSDLKELVNLKLRNQMDETVYDEETNRLSSELNELRQQMLKLEEEEDQKEKIKERIDEIIQLLSSRQDILKQFDDNLFNALVEKITILSPAHFVFTLKSGMSIDEILD

SEQ ID NO: 14944 - protein, 516 aa, synthetic construct
MKAALYCRVSSEAQDTVLSLSAQLRALREFAGKNGYEVAREFIDEAESGRSTDRPAFKEMISVSRLKPPPFDTILVWKLNRFARNRGDSVTYKMLLKKQGISVVSISEPVDDSPTGHLLEGIIESVDEFYSLNMGQDIRRGQAENARRGFYNGSKPPYGYQIVKVKDGEKLRNKIEPLPEDSVPVRVVKLQFEMSLSDKGCKAIATKLNTQGFRTLKGERWGRTTVYKVLANEAYAGVSGWGSVRLENAWPAIISRDEFNLVKQKLGNKSPLAAHPRTVTSQYLLSSLLFCACGHSMSGHSAKSSSYAYYQCQRNFKQGKEACCSRSLPKDKLERIISENLKSTILTDDNLEKLVMYTNEDIRSSHRIIHDRLECVDAELREAGARLLKLYEAIETGIVTLHDLAPRIRELRNKQEELSKVRVQLDADAVVEKQEQVNLQKVKSYAGDLRVLLDEGDVLSRKAFIKTFVKGITIEGNEAKVEYRLPLPGGETETVLPIDTFGGLTFQLDAKSSLFK

SEQ ID NO: 14945 - protein, 534 aa, synthetic construct
MENPGKRAVIYARVSSDKQDVDLSISAQLRALKEYATRNSFQLIKEFIDEAETGRTTARPAFREMVSLARRTPKLFDLILVWKYSRFARSREDSIMYKALLRKNGIQVVSINEPFDDTPTGRLLEAIIESLDEFYSDNLGEEVTRGLKESASRGFYLSHKAPYGYRKIKVKDGIKERTRLEIDPYDGKTVASLFDKVVHGQGLTEIAKELNAKLISSPAGKTWGKTSVRAVLANEVYLGIMVWGRQNKRGFEPIRVEGAFPPIVSKDTFVKVQRLLWERAPTRMHPKRVISKFLLSGLVRCGHCGKALVGADAKSGRFTYYACGTIIKKGTGSCLGGYLNSGKFEGQVIRKIKENILTTSNLYKLVGLVNEEMDATSNTYRDEFNSISAEMLDANRRLESLYDAVETRKIDLSDLSPRIHDLRLHIESLRDRKLQLEGLLSERRIELADSKIIDAYVNDLRIELDSGALTERKAFIKTFVKEIEVIDKKAVLRYTIPLTPKALKEETIRVLSTEHYGGPSWSRTKDLGLIRTAL

SEQ ID NO: 14946 - protein, 539 aa, synthetic construct
MKAVLYCRVSSEAQDTVLSLSAQLRALREYAEKNGHVVVREFIDEAESGRSTDRPAFMEMISLSRLKPPPFQAILVWKLNRFARSRSDSVTFKMLLKKQGISVISISEPVDDSPTGHLLEGVIESIDEFYSLNMGQDIKRGQMENAKRGFFNGSRPPYGYKVIKVKDGEKLRNKLEPMPDDSVPIQVVKLQFEMALKDQCCKAIACKLNADGLRTLKGEYWGRSTVYQVLTNEAYAGVLVWGSVRLKNAWPAVIPHEDFYLVQKKVGNKSPAVAHPRTVTSQYLLSSFLFCSCGHSMTGHSAKSGEYAYYQCMRNYKQGKEACCARSLPKEKLERLVTQNLKSTILNEQNLEELVKLVNEDLRSGHTALYERLSNIDSELEEVNTRLLKLYEALETGLLTLHDLAPRIRELRNKQDELSKVKVQLDADAVVDKMDQLNLEAIKTHARDLRALLEDADVVRRKAFIKTFVKRVTVEGNTVKVEYRLPIPGGDGETVLPIDSFGGAEGIRTPDPCDANAMLSQLSYSPMQPPIITHHGAAY

SEQ ID NO: 14947 - protein, 565 aa, synthetic construct
MPPTLKAAIYCRVSTDDQEREGTSLQTQQAACEEYCQRKGYNVTHRFIEAYSGLTLDRPKLRDLQGKARSHDFDVIVIYCLDRMTRNPTHGVILGEDFTRLGIKLEAVTETIESSELGKLISYVKGYASNLEAERIKERTMRGKMAHVKAGKLPQGTGIGVYGYQWNKDTGRRTIIEHEAKTVLRIFADVIAGKSVNSIALSLNKDEIPTKSGSLWFPLTVRRIALNSTYAGLTYYGQTKRVGKNKVIAQPKENWVLLPDVTPPIITQEMFNKAQEAIKNRHEVRPLKQNAAYLLTGFMRCPKCGSTIGGTMLSGKYRYYQCRGSKPTATRAKICDAGYIKADEIEENVWYRLISVATEPLKMDGINTTEDDSTNLLPILDKQIKELRVKLKAYPQKEKNLYGLLTHEQVTSEYVLEAVSKLKERLAEDEQQLKGLVETRKRIGASAQIALSSEQKNSLVLEKLFEATTIEDRRRWLQAMRVKIIAQPGSFKMMCFYDAKIDYADFLENPDADLESGDPMPDVNQPVYADYAKSVKDLVTIERTSGCAWSYEGDSIPFQRTLRPA

SEQ ID NO: 14948 - protein, 534 aa, synthetic construct
MNTGAIYARVSTEDQATGGTSLGTQVQKAMLKAQELGWNVPEGYIITEDHSGKDLHRPGLKKALELARSRSITGIIFFTLDRLYRPDQPGDEWRVFEVLQRFQDQGVKVEWVDASISSREGPFSGVMMYLDSWRAGEERRKIIERTVRGKKARASEGRMPQGTGKGIFGYDYDVITKTRRINEAQASTVRQLFDWTTQGYSIHGMAKKLNGDGIQAFSGGRWHPLTIRRIVTNSVYAGQSFYGRTQRVVDKDGKSHVRETPRSQWIEMPGVTPAIITDDKFQAAQAALGGTKRRVFSEPRKNLLSGYIHCGVCGHRLTGSVLKQKYAYYYCRNNWERYGHTCSQGYVKAPELEARIWQTVGDILQNPDLILSEMRRSHNQSLPHLDETESKLKKESASLAEQEKRLVRLYALGEVNEMFILQETRTLKTRQDAAQRHLEEIRKQRLQIMSLLDSQARITEACQLVSANLARLTFDQKRLALEAIKTEVWVYPDRVELRGKLPTSSLTIARTSASQHGRSCQFQPASVHRGMRVR

SEQ ID NO: 14949 - protein, 594 aa, synthetic construct
MVMDGVKKRVATLYRVSTKGQLDGDDIPMQRNACRSFIEKQGNWELVKEYIEKGVSGFKVSASKRDAIQRAKEDAEKGLFDVLLVFMFDRLGRRDDETPFIVEWFINNGIEVWSVKEGQQKLEDHADRLINYIRFWQSSGESRKTSIRVNEKHSQMVEDGIYRGGLVPYGYKTVNSGVFNKKGKELLKVVIDEEEAEIVKKMYDLVLEEGYGQSRIAQYLNEKGIPSKTGKKWTSGAVNNVLRNPMYKGYMVYARGTEKEVVSKEKLEELVIIDEEKWNKVQSIREKRNPENVKNRGEESIITTTKSSLLLVGLVRCGHCGSPLCTTYNKKKYVRKDGTEYVKREAKYRCSGKAQKKVDCDGQTLYSPKKIEGVVLDELYDYLDQLETIDLTSKIQEFKQHNTDKEVKTLKKLQSEFDKVNSALVKLRDEALKIIMGESFFDAKVVNDLINQKENELRELEESINKAKLDLESKKVELSEMEELQRYIPVWREVFEKASVEKKKMMLSTVIDKIVVFRDRVEITFKISLNRFLVNEGSHSNNDALPTELMPQKRIWMICPCPIIYRDADHCNPFFIHHPLSISTCTTSSMERMT

SEQ ID NO: 14950 - protein, 556 aa, synthetic construct
MAMMNEMEYRTIGSALAGGYRAAVYCRLSKDDDLQGESASIANQRDMLEKYCEKQGWEVVAVYQDDGFTGLNMERPDLQRMLRAIERRQINLVITKDLSRLGRNYLQTGHLIEDFFPRNGVRYIAMNDGIDTLRDNNDIAPFKNILNEMYSKDISKKVHSSYLLKAQKGQFTGCLAPFGYRKDPEDKNHLLIDEETAPIVRLIFGYALNGHGPNYIRRRLEEEKIPCPTWWNRERGLRNTRTKWEKKDPENGRYMWDFSVIKDLLMNPVYTGAIASQKKDYRFKIGTIGEKKPEDWIVVEGQHEPLIDRMSFDIVQNKLKSRQRPGQTNEISLFAGLLKCGECGKSLTVRYTNAKHPQQIYSCKTYNAFGKNHCTQHRIDYDTLYSHVLRKIRECARAALMDGEAVADRLTNTCEAEQREQREAMERSLTRDEERIEVLDKMVMRLYEDMIAGRISEQNFNTMLEKTQTEQTELKAKVSEGRKRLSDEVQLANDAKQWVEAIQEYANITELDVATLNRLIKEIVVHERIDEDKTRHISIEIHFNLKPIPEVEQVTA

SEQ ID NO: 14951 - protein, 541 aa, synthetic construct
MLRQTTQQLITALYPRLSHEDELQGESNSISNQKRILETYAKQNGFSNLRWYTDDGYSGANFQRPGFQAMLADIEAGKVGTVIVKDMSRLGRNYLQVGMYTEMIFPQKNVRFIAINDGVDSAQGENDFAPLRNIFNEWLVRDTSKKIKAVKRSKGMSGKPITSKPVYGYLMDEDENFIIDEEAAPVVRQIYSLCLAGNGPTKIARMLTEQQIPTPGTLEYRRTGSTRRYHPGYECKWATNTVVHLLENREYTGCLVNFKTEKPSYKLKHSIENPPEKQAVFENHHEPIIDRETWERVQELRKQRKRPNRYDEVGLFSGILFCADCGSVMYQQRYQTDKRKQDCYICGSYKKRTADCTAHFIRTDLLTAGVLSNLRKVTSYAAKHEARFMKLLIEQNEDGDRRRNAAKKKELETAEKRISELSAIFKRLYEDSVTGRISDERFTELSADYEAEQKELKERAAKLREELSKVQEATENAEKFMNVVRRHTTIEELTPTLLREFVEKIVVHESVALDGKRRGKLRRQEIEIYYSFVGKVELPDT

SEQ ID NO: 14952 - protein, 668 aa, synthetic construct
MTSDDDRSNFYNARATPVGPPESPRSAEEGLDFEGQQRVNPEDLNGGNPLMSPQNLGIASPEAPVNSLDGLEHLLNAHTGRAPEGGHTGLAQAVVYLRVSTPRQLHTAADIDEDGNSIATQRVEALRKVRELRATVAKEFVEPGQSAQTISKRTEFKKLLRYVDEHPQVKYVVIYMRSRVFRNFTDAAITKRQLLEKGVRLISAKEEFGEGYMADAMEAITDIMNEVQVRMNGEDVKVKMAHKVEQGGTVGRAKLGYLNVRKDFNGRLVNTIDVDFERAPLVAWAFEQYATGRYSISQMTHMLEERGLTTRPSPSRPAQAVSRSRLALILRNPYYTGVIRYKGSLYVGRHEPLVSKETFLKVQEVLDHRNRKGDRDIVHFHYLKGLLYCGPCKDAGRTSRLVYSQNAGNGGTYEYLVCTARQHKECSLPWLRVEQIEGEVLPVVAAEALSPEAIEDIRDAVNKSIANILAQDRDVKAQLTKQLRKLEAQEERLIELAATGSLPIAKIRERIEKTTLQKEAVLEQLEVTADRLQYGTETALAYIDLLSDPGELYRRASDTVRRDLLTAYFDSMTVRVEDSRVHVSGERRAISNRLREVGGEIAVAEGQNNQGKTETPRSRAGSSVRSTVSSFDHGSSNVRMAGVPGLEPRTTESRLACPSEAPNRWSSP

SEQ ID NO: 14953 - protein, 572 aa, synthetic construct
MNPRQATNHQVFDNAPPPLRYIAPVTRDDEYEDSDEVRSLTTTDAPRGSRAVVYVRVSSKGQLNTDYDPEGLSIPAQRAACARKADQLGLVVVGEYVEPGRSATEMTKRVAFQQMLERIRRERDVDYVIVHKLSRFARNRLDDAIVMADLKKRGVTLISATEQIDSTPEGQLMHGILATFNQYRSAADGADIAYKMGQKARNGGTLGRAPIGYLNTLDRIDGREIRSVAVDEERAPFVKLAFELYASGTYTLDDVTTELADRGLRSRPTIARPAAPIAVSKVQRLLRDRYYLGEIEYKGETYDGRHEPLIDPELFEKVQTLLDARNKSGERRIKNDHYLKGTIWCGRCRLEDRVIKRMIIMRATGRNGGEYAYFFCRGVQDHVCDAPYSNMERVERAIEAHYKTIRLSTEFIAAVRENLESAVADKVKAQQLLRKQLENQLRQLAVKEENLLDLAADGELPTARIKVKLHEIGRDRAKLAAQLDAVELDLSGGLAYINAHLELLADPQELYRRASDEMRRQLNQAFFNRIYVVNDEVVGDELNSPLVELLAAERGWTALVVLTSTVVDAVDG

SEQ ID NO: 14954 - protein, 613 aa, synthetic construct
MKKCFIYHRVSSEYQLAGSGIQRQADNLQAYVEHTNLLDDMEDPEATIISDQGVSAFKGLNMSEGELGRWMEQVRAGMWDGSALVLESIDRFSRQNPFTVVAYLSELVNHNITIHDVSLNMLINRTNSAMLPIVTMSAQRAYEESKIKSDRIRDGWRRKRENAFNNGTIVTNKCPQWIDVQDNKYVLNDKVAIVREIFRLYQTGIGTPTIAKVLNAKGDEWLFESGRLWRGESVHKILRNKRVTGTIFISEIIRDYNSTSNPVDQKTYEMDVYPIAIPKEEFDLVQQLMKTRRPNNGRITTSKNTEELKKSNIFNSVCRCARCGEAMYHNVVLANRDSKKNGKFTEEYRYVRCIGERDGFCDNKALRYEVIEQFVIEYIKGMDFTQILKPNNINPEIELVRQRIEEEKAHIQEYELGIERLKNQDKKIPFDVLTELQESRDKLKELEEHQSTFTEVQVDTDYLKTVDPSVLFDQTNIEVRSRIERELSKVIDTIQLYRTGKHYVITLKYRNVDVMKHVLFVEAKKVPVFISGVAIERMGDTIVYSTPSFNIDMVDGDLPRLTNVGGEPLNIIDYSLLLNYVDNIDPNDAVGVWMRHNHDFLFIKSDLNLWNHP

SEQ ID NO: 14955 - protein, 507 aa, synthetic construct
MNLKKTRVVAYCRVSTGSDEQLVSLQAQKAHYESYIKANPEWEYAGLYYDEGISGTKKENRSDLLRMLSDCETGRIDLIITKSISRFARNTTDCLEMVRKLIDLGVHIYFEKENINTSSMESELMLSILSGLAESESISISENTKWAIQRRFQNGTFKISYPPYGYQNIDGQMIINPKQAEIVKYIFAEVLSGKGTQKVANDLNQKGIPSKRGGRWTATTIRGILTNEKYTGDVILQKTYTDSHFNRHTNYGEKNMYLVENHHEAIISPEDFEAVDAILNQRAKEKGIEKRNSKYLNRYSFSSKIICSECGSTFKRRIHSSGTRKYIAWCCSKHISNITECSMQFIRDEDIKTAFVTMMNKLIFGQKFILRPLFHGLRNQNNAASFRRIEELETKIENNMEQSQVLTGLMAKGYLEPALFNKEKNALEAERERLLAEKDQLTRSVNGNFAKVDEVDRLLKFATESKMLTAYEDELFEDYVERIIVFSREEVGFELKCGITLKERLVN

SEQ ID NO: 14956 - protein, 516 aa, synthetic construct
MSCKSGPYLMLSLFLIILWLTKQFTIMIENKKRVGIWIRVSTDLQVRDESPEHHEQRAKFYIESRDWQVAEVYRLDAVSGKSVMNHPEAQRMLNDLKSGRITGLVFSKLARLARNTKELLDFGEIFRKEGADLVSLAEQIDTSTPAGRLFFTLVAAMAEWEREEISSRVAASVPIRARMGKPLGGQASFGYKWENKALVIDKNEAPVRKLIYEIFLKCQRKKTTADSLNKMGYRTRSGACFSDTTIDRLLRDTTAKGVRIANYTKSLGEGKQWVIKPENEWIKIPCPSIVDENLWEKCNSILNEQATKRKRIGRKSEYLLAGFVKCECGTSMYVLSSAKKFTCKNCKNNILVDEMDKVYQQLLKGYLHDLQPEMYVGELESVLKEKEKLFSETKKKRVQLRKKMDELVPLRAELDKEHFGELYQPLVDQVKQLDKSTPELQAEIDLKRIQISSSDYVLKEAKMLYNQWSEMCFRQKRAIVETITEYITIGQDSINIGLSHLPLSSKQTSPHIFRDS

SEQ ID NO: 14957 - protein, 545 aa, synthetic construct
MRLAVYARTSSDDQAERGTIENQLEFARKYADLHQLEIVKWYKDDGVTGTIPLEARPAGRELLKDAKNKEIDLLLIYRLDRLGRSARIILNSVHELESDGVKIRSMTEPFDTGDPSGRFLLTILAGVADLERETILERLWYGANRAARSGKWLGGIVPYGYRVDSEGYLEICEDLLPQSDMTEAGVVRLIFHMVANQGYSCIKVSDYLNALGVPTAYAKDDRKVTRGKRKENTAGIWRPSRIRGIITNTSYKGVHFYGKRSTRKRDVIEREVPAIVDVDTWEKAQKVLRNNQIEAMRNTKNQYLLRSLLKCQCCGLTYVGIHYPGSKRALKGFYVCTGKQAYKGPMQGKCTSKNLPQDWIEDLVWRDCLAFINQPGEALQEIAAAREVKQTEKVDLESEITLIQKSIDDKDIERQSILDLFRKSIITFTDLEKQIQKINQEKEILEQRIKEIRTSLQVDRDYSTKVMNAFQLLTSLRNKLDDNPSFETRREIVKALVQRIQVHTTPSVGSKRPRASVTVQYCFAKDIIYTDKDCTNQSTETEQER

SEQ ID NO: 14958 - protein, 466 aa, synthetic construct
MKLRAAIYVRVSTTEQAEEGFSIKAQTEKLKNFANAKDYNFVKTYTDPGFSGAKLERPALKELINDIEKGFIDIVLVYKLDRLSRSQKNTLYLIEDVFLKNSVQFVSMQESFDTSTSFGRAMIGVLSVFAQLERDAITERMQMGAKERAKAGLYHGSGAGTIPTGYDYVNGELVINEYSDVVKDVFELYVNGLGLNAISVKLKEKYPSKKISRGTVLGGILDNDVYIGKVKYAGKSYEGKHEAIISEKQYNIVKAIRTRKSDTYKNQTHKKYMLTGLLRCAYCGGRVARSGVSRVKSNGLEFYYECYSRRKSPAHMIKDPNCPSKRHKNTEIEYDVIEFVKNIRFNHDNKNEINNKIDEVTTMKKELNSLDSQIDKMIELYQVSAIPMDKINTKISDLNRKKESLTDKIKNLKLSSISKVNREEKIKEVESFDWDNSDIPQKANLLKSVIDEIIIYNDTFEINWSI

SEQ ID NO: 14959 - protein, 460 aa, synthetic construct
MIRVATYTRVSTLEQAEEGYSINEQQDKLEKYCELKDWTITQRYSDPGFSGSNIKRPGISELVAAAKQGDFDLVLVYKLDRLSRSQKDTLYLIEDVFQANQVEFVSLSENFDTSTPFGKAMIGILSVFAQLEREQIKERMTMGKIGRAKSGKAMGWSKIPFGYNLVDDVYEVDEFQATVVKRIFSDYLSGESPATIAKVLNGEGHLGKGKPWSWKTVKDVLMNVIYTGYISFKGELYPGMHKPIIDMETYKKTQTQIEIRRVNADNPRPFRAKYMLSGLLKCHYCGATLRIAVSVNQRTKARSYRYNCPSSHPRRASTYKTKAVCPFKLVYKDEMEKRVIAEIEKLPKNFKQEKESVVDLDAIKKQIKLIKAKQSKLMDLYLVDGIDMEELNRRNGEFNKQIKGLEKELSSTPSKLDVSEMLNRAKNISELTYDEQKKLVKLLINEIEVANNSIKIHWRF

SEQ ID NO: 14960 - protein, 556 aa, synthetic construct
MNNRQSYTAVKNNDKITALYCRLSRDDELQGDSNSIKNQKTILQKYADDNGFTNTEFFVDDGYSGTNFDRPDWQRLISQVEEGKIGTIIVKDMSRLGRDYLKVGYYTEVLFPASDIRFIAINNNVDSANQQDSDFTPFLNIINEWYAKDTSKKIRAVFKSKGQSGKPLCTNPPYGYIKDPEDKTRWIVDEEAAKVVREAFHLCMQGYGPSQIAKEFTNRKIMNPTAHAKKNGINTPDNRGHDDDYVWRGSTIVHMLSRQEYLGHTVNFKTYRKSYKQKKQMKNDPSEWMIFKNTHEAIIEESVFEVVQRIRDGRRRLTPMGEMPLLSGIMFCADCGNKMYQVRGRGWEHEKEYFVCATYRKIKGGCSSHQIRNVVVEELLLDGIRRVTAFARNFEEEFVEMVTKKTRSELDKSMRDSRRELEQAQARIAKLDEIIQRLYEDNIEGKISDERFAKMIANYEAEQQTLEKRVTELKSIMTEEKESALNVDHFLSLVRKYTDIKELTAEIIREFVEKIYVYKAERIDGKRVQRIKIVWNCIGEFEPPVSTSTTKNEKSA

SEQ ID NO: 14961 - protein, 522 aa, synthetic construct
MRKVTRIDGNNALQAFKPKVRVAAYCRVSTDSDEQMASLEAQKDHYESYIRANPDWEFAGIYYDEGISGTKKENRTGLLRLLADCENKKIDFIITKSVSRFARNTTDCIEMVRKLTDLGVFIYFEKENINTQRMEGELVLTILSSLAENESLSIAENSKWSIRRRFQNGTYKISYPPYGYDYVDGKLFINKEQAEIVKRIFSEALDGKGTQIIADGLNSDKIPTKRGSHWTATTIRGILSNEKYTGDVLLQKTYTDENFKRHYNHGEKDQYMIKDHHEAIISHEEFEAAQEILRQRAKEKGVIKGSSKYQKRYPFSGEIKCAECGSNFKRRIHGSGNHKYIAWCCAKHIKDASSCSMKFIREDAIHQAFVVMINKLIFGHKFILRPLLQSLKKTNYSDNIAKIQELETKIKENTERVQVIMGLMAKGYLEPALFNTQKNELLKEAALLKEQKEAIKREIDGSQTILVEVEKLLKFATKADKQIDVFESEIFEDFIEEIIVFSQEEISFKMKCGLNLRERLVK

SEQ ID NO: 14962 - protein, 527 aa, synthetic construct
MAIRNVTVIPARKRIGNSAKAEELPKLRVAAYCRVSTDSEEQATSYEAQIEHYTNYIKSNPEWELAGIFADEGITGTNTKKREEFNWMIEECMQGKIDMIITKSISRFARNTLDCLKYIRQLKEKNIPVYFEKENINTLDTKGEILLTIMASLAQQESQSLSQNVKLGIQYRYQQGKIHINHNRFLGYTKDKDSNLVIVPEEAEIVKRIYREYLEGSSMLQIARGLETDGILTGAGNPRWHTSTINKILRNEKYIGDALLQKTYTVDFLSKKRVPNNGIVPQYYVENSHEPIIPREIFMQVQEQLVKRRCVHISKNGKKRNYSNKHPLSQMVFCGNCHEIFRRVHWNNRGKKSIVWRCVSRLENTGLFCTASTILEDTLKEKIVEAINVAVSGKNSFLAILKKNIETVLSEDLDETTADIDKRLEELQTELIQKANSKEAYDNIVNEIYRLRDLRQETLSRNALRQDKRDRIAEMSDFLNTQTGDITEFDDKLVRKLVEKATVYDDRLVVEFKSGLEIEVSLGSYNG

SEQ ID NO: 14963 - protein, 504 aa, synthetic construct
MNRAVIYARYSSDKQNEQSIESQLRVCKDYAKKNKLNVVGIYIDRAQSGKYDDRIEFSKMMRDSGKDLFDYIIIYKLDRFSRNKYDSAVHNHTLKKNGIKRLSAMENITEGPEGILMESILEGMAEYYSLELEQKVRRGIKENLLNGKSIGGHKVYGYSTANHKHIVNESEAIIVRKIFELYINGKTAKEIVSEINMLGHNLNMNRVYRMLKNTKYIGVYEHSGVVYSNIYPRIVDDKSFYKVQSLMSKNKKAPAAKKARVPYHLTGKMFCSKCGRPMIADSTNKSDKIYHYYSCNKNRSIQQKCSTNRISKMQIETLIANKIINNIFTDKHFNELIKDSIESYNKNIDDDSKIKSLEQNLKRTKKQITNIIESIKDGLSSKTLLQELSKLENEVEILQDEIYKENLLKPQRIDDRRLFYMINKHLESMDINEINEYVLDAFLTNVIYDDESVTIFINFFKENKVTIGMDELKSSISYLKGAPFNYDTIRCFFYIFSSKSTGHS

SEQ ID NO: 14964 - protein, 526 aa, synthetic construct
MAKVTVIPSTIHPLTQMPLNQMAVKKVAAYARVSTNSDEQYTSYEAQVTYYKKFIEDKPDWEYINVYADEGISGTNTKRRVGFNKMIADALNGKINLIITKSISRFARNTLDTISYVRKLKDNGVEVFFEKENLWTLDPKSELILTIMASIAQEESRSISQNVTWGKRVGFQQGKVSFAYKSFLGYKKEDEKIVIDEDQAEIVKMIYKMFLVEGKTATGIANYLKSKQVKTPTGKTNWTKNNVNSILTNEKYKGDALLQKTYTENYLDHKMVKNNGQIPQYYVENSHPAIIDRDMWEQVQIELKRRERIGAKYSSSDVFASKLICEDCGGFYGKKKWHSNSKYSRFVYQCNNKFHKHKEKCLTPNLKEEDIKLKFLKAYNLVMEDKRRIIQDSEEIIELLTDMTKIDDEIRDLDDELFITSELVSKLVNENSKTSDSIENYNKKYEELSNRYDKLQAKREELLKQRNDRQGQALKMQAFIASLSKSEDELSDWNERIWMLLVDGATVHRDSSITFMFHNGVESKIR

SEQ ID NO: 14965 - protein, 437 aa, synthetic construct
MTKKTVTKVNALPKLASKMRVAAYARVSSGKDAMLHSLSAQVNHYKKLIHDNSEWSFAGVYADEALTGTKDSRLEFQNLLEDSRAGKIDMIITKSISRFARNTVILLETVRELKSLGIDVFFEEQNVHTLSGEGEMILTFLATFAQEESRSTSENMKWRIKKDFEQGILWGGKPCLGYALEDKRFIVIPDEAKIVQQIYQLYIAGYGADTIGKILDERGIIPKNSAKWNRSSIMTILSNYNYTGDLILQKTFRENHLSKRKIINSGELDQYAVKKNHEAIISKDLFDKVQEIRKQRAERIKPRINKKPQAFKGMIKCGICGKAYTHKTTPHNEIWKCSLSVTKGIEACPSKQVPDREIKKAAKTILKIRSFDEEVLKSKVKQVLVMPENKLIFQFKDETSVEQSWNKSSRSEAWTPEMREKAKQRALKQHQGGVHHG

SEQ ID NO: 14966 - protein, 567 aa, synthetic construct
MNERKVIRIEATPAFIPGNTDALPKRRRVCAYARVSTDSTDQLNSYNAQITEYTKRIQENIDWDFVDLYADEGTSGTSTKKRVNFLRMLEDARNGKIDLILTKSLSRFARNTVDCLSIIQELRLINVEVFFEKENLSSTDSKVDLMLTIFSSIAQEEARNISENVKWGIRKRYKEGTIRINTSRFLGYDKDAHGKIIVNDSEAKVVKMIYNLYISGMSYREIAKHLIDNNFKNGRKEVVWHPANIMNILKNEKYMGDVLLQKRVTLDYLSHKSVINTGQAPQYYIENNHEAIISKELFDVVQQMTKVRSTSNESSRYGNQFPLSGIVHCSCCGRVLNRNYYNYRTENERVVLTCKNTSKKKIKCNNLPIDNETLEMVCSDALLKLEIINPTLVAQISHTVIKNLDSSQIIDSIELKQRQINQVEDEIKGLINLRISDVSNQNDKYLVKAFEDKKQEIEDLQYELEQFKNQLASLHINNKRIQKLQEFLQKTKSLSRDALLLIFKKIIQISNQEVILCMSNLDISSKDFTDKIELLRTYDSLFDSSIKNEKNGFQIKYSVIEIGDELI

SEQ ID NO: 14967 - protein, 553 aa, synthetic construct
MIELKEVINYKDLSLHKKKRNVCAYARVSTSSEVQLLSFDTQVSTYAKQIMSNPDWNFVGVYADEGKSGTNITKRTQFNLMIEAARNGLIDLIITKSISRFSRNTLDSIKLIQELKNKNVEVFFEKENISTFDPKIELIMSVLSGMAEEESRSISENVKWGNTKRFEKGEFHVVTKGMLGYDHDEFGNLVINEQEASTVRKIYELFLDGFGATPIMRYLEDHSIPTTYGNKHWSKTAIYGILKNEKYTGNALLQKTYRPSFKSKHTANNKGELPQFYVVDSHPAIISLAMFNKVQEIRKQKSIKYQKSHIKNMEETFGNKKSPYTSLIRCAHCGKHFNMKVNKNSNAFANRFLQCLSNASKKSCEADTLSCDVIDQEILNQINLIINNKNEFLNTLSKALKSDERLVIAKQELKATQEKLSALEAKLGKMASETDGFHKAVMDQLNKSIYELKIHSAELQNKIIVDLNVDNFLVNIKSSLKNYNSPITSIDEFPYKQFFSKIVVLERNKIIFVIGKRDDYENINLIKELYLPGSIQYRIRKTNYDAEHGIIFF

SEQ ID NO: 14968 - protein, 515 aa, synthetic construct
MTMDRICMYLRKSRADEEAEKYGEGETLAKHKKILLKVAKEKGLNILRIREEIVSGESLVHRPEMLELLKEVKNKEYDAVLVMDMDRLGRGNMQEQGLILETFKESNTKIITPRKTYDLQDEFDEEYSEFEAFMARKELKIINRRLQRGRVRSIEDGNFLGPLPPFGYEIVCEGKTRTLTPHPEQAPIVKMIFDLYANHNMGGGKIANKLNELGYKTYTGKNWSSHLVLNIIKNEVYVGKIQWRKKVYKKSDNPEQIKEVKSLPREEWISVKGKHEPLISNDIFDKAQEILKKRSHVPYKTKITNPLAGIIICSKCGSSMVYRPYTNNIDPHIVCYNTSCNNKSSKFKFVEQRLLKGLEEWLEEYKAEWDNVEDKENKSKANNTLRMHKLSLSRLKNELEELEKQKNNLHDLLERGIYDVNTYLERSQLLAQRIDDTKFNIENTSKNIKNEEKRIDAQRNIIPKVKKVLDLYPKTDDPERKNKLLKSVLDSAVYEKEKEQRNDQFTLTLFPKLPK

SEQ ID NO: 14969 - protein, 521 aa, synthetic construct
MGNVMVIPAKRQIGNTGRKQDAKPKLRVAAYCRVSTDSDEQATSYEAQVEHYTEYIKKNPEWEFAGIYADDGISGTNTKNREEFNRMIEDCEAGTIDMIITKSISRFARNTLDCLKYIRQLKEKNIPVFFEKEAINTMDAKGEVLLTIMASLAQQESQSLSQNVKLGLQFHYQNGQVQVNHNRFLGYTKDEEGNLVIDPEQAEVVKKIYREYLEGYSMDKIAAGLEADGILTGAGKPRWHTSTINKILRNEKYIGDALLQKTYTSDFLNKTRVKNTGIVPQYYVEGNHEAIIPREIYMRVQEELVRRRVVKTSANGKKRSYSCNHCFSQIIICGDCGEMFRRIHWNNRGCKSIVWRCISKLEPTGLECHARTINELDLQEIVLTALNELLGDKSKYQKQLQQNIASVIRASAAITTDGIDEKLMELQQELVKKANNKEAYDEIADQIFALREKRQQASMDTVQRDEQLQRITELQDFIKDQPSDLTVFDEALVKRWLKQITIWPTHCTVELKSGLKVDVER

SEQ ID NO: 14970 - protein, 519 aa, synthetic construct
MKKVTKIDKVQNVTNRKQKLRVAAYCRVSTSNDAQLESLETQKAHYESYITSRDDWQFAGLYFDEGITGTKKDKRPELMRLMQDCAAKKIDFIITKSISRFSRNTTDCLELVRKLQELDVPIYFEKENINTGSMESELFLTILSSMAEGESTSISENSKWSIKKRFQNGTFKLSYAPYGYRWDGRTLRIVPEQAEVVKRIFADVLSGKGTDAIAKELDDEGVPTKRGGKWTSTSVRGILANEKYTGDVIFQKTYTDDSFNRHTNKGELDMYYVTDHHEAIISKEDFEAAGLLITQRAAEKGIKRESQIYQQRYAFSGKIICNECGDTFRRRMHSSTYGKYVAWCCNTHLADKDKCSMMFLRDDDLKVAFVTVLNKLIYSHKLVLKPYAAALQNNSGDESLIRIQHLERLLEQNTEQRETLTRLMAQGYIDQVLYNSETNALLTQANTYREDIEVINATMSGDSSRFFEAERLLHFAERGSMLEEYSEDLFERFVDHIQVYSRHEVGFVMKCGLTFKEMI

SEQ ID NO: 14971 - protein, 528 aa, synthetic construct
MLDNSNVAPGKNKTLRCAIYTRKSHEEGLEQEFNSLDAQRESAEHYIEAQRMRGWTALPDRYDDGGFSGGNMERPGLRRLLADIDAGKIDVIVVYKVDRLSRSLLDFMKMIDLFNEKGVSFVSVTQHFSTTDPTGRMFLGILITFAQYEREVIAERIRDKVAAAKRRGKYCGGVPILGYDVDRDNKKLLVNPDEARTVQYIFRRFIQIGSAKKLGQELNEQGYRTKAWTTKKGKVREGSEWNTAHIYRLLNNRIYIGEIAHKDRSYPGEHEGIIDRATWDKVQAILEDNKPVKVSMARTKMVAPLKGVIRCGHCGCAMGPTYARKNGRHYTYYICQKDSKRTVSRCPLKRIPAGDIEQAVIEQLSAVFRTPTLVAKTYFAARDIEQAERERLFKQKAQLEMELSQAREQALELMKPGNDQTGKTEMLTTVNRQAVELSKQLTHVSERCKAYQGNSITEQDVSEAFQNVEGFWEDLFPVERNRLIRLLVDKVEIRETGIDMELRTNGLTTLIAELAGLACEVTERRASR

SEQ ID NO: 14972 - protein, 538 aa, synthetic construct
MSKNNNRGRGEARESASRTNGTIRCAIYTRKSTDEGLEQEFNSLDAQRESAEAYIASQRHEGWVCIPDRFDDGGFTGGNMERPALKRLFAGIESGDIDCVVVYKVDRLSRSLLDFARMMELFDKHAVSFVSVTQQFNTTSSMGRLTLNILLSFAQFEREIISERTRDKMSAARRKGKWVGGMPVLGYDVDPKGGKLIVNEDEAAQVRGMYQLYLEHRAMIPVVQEIDRRGWQTKRWTTKKGQDRGGKPFSKSSLFRLLTNVIYTGKVDYKGTIYNGEHSEIVDIDLWQRVQDALRRNGSTGGKEVRNKYGALLKGLLYCAPCGTGMVHTYTAKDNGKRYRYYVCLNAQQRGWASCPTKSLNAHEIETAVVGHIRSIGRNEEIISATAAKVREESGKRMAELETEQRGHERELKRLHTGVQKLVGESFTAVSNGGAAMDQLADLQDRIRTIEQRMTAIREEVIAIQRETVDEGDMARALAVFDPVWESLSPREQTRIVRLLVERVGYDGRDGRVTVTFRSPGVKALCSEADIRNREVSA

SEQ ID NO: 14973 - protein, 508 aa, synthetic construct
MKKAFAYARFSTDMQREESIDAQFRAIKDYCSRNKIFLVNTFADEGISGTTDNRPQFQEMIKLADEVDFIIVHKLDRFSRNKYDSAIYKRELSQKNVRVISVLENLDDSPESVILESVLEGMSEYFSKNLSREVKKGLYENAYKGKFNGGVPLFGYSIDENKNYIINEYQAIAVRLIFDRFAKGSSYTDIINELDSLGYKTVKGNSFKSTTLYEMLSNERYIGTYIFSKEDYNLQNKKRNTHRHKNREDMIIVENGNPAIIDKNTWQLVKERQKLNKKISNKAKWDYVLSPFLYCDECGERLQGTVRKNNQGKIYHYYRCVNKNCSQQSIRTDFLEEDFYTAFNEAIFSEENKKTLSERIKIYLDNKKTNVDKSKLENEIKEIEKQINNCIEFILTGSNSISVKNKVEELELKKFNLQNELLKSKANENKIDINSIIKFLNKYDKLENFSISEQQIILKFFIEKLKYKKGKLTIRLKLVEHCPTSERGFINGTEFPAPKLEKSSFFCA

SEQ ID NO: 14974 - protein, 468 aa, synthetic construct
MRVYGYARVSTQEQAEEFDALNQQIARLKAAGASEVLVDIESGRSDNRKQYNELLKLAQQHRVDEVIITRIDRLGRSVISIHKAMDIFVKHGVNLRILDAPVDPNSPFGWFSINQMSGLAEFESRLLSQRIKHGNNYFREQLKFCVPPFGYAKDENQRLTPDRNIHEKSGKTYFELAKIIIDLTLSMRSLKDVCNYIYTEYEIVFSVAGLRDWVKNPALQGHTVYFSKKKKGINQEPIINFNTHEALTSLDTVEAIQQKLLANKRYRSSAKSTRGDYPLAGLIRCVHCGGNMYRNFSRHKTRVEYMRCVNYVKPGRYHCENSKCTRLREIISKTIAALCENAPNLIDYLESQSTTTQIVNTKEIENLSNELAVLRGLRSSNPDIIAAIAKIEATINTLSTPTRIFDKDGFENAKRKIAIASQATFWESLDDSELRLALAEFVEKVDVDSSGVITPTFKLPLTLSSMVP

SEQ ID NO: 14975 - protein, 458 aa, synthetic construct
MRVGYTRVSKFEQEDALVQQTARIEKAGCSLIFSDIESGRSDRRKNFNKMLAMCREGDITEVVITRIDRLARSVMTIAKTVSLLESLNIKLVILDAPVEDSSSPFGWFSLNQMAGLAEFESRLLQSRVNHGLAHFRDQNKACQPPFGYAKEDGKYIPDTSVHEGSGKTHWLIASEIIDYFLIPKASLRNTIQFFIEKYNIKFSPPGLRAWLRNPVLQGHTRYNVKFNRVNPDKWDIRENTHQPLISKEVYQQIETRLSENRRLWGRNFDGATSNTVGLHLLSGQLICGCCGSKCYVHDKKKAMGVRCKKRRIYGNSVCTNKTAVPLLKIIDAVDQALCKKAFELNNYVVTSQPDREDTPEIIELKSRLDVLRSLPQDSIILDAIEKTILKIQQLQQQNTHAASLGLRLQKELVKTFGDSEFLQVVPETTKRELYKKFVKEVTVLNGVVVNVLLVDVLR

SEQ ID NO: 14976 - protein, 446 aa, synthetic construct
MRVGYARVSTGEQDDALVQQMARLEKTGVDKIFSDIKSGKSNKRKEFNKLLSLCKKGEIKEIVITRIDRLARSVVSMSRAIALFEEMNIKLTILDAPVENISNPFSKFSINQMGALAQFESDLLQSRVRHGYNYFREKNKAPSHVPFGYARIDEKYAPDLSLHESGKTNWAIAREIIDWMIANKASIRGTAHYTQSQYGIRWSITGFHNWLKNPVLRGHTRYNVHNKQHKPEEWDVRKDTHTALIDPITDEQLRSLMEQNQRIWGGNRLQGNRGTGLLSGQIYCNCCGGKCYVSRKDKDLLTCSKRNTYGKTYCSNKRATPLSKVVEYVDNALSEKAIALRDYALSEDEPEPNELIELRHKLESLEKIPKDDVIEDAIARIKIKIHQYKKITPNLALVDEWVHTFSDIRYFQLLPQEKKSELYRKFLHAVVIDSGSVVRVEFVEII

SEQ ID NO: 14977 - protein, 447 aa, synthetic construct
MRIGYARVSTRHQADTEALDQQIHRLEKAGAEKILYDIESGRKDTRKNFNQLINLAKNGVATEIIVTRLDRLGRNVISIHRTIETLQKVGVKLTILDSPLGNTNSAFGWLTINNIAGLAEFESRLLSERVSFGTEYFRSNLKYFGKPPFGYTKDENSKCTPHPTNWAIAKEIINKLYENSFTSLSRWLVEQHSIKMYPTSILKWLHNPALRGHTFYKLKTGETEKHYGTHEALITQQQYEELSKLTSFLHKKDPAKFKTHFLAGLFRCGICGAGMSKTGAGSKDSNNSLRFQCIKYKKFGKSVCSNSKQISASIVKQITIGELIKFAESILDAVNSSTIAKQIETSEELLALKHQLATLQTLPKNDLINSTIAETEYQIKIHEQQKSVRESKTEEDIYILEALNQADFFEELSDSELRALCLRFIESVKYNGGKELVFAFHSRLLLP

SEQ ID NO: 14978 - protein, 438 aa, synthetic construct
MRIGYARVSSRQQADTEALDQQISRLEKAGAQKILYDIESGRKDTRKNFNQTIALVKNGVATEVIVTRLDRLGRNVISIHKTIEILQKAGVELTILDSPLGDTNSAFGWLTINNIAGLAEFESRLLSERISHGTDYYRSNLKYFGKPPFGYTKNADSKCIPHPTNWAIAKEIIRRFYTNSYGSIARWLVENYGIKKYPSTFREWLHNPAIRGHTFYKLKSGEIERHYSTHEALISESEYQDLVKITAHTNKKDPSKFKPHILAGIFKCGVCGHAMSKTKAGKQFQCSQYKRFGKVECTNGKTIAKSIVKKEVIKVLTQYASEVVREVNNRTEADTVVDERLVTLQHQLQTLQSLPRNRAIDLAIADLKQQIKNYEQQSNTREARTEEDNLMLRSFGQADFWESLSDTEFKVICLRFIERVVFNGGRDIEVFLLDSSLP

SEQ ID NO: 14979 - protein, 557 aa, synthetic construct
MSNNRMVALYARVSSDQQAKNNNVDSQIDLLKAKIEADGETLIEDMMFVDAGISGATLIRPQLERLRDTASLGGIDLLYILAPDRLSRKYAHQALLMEEFADIGIQVRFLNHDIGTTPEDEMLLQMQGMFAEYERAKIMERNRRGKLHRAKGGSVNVLSNAPFGYRYIRKQQDGQAAQYIINLHQATTVRQIFQWIGEERLSIGEVSRRLSNAGIETQTGKTSWDRSVIWGMLQNPAYMGRAAFGKTKTTERRNIIRPQKHSAETPKKPYSVEKVNREDWIEIAVPALVSEALFLTVQEQLEENRKQARQRRRGAAHLLQGLVVCGHCHYAYYGKKISPSSAKGKKAYAYYRCIGTDGYRFGGQRICDNKQIRTERLDEIVWQQVVELLKHPERLEKEHERRLDLLQQDKKVNNNDDTITLKKQKNSLDKGQSRLIDSYAEGLIDKEDFEPKIRQLKSKIQQINQQIEACQHHEVNQMELFLVVSRLEEFAKTVAGSLDNIDFNSQREIIRALVKRVEIYKEEVNIVFRIEPQNDLSGNNGISTIKGKLMQHCKRSS

SEQ ID NO: 14980 - protein, 456 aa, synthetic construct
MRVGYVRVSTREQDEGNALEQQTARVEKAGAVLIFSDIESGRSDKRKEFNKMLAMCKQGKITEVVITRIDRLARSVITIHRTLVTLEEYGVKLIVLDAPVDPSSPFGWFSVNQMAGLAEFESRLLSDRIRHGLNYFREQKKAAPRPPFGYQRVDEKYAPDMMLHESGKSNWAIASEIIDYFLCGNATLRSTAKHILDTYKISWTAAGLRYWLTSPVLRGHTAYNIRGNLNNPEKWEIHQDTHEPLLSSDKFKLIHRKLEDNRHKYSYGNNKDSAKEPLPLVGQIICGDCGYKCFCKKIKWSTYRIRCKKHENLGDAFCGNETSTYLPDIISAVDAALAARYEEIRKYTVANFSSNDDDSPELVVRQEQLKALKSLPQSPIIQNAIEQTMLEIQVLKQREVAAKQVSTELIKTLTTCFENVGYWDDLSWLDKQPIYKDLVDFVRVLNGEILEIKLLV

SEQ ID NO: 14981 - protein, 626 aa, synthetic construct
MRNEKITPLYERLSRDDELQGESNSISNQKQMLEDFARRNGLPNPTHFTDDGISGTRFDRPGFLAMMEEVEAGRVEAIVIKDMSRLGRDYLKVGQVMEVLRQRGVRLIAINDGVDSLKGDDDFTPFRNIMNEFYARDTSRKIRSVFKSKGMSGKHLTGTVIYGYLWDEKREHWLVDEEAAEVVRRIFSLTLAGYGPYQIACKLSADRIEIPVVHLARFNEGVNRSKPVKDPYGWGSSTIVNILKKREYLGHTINFKTRKHFKDKKSHYVSEDEWTLFENTHEAIIDQQTFDLVQKIRSNVRRYPNGWGEAAPLTGLLYCADCGGKMYVHRTNNGRRISQYTCSNYTKVPCGTLCPTQHRINESAVLTLVSDTLRAIAEYSRNDRTEFIHTVQETQVAQQSADISKKRRRLAAAQKRAGELEKLICKIYEDNALGKLPDARYRALDAQYAKEQDALEIEIAELEKAVTGYEQSQKSAEKFIALIDKYENFDTLTNTMLNEFVEKILVHERSRKGSQDTTQEIEIYFNFLGRYIPPSLQPVPLTPEEQEELRKKEERKDRLHQNYLKRKASGAQKRYEDKIKAKKKAEMDAKKALIRAEDMKKGVFSTVGQLPKEEPRKGSIAASAAV

SEQ ID NO: 14982 - protein, 522 aa, synthetic construct
MTQRNAHTDQPKVTVQKAVIYCRVSSVHQETEGNGLVSQETRCRQFAEQNGLHVEAVFPDTKSGGGDFMQRPGMVALLSFLDAQPDESFVVVFDDLKRFARDRDFHFRLREAFRARNAHIKCLNFNFEDTPEGEFIETIMAAQGQLERMQNARQVAQKMKARMQNGYWVHNPPIGYQYKTVRGHGKVLTACEPLASIVREGIESYASGRFQSQAEVKRFFESFPDFPRNKHGEVKQQRVTDMLTNPIYTGHICSETYEINWLKGHHEGLISVATFDKVQERREGVAKMPARKNIGDDFALRGFACCAGCGVPYRSSWSKGKSKHYAYYLCQTKSCEDYGKSIVRDKMENAVGEVIKQLEPSPQLIMLINAMFKQAWNARLEQAKAIQSSAKRKLQTCEKQIDALLDRLVQTSNPSVVTAYENKIAVLEHDKALLSEKATQALPGQRSYEEKLELAVKFITSPWKLWASNNIKLRRLVLKLAFADRLIYDRNKGARTPEFTLPFKALEGVMSSNLKNGAGEGT

SEQ ID NO: 14983 - protein, 501 aa, synthetic construct
MEMTKVAIYVRKSRKNKNTVEESLETQRKMLEKIAKKKSYDYTVFQEVGSSEDKNRPEYNKMMDAIENDEFSRVLVYAKDRLSRSKVMDAMLEELFKEKNILIETPSNEIDLNDPRQAFYETINTAMNADELERSKIRQSDGRFNVVQIHKRWLGSRPPLGYDWDRNVKKLTINPKEKGIVRKMVELALNGYSSRQIADKLNKLGYRGKLGAPFKTDRILEVLHNRVYLGEAKLNSVRRKEKAIAKDCHDAIITEDEFNQIQALFKGRRSGAGKYGSLGAKSPLNGLLICSVCNKGLTIQLNNKGISKVTGKSLAFYQIRPCLHYLDEDRLIKCHNKGIKISTIEDAVKESLGNYKKDILEALNKLDNQDTSDMEQNLKNNLNLLTKELNKKERGIKRLLELYVEEQEIDKQEYTESKRVLEGSKTELLEEIELVSNKLKNMDTTSQISKLEKVKDMIDKFDDMEVEAQNALLKTVINKIVFTKTPDTNNQPEIDIHWREL

SEQ ID NO: 14984 - protein, 513 aa, synthetic construct
MRNIFIYLRKSRKDIEEEKKAAEIGDMYDTLERHRRQLLDLAKRNNFTILDILNEDVVSGEYISERPVMQRLLREVESRRVNAVLVMDLDRLGRGDMSDQGAIDRTFRLSGTKIITPSEVYDPESESWELVFGIKSLFAREELKTTNKRLMRGRRQSATEGRHIANRPPFGYKRDKHLKLYPDPDTAWIVKKIFELTLNGWGRKRIAIELQKLGIKSPMGKDSWGTATIRQILTNEVYIGKIVWGKQKNVKIDGKYVPKKLPQEKWVVNENSHEAIISEDLFENVQDVIKHRYNPSVPQDNELKNTLAGLLKCSICGMTMKYTKPPKRPNAYIHCQNVACQGKQRSATFPLVEERILEGLEQIVDDFKLNEDMFEKKKESNSLIFLKEKAINNKKQELKNLTTQKDNLHDLLEQGIYTVETFLDRQKSVGERIRKLENELSLLEEDLQKEIEQIKNYTEYVPAIKAAIEAYRKTENATKKNRLLKSILEKATFYRDETHKRQDEFVIQLYLKY

SEQ ID NO: 14985 - protein, 524 aa, synthetic construct
MTKRKTAVGYIRVSTGVQARDGFSLDNQIEEINKECKKQEWELLGIFDDKGISGALLNERPGLIEMMRFIKENNVDYLVIFKFSRLSRNIGNLFLITEQLKETSTHLISISDNFSSEAGASKIILSVLGSIAEMERDNIIEQVRGGMSQKAREGEWNGGTAPLGYDLVEKKLVINEEESKTVKFIYTEYLKGNGYKTIAAQLNDNGVKTKTGGTFSGNSVKDILRNPTFCGKIRWGHRKDWGKRYSDGKRKRVYNENPIIVEGKHEPIIDEETFNKVQNLIDNNPRHHMKRFNGNHLLSGLLRCPDCGNGMSIQPVKRGNKTYEYYTCNQYMNHKTCKPNTINKAKIEPEFLDIFEKKVNEPDFQKSMLASINNTDIQVKELERIIGSKEKEIKEAEKMLDNLIDELLAESTERVKEKLRNRMDEVSLKIEEFQADIEKKRTSIKNLESQNLNKDDIVEIFQYAGKVIKKIEDKEKQQALVRMLVAEIQVEDKHINEVHFRFSKKFRIGGGKVNRTTNSGKAKS

SEQ ID NO: 14986 - protein, 517 aa, synthetic construct
MNKVAMYLRKSRADIEAESRGEGETLAKHKKALLKVASELQLNIIKIYEEIVSGESLMHRPAMLQLLNEVEAHKYDAVICMDMDRLGRGGMKEQGLILETFKEANTKIITPRKTYDLHDEWDEEYSEFEAFMARKELKIITRRLQRGRLASVEAGNYIGTTPPYGYKIKPLKDGRSLEPHEEQSAVVKMIFDWYTHDDPEVRIGAAMIANKLNELGYKTAKGNKWSNSSVLSVIKNAVYAGRIQWGKTKTTKSSDPQKTKEIATKPKEQWIDVEGKHDPIITMELYQKAQEVLKGRYHVPYQLVNGITNPLAGIVVCDKCGAKMVYRPYTTQKPHIKCYNNPRCDNKASNFELVERRIIESLEQWLEAYKADWEMRVNEEGDELQLAEVNRTALIKLERELVETEKQQHKLHDLLERGIYTENVFLERSRHLSQRSEEINAAIESAKESLSLEEERQQAKEKIIPQVEHVLDLYYKSDDPKRKNSLLKSVLEKAVYRKEKHQWRDDFQLVLYPKLNQ

SEQ ID NO: 14987 - protein, 515 aa, synthetic construct
MKTAIYLRKSRADLEAESRGEGETLAKHRSTLLKIAKEMNLNVLSVREEIVSGESLVKRPEMLALLEEIEDNKYDAVLCMDMDRLGRGGMKEQGIILETFKRSNTKIMTPRKTYDLNDEWDEEYSEFEAFMARKELKIITRRMQRGRVASVEAGNYLGTHAPFGYDIHRLNKRERTLTINSEEASVVRMIFDWYANEDMGANAIRSKLNDLGYKSKLGNEWNPYSILDILKNNVYIGKVTWQKRKEVKRPDAVKRSCARQDKSDWIIADGKHEPIISESLFEQVQDKLNSRYHVPYNTNGIKNPLAGIIKCGKCGYSMVQRYPKNRKEAMDCKHRGCENKSSYTELIEKRLLEALKEWYVNYKADFEKHKQDDKLKETQVIQMNEVALRKLEKELVDVQKQKNNSHDLLERGVYTVDMFLERSNVISDRINEITSTMEKLQKEIKTEIKKEKVKKDTIPQVEHVLDLYFKTDDPKKKNSLLKSVLEKAVYKKEKWQRLDDFELVLYPKLPQDGDI

SEQ ID NO: 14988 - protein, 515 aa, synthetic construct
MKTAIYLRKSRADLEAEARGEGETLAKHRTTLLKIAKEMNLNVLAVREEIVSGESLVKRPEMLALLEEIEDNKYDVVLCMDMDRLGRGGMKEQGIILETFKRSNTKIMTPRKTYDLNDEWDEEYSEFEAFMARKELKIITRRMQRGRVASVEAGNYLGTHAPFGYDVHRLNKRERTLTINPEEASVVRMIFDWYANEDMGASTIRNKLNDLGYKSKLGNDWNPYSILDILKNNIYIGKVTWQKRKEVKRPDAVKRSCARQDKSDWIIADGKHEPIIPESLFEQAQEKLNSRYHVPYNTNGIKNPLAGIIKCSKCGYSMVQRYPKNRKETMDCKHRGCENKSSYTELIEKRLLEALKEWYINYKADFEKHKQGDKLKETQVIQMNEVALRKLEKELVDVQKQKNNLHDLLERGVYTVDIFLERSKAVSDRINEITSTMENLKKEIKTEIKKEKVKKDTIPQVEHVLDLYFKTDDPKKKNSLLKSVLDKAVYKKEKWQRLDDFELVLYPKLPQDGDI

SEQ ID NO: 14989 - protein, 475 aa, synthetic construct
MKTTNKVAIYVRVSTSYQAEEGYSIDEQKDKLEAYCKIKDWKIYDVYVDGGFSGSNTKRPELERLIDDTKRKRFDIVLVYKLDRLSRSQKDTLFLIEDVFLKNDVAFISLQENFDTSTPFGKASIGMLSVFAQLEREQIKERMILGKEGRAKKGKAMSWTTIPFGYDYSKETGILSVNPTQALIVNRIFTEYLNGKSVVKVIRDLNAEGHVGRKRPWGETITKYLLKNETYLGIVKYRGRKYEGQHEPIISQELFDLVQLELQKRQIDALKRNNNPRPFQAKYMLSGLLKCGYCGGSLGLYVTSKNRKGKAYQRYQCRHRFDKDKSKRCNSKWYDKQELEEKVIERLSKIKLEPKYRKEMLTKNDETMKVEEIKEQLKKLNNRLDKLTELYLDEIITRKELDTKNEKIKIEKAFLEEQLETRKKNTIDIRQRKLARLLKDFNPEKLSYEDVSKIVKSVVNEIVVTKDEMAITLDF

SEQ ID NO: 14990 - protein, 527 aa, synthetic construct
MDNKLRAIVGARVSHLDDDKANTRKVSHIAQTEEGVRWAQARGFEVVGTFQDLGISAGKTTPFERPELGEWLAPERLHEWDVLVFSKIDRAFRSTNDCVEFAKWTKDNRKILAFSGDGVVLDYLHPAGDSLDQMMSEFFIYVGSFFAAIELARFKTRATDRLAVLRMTDRVSHGVAPLGFKTVPHPSGKGKALARDPAGYALLHEIYAKLVVENHSLTEVVRWLNSSGHRSNRAKAAGEGNWSVSTLKRTLTSLRLQGLRVSGDKLVLDPQGQPICMAQPTFTDEQWTQLQAAIAQRSASGRARQMTPNPLAGIGYCGAILHRPGCKYQTWRGRCDCPECGYALSLHRRKSSSGKVHTYVRCGRSVTGCRGAMRLDEIETFLEERFLADHGDTEMTRKVFVPGEDHSQELAQTEQSLERLRWESDNGLVDDESLYKSRLAALVARKAELTANTIVPARWEYVGTGQTYRQLWSDPETDRRQVLRDAGVKFVLHCLPRGSVGQTKVLPTEIRVPEGWPAPAEVPIPLV

SEQ ID NO: 14991 - protein, 543 aa, synthetic construct
MQQLKQKRVGIYVRVSTEMQSSEGYSIDGQINQIKEYCNFHHFEVKDIYADRGISGKSMNRPALQRMLHDANKDHIDCVMVYKTNRLARNTSDLLKIVEDLHKQNVEFFSLSERMEVNTSSGKLMLQILASFSEFERNNIVENVFMGQTRRAQEGYYQGNLPIGYDTIPDSKHELMINQHEANIVKYIFESYAKGHGYRKIANALNHKGYVTKKGNPFSISAITYILSNPFYIGKIQFAKYKDWNEKRRKGLNDNPVIAEGKHAPIISQELWDKVQSRKKQVSQKPQVHGKGTNLLTSLIFCEKCGATYAASTTTNTLKDGTKKRIRYYYSCSNFRNKGSKVCSANSVRADVIEKYVMNQILEIIKSDKVLKQVVERVNQDSQIDMAALNHDIAYKQKQFDEVQIKLDNLIKTLEDNPDLTSVLKNTIHQYEKQLNDITNQVSQLKQQQNQEKPSYDTKQIAALLQQIFQNVESMDKVQLKALYLTVIDRIDIRKDGNHKKQFYVTLKLNNEIIKQLFNDTPLDEVLLSTSSLFLPQTLFLQI

SEQ ID NO: 14992 - protein, 449 aa, synthetic construct
MKQAMGYLRQSTTKQQSLPAQKQAIKTLAEKHNIQHITFYSDKQSGRTDKRNGYQQITELIQQGQCDVLCCYRLNRLHRNLKNALKLMKLCQTYHVHILSVHDGYFDMNKAFDRLKINVFISLAELESDNIGEQVKNGLREKAKQGKLITTHAPFGYHYNNGIFMINNTEASTVKAVFSYYLQGYGYKKIAQYLEADEKFINRKPYQVRSIIMNPNYCGRVINQYGQYDNMCPSIVSTSIYEQAQAIRSQKQLKRTSSANQLKQKIKCPYCGSTLTNITIRKKHRTLRYYVCPQNMNASRFVCEFKGINAQSLEASVLATCQDFFQNQQLYSKINHTIQQRLKKQKDIEAKSTLTQEQLIEKLAQCKIDAETFREQTQSLCQQSKPISSIHTHQIRKALQNVIQQRFTLNMLYPYIDEIHITKSKTLTGIYFKNEPLNIVNQTAQSSIA

SEQ ID NO: 14993 - protein, 543 aa, synthetic construct
MNEMKKKRIGAYIRVSTERQVEGYSVDGQITQIEQFCQFNGYDLVDIYADRGISGKSMNRPALQRMLQDAKNGKLDCVIVYKINRLARNTSNLLTIVEELHRQNVEFFSLSERMEVKNSTGKLLLNILASFSEFERNTILENIYTGQHQRALEGYYQGNLPLGYNNIPDNKKELIINQHEANIVKYIFESYAKGHGYRKIANALNHKGYVTKKGNPFSISAVTYILSNPFYIGKIQFAKYKDWNDKRRKGLNDNPVIAEGKHTPIISQDLWDKVQARKKQVSKKPQVHGKGTNLLTGILHCPNPQCNAPMAASNTTNTLKDGTKKRIRYYSCSNFRNKGSKVCSANSVRADVIEKYVMDQILEIVKSDKVLKQVVERVNQENQVDVAALNHDIAYKQQQFDEINIKLKNLIQTIEDNPDLTSALKPTIHQYETQLNDITNQMNQLKQQQNQEKPSYDTKQIAALLQRIFQNIESMDKSQLKALYLTVIDCIDIRKDESHKKQFFVTLKLNNEIIKQLFNNNSLDEVLLSTSSLFLPQTLYLTI

SEQ ID NO: 14994 - protein, 449 aa, synthetic construct
MKQAMGYLRQSTTKQQSLPAQKQAIKTLAEKHNIRHITFYSDKQSGRTDKRNGYQQITELIQQGQCDVLCCYRLNRLHRNLKNALKLMKLCQKYHVHILSVHDGYFDMDKAFDRLKLNIFISLAELESDNIGEQVNNGIKEKARQGKLITTHAPFGYHYKRDTFTINKNESPTVIAVFNYYLQGNGYKKITQFLEEDNKLLNRKPYQVRNIIMNPNYCGRVINKYGQYDNIFPSIVSTNMYEQAQALRSQKQIKRTPSDNQLKQKIKCPYCGSKLTNMTIRKGTHSLRYYVCPRNMNESRFVCDFKGINAQELETSVLTTCQDFFQNQQLYSKINQSIQKQLKNQRDIETKNTLNHEQLIEKLAKGKIDAETFREQTQLLRQQSKPISSINAFQIKRTFQNVIKQRFTLNMLYPYIDEIHITKKKILVGIYFKNEPLNIINQTTQSSIA

SEQ ID NO: 14995 - protein, 558 aa, synthetic construct
MKGKIALYSRVSTSEQSEHGYSVKEQEQVLIKEVVKNFPGYDYETYTDSGISGKNIEGRPAMKRLLQDVKDNKIEMVLSWKLNRISRSMRDVFNIIHEFKEHGVGYKSISENIDTSNASGEVLVTMFGLIGSIERSTLISNVKMSMNAKARSGEAITGRVLGYKLKLNPLTQKNDLVIDENEANIVREIFDLYLNHNKGLKAITSVLNQKGYRTINQKPFSVYGVKYILNNPVYKGYVRFNNHQNWAVQRRSGKSDKNDVILVKGKHEAIISEEVFDQVHEKLASKSFKPGRPIGGDFYLRGLIKCPECGNNMVCRRTYYKTKKSKERTIKRYYICSLFNRSGSSACHSNAINAEVVERVINVHLNRILSQPDIIKQIASNVIEELKQKHSHQAEIKYDTDSLEKQKAKLKSQQERLLDLYLDEEIDSDILKDKQSRMNEQLEALDQQIKEAQQANQSQDDIPNFDKLKGRLILMITRFSVYLRKATPEAKNQLMKMLIDSIEITTDKQVKVVRYKIDESLIPQSLKKDWGSFFMPKFQFEIDGRNNYFIDQITTFTT

SEQ ID NO: 14996 - protein, 554 aa, synthetic construct
MTTRTKNARKVAIYARYSSDLQNDRSIEQQFDICRTYAAKMGWVVVEQFEDRAKSGASVFGRSSFIKMVEAAGLAKFDIVLAEDLDRLSRSQRDTAELYEDLTFKGLEIYTCTDGRINEMHVGIKGVMNKLYLTNLANKVHRGQKDVLNDGRNPGGDIYGYRVRKGEAGILDIDPDTSRIVKRIFEEYAAGASPRKIAAGLNRDGIPSPRGGVWNASTINGNIARGQGILLNERYAGVVVWNKRKNYKNPKTGKLVRRDNPPSEWIYKEVPHLRIIDEELFEAVKQRRTSAGTPNSRRAPRSNRLLSGLLRCGACGSGMTLDGHDRSGPRIRCSRHRESGSCANGTKYYVETIERLVVDRLNDSIDNPQRMGEYVEAYIAERRALSAAAAKNKDKLSSRLVACRKEMDRLIDAVKTGILEAHEVAAKLTTNREEAARLETEIAAADETITKIDLHPASVARFKRHLEEASTISSGEVSDTVRGSIRALIETVAVLPRQRGEPYRVQVAGRISGLIGEPDCRLNSVIPSAGTSFTREFASSAHRYFERNHLASGN

SEQ ID NO: 14997 - protein, 565 aa, synthetic construct
MKNKKAALYVRVSTSYQIDKDSLPFQKEELSNYSKYALGIDDFEIFEDAGYSAKNTARPAYQDMMRRIRDGEFTHMIVWKIDRISRNLRDFTEMYDELKDYGVTFVSKNEQFDTSSAMGEAMVQIILVFAQLERKLTAERVFSIMMNRAEKGLWNGAKSPFGYVWSEEDKYPVPCEKEGPVIKKIFDMYSKKQSALEVSRYLNNNGIDTKRGGRWTSKTIVDIIRSPFYKGTLRYNYRQGGRGKKKPEDEWIVINHNHKPLVSGDLWQVCNDIMDKNSANISAASRRKDHVHVFSGLLKCAKCRASFSAGMDRPRADGFRPSVYRCRTKSVDKLCDASNPGEVSFGPFVISYLSNFIKAKSKLSASDSPLDLQDMLLDGVPFKDVDSIDRQSIEITYKAILQIDYIDEIKLHPDAQSDDEEDFAMNRLKSERAKLERALSRWRDLFLFSEDSISEKDFLIKKLDMESKMDEIDKKLENMLPKEEDRGMGDISFLKKSAQLLFVKKLLDEGTSIEYGFDYKKLLSEVGKEPVKEFVNATVKEIAILDGVVSSITFANGLVHKFKYK

SEQ ID NO: 14998 - protein, 507 aa, synthetic construct
MKRAISYIRFSSEKQSRGDSLRRQSKMVTDWLKAHPEYHLDQDLSFRDLGVSGFTGKHLQGGLGDFLTAIEKGLVKAGDTLLIESLDRLSRQDVDQASELLRNILRSGVDVVTLSDGEHYTKESLKDPLALIKSILIMQRSHEESLRKSERIQAAWNRKKELISEGIKISKRCPAWLKLNDDRKSFSVIPEKVETVKRCFQLRLEGKSIWEIVRTLNDEGHQTLNQYKAGSFGQTSVQDLLKNRSVIGYFTPKGCEEIAGYYPAIIDETTFYKVQQLSYSRYGRKPASDKPMAVNLFKGVIRCSECGHALIITGFSDTRSGIYRCPLRNENRCSAKGLSRKQTDGTLLTLLSRLDRFDSDMTNTIDTLKLHREHISSNIEKLVQLSLEIEDLSAITIKLKQLKGELSQVDADIEKETQRLKSIDVGCLSDCDLTTKAGRIEAQLIIKSAVKEVVLNTAKRRCKVTFHNGKVIDLPITENPSEDVTEAIQSLSEVTERGLIDVDEVII

SEQ ID NO: 14999 - protein, 559 aa, synthetic construct
MKTKLYSYIRFSSMRQNDGSSYERQIRMAREIAAKYDLELVNDYQDLGVSAFKGANSKTGALSRFLDAIGRSVPVGSWLFIENLDRLSRADIVSAQELFLSIIRRGITIVTGMDNKIYSLDTVTANPMDLMFSILLFIRGNEESQTKRNRTNSSALIKIKSHQENPQNPAVAIEEVGKNMWWTDTTSGYVLPHPVYFPVVQEIVELRKNGRSTAEILDHLNETYAPPPAVSNKKHSKWSRAMVERLFHTRALIGIKEVSVDGVNYELKDYYPRVIDDPTFYHLKKNIGARAWNFGDKEEVKPIPLLSGIGLLKCDHCGCAMVKVKGTNKRSDQYRYTCDATRSRRLDCEHPNWSFRGDQLEKAVLQLLADKIWIAEDKANPVPALKVQVDEISRKIDNLIALSAMTGATKELADQITTLNSERETLYNQIKMAEEEMYSVDSQGWEKLAEFDLEDVYNEERLKVRFKIKQALKRIGCSRIDRNKNLFVLEYIDGKTQRVVIENSRGTRKGRIFIDLKTINDRQILESNGLVLHPCLDMLTDKNWKPEEEIPGPLQEFGI

SEQ ID NO: 15000 - protein, 506 aa, synthetic construct
MRTVITYLRFSSATQGAEGADSTRRQNELFKQWLRKNSDAQVVASFSDEGLSGYKGKHLTGQFGDMLARIESGEFSEGTVLLVEAIDRIGRLEHLETEALMNRIIAHGIEIHTLQDGLIYTRDALSDDLGISIIQRVKSYVAHQESKQKSFRVSQKWKQRAKLALAGEQRLTKMVPGWIDPDTLKLNEHAETVRLIFKLLLSGESLHNIARHLQANNISSFSRRKDANGFSVHSVRTVLRSESVIGTLPASQRNDRPAIPNYYEAAIDAATFNKAQEILDKNRKGRTPASDNPLTINIFKGLFRCQCGASVHPTGTKNKYAGVYRCNNHLDGRCDVPPLKRKPFDKWMIDNFLGMIDVGNDGEAEGKIASLQHEVEIVTTRIKKATALLLEMDDITELKTQVKELNQKRTELQTTIDSMRRKTSLSDKGLPQLKDIDLMTKEGRVECQLILSKHLKGLTLGKDSVTVTLQNDTEITIPTNPLPLNDGSPIFEIADKELLDIDAYQL

SEQ ID NO: 15001 - protein, 506 aa, synthetic construct
MRHVITYLRYSSAIQGAEGADSTRRQNDLFKQWLKKNSDAQVVASFNDEGLSGYKGKHLSGQFGDMLSRIESGEFSEGTVLLVEAIDRIGRLEHLETEALMNRIIAHGIEIHTLQDGLIYTRDALSDDLGISIIQRVKSYIAHQESKQKSFRVSQKWEQRAKLALAGEQRLTRNVPGWIDPDTFKCNEHAETVRLIFKLLLDGESLHNIARHLQSNDIKSFSRRKDANGFSVHSVRTVLRSESVIGTLPASQRNDRPAIPNYYEAAIDAATFNKAQEILDKNRKGRTPASDNPLTINIFKGLFRCQCGASVHPTGTKNKYAGVYRCNNHLDGRCDVPPLKRKPFDRWMIDNFLGMIDVGNDGESERKIAALQHEVEIVTARIKKATALLLEMDDITELKAQVKGLNQKRTEIQTTIDTLKRKTSLTDKELPQLKDIDLTTKAGRVECQLILSKHLKGLTLGKDSVTVTLQNDTEITIPTNPLPLNDGSPIFEIADKELLDIDAYQL

SEQ ID NO: 15002 - protein, 588 aa, synthetic construct
MAEIIKIEAKKSPLPNRKKVAAYARVSMETQRLHHSLAAQISFYSDLIQKNPEWDYAGVYADEGISGTSVEKRPEFMRMMKDCKAGKIDLILTKSISRFARNTVDLLKVVRQLKDLNIEVRFEKEKINSLSDDGELMLTLLASFAQEETISISNNVKWAIRKRMSEGNPNMRNNVYGYRWKDDTLIVVPEEARIVRRIFQNFLDGKSRLETEREFAEEGITTRKGYRWTDSNIKVVLTNVTYTGNLLCQKEFVEDPITKKRKKNRGELPQYFIANTHEAIIDKETFDYVQEEMARRRALGPRANKSLNIYCFTGKIKCELCGKSYMRNVRNNRAKHSNLGDKVFSWVCGSSKKKYSTCSAKAIPDRILKTCCAKVLGLEDFDDAVFNEQIDKITVPKQGVLIFHFKDGHTIRETWKNNARKESWDDAARKRASDYRRTHAMKRSDVTCFSTKIRCEHCGCNFRAQTQNCSTSPSGKRRYWRCAEHNGCDTRGFRDDLLRSLTAEVLGLDAFDDAFFLSKIDHISVLSREDLIFHFYDGKEIARKLIQPTHEGHKWTEEQHAKFKASIKECYASERHKPIRKEKLWPNK

SEQ ID NO: 15003 - protein, 526 aa, synthetic construct
MAKQVTTIPASIKPFSKTPLTTSRKRRVAAYARVSTDSDEQFTSYEAQVDYYTNYIKARNDWQFAGVYTDEGITGTNTKKREGFKRMVKDALDGKIDLIVTKSVSRFARNTVDSLTTIRKLKEHGTECFFEKENIWTFDSKGELLITIMSSLAQEESRSISENCTWGQRKRFADGKVTVPFKHFLGYDRGKDGNLIVNLEQAKIVKRIYAMYLQGKTYHLIAKALTEDGIPSPAGKPRWNPSNIKSILTNEKYKGDALLQKSFTTNFLTKEHKINEGEIPQYYVSGNHEAIIEPEVWELVQREMERRKSEKGRHSGVRLFSGKVYCGECGTRLGSKVWHSTDKYKQVIWQCNRHCKKNSPCKNGVHLTDEELKAAVLSATNKLIENKDEILNSFQEIVGGVYDTHTLEGEKAKLESEMDVCAKMIEDLIRQNATTPQDQSEYQAKYEDLERFYNEKKAALAKVEGKLKKMQATKADIKFCLKQLQKQDTLLQAFNAQSFCALVDHITVYGKDDIRVIFRNGSEIKV

SEQ ID NO: 15004 - protein, 507 aa, synthetic construct
MKRVISYIRFSSEKQSRGDSLRRQSKMVTDWLKAHPEYHLDQDLSFRDLGVSGFTGKHLKGGLGDFLTAIEKGLVKAGDTLLIESLDRLSRQDIDIASELLRRILRAGVDVVTLSDGEHYTKESLRDPLSLIKSILIMQRAHEESLRKAERIQAAWDAKKEAAKAGIKISRRCPAWLRLNDDRKSFSVIPEKVETVKRCFQLRLEGKSIWEIVRTLNDEGHQSMSQYKPGKFGQTSVQDLLKNRSVIGYFTPKGCEEIAGYYPAIIDETTFYKVQQLSHSRYGRKPVSAKPLSVNLFKGVIRCSECGHALIITGFSDTRSGIYRCPLRNENRCSAKGLSRKQTDGTLLTLLSRLDRFDSDTTNTIDTLKLHREHISSNIEKLVQLSLEIEDLNAITSKLKQLKGELSQVDADIEKETQRLKSIDVGCLSDCDLTTKAGRIEAQLIIKSAVKEVVLNTAKRRCKVTFHNGRAITLPITENPSEDVTEAIQSLSEVTERGLIDVDEVII

SEQ ID NO: 15005 - protein, 521 aa, synthetic construct
MAVSKNVMIIPAIKRMGNNRKEDETPKLRVAAYCRVSTDSDEQASSYEVQIEHYTEFIKKNSEWEFAGIFADDGISGTNTKNRDEFNRMIDECMAGKIDMIITKSISRFARNTLDCLHYIRKLKDKNIAVYFEKENINTLDAKGEIMLTIMASLAQQESQSLSQNVKLGYQYRYQQGEVMVNCSRFLGYTKDENKRLVIVPEEAEIVKRIYREYLEGSSMDKIKKGLEADGILTGAGKKRWHTSTIRKILSNEKYIGDALLQKTYTVDFLTKKRVVNNGIVPQYYVENSHEAIIPREIFMQVQEELVRRSKGHISTSGKKRNFSSNHVFSQIIFCGECGEIYRRVHWNNRGKKSIVWRCVSRLENTGLTCHSRTVLEDMIGLATVDAINKLIGQKDGFLTILKENIETVISETDNNIVSEIDKKLEELQKDLLRLANSKEDYNDIADEIYRLREERHKALAEEAGKKGSKQRLEDMEKFLNEQSTLLEEYDEQLVRRLIEKITVYDDKLTIEFKSGVEVDV

SEQ ID NO: 15006 - protein, 528 aa, synthetic construct
MTYQEGGEAMKKITKIEGNKVASIIKPKLRVAAYCRVSTGSDEQLVSLQAQKSHYETYIKANPEWEYVGLYYDEGISGTKKENRTELLRMLSDCENKKIDLIITKSISRFARNTTDCLEMVRKLLDLGIYIYFEKENINTQSMESELMLSILSGLAESESISISENNKWAIQRRFQNGTFKISYPPYGYDNIDGQMVVNPEQAEIVKYIFAEVLSGKGTQKIADDLNQKGIPSKRGGRWTATTIRGILKNEKYTGDVILQKTYTDSRFNKRTNYGEKNRYLIENHHDAIISHEVFEAVEAALNQRAKEKGIEKRNDKYQNRYSFSGKIICSECSSTFKRRIHSSGTRKYVAWCCSKHLKQITECSMQFIRDEDIKTAFVTMINKLIFGRKLILQPLLDALRGMSNSDNLSRIQELEKQIEKNAEQRELLVKLMAKGYLEPALFNRENNELQMEADNYMGQKEALIHALNGELSKVQEVSNLIKFTNKAEMINTFSEQIFNDYVEKIIVYSRVEIGFVLKCGITLRERM

SEQ ID NO: 15007 - protein, 508 aa, synthetic construct
MKKAIAYMRFSSPGQMSGDSLNRQRRLIAEWLKVNSDYYLDTITYEDLGLSAFKGKHAQSGAFSEFLDAIEHGYILPGTTLLVESLDRLSREKVGEAIERLKLILNHGIDVITLCDNTVYNIDSLNEPYSLIKAILIAQRANEESEIKSSRVKLSWKKKRQDALESGTIMTASCPRWLSLDDKRTAFVPDPDRVKTIELIFKLRMERRSLNAIAKYLNDHAVKNFSGKESAWGPSVIEKLLANKALIGICVPSYRARGKGISEIAGYYPRVISDDLFYAVQEIRLAPFGISNSSKNPMLINLLRTVMKCEACGNTMIVHAVSGSLHGYYVCPMRRLHRCDRPSIKRDLVDYNIINELLFNCSKIQPVENKKDANETLELKIIELHMKINNLIAALSVAPEVTAIAEKIRVLDKELRRASVSLKTLKSKAVSSLGDFHAIDLTSKNGRELCRTLAYKTFEKIIINTDNKTCDIYFMNGIVFKHYPLMKTISAQQAISTLKYMVDGEVYF

SEQ ID NO: 15008 - protein, 559 aa, synthetic construct
MKTKLYSYIRFSSMKQADGSSYERQKRTAAEIAAKYDLELVTSYQDFGVSAFKGANSRTGALSRFLDEIGRSVPVGSWLVVENLDRISRQSIIEAQELFLSIIRRGITIVTGMDGKVYSKESVNANPIDLLLSVMLFARANEESQTKRNRTNSSALIKIKAHQENPQNPAVAIEEIGKNMWWTDTTSGYVCPDPVFFPIVQEVVELRRNGRSTAEILDHLNATYTPPPAASHKRHSNWSRAMIERLFHTRALIGIKEISVDGVKYELKDYYPRVLDDAEFYHLKKSIGVRACNYGDKEEVKPIPLLSGVGLLKCEHCGSAMVKVKGTNKRPNQYRYSCDAMRSSRIACVHTNWSFRGDQLEKAVLQLLADKIWIAEDKANPVPALKVQIDEISRKIDNLITLSAMTGATKELADQITTLNSERETLYNQIKMAEEEMYSVDSQGWEKLAEFDLEDVYNEDRIKVRFKIKQALKRIGCSRIDKYKNLFVLEYIDGKTQRVVIENSRGPRKGRIFVDLKTINDRQILESNGLVLHPCLDMLTDKNWKPEEEIPGPLQEFGI

SEQ ID NO: 15009 - protein, 588 aa, synthetic construct
MAEIIKIEAKKSPLPNRKKVAAYARVSMETQRLHHSLAAQISFYSDLIQKNPEWDYAGVYADEGISGTSVEKRPEFMRMMKDCKAGKIDLILTKSISRFARNTVDLLKVVRQLKDLNIEVRFEKEKINSLSDDGELMLTLLASFAQEETISISNNVKWAIRKRMSEGNPNMRNIVYGYRWKDDTLIVVPEEAKIVRRIFQNFLDGKSRLETEREFAEEGITTRKGNRWTDSNIKVVLTNVTYTGNLLCQKEFVEDPITKKRKKNRGELPQYFIANTHEAIIDKETFDYVQEEMARRRALGPRANKSLNIYCFTGKIKCELCGKSYMRNVRNNRAKHSNLGNKVISWVCGSSKKKYSTCSAKAIPDRILKTCCAKVLGLEDFDDAVFNEQIDKITVPKQGVLIFHFKDGHSVTETWENNAKKESWDDAARKRASEYRRTHAMKRSDVTCFSTKIRCEHCECNFRAQTQNCSTSPSGKRRYWRCAEHNGCDTRGFRDDLLRSLTVEVLGLDAFDDAIFLSKIDHISVLSREDLIFHFYDGKEIARKLIQPTHEGHKWTEEQHAKFKASIKECYASERHKPIRKEKLWPNK

SEQ ID NO: 15010 - protein, 539 aa, synthetic construct
MAKQVTTIPASIKPFSKTPLTTSRKRRVAAYARVSTDSDEQFTSYEAQVDYYTNYIKARNDWQFAGVYTDEGITGTNTKKREGFKRMVKDALDGKIDLIVTKSVSRFARNTVDSLTTIRKLKEHGTECFFEKENIWTFDSKGELLITIMSSLAQEESRSISENCTWGQRKRFADGKVTVPFKRFLGYDRGKDGNLVVNPKQAKIVKRIYAMYLQGKTYHLIAKALTEDGIPSPAGNPRWNPSNIKSILTNEKYKGDALLQKSFTTNFLTKEHKINEGEIPQYYVSGNHEAIIEPEVWELVQREMERRKNEKGRHSAVRLFSGKVYCGECGTRLGSKVWHSNDKYKQVIWQCNRHCKKNSPCKNGVHLTDEELKAAVLSATNKLIENKDEILNSFQEIVGGVYDTHTLEGEKAKLESEMDVCAKMIEDLIRQNAAIPQDQSEYQAKYEDLERFYNRKKGGLSEGRRKAQKDAGDQSRYQVLPEAATKTRQASANIRRTELLCSCRSHHGIQQRRYPHNLQKRQRDLLLAAVISSSDQNKK

SEQ ID NO: 15011 - protein, 522 aa, synthetic construct
MRKVTRIDGNNALQAFKPKVRVAAYCRVSTDSDEQMASLEAQKDHYESYIKANPDWEFAGIYYDEGISGTKKENRTGLLRLLADCENKKIDFIITKSVSRFARNTTDCIEMVRKLTDLGVFIYFEKENINTQRMEGELVLTILSSLAENESLSIAENSKWSIRRRFQNGTYKISYPPYGYDYVDGKLFINKEQAEIIKRIFSEALDGKGTQKIADGLNSDKIPTKRGSHWTATTIRGILSNEKYTGDVLLQKTYTDENFKRHYNHGEKDQYMIKDHHEAIISHEEFEAAQEILKQRGKEKGVIKGSSKYQKRYPFSGKIKCAECGSNFKRRIHGSGDRKYIAWCCTKHIKDASSCSMKFVREDAIHQAFVVMINKLIFGHKFILRPLLQSLKKTNYSDNITKIQEMEAKIKENTERVQVIMGLMAKGYLEPALFNTQKNELLKEAAILKEQKEAIKRAIDGSQTILVEVEKLLKFATKAEKQIDAFDSKIFEDFIEEIIVFSQEEIGFKMKCGLNLRERLVK

SEQ ID NO: 15012 - protein, 559 aa, synthetic construct
MRAVAYCRVSTNDLDQLNSLHNQVAHYQDLFSKKGYTPVKVGVLYKKNGEKIALEGIFADEGISGTKIKHRKAFKYMLRCAEDKEFDIVICKNVQRFSRNIADGHNALKRLKQLGINVYFEDGGLNYFEHEDIINLFLSMAQSESRIKSSACKFGIRKAQLDGKWTSNCPYGYNRVNGYLKINESEAEVVRKIYDLYLNEGLGHKKIVDYLTQNKIPTKKNGIWHTQHVKHILTNPLYTGIQITHKSENMDINVRNIKEIPEDDWIIHKKPELQIISKDIWERAQDLAKKKLDMMMKNNVRPSSTNLFSTTVYCGNCGGVLRRKRKRTKRREGNGQYKMIWLDTFEWVCQNNDMYGVKRCNCRNSVDEEILLKFVKDEIIRYRDIKEVHEILLEKYIQKNFSYDENKANEIESNILELKQDYDNRQRLNGKGIITDDELEEFAKGYRIKISELERELLKIKNVRADIEEAKRQYEDFIKYINNVDIDNLTNMDLKKIFYKIVIRTDNNMLNEDGSFKDEYETLKEYPYLWINKSKRTVKIMTAEMMFMDNQEMNLLFGF

SEQ ID NO: 15013 - protein, 525 aa, synthetic construct
MQTGIAYARYSSDNQREESIDAQLRAINEYAQKNDIVIIKVYIDEAESARTDDRPNFLKMMADIKNGIIKPDCLLLHKVDRFARNRIDAAYHKYYLKKNRIKILYADPSQQFGDNPEGRLLEGIMESFAQYQSENLASEVMKGMKENAYNAKHTGGIPPLGYSLNANKELIINESEAIIVRKIFDLYNQGYGYRSIANELNSKGYRTKTGKMFSQNSIYDILCNEKYSGTYVFNKRSSKDPLGVRNNRRFKDESEIIRIPGAIPAIIELELFKQVQDKLRERKRGPLMSGKRFYLLSGLITCGECGATYTGNSYYHGRGGKKYYIYSCNNRSKGAGCKNKNIRQDIIEPFVIDELMKNVFSDEAMKKVIPQILKYAKTQGEESSNDLKAIQTKIKDIESKIDRLLDAIADGIADKLFAKQKMDKLKSEHDELKEMEQFYKIRTFDWATEENIKNFLLHNKEILLNGENEKKRSVVELFTHQIIIYPDHIDLDLKVDVDRDNVGGGEGSRTPVRNRIHKSFYGCIR

SEQ ID NO: 15014 - protein, 507 aa, synthetic construct
MKRAISYIRFSSEKQSRGDSLRRQSKMVTDWLKAHPEYYLDQDLSFRDLGVSGFTGKHLKGGLGDFLTAIEKGLVKAGDTLLIESLDRLSRQDVDRASELLRNILRSGVDVVTLSDGEHYTRESLKDPLALIKSILIMQRSHEESLRKSERIQAAWNRKKELISEGIKISKRCPAWLKLNDDRKSFSVIPEKVETVKRCFQLRLEGKSIWEIVRTLNDEGHQTLNQYKAGKFGQTSVQDLLKNRSVIGYFTPKGCCEIAGYYPSIIPESDFYKVQQLSHSRHGRKPVSDKPLSVNLFKGVIRCSECGHALIITGFSDTRNGIYRCPLRNENRCSAKGLSRKQTDGTLLTLLSRLDRFDSDTTNTIDMLRLHREHISSNIEKLVQLSLEIEDLNAITNKLKQLKNELSQVDADIEKETQRLKSIDTGSLSDCDLSTKAGRIEAQLIIKSAVKEVVLNTAKRRCKVTFHNGRLIDLPITENPSEDVTEAIQSLSEVTESGLIDVDVVEI

SEQ ID NO: 15015 - protein, 507 aa, synthetic construct
MKRAISYIRFSSEKQSRGDSLRRQAKMVTDWLKAHPEYYLDESLTFRDLGVSGFTGKHLKGGLGDFLTAIEKGLVKAGDTLLIESLDRLSRQDVDQASELLRNILRSGVDVVTLSDGEHYTRESLKDPLALIKSILIMQRAHEESLRKAERIQAAWDAKKEAAKAGIKISRRCPAWLKLNDDRKSFSVIPEKVETVKRCFQLRLEGKSIWEIVRTLNAEGHQTLNQYKAGKFGQTSVQDLLKNRSVIGYFTPKGCEEISGYYPAIIDETTFYKVQQLSYARYGRKPASDKPMAVNLFKGVIRCSECGHALIITGFSDTRNGIYRCPLRNENRCSAKGLSRKQTDGTLLALLSRLDRFDSDMTNTIDTLKLHREHISSNIEKLVQLSLEIEDLSAITSKLRQLKNELSQVDADIEKETQRLKSIDVGCLSDCDLTTKAGRIEAQLIIKSAVKEVVLNTAKRRCKVTFHNGKLIDLPITENPSEDVTEAIQSLSEVTERGLIDVDEVII

SEQ ID NO: 15016 - protein, 499 aa, synthetic construct
MELDATLTLKDEGLSAYHQRHVTQGALGVFLRAIEDGRIASGSVLVVEGLDRLSRAEPIQAQAQLAQIINAGITVVTASDGREYNRASLKAQPMDLVYSLLVMIRAHEESDTKSKRVKAAIRRQCEGWLAGSFRGLIRNGKDPQWLRWGDQGWELVPERVSAVRRALELYQQGLGAGRAANLMHQEGYELSSWGISGQQVYRLIKLPALRGAKRLSVDGEDYMLEEYYPRILSETEWAELQHLASQRHRRRGAGEIPGIITGVGLAYCGYCGTALVAQNIMNRRRADGSLADGNRRLQCTSYSKNGGCSASGSCSVVPIERALLNFCSDQLNLQRLLQVGDDGQGIRQQLVVARAAVEKIAKQLGRITEALLDDESGSAPVAFVRKARELESQQTAAQQKVAQLEYELAAVSGTSQPAQAGRWEELAELVEAGDYSAREKVRQLVMDTFERIVIYMRGLEPDGRKGRLIDVQLLSRTGQHRLIQIDRRSGQWVSSEDWE

SEQ ID NO: 15017 - protein, 513 aa, synthetic construct
MERVAIYLRKSRADLEAEARGEGETLAKHKKALLKLAKKMNLNIVRIRQEVVSGESLIHRPEMMELLKEVDAGFYDGVLVMDMDRLGRGNMQEQGIILDTFKKSGTKIITPRKTYDLRDEFDEEYTEFEAFMARKELKIITRRLQSGRVRSVEEGNYIGTRPPYGYQIVDDRSGRYLVPDPEQAPVVKMIFDWYTNDNPNERLGCGHIANRLNELGLRTYTNKLWNSSSVLTIIKNAVYIGRIQWKKKSYKKSLDPTKTRESKTRPQSEWIDVKGKHEPLISEEQFQKAQEILKKKYHVPYHLMNGITNPLAGLIRCVKCNSSMVLRPYTKQKPHLICKNRHCDNKSTRFDLVENRVITGLNTWLEAYQLQWSQEDMPKESNHKVDLIEVTIKNLQTEIKNLEAQKGRLHDLLERQIYDEETYLERSKNLAVRLNEVREAIERSFMELEKEKSKAKAQIEIIPRVKHVLELYPQLDDPKQKNTLLKSVLEFCIYRKEKHQRGEEFELTLHPKI

SEQ ID NO: 15018 - protein, 476 aa, synthetic construct
MKASIYIRVSTAEQAAEGFSLAAQQQRCTDFIKSQGWELGEVYKDDGYSAKDLNRPSMQRLIQDVKSKKFDVLVVYRLDRLVRSVLDLHQLLNIFDEHNIMFKSVTEVFDTTTAMGRLFISIVGAMAQWERENLSERVKMGLERKFLEGKRIGGPAFGYRIDEDGKMVIDQEKAQIVRWIFNSAKKMGINKIAKILNKQGIDSPKGGNWTGSKVAYLLRNPTYTGKIRYLVNRNGYGEKETIDSNHPALISEEEYNEVQEILKKRHGGRKKAHTSDYPFSTILFCNRCGSPYSGARQENKSGVTYYYRCNGTARGICQASTVLEERLVDELLNKINLIIEESKVALESEKEETDNKFRLKQIEAELQRIKKRRRKWQEAFANDAISLEELKERMNEEKEKEEALMEELEAFNTVPNETDVSKDEIIDALKNLKEIWYHLSRKEQKEILNMIFSRIYIKTEGERPHIKPIITDYELL

SEQ ID NO: 15019 - protein, 588 aa, synthetic construct
MKKDVKVIKGDTTLKRTASGCVQRSIKRVAAYCRVSTDTEDQINSYNSQVEHYTEFIQKNKEWTLAGIYADEAITGTQVDRRIDFQRLINDCMNGDIDMIITKSISRFARNTLDTLKYVRKLKEFNVAVFFEEENINTLTMDGELLLTILSSVAQQEVENISANVKKGLRMKMERGEMVGFQGCLGYDYDPETKSISINEKEAEIVRYIFRRYIEGVGGMVISRELEEQGYLSPRGNKRWTETTVLGIIKNEKYKGDLMMGKTYTVDPISKRRLDNFGEQDKFYIENHHEPIISEEDFEKAQGIRLRRSKNRNTVANNGGKREKYSRKYAFSSMLECGFCGHNLSRRNWHSSSEYTKVIWQCVNATKNGKKYCPHSKGIEEEAIEKAFMESYRQVCHNNVEITNEFLKTVEEELKDNSLAKDLKKITNQLDKILKKEKDLVELRLNESISMDIYQDKYNEIAISKEKLLAEKRTLEVTLTDEKALKKRLEGFKKLLESNKYLEEFDRAVFESIVDKIIIGGTNDEGEIDPAMITIIYKTGKKDSQDGRLFKSRRKNAKEVNEETDNKLYPHSSDEVNNLYSYPIDNTC

SEQ ID NO: 15020 - protein, 539 aa, synthetic construct
MSRTKKYVAGLYCRLSKDDGNSVESMSIWSQKVMLKQYAESNSIAIYDYYVDDGYSGTNFERPSFKKMITDIENGKINCVITKDLSRLGRNYLQSGAYIEMYFPQKNIRYIAITDGIDTLNSNQNDIMPFKNILNEMYAKDTSKKVKSAIQSRMREGTYIGSKAPFGYLKDPNNKRRLIIDEKTKPIIELIYKLCLEGKGTQLISQELMKRKIPRPSAFVENAEKLYGLTEENKYQWSHRMVLNVLRDPVYCGNMARNKRPTLSFKNSKRMYIPKSDYIYAKDTHEGIVSEEIWEQVQTMIDKRKCNNKKGLYYDNIFQGLVRCPKCGYALTPKTDYRLKKKELIDFVHFSCSTYKKYGVNACSSHRIEARDLYNIVLEDIQYHGSMALSAKEDFVEKIIEKIEVEKIDEGKELSNKLELKKNQLAELDRSYEQLYEDRLEGNITERNFNLMNVSISKKQDKLIEEIKVLEGDIEVSFETEDNYKKFMNNISKYAKIKSLNRYILNQIIDKIYVYDKEEIDGQISQKVEIHYKFIGKLN

SEQ ID NO: 15021 - protein, 514 aa, synthetic construct
MKAALYARFSSDNQREESIDAQVRAMKEYSERNDIQIIKIYTDEAKSATTDNRPQFRQLIKDSTLGLFDIVLVHKLDRFSRNRYDSAFYKRQLKLNGVKVMSVLELLNDSPESIILESVLEGMAEYYSANLAREVMKGMKETALQCKHNGGIPPLGYDIADDKTLIINENEKHAVILIYTLYSNGFGYNEIVDELNKKGFKTKLGNSFGKNSISEILRNEKYIGTYTFNKTNRQFAGKNVKKIKGEEEIIRVEGGTPQIIDKSLWNKVQLKLNKNKRAKGSNSAKENYLLSGLLVCGSCDGAMVGNRKRAGRNKDMYVSYECSTRKRTKQCNAKSINRDFIEEFVVNDLIEKILSPNTLEYISTKIYNSAIKQQEIIKSDVKIIEKKLIEIQKQIDNIINAITKGMFHESMKEKMDELENEKNNLKIDLYETKVQFEKYSPKIDHIKKYLSNDSNIKTKEFHEQKEIINRYIKKVLLNEDKIEIHYIVDFDDGGGGSRTHVRKYFHKTFSECRR

SEQ ID NO: 15022 - protein, 541 aa, synthetic construct
MAKNVQIIRPVKQQVIQQLQPKKRVCAYCRVSTDSREQHNSFSVQMDYYKNFIDNQEDWEFSGIYADEARSGTKLQKRDDFLRMMKDCEDGKIDMVITKSVTRFARNTVDSIQAIRRLKELGIGVYFEKEHINSLSEKSEQMLTILSSLAQGEAESISTNNKWAVMKRFNDGTFTISCPAYGYTKDENGELVIKEEEAAVVRRIFRDYLHGKGTYLIAKELTDEGCPTIRSGEKWSDGVVREILLNPVYSGNLLLQKTYTTEVLPFKRKHNRGQVPKYFIEDNHEPLITPEQAEAVREIMEYRSKQHAVDSEKCQNRYGFSSKILCGECGSTFRRQKIYIGKPYEKIQWCCHQHIEDKTKCGQKAVREDILQCAFILMWNKLTSNYADILLPLLEVLKKLRMDEQQEQEIEDRNNKILELTEQGHILSRLISKGYMEPAVFIEHQNALALELTAAKKKRNQLLDNNGFEREIAGAELLLELIKNNPGILEAYSEDLFSQAVENVIIQKEQITFRLINKLELTESIGKEEDQNGTASYAHRI

SEQ ID NO: 15023 - protein, 549 aa, synthetic construct
MQTAVAKKKNISIIPPQPEYDRSIKIQYKALRVAAYCRVSTLLEQQEGSYEAQITYYTEKIKSNPNWKMAGIYADDGKSATNTKKRDDFNAMIEDCLAGKIDMVITKSVSRFARNTVDCLQNIRKLKEKNVAIFFEKEGVNTLEGSGELLITILSSQAQEESRNLSENTRWGLVRRFENGIMSINHNKFMGYTKDENGDLVIVPEEAEIVRRIFRLFLEGSSYVQIAKILESEGILTITGKKEWCPSVIDQMLQNEKYMGDALLQKTYTVDFLTKKRVKNQGIVQQYYIQDNHEAIIPKELFYRVQEEKARRASLCKSAATRRAKKEQSKYSSKYSLSDIMICKECGKPYRRQVWSKNGQKSAVWRCENRLKNGTKYCKHSPTLKEDVLNEAVMTAINSVVENRGDFVGAFRENVIQVIGSYSTKNVPTEYDEQIAKLQGEMLTLIEENAKMGSITEDFDEQYHKIAERIKELKQKKLDSIRDQKRAADFQQRVSDMDTCLKKVSCVVRDFDDDLVRRLLQSVKVINEDTLEIQFKSGIVMKQRVSYYE

SEQ ID NO: 15024 - protein, 594 aa, synthetic construct
MNRSGKKCVLYPRVSTEMQVDGFSLDGQKHSLKRFADREEMEIVDIYEDAGKSGKSIEGRPAFKQMLFDIENGLEIDYILVYKLSRFGRNAADILNSLEHVQAFGVNLICIEEGIDSSQTSGKLLISVLSAVAEIERENIIEQTMNGRKEKARQGGWNGGFAPYGYYLKDKQLFIQEDEAEAVRIIFDKYLKENMGFHKIANYLNLQGIQKIKRNNGTLSGWGTHFVRMIIDNPVYCGKISYGRRVREKVKGSKNECKQIPQENYIIAEGQHEAIISEELWNAAHEKRELTGVKSPSKIGRDRAHLLSGILKCPKCGGPMYTNKHAWTNKDGTYKEIYYYVCSKARTARGKTCDYKAMLKKTDIEPLVIEAIRELIKNQDFATEIKSRIGKEIDTSTLNRELKNYESKLREVELNKTRLENEIDSLPEDTRFRERKVHDMTLRLDGLYDIIVELEEKIEDVKLRRKAVEQDAITLENIYTLLANFDLVYDKISDDEKKSLISSLIKEIEIFPCDEAELPLKSILFNFPVYKDGEDACEFLWDKSTHVSVCLERSKKMPLEAGTPLEASYIAEISRLGKVIFSSIWCLILRYSSK

SEQ ID NO: 15025 - protein, 415 aa, synthetic construct
MKNVRIIPAKPKENKKLKVAAYCRVSTSGSEQLRSLEIQISAYTKMIKSHPNWIFVGVYYDIESGLRRSGRKSLDKLLKKAAKGKIDYIITKSISRVSRDTLEILKITRFLRERGINMHFENEKLDSIEADKEFEITLRGMLAQDESRNISENIKWGIQRKFEKGEILTKYKNFMGYTCVDGEIVIVPEQAEVVRKIFDLYLQGLTLGQIKDYLEAQGIKTVTGKEIWDTKTIQRMLTNEKYKGDTMFQKTFTEDFMTGKKSKNIGQRNKYYVKDSHAAIVSAEIYDKVQEEMAKRARLVTSEDGTVEISGSKYNGKYFLGNLLVCGDCGASYRRRTERGKVVWRCATRIEKGKDACPHSPTMDEGWIQDVLAEAVCENGGYDEGIIRNKVARIQIYNLYTMISYKNGEQTKICF

SEQ ID NO: 15026 - protein, 521 aa, synthetic construct
MAKITKIEKRQQINRVKKMRVAAYARVSTESAEQLLSLEVQKEHYENYIKANPYWEYAGLYFDEGISGTKIEKRESLLKLLDDCEKGKIDRVITKSISRFARNTVDCLEMVRKLTGLGVAIYFEKENIDTEHMSSELMLSILSSIAESESRSISENSKWSLKRRFENGTYVISYPPYGYENVDGKMVVVPSEAEIVKEIFRMAISGLGSYLIANELNKRGIATKKKSKWHSSTVQAILKNEKYTGDVIFQKTYTDENFNRHQNRGEKVRYMMKNHHEPIISHEDFELVKTVVGQRRKEKNIDGSDNKYQKRYALSGKVYCGECGSKVKRCMRYAQSGDYATWTCVRHIEDKKSCNMKYIREEHIKAAYVQMMNKLIAGKNTMLKPFVDTLRGGNNKNRLRHILELDEKIEKLNEQAQVLTKLLSSGYIELDVFYAENNNISLELDELEKEKTSLSSIVSGDLNHLNEAQKLLRFINKSDCIKVFIDDTFSEFVEKITIEDRLKFTFHLKCGLNLTEEVIVK

SEQ ID NO: 15027 - protein, 550 aa, synthetic construct
MPHSPRVALYARYSSDHQREASIEDQLRLCRERCAKEGWTVTAVYKDSAVSGASLLRPGIQALIEAARRGQFDMIVAEAMDRLSRDQEDIAGLYKRMEFAGVRITTLSEGEINNLHVGLKGTMNALFLKDLADKTRRGLRGRVEAGKSGGGNSYGYDVLKKLGEDGDPLRGERVINQREADVISRIFRDYADGASPRAIAYQLNEDQISGPRGRDWGQSTINGNRQRGTGILNNELYIGRMVWNRLRYIKDPETGKRISRPNPEEDWIIKDVPHHRLVDQGLWDAVKARQGTLDQRRPMQDNNALGGYRRAKYLLSGLLKCGKCGGGFSMYSRTHVACSTRRNKGTCDNALTMDRQSLEATVMEGLKSRLMEPAYFREFCAEYTRDINRSRKAQVASLAAQRREYDKIDKEVDKLVDALCQGIPAAKVKDRMITLEQRKGDLEIILSQAAVPAPLLHPNMADAYAEKLERLTDSLNDPEILTQASETLRSLIEAVILLPVGDRLEIELVGDLAGILHFVDPTKNTATDKSGRRQFPLVAGIGFEPMTFRL

SEQ ID NO: 15028 - protein, 640 aa, synthetic construct
MEEIVRCACYTRKSVEDATLDRDFNSLTSQREACENYIASQKSKGWVCLPEHYDDGGYSGGNMNRPAMTRLKEDIKAGKIDMVICFKLDRLSRSILDFAELQKFFEENNVHFVSVTQDIDTSTSSGRMLLNILITFAVFERDLIIDRVKTAIEGGKKRGKFCGGVPMLGYRSDPFTKKLLIDEEEAKTVRLIFEKYMALESIQATVAEINRLGLKTREWVSVSTGKKHMAKPWNTSSIHRILTSPIYAGYVSHYDTNYEGEHEPIIPRPQWEKVQQMLTGNSPVKRGQKRQRNSHPFSGLVRCGHCGCALTPTFTSKRGKKYCYYTCSALNKNAAHECTVKRIPAGDLEQTVISQLVGLFRAPAILRETLKAVRQKEELLLQNSERDCEMLQAHLTELKQRALKEEIDYDEVKKAATLLAEAKRKRSLLREPTTEDEIIAALGDAAGLWEFMFPGARQELIQLVVGEIVVFPERISFVLKVDGLKDLASEMAIGGYFNQPHGNPAEIPESRQDILDDGSIRITMKLELKRIEGHRRVVIPAPGAERLKQTSLLRAINNARKWMDMLINGEAQNVTDLSKQLGLKTGYVTRILSLNSLAPDIVEAILAGIEPDGLSIAKLTEQPIPEDWNEQRRLYGFPER

SEQ ID NO: 15029 - protein, 498 aa, synthetic construct
MKYIIYARVSPRGSDFEGETSIQMQIDMCRQHIEAAGDEVVSVISDEFYSGKTMDRPGMNQIMCELQSGTAPWDAICFYKMSRLSRSQRDSVNFLAELADHGKGFLSITEKYDYSTPIGRAMLGVMQVINQLEREQTSENTRNKMISIAAKGLCPYGNPPRGYKRREKGDNQLYLDPRRAEEIKDIFQMYASPDYTMQDIQRRYRCLSKQAILNILRNQTYLGKIVYAGQIYPGKHPAIISQALFDQVQEMLPRAGSGLNLRKKAHKRQYLLSGLLRCKCGRYMSPASAKSGRYFYYECTDDLNCKNRIRAEAIEEEALNQLQHLNRKIDYKLIEAGWAEVEQRHQEYVNALRPELENCREAVRQAKAEREKIIELLMSGHLSETNAPIFNARLETASKEVDRLTARIEGLEAECSNIGYDPDRALQFVREIETIADIMAHIPGDFEQQRRILVTHIKQIAEQPDGSFRFYFNFEPPKSSTICQVWLRQLDSNQRPSG

SEQ ID NO: 15030 - protein, 452 aa, synthetic construct
MSRKTAIDTTAKVPCAVYTRKSTDEGLDQEFNSLEAQREACLAYITSQKAEGWIPVSDHYDDPAYSGGNTNRPALKRLMADIESGKVKCVVVYKIDRLSRSLADFTRLMETFERHGITFTSVTQSFNTATSMGRLTLNILLSFAQFERETTADRIRDKYAASRQKGLWMGGHPPLGYDIRSRELVINRDESEQVRYIFRRFAECGSPTQVVRDLRAAGIQNKSWTTASGVHRPGKPIHKAALYRILKNRVYLGEATYKGESFPGRHKPIITQELWDRVHGLIDEHRRDRTTLPRGQTPFPLKGLVRCGHCDMAMKPTHSRKKGQIQYRYYICINAARAGHDQCRLPSVPAAELERLVLDHVRRLIQTPEVVAKALQQVKRNGAKRPDRTVIKQLTSLDPVWEELFPLEQNRLLKLLVESMVVTTTGIDLRLRVDGLGALVDELVNEEERNVA

SEQ ID NO: 15031 - protein, 447 aa, synthetic construct
MSKKHTPKKIRCAIYTRKSTEEGLDMEFNSLDAQREACEAYIASQQHEGWLQVPDRYDDGGFSGGNMERPALQRLLRDIEAGRVDCCVVYKIDRLSRSLVDFTKMVELFDQRQVTFVSITQSFNTTTSMGRLTLNVLLSFAQFEREVASERIRDKFSASRKKGMWMGGHPPLGYDVANRRLVINEAEAVTVRMIFDRFIQIGSATDFAKELRENGLRTKSWTSSKGTFHPGKPFDKSAIYRILNYRAYIGDVVYKGEVYPGEHEPIVTLRQWNQAQSILQQNARKRASRARAQTPSPLKGLIRCGHCHRKMTTSHSRKGGRLYRYYLCGTAAKQSHSDCPVGNIAAGEIEELVLSQLQRMVSSPELIARTWRSANDQSDSKHSEKDIITAMQTIEPVWSELFPGEQTRLIQLLISRIEVRTDGVKIHLRVNGLTSLADELANQEVAA

SEQ ID NO: 15032 - protein, 526 aa, synthetic construct
MAKQVTTIPASIKPFSKTPLTTSRKRRVAAYARVSTDSDEQFTSYEAQVDYYTNYIKARNDWQFAGVYTDEGITGTNTKKREGFKRMVKDALDGKIDLIVTKSVSRFARNTVDSLTTIRKLKEHGTECFFEKENIWTFDSKGELLITIMSSLAQEESRSISENCTWGQRKRFADGKVTVPFKRFLGYDRGKDGNLVVNPKEAKIVKRIYAMYLQGKTYHLIAKALTEDGIPSPAGKPRWNPSNIKSILTNEKYKGDALLQKSFTTNFLTKEHKINEGEIPQYYVTGNHEAIIEPEVWELVQREMERRKNEKGRHSGVRLFSGKVYCGECGTRLGSKVWHSNDKYKQVIWQCNRHCKKNSPCKNGMHLTDKELKAAVLSATNKLIENKDEILNSFQKIVGGVYDTHTLEGEKAKLESEMDVCAKMIEDLIRQNAAIPQDQSEHQAKYEDLERFYNEKKAALAKVEGKLKKMQATKADIKFCLKQLQKQDRLLQTFDEQSFCALVDHITVYSKNDIRVTFRNSTEIRL

SEQ ID NO: 15033 - protein, 523 aa, synthetic construct
MSSKVIVIPAKKKKGNSIKESEKKKLRVAAYARVSTDSDEQATSYDTQIDHYTNYIKKNPDWEFAGVFSDEGISGTYTKKRAGFNKMIEEAMEGNIDYIITKSISRFARNTLDCLKYIRKLKENNIPVYFEKENINTMDAKGEVLLTIMASLAQQESQSLSQNVKLGFQYRFQQGQVQVNHNRFLGYTKDEEGKLVIVPEEAKIVKRIYREYLEGASLRDIKVGLEKDKIVNGAGNKKWHVSNLNQILTNEKYMGDALLQKTYTVDFLNKKRVKNDGIAPQYYVENSHEAIIPKEIFMRVQEEIDRRANMVSGKGKRRIYSSKYALSSIVYCSKCGDIYRRIAWNNRGKKYTVWRCCTRVTHGPDACHARTIKEEDLQEAVVEAINQLISESSELKETIKENIEKAITGDGSGQIEEIDKEMLKVQEELLKVANAKKDYTDLVERVEELRNEKEKILLEMAEEKNEQSRLKELEEFLDNQELEIESYDEELVRKLIDKIVIYEENLKVVFKSGLEVEIDKDKK

SEQ ID NO: 15034 - protein, 520 aa, synthetic construct
MKKITIIEANQKEESTLRVAAYARVSTDEEAQLVSLKTQKAHYEKMIAENNSYTFAGLYFDEGITGTKKECRDGLLKMLKDCEDGKIDFILTKSISRLARNTTDCLEIVRRLLDLNIGIYFEKENIDTRTMESELMLSILSSLAESESRSISENNKWSIKKRFQNGTFIISSPPYGYENIDGKMVVNEEEGKIIKEIFEQYLSGKGTHKIAEDLNKRKIKGQKGAKWHGSTINGILKNEKYIGDVIYQKTYTDENYKRHKNKGEEDQYKIIDNHEAIVSREDFQKVQGLIKIRAIAKENGKNTKRYQNRYSLSGKIKCGECGSSFKRRHHYNGKEKYIAWTCSEHLIDINKCSMKFIKDKDIKVAFITLVNKLVFGKDRILMPLLESLKRVDSKKEVAKINKTEESLEKLRERKEVLNKLITSGVLDASIYAKESSEISSEESHLLREKERIKKAILGNDEEIRELEKLIEILGKSEMIDHFEDDLFEVIIAHIQVVNRETLDFHLKCGLVLREEVKEDV

SEQ ID NO: 15035 - protein, 520 aa, synthetic construct
MPYVAYLRKSRADQEAEQRGEGDTFARHEKILIDLAQRQKLPLTDIYRELVSGETISARPVMQQLLSEVEAGLWDGVLVVEVERLARGDTSDQGRVQKTFFYSNTLIVTPMKTYDPTNEYDQEYFEFGLFMSRREYKTINRRLQAGRISSIREGKYPGNIPPYGYLREKLPKEKGFILTPHPEQAPVVRQIFAWYADTENHLGVAKIATRLNQQHVPTFKGNEWTISTVQRILQNPVYCGYLIWGRRAHVKQMKNGEITTSRPWSKNYEKVKGLHEPLVDEETFDRVQQLFMLHPRRPVPKKKIMQNPLSGLIVCGMCGRKLQRRPYNSGRQATLICTQAGCANVSSDLRIVEQAVLESLRKWLEDYKTETSIDPDRRLNAELEGLKQSLHSLYEKQNELFKMQQRAYELVEQGVYTTAVFLERQQQLTAQRNNLEASISDLENQVSALENERETKKQLIPKVQHVLDVYGYAETDEEKNRLLTSVLEKVIYMKTTNNRWSTENDMELTIFPRFSLSCNH

SEQ ID NO: 15036 - protein, 490 aa, synthetic construct
MQPTPTPDDIRIGAAYIRVSTDDQVEYSPESQLVEIRKYAKANNIVIPDEYVFVDEGISGKSTNKRDGFMRMIGVAKTKPRPFDVVLLWKFSRFARNREDSILYKSMLRRELGIEVVSVSEPIGDEGMSIIIEAMIEAMDEYYSINLAGEVRRGMTQRAKEGKPNTYAPMGYRMQDGEYAEDPDAAPVVRKIFEDFAGGKPLVTIARELNAIGIRTRFGNPLENRSVEYILRNPVYIGKVRWTPTGRTRRDWDNPDTITVDGTHAPLIPRGLYDEVQHLLDEQKRKYAPHGRRDGHMFALKGLLRCSSCGSTLVLSSKTRTAKGGPSVQCHRYARGQCPESHSIQLAAITEAVFDRIEQDFQTLNFGVMAADGQRMKSSNAAQLLGRQIAREEQKLERIREAYEAGVDTLEEYRARKAAIEGRIAALRESAPAPGEAVTPAAFAAAHQDALQKLRDEGVTDADKNDALRRFIRCIIFDRKNNCFQIQYYA

SEQ ID NO: 15037 - protein, 680 aa, synthetic construct
MSVKQTESKITALYERLSRDDDNAGDSNSIVNQKKYLESYARQRGYTNCRHYTDDGWSGGNFERPAWKQLIADIEAGKVAHVIVKDMSRAGRDYLQTGFYTEVFFRQHGVHFVAIANSVDSDDQNSNEFAPFLNIMNEWYLRDLSRKQKTAIRVKGESGKPTTNCAIYGYKKDPENKYHWLIDEEAAAVVRRIFRLTIEGKGPYDIARILFEDKVETPAVYFGKQGKGIWKSKEEFSNPYNWSGYVVGQILSKPEYMGHTVNFRSHKQSYKDKNAVMNPREDWLIFEDTHEAIVDRETWELAQKLRKTPKRIDTLGEANPLTGLLYCADCGEKMYNHRSKGGTENNPYPSDFFDCSAYTLAHQKRTSACFGHYISTKALRTLILDTIRTVSTFAISNQEAFMEKVRSASQLQQAEAAKDAKRKLSKDKKRIAELDTIIKKLYESFAVGRITDERFDRLLADYEAEQKALQTAVAEAEEKLSAFAEDTARVEQFLELAKKYTDFSELTTPMINEFIEKIIVHAPERIDGDRVQEVEIHLRFIGQFELPAPELTEEEIKRQEQLKRHRIKSRERYQKIKAGEHAVGQPFMLTCKCCGQEFASKRTNTLFCGPNCRAKFYRQEAAESRSRECTCENCGKVFPTTRSSVKYCSDACRYAAQIKRQGARKKALREAKNEEEIKTS

SEQ ID NO: 15038 - protein, 520 aa, synthetic construct
MKKRKAILYIRVSTDEQAEKGHSLAHQDDSLRKYCAMHNIEVVAFFKEDYSAKTFERPQFNKLLEFQRKNKGMADLLLFLKWDRFSRNAPEAYSMIAKLHKLGLEPQAIEQPLNMEIPEQKFLLALYLTAPEVENDRRSLNILAGVRKAMKEGRYMGSAPYGYKHGRTENNKPTIVPSKEKKMVLQSFEMMATGLYQIEELRRMLYQKGMPLGRTRFWYMMRNPTYMGKVFVTAYKQEPACLVKGVHEAIVPEALFYDVQDILDGRKKKEQPVTICQQDELPLRGFLACAKCGKPLTGSASKGRNARYYYYHCKAGCKERFRADEANGVFYDVLRAVSANDKIFRSLELIMGGKHKDATDDRAEELATLKKQLDTYEQRLERAQLFMLDGQMDFMEYQPIKSKLQEDIHRIRIKIDAIEEVKPKDETAIMEYGFYFLANLDKLFTAADLEVKRRIIGSTFPEKLIFENNRYRTASDNNVLLLIAATGKGLGVKKESRLEKSNLLSRRVEAHGIEPRTLCL

SEQ ID NO: 15039 - protein, 494 aa, synthetic construct
MNTKKVGIWIRVSTDYQVKDESPEHHEQRAMYYCKSKDWEVVEVYRLDAISGKTVMEHPETQRMLSDIRSKRITGLVFSKLARLARNTKELLEFAEIFRNEKADLISLAEQIDTSTPAGRLFFTIISAMAQWEREEISSRVAASIPVRAEMGKPLGGQASFGYQWINKQLVIDENEAPVRKLVYEIFKECQRKKTTADRLNSLGHRTRNGSQFSDTTVDRLLRDTTAKGVRLANYTKSMGNGKQWIVKPQDEWVQRPCPAIISEELWLECNSVLDEQKVRRVKIGKPSENLLAGIVKCHCGAAMYVYANTKSFSCRKCKNIILEIDINEIFQDLLKQYLEGVTPQMFIDEIEQAIKKDELLLANSVKSLSRIQKKMDELVELRISKELDKEHFANLYKPLEKQFNELNQSIPELEAKIDLTKIQLKSSDYILNEAKSLSEKWDLMDLPQKKAIAETITEYLIVNAGDIDLALTYLPGSAHNCPRNLRDSSRPPT

SEQ ID NO: 15040 - protein, 533 aa, synthetic construct
MKRVYCLYRVSTKKQVDKNENDIPMQKNACHDFVIRQNDWSILKEFSEKGVSGYKVSAQNRDAIQELKDAAVKNEFDVLLVFMFDRIGRIDDETPFVVEWFVKHGIEVWSVQEGQQRFDNHVDKLMNYLRYWQASGESQKTSMRIKNSMEQMEIAGLYTGGPVKFGYRLVDSGLVNKKGQPIKKLEIDPAEEAVIHLIDDMTVHNGYGSWRMAQYLNEHGYKTHTGKGFTSMKIIRILRDSYYCGILPDGRTSEALQKLRIRSDDMAKQIGFILDQRNMKNEEKRHVARNTKGKALLSGNVFCAHCGSRLVTIRYTDRYIRADGSEYSVEQAKYACYHKSRKLCECDGQTTYQADQIDKIITQIIRKLFSCMTGAPEEEKLQLLFKQQIARNRAEQKKATLEISKSKDQLAKLQMEIGKSLTGDSVYSPEDLSQAITVLKEKISAVENKLVKLQDEEENKKSSVDLITSAYNQFKSWADEFDTATLEQKKMIACQLFKRVEVGRDYKVSVELNMTYKQFCNEWGNEASIYMAV

SEQ ID NO: 15041 - protein, 540 aa, synthetic construct
MNETVPKLTIIPANPELAEKKSIRRQLRVAAYCRVSTDSEEQMTSYEAQKTYYTDKIMQNPQWSMAGIFADEGITGTSAEKRPEFLRMIRLCRKRKIDLVLVKSISRFARNTVDCLHYIRALKELGIAVIFEKENINTLDSEGEMLITLLGAFAQAESESISQNVRWGIRQAMREGRISLRCKQLYGFTEDENGQPQALPDEAEVVRRIYKSFLRGQSIRMIKGWLDAEGIAPRKGKEWSLSSVENILKNEKYCGDVLLQKTFISDCISRKVIKNVGQLPMYLIENHHEGIVSRETYQAVQAEFARRGSRRSPNKRAAATGLSSYTSRYALSDRLVCGECGTLYRRCTWVRKGGKKIVWRCSSRLDYGSRYCKHSPTMEEGALQRAIMAAVNSMMEDKTRLVAAISDAIRSGLAPDATGSLTPAVIDKELTRLDQEFQELLQYAAENGGYMDYAEKFKAISEQMGDLREQKALILEAQQADLAVNGRIQQAEELLNSASPEITEWDEELIRQAAETVKVLSDHEILVCLRGGIEIRQEVI

SEQ ID NO: 15042 - protein, 532 aa, synthetic construct
MGKGPVTEGSLARKQVIVIEADKAPRPQKLQVAAYARVSSDSADQQNSFLAQTRYYTTYITSHEEWTFVDLYADEGITGTSAEKRTEFQRLIADCKRGRIDRILCKSISRFARNTIDCLETIRELKNLGVGVYFEEQNIDTAQMSGELLTTIFAAISQKESESISENMKWSYQRRMESGGYIPSSLPYGYELCNGKIQLNPSQSAIVRRIFQEYLSGDNMRVIIERLNADNIPVKSADPEQKWTINSLSYILSNEKYIGDSLWQKTYRTDTFPRIRHINRGEQPQYYAEQTHPPIISKEMFQQVQQLKQHRLQKNGSRIGPITPLHKKLYCGICGGGFRRKNCRNITYWSCVSHEQNQSNCPITQIPEREIQAAFLRAYHRLRMNGIPVLKQLAANLRKIREQRFLWRVDIVELNKQIGSLMDQNRMLAEMQKHGLLDSDLFLSQTNGIAQKLREAQAQKERLLGENEDQTLEQTKELLESLSSMPEFLPDFDEGIFVELVEQITVESNTSLCFCLKNGIKLRETIERSVRR

SEQ ID NO: 15043 - protein, 546 aa, synthetic construct
MENKKKRVYCLYRVSTKGQVEKNDIPMQKECCRAFAQQNDWEIVREFSEKGVSGFKVSAKNRDAIIEIQQDAIKKKFDILLVFMFDRLGRKDDETPFVVEWFDHNGIEVWSTQEGRQRFDNHVDKLINYIRFWQASGESIKTGIRTKTRLDQIVKEGRWRGGTPPYGYKLVKKGKYNKKGHEVYDIAIEPGEAKVIKLIFEKYVNEGYGAQRLEKFLLQQRIFNRKGENFTNTTLIKMIQNPAYTGILRNGESKSEIFPDLQIIRPELFRQAQAIRKDRAMKHSDIPFNSKGKSLLPGKVYCGHCGSKLVLTTSGGRAVQEGERPEPRLRYQCHYKVRHPQSCDGQSGYEAKKLDSMVDETVRLLFARIKAVPAKSFISRQLEKQLGQNEERLKRVRKENTKASVELESYKSEVLKVIRGTSSFSRELLRELIEKSEKQVQETRTKIEEIEKTAADLAGAIARANEQYHQVLDWSELYDKSTTEAKKMILAQLIDRVTIKKGYQLDIAFSVSYEQFMEVCKTREKKAQIEQEQPTPKKKKNLEMVR

SEQ ID NO: 15044 - protein, 502 aa, synthetic construct
MLGAIYARYSAGPNQTDQSIEGQVADCQAYAERNGIQIVEIYADRHISGKSIVGRNEFQRMLHDAEQHRFECVIVWKIDRFGRDRQDIALSKMKLKKAGVRLLYAEESVPEGPEGIILESVLEGLAEYYSADLRQKIVRGMRETAKKGQYCGAPLPIGYTVDDEKHIIVDEEKAAVVREAFRMHNAGAQTKELVELFRKHGVTGQRGKPITQAVIYRMLRNEKYLGRFEIQGVEILTDPIIDMATFEEAAKHFGTPRNNAAGRAKVDYLLSCKCFCSYCGAMLNGESGTSRTGKVYHYYKCGAKKRGEKCELKPIPRDHFEDRVIEATVEDMLTEDMIEKLTVRILEIQEQEDALDPAAAYRKQLDSNRKRQRNILDAIEEGTGARGLAGRLAELEAEEEELLVEIERAEMKKPRLTSEAVGAWLRSFKNGDTKDAAFRQRLVDTFIARIEVRNGQAMIFYNIQEKGPHSKVRVRSEWWRRGELNPCPKTHSHEPLRVQFVV

SEQ ID NO: 15045 - protein, 651 aa, synthetic construct
MSNTAMANTAQALMDSMTPKFAVSYLRVSTRGQAERGGGHDEGFSIPAQREANKKKALSMGAMVGKEFVDRGASAKSADRPQLQAMLEYVKENADRVDYVIVHKIDRLARNRDDDSDIMRVLRECGVQLVSASESIDDTPAGMLLHGIMSSIAEFYSQNLATEVKKGMGEKIKGGGTVGRAPIGYQNVRLVDDKGREERTVITDPERAPLITLAFEEYATGNWTVADLADHLAACGLNTRSTPKISSQPVTLKTLHKVLVNPYYKGVVKYKGVEYPGSHEALVDTETWDKVQAILASRINGTRNLKHPHFLKGSIFCAYCGERMMVSNEKKKDGTIYPYFVCSGRHSKRRKDCTTKAVLIDVVEKEIEKIYEAYQLPPEVRILLESCIQEIISTERAKYDAELDGLKGEKAKLENKRKKLLEAHYCDAIPLDLLKSEQQKIAKELSSIEHEIKMHDTTFEQITENLKRALDIVENCGEAYKNASDTIKKLMNQAIFEKFYISNDADMEFKVDAEFRPPFDQILEPVKDDIIRINRLAQDCSSKLSYYIGIAKDHIQEIFGCGLYTINNSTNMSTYSNGSNFFSHNSSSKVLLVEARRVELLSESLSTKLSTSVVYLLRSRSRLPANRLPAAVSLIKPESRQGTRKTSSPQK

SEQ ID NO: 15046 - protein, 528 aa, synthetic construct
MNNAKRVTVWEPIDIQAMCEEESEIPKLKVAAYARVSTEQDEQQSSYEAQVDYYGKYIRSNPAWEFVGIYADEGITGTNTKKRDGFNRMIADAKAGKIDLILTKSISRFARNTVDTLQTVRELSALKIEVIFEKEGIRTLDKQCEVMLTIMSSLAQEESRSISENVRWGMQKSMQDGNISLPYKRFLGYRKGEDGRPEIVPEEAEIIRDIYKMFLDGKTIRTIADTLTEHGIKTPGGKDRWSVSTIKSILSNEKYKGDALRQKTYTVDYLSKTVRKNNGEVKQYYVSNSHDAIIDEDTFNLVQAELERRSNFRSALRDNSVFSTKIICGECGYFYGRKVLHSNSKKHRKVVWYCNHRYDGEEKCTSPSISESDIKKYYLEALKKLLSNKDSYITECQERLENEDILVQLKETRLQAEISLENLMVEIQELVHENARKSQDQQKYRAKFNQLVQQIDEQKKRIADLKAEELKTVGMREKLHRFVETLENYQDVTVFTEQEWNNLVERIVVKPDSLDFKFKNGEKIKITI

SEQ ID NO: 15047 - protein, 437 aa, synthetic construct
MQITEINATKLPDIGIKRVAAYARVSSEKGEALHSLSAQISYYNEYISNHIGWEFAGVYADEGISGTKDSRPELQRLLADCRKKRIDLVITKSITRFARNTVTLLDTIRELKLLNIDVLFEKENLHSLGANGELMLTLLAMYAEEEARSASENQKWRIRKMFEEGRPNTGRMLGYYLKDGQLTIIPEEAEIVRMIFDDYLSGMGRLAIAKKLNAIHVPTVRGCDDWREGSIYRILHNEKYTGDMILQKTYVEDFRTKKGVINRGEKRKYFVENSHEAIISKEIFERAQAEAERRKAKIKLPEKRMKTIFTGMLICACCGKHFNRRVANASTKYAKPAWICATFMRKGKKYCNNRQIPEKILIAKTKEVLGLPSLEDIDLKDYISEIVCGKDYDLTYIMNSGAEVKTIWHPYSRKDSWNEEMRQQARNRTLERSTLYE

SEQ ID NO: 15048 - protein, 511 aa, synthetic construct
MTKTITELTSQKQTNRMIRLAPYARVSSNSEDQLHSFAAQVRYYTDYTRNHPGYTLVDVYADEGITGTCMEKRDDFNRLIRDCKKGKIDRIITKTIARFARNYTELLTVTRMLRTMGISIYFEEQGIDTETIDLEMMLTLPGIAAQKESETISDNMRWSYKKRMETGEFNCCRAAYGFKLTDGELRINETEAEVVRRIFHLYLQGYGKQSIANLLNEEGVPKRYGQKTWHLFTIDYILNNERYMGDALLQKSYTTECIPFKKKRNKGEVTQYYVENSNPAIVSRETYMAAKELQRSKTVRCPSQPNRYPLSKMLKCPVCGHNYRRQIVNGTAYWICSYKSSGRTQCACDRVREVTVMAAFSRMSSKLADNCDELLGSFIRQLEKLQNRTCTYGEKVYMLNRQIADINAQILVITQLHKNGILNNAEYAEQSSELDRKVTELRSERHRIMAEDEDDEIIESLKVLNETMSEYKPTGAFDEGLFGQIVESITVISGQKLSFRLAGGLVLTEKI

SEQ ID NO: 15049 - protein, 514 aa, synthetic construct
MAAYCRVSTKQDEQLNSYENQVNHYTDRINREAGWKLVGIYADKGITGTSMKKRDEFKKLIRQCKRGKVDMIIVKSISRFARNTLECILITRKLRDINVDVYFEEQNLHSIEPSSEFYIAIYGSIAQSESENISHNVAWGKAQSAKEGNVFIAYKSFLGYRKGADGKPEIDPEQAQTVRLIYNEFLAGKSLQQIASNLTETGVPTPMGKTVWQPGVVQSILSNEKYKGDALLGKTYIKDCISKKVIVNAGERTRYYVENNHPAIIDDETFALAQEELARRASKRKVKQIGSTTEQGKYCGKYALTELLVCGECGTPYRRCTWTVNGKKRIVWRCISRLDFGKKYCHQSPTMDEKPLQDAIMQAVMKVAQTNPHVLQTLKMHIQMGLGGEAGEDESMDIQIRIAQIDKKFKDILNSVTAENQQSLLTDPRIGELMSEKRILENRLAEYAAAEQKRADTESRLANLYTILEGMKNHPMEYDDRMIRKILRCVVVQTKQRIKVIFIDGLEMEVEVEQ

SEQ ID NO: 15050 - protein, 527 aa, synthetic construct
MEIVDIYEDAGKSGKSIEGRPAFKQMLYDIENGLEIEYILVYKLSRFGRNAADILNSLEHVQSFGVNLICIEEGIDSSQTSGKLLISVLSAVAEIERENIIEQTMNGRKEKARQGGWNGGFAPYGYYLKDKQLYIQENEAEAIRIIFDKYVNGNMGFYKIANYLNLQGIPKIKRANGTLSQWSTHFVRMIIDNPVYTGKIAFGRRTREKVKGTKNEYRQVHQDEYIIADGQHEAIIDEELWNEAHEKRELTGIKSPSKIGRDRAHLLSGILKCPKCGGPMYTNKHAWTNKDGTYKEIYYYVCSKARTARGKSCDYKAMLKKTDIEPLVIEAIRELIKNQDFATEIKSRIGKEIDTSTLNRELKNYENKLREVELNKTRLENEIDSLPEDTRFRERKLHDMTLRLDGLYDTIVELEEKIEDVKLRRKAVEQDAITLENIYTLLENFDKVYDKISEEEKKSLISSLIKEIEIFPCDKAELPLKSILFNFPVYKDGGDVCGFLWDKSTHVSSCSSKGREILSSISIVSYS

SEQ ID NO: 15051 - protein, 651 aa, synthetic construct
MANKKIKVYLYTRVSTVMQIDGFSLDAQKERVRRYAEAFNYEIAGEYEDAGKSGKSIEGRAEFKKMLEDIQSNKDGVSYVLVFKLSRFGRNAADILTSLQIMQDSNVNLICVEDGIDSSKDSGKLVITILSAVSEIERENILVQTMEGRRQKAREGKWNGGFAPYGFSLISGKLEIEESEAEAIRLIFDKYVNTDMGANGIAKYLQQQGIHKKEKQNGKNPFFSAGLIRQILDNPVYNGKISYGRRKNEKIAGTRGKYHIVKQDDFMVSEGIHEAIIDEDTWEKAQKKRKVQANKYEHVYKSKDEKIHLLSGILCCPLCGSGMYGNKSTKKKNGKHYKDYFYYGCKHRTLLNGHACTFNKQLQEEKLNDAVTEVISSLVKNPNFADVMQKKINIKTDTAEIEKEIANFQKQLGQYIGTKRSLEKQIDNLAYEDRHYDRKLSDLQDRLDTMYDNIDDIEQSLKECRDRKQAIEAEKLTGDNIYKTLIYFDKLYDVMDDADKRSLLSALIKRIDVYEEAKPNGQWLKSILFKLPIIEENLEIGLDNDVYVETCVLLGRENIDDVKYAYVDYEPTDAEYLNGISGSATYREIREWVKKEYNLNVTSLNIAQVKEECGFEKRPNYNTGSQTNRVPNCPTDKEKAIVKAFKHFGMR

SEQ ID NO: 15052 - protein, 579 aa, synthetic construct
MAYKAKAPDSGAEKDIRVAIYVRVSTVYQIDKDSLPMMKQDLTAYCKYVLNTEDYEIFEDAGYSGKNTARPAYQKMMAQIRQGNFTHLLVWKIDRISRNLLDFAEMYQELKKLDVTFVSKNEQFDTSTAIGEAMLKIILVFAELERNMTSERVTATMINRASNGVWNGGRVPYGYSYDKDTQTFSLDPNENSIYNLLVETYETSKSVVYTSRKLNDLGYRSRYGNLWSPIAVWTILRSPWYKGIYRYNYYKIPGRAAVKDESEWVVVENHHPASITPERFDKIQETLDRNARFRNAPGRKITKKTTHVFAGLVLCADCGSAFTASPGKRHVSGYHPSKYGCSNARKTSACHAKYTSDVVLGEFLLNYILNILNAQKNVDEISSTEELQSRLLCGSTFSSIDHVKQDDLDSLFTQLKSRPEKDPFTAVRSKTKPKVDPELKRMMNDLKKQRRALDRLNDLYLYSENSISEREYLVRKQQITDCIQEINDTIEAIAKENHEQSIDDNEFIKQASTFILNQKLADRQYVCYTKLAETLSPETLKAFFSSIIDSIIMRAGKIETVIFRNGLSQTFIYKEKPGK

SEQ ID NO: 15053 - protein, 567 aa, synthetic construct
MTEKKKKKQQKCYIYIRVSTSMQVEGYSLEAQRERLNKFADYQGMEVVREYCDAGRSGKNITGRPEFTQMLRDIADDRDGVSYILVFKLSRFGRNAADVLNSLQYIQDYGVNLICVEDGIDSSKDSGKLTITVLSAVAEIERENILVQTMEGRKQKAREGKWNGGLAPFGYRLDKEKGELVVDPKEAEIVKVIFDKFINSDMGADSISNYLNDHGYTKNTSRDFEVNYFTRSHIMKILDNPVYVGKIVYGKSATEKVKGTRDQYRRVKQDDYLVADGRHDAIIDEDTWNKAREKRKETGVKWNKIHDLDHEHLLAGILKCPICGASLAGTVRRKKYPSGKVNSTFYYRCLHRKRIEGTDKKCDFKPSLNQIDTDAEIIGVIHDMVNDERFEAFIRGKLDEKVDVSSFEAEREGLRTQLIQATGAKDKLMQQLDRLDVTDRHYDRKYQDMQDRLDTLYDRIADLEEKIDDVTDKISGAYDENLTSKQLCKVLLQFDEMFEEMTDLERKEFLYTLIERIDLFPERQENGSILKRIRFKFRVDYDAEAGGKVLLNENDVESCVLLTRVSN

SEQ ID NO: 15054 - protein, 530 aa, synthetic construct
MKKQLNLYGHYCAYLRKSRADRDNMYATDEDVLARHESILADLSKRLGIVIEKTYREVVSGDTIAARPEVQQLLEQVEDGLWDGVLVVEVERLARGDSIDQGTISRSFALSHTLIITPNKIYDPDDEFDSEYFEFGLFMSRREYKTINRRLNRGRDQSAEEGKYIGNKPPYGYERVKLQGEKGFTLSPDPNKADIVRMIFDMYVKGEDSGSTGVSKIVRKLNAMHIPAAMGGDWTTSTVQDMLSNPVYIGKIRHKWRPAVKSVKDGVLSVSRPRDKERVTIYEGRHPGIISPDIYAAAQEKRKKNPGKTVPSRYIIQNPLSGLVVCGKCGRKMIRRPYKPPQKDTLLCYHTNCSQIGSPLYLVEQEILNALRAIVDDTINPSISLPETSDNTLKTKLKILNEKEKELDDLQLQKDRIYNFLEQGIYSIDEFRERSTRNTDEMEKIQTTVEVLKTEIKKLNSYQKKKKEFIPRCEHLLEHYEELTVEQKNDCLKELLDKVEYDKNERNKHGEGDKPNFKLHLYPKFFSDNY

SEQ ID NO: 15055 - protein, 554 aa, synthetic construct
MMNGYEYTDMDAILAGSFRAAIYCRLSKDDDLDGESASIANQRDMLEKYCEKQGWEVVAVYQDDGYTGLNMERPDLKRMLKAIERRQINLVITKDLSRLGRNYLQTGTLIEDFFPRHGVRYIAMNDGIDTMRDNNDIAPFKNILNEMYSKDISKKVHSSYLLKAQQGQFTGCVAPFGYRKDPEDKNHLLVDEETAPIVRQIFLWALEGHGPNFIRRRLEEQKVPCPTWWNRERGFRNVRTKWEKKDPENGQYMWDFSVIKDILMNPVYTGAIASQKKDYRFKIGTIGEKKPQDWIVVEERHEPLIDSKSFAIVQDKLKSRQRPRQDGETSLFAGLIKCGECGKSLTIRTTHAKHPQQIYACKTYGAFGKNHCTQHRVEYDTLYHLVLNKIRECAKAALTDGEAIAGKLTNTCEAEQKGQREALERSLTKDEERIEVLEKMVLRLYEDMVAGRISEANFNLMLDKTQKEQSELKERVAQGRKKLADEMRLAMDAKQWVDAIQEYADITELDAATLNRLIKEIVVHEHIDSDKTRHISIEIHFNLKPIPEVEQVKG

SEQ ID NO: 15056 - protein, 598 aa, synthetic construct
MKNKKIKCDIYTRVSTTMQVDGYSLDAQKEKLKRYAEFQNMEIVNEYSDEGKSGKSVEGRPEFQRMLDNIENGTDEVQFVLVFKLSRFGRNAADVLNSLQRMQDFGVNLICVEDGIDSSKDSGKLMISVLSAVAEIERENILVQTMEGRKQKAREGKWNGGFAPYGYELVNGELQIAEDEAEIIRLIYDKFIHTNMGISAIAAWLNQHGYKKKKRQNNTLDAFAASFIKGVLDNPVYCGKLAYGRRKNEKVSGTRNEYRIVKQENYMLHDGIHEGIISETDWELAHQKREKTGVKYEKTHSLDHEHILSGILRCPLCGSGMYGNVNRKKKKDGTLYKDYFYYACKHRRLVDGHKCGYRKQWSEEKINNAVEEVIRKLVKNPKFEEAILNKIGSRIDTEEIEKEIERLEKQHRQLTGAKARLGQQMDSLDIMDKFYEKKYQDMETRLYRLYDEIEGVENSIEEVKNRLLNIRQQKISEENVYQFLLYFDKLYDKFTDLEKKEFLNSFVEQVDIYEQEQPDGRFLKHIKFRFPVYFGDRETQELCWDNESTVECVGFFGICFIQNVRVKYNWRIRRNIYNTDRWEGICRVGIVRYGNIVV

SEQ ID NO: 15057 - protein, 623 aa, synthetic construct
MSKQPEMVIARNSRATRNNDTTLNLDNQMYQQPVTSFQRVSNDAPLSEETKTAIQNTVLQFYVHSQPQEEAEGITACYERLSQEDKLDGESNSISNQKRILEKYCRDHGYTAIRHYDEDDGYSGTNFNRPGFQRMLADIKAGKIKRVVVKDMSRFGRNYLQVGMYTEMLFPEYGVHFIAVNDGVDSVRGDSEFTAIRNVFNEMYAKDTSKKIRATWQSKGRSGEHLTTIPPYGYKKDPENKKRWIVDEEAAAVVQKIFALCMDGMGPTQIAKWLQENKVLSPVAYCYENDLPTTSKRPTDPYKWATKTVVHILERLDYLGHTVNFKTSKQSFKSKKVLWNDPADWVIFENTQEPIIEESVFLIVQKIRQGRRRPTKMGDMGMFSGLLFCADCGGKMYLCRANHFKPEQEYYLCSTYRKDRTLCSTHSIRRVVLEEIVLRNLREAIQYVTQYEDDFVQRAADQSLRERDKELAQKKDTLAQSQKRIAELDVIIKRLYEDNISGKLSDERFIKLSRDYELEQTNLTNLVEHLRQEVKEQEKQKVNVRQFIAAVRKYTDMQQLDASILREFVDKIYISEVYTPDDNEPRIKVREIEIVYNFIGAFDFEEAREQSQAAQKEKKTGVA

SEQ ID NO: 15058 - protein, 490 aa, synthetic construct
MIKKIAIYVRVSTLEQAEHGYSINEQIEKLKKYCEIRDWHLYDTYIDPGFSGSNIERPSIKRLISDCEEKKFDTVLVYKLDRLSRSQKDTLYLIEDVFSKNNVDFVSLNENFDTSTSFGKAMIGILSVFAQLEREQIKERMQLGRLGRVRSGKAASWAVPPFGYTYNRKTGQLEINSVQSKIVEDIFSMYQSGISISKIADKLNIDGHIAKKRKWSRTSIKNILLNSTYCGIVEYKGNIFEGKHDPIITKESFERTKEELEIRQPKRLEALNVTKPFQTKYMLSGLVFCGYCHAPMDTLLGHVRKDGTQLRKYQCKNRFPKKTTTNKIYNEGKKCDSGYYFMEQLETTVINELLKLQNTPSLFNSITSKKSKNKEINIPQIKKDIKLIDDKINKITDLYINNIIDLEESKIRNIRFQKEKEFLINQLNTDDTTKEIEKLKEYEKIVKDFDFGAEDYDKQKILCNRLIEKIYIYKDKLKIVWKFEYLNRVF

SEQ ID NO: 15059 - protein, 645 aa, synthetic construct
MIYRPICYERVSSFDQVASGAGLDDQRSIIEQYLDDNAEKFSNERIYITDEGVSAFKNANISPDSNLGKFLQDVRNRMYGRGDALIVTSLDRLSRRSSWAENTIQFIVASGIVVHDISTGLVLKEDDNFSKILMEIILQRSHNESLMKSVRAKVAWQNKVQRAAANGEVVSNRMPFWLQNIDNKYAVIQEQAELIKRCFELYKQGFSTGEIVKRIDDPKWQMVRVSRLIRDRRLLGEHKRYNDEVIPNVYPKIIDDELFIMANRMMDTVMTEKKKPAEDLLLEPDVVKTIFSLYESGLGSGAIVKRLPNGWSTVNVLRVLRDKRVVEQKIIDNLSFERINEKLNKNGVATRIRKDVTIAQDDYITNLFPRILKCGCCGGNIAIHYNHVRTKYVICRTREEKKRCDAKSIQYSRIEKNILSTVLKVDFSKLVNRTDSNDDVKDLLQTELAALRTEEKIYHSKILKRKQEGKKTSLPLMEGLTDVQDRISDVTQQIEQLLTVQDIPVFDYDIDSIIDPMNVEIRAKVRKELRLVLSMITYRVIDKFILINLEYFSDVLKHVLIIDNKRGGGDILTQITIQNVNESTSYETPSFKILVTNEILSLDSTGVISMNDYALLLNYIDSIDSTSQIASWLRENYNLFLSNLK

SEQ ID NO: 15060 - protein, 546 aa, synthetic construct
MAKEKIKVYTYTRVSTAMQIDGYSLDAQKSRMKAFAEFNDYEIAHEYEDAGKSGKSIEGRTQFNQMMEDIKTGKDGVSFVLVFKLSRFGRNAADVLSTLQVMQDFGVNLICVEDGIDSSKDAGKLMISVLSAVAEIERENIRVQTMEGRIQKAREGKWNGGFAPYGYKLVDGKLEINEEEAPAIRTIYEQYVTTDSGANGIAKYLENHGISKVQRQNGKNPLFDARLIRMILKNPVYCGKIAYGRRKTEKVHGTRNEYRLVEQENFLLVDGLHEAIIPEDIWQAAQVKLAAQAKRYEHVNKGKNECTHLLSGIVKCPVCGVGMYGNKCVKRKADGSKYKDFYYYGCKHRSMTRGHKCDYKKQIRKELLDDAVAEVICKLVSNPKFAAMMQEKINMKVDTTAIEQEISNYEKQLRQAYSTKSKLIEEIDSLDPDDRHYGRRKSDLDDRLYGMYDKIEELESLLIATRAKKQSIEAEKLTGDNIYKVLIYFDQLYGKMNDREKRQLIEELISEIQIYPERQPNGQWLKSIKFRLPIIEEDMNISLDNE

SEQ ID NO: 15061 - protein, 592 aa, synthetic construct
MPNLRKIEAAVPAIREKKKVAAYARVSMQSERMLHSLSAQVSYYSGLIQKNSDWEYAGVYADDFISGTNTVKRDEFKRMLADCEAGKIDIILTKSISRFARNTVDLLETVRHLKDLGVEVRFEKERIRSMDGDGELMLTILASFAQEESRSISDNVKWGIRKRMQNGIPNGHFRIYGYRWEGDELVIVPEEAEVVKRIFRNFLDGKSRLETERELADEGITTRDGCRWGDSNIKVVLTNVTYTGNLLLQKEFISDPISKQRKKNRGELPQYYVEDTHPAIIDKATFDFVQEEMARRRELGALANKSLNTSCFTGKIKCPYCGQSYMHNKRTDRGDMEFWNCGSKKKKKKGTGCPVGGTINHKNMVKVCTEVLGLDEFDEAIFLEKVDHIDVPERYTLEFHMADGNVVTKDCLNTGHRDCWTPERRAEVSMKRRKNGTNPIGASCFTGKIKCVSCGCNFRKATRNCKDGSKVSHWRCAEHNGCDSPSLREDLLEQMAAEVLGLDAFDAAAFREKIDRVEVLSSSELRFCFKDGRTVSRNWQPPERVGRPWTEEQRAKFKESIKGAYTPERRRQMSEHMKQLRKERGDKWRREK

SEQ ID NO: 15062 - protein, 425 aa, synthetic construct
MRIRIITAVPTAEKKKRVCAYARVSTDSRRQEESLENQTATYERLIRSNPEYAFAGVYADQGISGYCENRPQFQKMLERARAGEIDLIITKSISRFARNTVTVLKVARELKELGVGIFFEEQKINTLSGDGEMMLAVLASFAQEESRSMSENNKWSIKKKFERGEVMITTSRFCGYDKNEYGDLVVNGKEAEIVRLSFDLYLMAVGSTRIASLLDYLGVPTVAGGTWEGGTIGGMIANEKYKGDFLLQKYYTPPDKRNFTRKNRGEVQSYYISENHEPIVSPEVWQQAQEMRDYRKKIRNIGQDGTRKFQNRYPLSGMLICPYCGKTLRRRQVYKKKIQWLCSTYIEHGKQACKGIRIDDAELAGLHVTGQTVVEEVLKDGKKHYRYTSKAEFDFTGESQPERPEDTDGSVLPGVNRPRRTVIKL

SEQ ID NO: 15063 - protein, 444 aa, synthetic construct
MAAYCRVSTDQEEQLLSYENQVNYYTKFIKDNPLYTFAGVYADEGISATNTKKREEFNRMIADCREGKIDMIITKSISRFARNTLDCLNYVRELKELGIGILFEKENINTLDAKGEVLLTILSSLAQDESRSISENSTWGIRRRFETGKHKMSTKRFLGYDSDETGKLIVNSRQAKIVVRLFQEFLDGKTTDYIKRIFEREGVVNWDGSTKWHATTMNSMLQNEKYKGDALLQKSYTVDFLTKKRAKNSGEVQMYYVEDDHEAIIDPRIWECVQLEFKRREKYLKEHGTHSYSRNPETNPFASRIVCGTCNKVFSRKGWRSSAGYDRKVWQCSERYRVKGVQGCDNRHVEEETLIKAYLMAWNALVENRESFLEQWKQQMRGEDLLAGYRAKKLVEYTKDAKPLKEMDTDFMLKTLDHIKVFEDGTLLVTFLDGSEIEYRSEEA

SEQ ID NO: 15064 - protein, 528 aa, synthetic construct
MGKKAETSGEKTGVIYARYSSHAQKDASIEQQVRECLVFAKAQGIHIAATYEDRAISGKTDRRPNFQRMMKDAEKRKFQYVVAWKSNRMGRNMLQAMMNEARLNELGVRVLYAEEDFDNTAAGRFALRSMMNVNQFYSENMAEDIRRGLRDNAMQCKVTNGTLPLGYKKDENLHYVLDPPNDEIVREIFGRVACGEPFVSIAEDLNARGVKTSRGGRWGRSSFHALLSNERYTGVYIYGDIRVEGGIPQIVDKGLFYRVQEVLKTKNNPQGRPRGGGDYLLTGKLFCGLCKSPMVGVSGTGKNGQLHHYYICQKRRQEKSCKKQNIRRDVIERQVAAAMKEYILRDDVIEWLADKAIAWAKDYRGETGIGALEAQLAENKKATKNLLAAIEMGIITESTKERLLELEREQAMLVSRLAEENASLVSFSRDDIISALSLYRDGSVEDRAFQAKLFDAFLVAVYLYEDHFKLEFHIGGKSGIDVPLEPSIVDSLDSADSECSYEIAFEPPDGHYMNTYFFKGNFAVRVWL

SEQ ID NO: 15065 - protein, 566 aa, synthetic construct
MARKNKSAEAGQRLVAYYRYSGGSGQTEQSIEGQRRDCMAWAKAHGLTICHEYIDRHISGKTDNRAQFQRMMQDSDKGAFDSLICWKTDRLARNRYDSAIYKSRLRKNGVKIYYAAESSVDGPEGIILEGLMESLAEYYSAELSQKLRRGIRESALKCKCLGGYRALGLTSDKDHNYVIDESQAPAVRYIFEQYAAGRTAAEIVADLNAKGVRTATGGTFNKNSILRIITNEQYIGTYISRAHNVRVEGAIPAIIDRELWDKAQAMVQKNKAGRGVKSKAANYMLSGKLYCQICGGAMKGICGTGKHGDKHYYYACSNHTSHSCDKRNIEKSFLEDLIVSATAEHILAPGKLEQIADRVVQVQEAEQHIINPEKEMLESELLECTKKQDNILRAIEDGTDSARLSSRLRELEEQEAALRYRMESIEEPPAAPIYSRDQLLFMLEQFRRAADEQDEIYKQRLVNTFVHDIYLSDDSAFVQFNISAQEKEKSTTLESVVLSLNGGDPDGENPDKSRLPAGFDRVSLGGDGGNRTRVRKEVHESISGCSLSTTFPLCQAGKQADTLVAS

SEQ ID NO: 15066 - protein, 466 aa, synthetic construct
MSKDKMMVFGYARVSTENQLENYSIEEQTARLESYCAAKGWVLLHTYIDGGYSGGNTDRPALQTMLAQIRETHVDAVVVYKLDRLSRSQKDTLTLIEDELLAHGTDFVSINENFDTSTPFGRAMIGILSVFAQLEKDQITERFTMGRIGRGKAGYFHGGGNAPTGYTYADGLLTVNEYEAIQVREAFDLFLAGKSINAIWHILSTKYTTKWTAAKVRNVLKNSLYIGKVHFMGQEYDGIHQPIVEKRVFTAANQLLNSLSREAAKTTSQRNPFRAGYLLSGLLYCGRCGARYSANHGYYKCYSRAKSSPKFVRDPDCKNDNWEISTLDHLVCQQVDAMVSSSAAVDHAIMAADAAKTVHIDKDKLRRTCAELERQIERLIELYQVGSIPMASITQRVNDLSAQKAALESQLNAPDEVPAKDLFLAAVEDYRQGFADGDTDRKRALLSGLLDRITIDGQSIQLHWRL

SEQ ID NO: 15067 - protein, 585 aa, synthetic construct
MKKRMIPMAVSSADFDPSMNMIDPMEASAFGVIYARYSSHSQRDVSIEQQVKDCMAYAARNNIYIVACYADRHMTGRTDRRPEFHRMLRDAEAGGWSFVLTWKNDRFARNRYDAAIYKAKLKKCGVRCLFSQEYIPAGPEGILLEAMLEGDAEFRSAQMAVDIKRGLAYNAEHCMVTGAIPFGYRRTKDYTLELDPDRAPLVKEIYDRFLAGWKIIDIANDLNRRGITTASGKPWGRNSFHSMLSNERYTGVYIYGDIRTPGGLPAIIDRDTWLAVQRRLHTKKNPVGRSRSYGDYLLTGKLFCGHCQRPMVGVSGKTRPGKPLYYYYVCQGRRLSHDCQKQNVRRDWLEEKVCAMVAGLVMQDDVVEWMADCVVDYQRRHKEDGTLQALASQLKQTRAAIGNVMAAIEAGIITATTKDRLLELEAQEQKLAQALETEKALRPTYTRERVIFWLEQFRAGDLTDPAFRLRLVTTFVNAIYLYDDHLKVVLNYTGRNSSVDFPLVEDALDSGAVDGGPYNVETGPPQVANPNPAPIGAGFGFVLFLNNLGKIKPKSLSHFSFWWKLLWLRVLSAWLGLSVTGNRLG

SEQ ID NO: 15068 - protein, 466 aa, synthetic construct
MSKDKMMVFGYARVSTENQLENYSIEEQTARLESYCAAKGWVLLHTYIDGGYSGGNTDRPALQTMLAQIRETHVDAVVVYKLDRLSRSQKDTLTLIEDELLAHGTDFVSINENFDTSTPFGRAMIGILSVFAQLEKDQITERFTMGRIGRGKAGYFHGGGNAPTGYTYADGVLTVNEYEAIQVREAFDLFLAGKSINAIWHILSTKYTTKWTAAKVRNVLKNSLYIGKVHFMGQEYDGIHQPIVEKRVFTAANQLLNSLSREAAKTTSQRNPFRAGYLLSGLLYCGRCGARYSANHGYYKCYSRAKSSPKFVRDPDCKNDNWEISTLDHLVCQQVDAMVSSSAAVDHAIMAADAAKTVRVDKEKLRRTCAELERQIERLIELYQVGSIPMASITQRVNDLSAQKAALESQLNAPDEVPAKDLFLAAVEDYRQGFAGGDTDRKRALLAGLLDRVTIDGQSIQLHWRL

SEQ ID NO: 15069 - protein, 540 aa, synthetic construct
MENVVRVDCLYRVSTVGQVEKNDIPMQREFCRAFIAEHPNWKLEKEVYEKGVSGFKKSAKERDAIQELQRDAVEGKFDILLVYMFDRLGRKDDETPFIVEWFVRNGIEVWSATEGQQRFDNHVDKLLNYIRYWQASGESIKTSVRTKTRLEQLTESGFYTGGSIAYGYRLDKRGRTNKRNKEVFDLAVDENAAKIIQLIFHKYVNEGYGAQRLSRYLEEKKIRKPNGKNFPNTSINRIIKNPIYTGVIRNGDAQSEFIPELQIIDQETFDRAQKIMSDRTTHHAETPLNLKGQSLLVGNIFCGHCKNRLTLTTGGRNRVRKDGSIYHDIRARYQCHYNVRHPGECDGQSGYGVKKLDGIIDRIVRYQLSKISAASGEDIVAKQNRKAIELAKARHHLATVQLAEKQRELVDYQNEGIKVIRGQSKFDMEFLNELVSKAKAEVTELEAAVEAAREELDIHLANADVERKEYEKIKTWADLYDNCNFAAKKMIISQFIKSVYVYRDYTLEIEFNVSFEEFRTMATECQDQGTNEQPLVYITA

SEQ ID NO: 15070 - protein, 623 aa, synthetic construct
MSKQPEMVIARNHRATRNNDTTLNLDNQMYQQPVTSFQRVSNDAPLSEETKTAIQNTVLQFYVHSQPQEEAEGITACYERLSQEDKLDGESNSISNQKRILEKYCRDHGYTAIRHYDEDDGYSGTNFNRPGFQRMLADIKAGKIKRVVVKDMSRFGRNYLQVGMYTEMLFPEYGVHFIAVNDGVDSVRGDSEFTAIRNVFNEMYAKDTSKKIRATWQSKGRSGEHLTTIPPYGYKKDPEDKKRWIVDEEAAAIVQKIFALCMDGLGPTQITKWLQKNKVLNPTAYAYDKGLPVSNKPPVNPYKWTNETVSRILERLDYLGHTVNFKTTKQSFKSKKKLWNDPSEWVIFENTQEPIIEESVFLIVQKIRQGRRRPTKMGDMGMFSGLLYCADCGGKMYLCRTNYFKPEQEYYICSTYRKDRTLCTTHSIRRVVLEEIVLRNLREAIQYVTQYEDDFVQRAADQSLRERDKELAQKKDTLTQSQKRIAELDVIIKRLYEDNISGKLSDERFIKLSRDYELEQTNLTNLVEHLRQEVKEQEKQKVNVRQFIAAVRKYTNMQQLDASVLREFVEKIYISEVYTPDENEPRIKVREIEIVYNFIGAFDFEEAREQSQAAQKEKKTGVA

SEQ ID NO: 15071 - protein, 666 aa, synthetic construct
MPRPHIITMTGYYRVSTKAEAQQTSFKNQPAYFRTLLKDPKYKNYRPAKKFYCDWGLSGTKLNRPGFVEMLEDAGLDVEIEDRDDIPHPKYPDKVMKQRLYKVSVNPKKKPKFEEIWIKTTSRFARNINAYEILMTLRNAGVFVYFISKDLSTRNLEDMPAIRQCLSEDMSYSEQLSRDGKIKQQQFEEEGRLLGCPFGYDYHKKTKTTLPYYTINPVDGEVVRKMFEYCIQGLGSRNISKKLADEGHLTKKKKPFAVSTIKRILSNEKYMGLNNLGKLTTGDLFQKLSTPKVREDYVDRLSENEGLPAIVTPEIWYAAQEASKSRRTIADDRPIGLHRPEHDYKNLLVCGFCGNHFIYDNNSDRGFFKCATKARKGINACNCNNLFMYKLEDYLTSLQNGGLHDLIQQDFENTLLTLIRLIEDYLTALKDPQKLNSDNTDLENLHQELDVQITARDQLLNLLTTGKLSESGIATFQEKIQSIEFEIQLIEDKIRDIKTPYSNYMDCLKKLFETVFDELRLFETKKETYTRQEVLNALSYIKVYGETANFRGGRPPIPVLIPILKETETSQALIRVGYNTFNYKLYNSFSNYDPNASIEWGAERRTEKTDYVQTKYILSSNAFIRPNGDLGYIKTLGIEGISELQQIKAHIDELYNEFKALTQNQP

SEQ ID NO: 15072 - protein, 531 aa, synthetic construct
MIKIRAAIYVRKSRLSEKGESINNQIDLCKKYFYNLQLDTSIEFLVYQDEGFSGGNTNRPEFQKLIRDIKKKRFNYLICYKLDRISRNVADFTSTLKILEENNVNFISITEQFDTTSVMGRAMINISATFAQMERETIAERIRDNMLELSKTGRWLGGTCPLGFKSTSVNYESNGHKKKMYKLQVVDNEMDIVKLIFNLYIEKKSCSPIARYLCSNGIKGKNGGDFSRNTVLQILTNPVYCTADKKALDYFKNLGATIEGNANSNCGIMAYNKRKNGKKDNPINEWIISTGAHIGVISSTQWIQCQNILNDIRKKPNNRTGTGSKFLLSGLLRCAHCNSSMCSWSRNNPNGKYERYYRCELKNRASNRCICKMLNADKAESFVIDLLKNLDIKTIENYKNNSTIENASSIERKKTMLNKTLNENNKIISGLIKKLALLDDMDILNTIQNEIKSLKTENKTIEKNINNLSIKSFVVEDEKENKKAFIESLKLFKKTIDLIGDIEIKRNMIENLVEYFTYNSETKQIKFKLRL

SEQ ID NO: 15073 - protein, 477 aa, synthetic construct
MHYESYIKGNPDWEFCGLYYDEGITGTKKEKRTELLRLISDCENGKIDFIVTKSISRFARNTMDCLELVRKLVDLGIYIYFEKENLNTGDMESELMLSILSSLAESESVSISENNKWSAQRRFQNGTFKVSYPPYGYENIDGNMVINEEQAEVVRWMFSETLAGKGCYRIAAALNEKGVPTKKNGRWTASTVRGILKNEKYTGDILFQKTYTDSQFNRHTNRGEKDMYYMESHHPAIVSRETFEAVAAVIGQRGKEKSVTQGNKYQNRYPFSGKIICGECGSSFKRRIHYSTHQKYIAWCCSKHIEHIEDCSMQFIRQDAVEAAFMTMMNKLAYAHRRILQPLRDALRRVDDTEGFRRIEELENRIDAVLEREQVLSNLMAKGYLEPALYSSEKNELARELEELKVRKDAIIRSLNSSMANADAVNELLKFTARAEMVTAFDEEVFGRFVEKIEVYSRSEVGFVLKCGLTLKERLVE

SEQ ID NO: 15074 - protein, 523 aa, synthetic construct
MTENRSVTVIPARQRMGGGIKKEEKPKLRVAAYCRVSTDSDEQATSYEIQIEHYTSFIQKNPEWELAGIFADDGISGTNTKKREELNRMIDECMAGKIDMIITKSISRFARNTLDCLKYIRELKSKNIPVFFEKENINTMDSKGEVLLTIMASLAQQESQSLSQNVKLGLQYRYQQGVVQVNHNRFLGYTKDEDGRLVIVPEEAEIVKRIYREYLEGASLARIGDGLEADGILTGAGKKQWLATTIKKILSNEKYIGDALLQKTYTVDFLSKKRVKNNGIVPQYYVENSHEPIIPREIYMRVQEEMARRANLHSGEKRKKRVYSSKYALSSIVYCPKCGEIYRRIAWNNRGKHSTVWRCCTRVEHGPKGCDAPTIQESVLQNGVAKVINEVFGNSSAFLPILEENMQAVIGSDVESQLAEIDGRLKELQQELLKQANAKKDYTELADEIYALQEQRQNVLAAEAEQDGRRQRMEEMKALLEEQADIPLEYDEQLVWRLVEKVTVYEEELVVEFKSGLEIRVEI

SEQ ID NO: 15075 - protein, 523 aa, synthetic construct
MEPNKNVTVIPARKRVGNTVTAEAKPKLRVAAYCRVSTDSDEQASSYEVQVEHYTQFIQKNPEWELAGIFADDGISGTNTRKREEFNRMIEECMAGKIDMIITKSISRFARNTLDCLKYIRELKEKNIPVFFEKENINTMDSKGEVLLTIMASLAQQESQSLSQNIKLGLQYRFQNGEVRVNHSRFLGYTKDEKGNLIIEPAEAEVVKRIYREYLEGASLLQIGRGLEADGILTGAGKTKWRPETLRKILQNEKYMGDALLQKTYTVDFLNKKRVQNNGIVPQYYVENSHEAIIPRDLYMQVQEEMIRRANLHSGASRKKRVYSSKYALSSIVYCPKCGEIYRRIAWNNRGKHSTVWRCCTRVEHGPGKCDAPTIQESELQAAVVKAINLALGNRDGMMEVLQENIETVIRQEDETSAEGINAKLEELQKELLRLANSNKDYNSVADEIDRLRELKQKALTESAEREGMKKRIAEMQEFLNSQTTEILEYDEQLVRRLIEKVTVYEERFEVEFKFGTKVDVER

SEQ ID NO: 15076 - protein, 591 aa, synthetic construct
MEVELIKAHDPFDGSARRKIGRLRVAAYCRVSTDDEDQIKSYNSMVTHYTELIKNNKEWIFSGIYADKAITGTKVDKRDEFQRLIQDCMDGKIDMIIAKSLPRFARNTLDTLKYVRMLKERNIAVYFEVEKINTLKDGEFLMTILSSVAQQEVENTSAYVKKGLKMKMKRGELVGFQGCLGYDYDVETKSISINEEGAVVVRYIFDRYVAGAGSTMIARELNEQGHLTIRGNPWTSSSVMGIINNEKYKGDILLGKTFTVDPISKRRLENLGEEDRYYIHDHHEPIITEEQFERAQEMRRRRNGNRKCGVTPGKREKFSRQFAFSCMVECGFCGSNLSRRRWHSSSKYKKTIWQCVKSTKEGKRFCPDSKGIPEQVIEEAFIESYRMLCNDNKDVLEEFLKRTEKALGENSIGDQLHKLEKSIEKVSLKRKKLLDNYLKGIIEQDIYEETDVELKTELTNTRAKLEYLQQQSDEKSSLQRRLSDFKKALSHNEVLEEFDRGIFESIVEKVIVGGLDEDGNKDPYKITFIYKTGFKNEIGNAKERFVKSSSIGDKVKKMCSDISDEVKGVCSYISLNTCGVRSIDVKSQRIE

SEQ ID NO: 15077 - protein, 540 aa, synthetic construct
MKQPYNTTIYNTALYMRLSRDDENYGDSVSIETQRTILQQYAKEQGLHVVGEYVDDGWSGTNFERPDFQRMMDDMEAGKVNCIVTKDLSRFGREHVMMDYYLEFLFPEKRVRYIAVAENEDTEKGLSDFVPFKNLFNEWFAKDTSRKVKAAFKAKFATGQRIGAYAPIGYRKHPEIKNKLIIDEETRWIVEKIFDLAIHGRGAASITRILIAEKVPTPGFINFQRDGTFANIYAGAPEEKSYAWTIAQVKSIMKDETYIGHTIHYRETNISFKNKRRVRKPQSEWVRVENTQEPIISEQVFNQVQEQIASRRRKCKDGTTQIFSGLVKCADCGWSLSYGENRQNSKPYGHYHCSKYGQGTRQCSMHYIRYDVLYAYVLSRLQYWSGLVQNGEGELMKRLLNASDKEQAAARKRQAAELKRTEKRKAEVDKLFSRMYEDWVAGRITEYNFSMLSGKYQSEQAELDEKIERLQSAITTESQNAADAEKWIALMKECVNPTELTAELLNTLIEKIVVHEAVKGEDGSREQEVEIFYRFIGKID

SEQ ID NO: 15078 - protein, 522 aa, synthetic construct
MKIAAYCRVSTDKADQLNSLEAQKEFFSEYTQRTGDVLVKLYADEGISGTKIKNRKEFLRMMADAEKGMFDMVVVKDISRFARNTVDLLQNVRKLKALGIETQFLTANMTSMGNSEFVLTIFGALAQEESANTSKRVKFGKKLNAEKGRVPNIVYGYDKTIGDYFNLEINKEESKVVKQIYKWYTEEGYGAAKISNMLNEKGYRTKRNCKWSQNAICRILTNEIYTGKIINGKQEISDFLTGQRREKDETEWLVVERPELRIIEDEVFEKAQEILRGRNDAFNLNHERQSNKYLFSTLIKCKECGWSFRRTVRTYKNTYVRWVCSGRNGKGADSCPNKTVVDEEELIQILQEYFNRVLQQKNKVIDYVVKEFQRVYKAKDENAEYEKELNLQIARLQRMRQKYMDMYTDDLISREELNDKLGGTRQELARLENELKMVSSNLTKGDQMEKILNDTFKQIEDITDVHEMTNVQLKRLIKKIEVDKDGNVDIYLRLLGDLGLNESILVEDECENKTVLNSNDQT

SEQ ID NO: 15079 - protein, 552 aa, synthetic construct
MNIHSPTTTARAALYLRVSTARQAEHDISIPDQKRQGEAYCEQRGYQLVETYVEPGATATNDKRPEFQRMIEAGTSKPAPFDIVVVHSFSRFFRDHFEMEFYVRKLAKNGVKLVSITQEMGDDPMHQMMRQIMALFDEYQSKENAKHVLRAMNENARQGFWNGARPPIGYRIVAAEQRGSKIKKKLEIDPLHADTVRLIYRLFLEGDGTSGAMGVKAIATYLNERRFFTRDGGRWGLAQIHAILTRTTYIGEHRFNTRSHKDREKKPESEVAIMAVPPLIERETFDAVQARLKSRNPMVTPARVSSGPTLLTGICFCAKCGGAMTLRTGQGSTGATYRYYTCSTKARQGKTGCKGRTIPMDKLDHTVADYIGDRLLLPKRLETVLASVIDRRQERTERRREHLAELQRRITEADQRLGRLFDAIEAGMVDKDDAMAKERMVSLKALRDQAAADAERTQLALDSSGNQGVTPDMLKGFARKARERIRLNDGGYRRDHLRALAQRVEVADDEVRIMGSKSELLRTLVAASSVETAAFGVHSSVLKWRTRQDSNL

SEQ ID NO: 15080 - protein, 570 aa, synthetic construct
MTVTPCIIYVRFSSIQQEKGASIERQLELARAHIAREGWVEAEPPVIDKGRSAWKGDHLSKGNLGILNKRIMAGEIAPGTVLLAEKLDRFSRQERKITRRWLEDVTDLGIGIATVDGGRVYTAQTLQANMVEDIEILIRAELAWKESQQKSERIMDAQARNRTKAATTGRVMSARCPGWLKVVAGKFEIVEERAELVRQIYQWTAEGVGARTVGKRLNDADVPTWGKASHGWEPTFISEIIASPAVEGDHQPTRLIKGRKTATFEKIENYYPRIVDADLVTAARSARKMRQRSGGGHRMNFRNLFQSVARCAGCGGRMTLRNGPTPRANLICSHVFRGRKCDQATSIRYRAFEDAALTQMLHLALDDRFFSKADETRPLVTKVAELDKLIADQTAKSKRLLKMILGADDPDQTMLDMRSEIERTMVATKARREEAILALDAARGAVSQAAHMRRVWEVREAINHEDESISTAARMKVAQAIQTVVERVEIDTKDEFEGKEQKTFTMTLVGNVRGFKFDDRGNLLAEFDLGAHILNPETGVGYLHGSLGVQPDPQKIATLHEYFRRRSQAA

SEQ ID NO: 15081 - protein, 471 aa, synthetic construct
MTRPAALYIRVSSHLQARDDRYGLARQEAETRAYAARTGLSIPDGALYTDVITGRSETRDGLEQLKADRQRYSAIITSEADRLGRTPLAGHKILSELLGLGLDVHNATDGLYDPDDDASVLTFDMRMVIAHQELRSIKRRMLGGKLAAAEKGEIIPHGWRCYGYRQAYELEGGRPIRRIEVDEVEAAIVREIFERLIRGDTTVTIAEDLNARGVPSAMNSNWHHQRPWYMARNTAYKGEARMTLRHAKREFTFPVPAIVDEDTWQLAHDSLRRKPIKHTETFWLNGLLRCAECGGAMSGTNSQANRTSYRHYRCSRAFKHRFYGDVPSCTQRTHYRMNDLHEHADRIVREIAEHPERYAGQAAPTPPDHSRALKEIDRLEGQLKRYLTDYQRELLTGDEYAGLRDTARRRLEELRVEVAPPKVVTLPNTAAALEAIGRLVQEGVPTREVLLRSGTRLSIAPGGVLDVVLRV

SEQ ID NO: 15082 - protein, 544 aa, synthetic construct
MIRAALYARYSSDQQNAASIADQLSLCRERATREGWQVEGIYEDAAVSGSSMILRPGVQRLLADAQAGKFDIVLAEALDRVSRDQADVATLYKHLQFARVPLITLAEGEISELHVGLKGTMNALFLKDLAKKTHRGLRGRVERGFSAGAVGYGYRMVRRLNSEGELVRGEREIDLAQASIVERIFREFAAGKSPIAIARDLNADGIAGPSGKPWRDTSIRGTPRRGLGILNNELYVGVRVWNHKHYVKDPTTGKDVTRLNPESEWVRKAAPELRIVSNELWDAVKHQQEALAARYAGHKEAAQARSVNGLRRPAYLLSGLLECGECGGNYAIVTTDRYGCIGHHRSRNCTNGRTIRREELERRALAGIAERLVSADKIDAAVAAYATHINRENRERRIQIEADRRGLARIDKAVAGIMAAIEDGLYQPSMKARMAELERERNEVNARLAEAPAGIPDIHPGIAEIYKRKVTKLTETLKDPQARLDASSDIRSLVGKIVLHPGEKRGEVHATLHGSLMGILDFVNDNPQPTTDRVIIKVCPGSRE

SEQ ID NO: 15083 - protein, 555 aa, synthetic construct
MNWQVDSMTKQNYDALIPAVIYARYSSSGQREESIEGQLRECREFAGRNGLTVVGEYVDKALTGRTDKRPDFQRMLRDSERGIFKAVICWKMDRFARNRYDSAMYKYKLKKNGVRIFYAKESIPDGPEGIILESVMEGYAEYYSENLSQNIRRGYYDSAMELKTLGRKALGLRTGPDGRFEIDPATAPVVRRIFEEYAAGEKAKDIYNRLNEEGYRTIKGNPFNKNSIRRILQNEKYVGVYEYKDIRVEDGIPAIVTRELFDKCQAMLQRHHRAPAAKRDTSFLLTSKLFCGHCGEPMTGDGGTGKSGKVYYYYTCNGRRQHKCKKERVVKDWIEQVVIEQLVTLVHSDDFINEVADRCMEYQEKEKDDSALRALETWQRENEKAINNMLAAIEAGIITPSTKTRLTELEAERAQIEKGIAQQLISEPSLDRDQVVYFLERFRNGDITDESYRVFLVDTFLNSVYLYDNNKLILLLNYSGENSKVTLELVESAIDAKLKSSGFAPMTALANKNHRDVVLIFFVPRKSPFSAKISRQGVVQAKKSGTTSQSGKSRG

SEQ ID NO: 15084 - protein, 520 aa, synthetic construct
MKRITKIEENMLLEKRKLRVAAYCRVSTARDEQLVSLAAQKAHYENYIKSNDEWEFAGLYYDEGISGTKKEKRDGLLAMVAACERGTIDFVITKSISRFARNTTDCLELVRKLLDLKIYIYFEKENLNTGSMESELMLSILSSLAESESVSISENEKWGIKRRFQNGTFIISYPPYGYDNVDGEMVIVPEQAEIVKQIFADTLAGKSTHEIADELNERGVATKKGGHWTPGTVNAIIGNEKYTGDVLFQKTYTDNSFNRHQNRGELDQYLMQDHHEAIISREKFELANAVLKQRGREKGNGHDTGRYQNRYGFSGRICCGECDGKYKRRMHYKPSGQYVAWACANHLKDKESCSQKYITDDALKLAFVTMMNKLVFGHQMVLHPLLQSLRGLNDQSRLLKIEELETAIEKNREQKQVLTNLMANGYLEPALFNKESNELAAEADTLRQEKDGLMRSVNGDMVKIEELQRLLRFTSKGTMMTEFDDETFLSFVERITVLSRKEVVFELKCGLSLRERLVEP

SEQ ID NO: 15085 - protein, 523 aa, synthetic construct
MELSRNITVIPARKRVGNTAAVGQRPKLKVAAYCRVSTDSEEQASSYEVQVAHYTQFIQKNPEWELAGIYADDGITGTNTKKREEFNRMIQDCMAGNIDMIITKSISRFARNTLDCLKYIRELKEKNIPVFFEKENINTMDSKGEVLLTIMASLAQQESQSLSQNIKLGLQYRFQNGEVRVNHSRFLGYTKDEEGNLIIEPAEAEVVKRIYREYLEGASLLQIGRGLEADGILTGAGKTKWRPETLKKILQNEKYIGDALLQKTYTVDFLNKKRVQNKGIVPQYYVENSHEPIIPRDLYMQVQEEMIRRANLHSGANRKKRVYSSKYALSSIVYCSKCGEIYRRIAWNNRGKHSTVWRCCTRVEHGPTACDAPTIQEPDLQAAVVQAINLTLGNRENMMVTLQENVEAVIRRKDETSSEGIEAKLLELQKELLKLANSKKDYNSVADEIDRLRELKQNALVESAEREGLKQRIREMREFLEQQSTEVTEYDELLVRRLIEKVTVYDERFEVEFKSGAKVDVER

SEQ ID NO: 15086 - protein, 575 aa, synthetic construct
MARKNNLKIIQNASTKQTKVAIYLRVSTSYQVDKDSLPMQRKDLIAYCNLILGTDNYEVFEDAGYSGKNTDRPAFQEMMKRIRNGEFTHVLVWKIDRISRNLIDFAEMYEELQSLRVTFVSKNEQFDTSTAIGEAMLKIILVFAELERNMTSERVTATMISRANNGLWNGGRIPFGYDYDPDSMTFSIREDEASICRMLKDDYIQNRSLTGTARMLNTSGHLTRAGAEWTPTTVWIIASSPFYAGIYRYNRYKGTENRTINPEDEWVMIPNHHPAIFTLEEHEKMLFILEENSRQKNSVGKQCKRTNIHIFSGIVFCGKCGNKLTATPGRKHADGYRTSVYSCPMKRKSSECDNPAVNDLIIGEFVINYILNMLNAKKTFSKIYTPEELERHLLHGSTFSDISHIEQDGLNDFFNLLSRYGSDNSFVFSIKKPRKKRAAVNPELSALRKEKEKQERAMQRLQDLYLYSDNAISEKDFILRKADISKRLDDINAQLGMITRNSDSILSDEDFIKQASHLLIQKELQNKEYIYFKNLAANVSPEILKAYMDTILDSVYMVDGQVSSIVFKNGLTHKL

SEQ ID NO: 15087 - protein, 534 aa, synthetic construct
MYRTEISFRPDEIVQYLRKSRTDDPYLSVEEVLSKHETILREWAERNLPGPVPEENIFREVVSGETIKDRPEFLKLLRLIESPDIKAILVVEVQRLSRGDLEDAGRLMKILRFTHTQVITPHKIYDLEDEYDRDFFERELKRGNEFLEYTKKILNRGRQLSVSQGNYIASVAPYGMDKCWVQEGKRKCPTLKENEKADVVRLIFHKFVRERVSPYAIGLYLDSIGEKPPKGEHWTYTAVQEILKNIHYDQKVCWGRRSVEHKIVDGKVLEMRPRKKDFEIFDGKQPRVVDHELFLEAQELLKQTSRTRHDYTPVNPFAGLVFCRTCGYSMSFRFYRRKGQKDTCPPRMLCSNQIRCRSSSCSYSELEEAVAGILRQTIAEFQVQLNQETFDAARASETTLKTLEGRLHELEQKELRQWEKYADGEMPKEIFDQLNERLQASKKAARKALEQARAAAPKTPEQIREKIARLSDALNALEDDTVPVPLKNNYLKAVIERIDYYRPAAVRKRSDSSEPKVRGGWYTPPFELDVRLKI

SEQ ID NO: 15088 - protein, 520 aa, synthetic construct
MKRITKIEENMPLEKRKLRVAAYCRVSTARDEQLVSLAAQKAHYESYIKSNDEWEFAGLYYDEGISGTKKEKRDGLLAMVAACERGTIDFVITKSISRFARNTTDCLELVRKLLDLKIYIYFEKENLNTGSMESELMLSILSSLAESESVSISENEKWGIKRRFQNGTFIISYPPYGYDNVDGEMVIVPGQAEIVKQIFADTLAGKSTHEIAEELNERGVATKKGGHWTPGTVNAIIGNEKYTGDVLFQKTYTDSSFNRHQNRGELDQYLMQDHHEAIIRKEEFELANAVLKQRGREKGNGHDTGRYQNRYGFSGRICCGECGGKYKRRMHYKPSGQYVAWACANHLKDKESCSQKYITDDTLKLAFVTMMNKLVFGHQMVLRPLLQSLRGLNDQSRLLKIEELETAIEKNREQKQVLTNLMASGYLEPALFNKESNELVAEAEALRQEKDGLMRSVNGDMVKIEELQRLLRFTSKGTMMTEFDDEIFLSFVERITVLSRKEVVFEWKCGLSLKERLVEP

SEQ ID NO: 15089 - protein, 635 aa, synthetic construct
MKKKCYIYTRVSTAAQTEGYSLEAQQERLRQYAEYKNLEIAGEYCDAGRSGKSIAGRPAFMEMMEDIASEKDQISYVLVFKLSRFGRNAADVLKSIQTLLDYGVDLVCVEDSIDSSTQGGRLTLAILSAVAEIERENIRVQFMAGRMQKVMEGGWAGGPAPFGYRNEGGSLVVEPGEAEIVRLIYAKYLEPEMQLATVVRWLNDHGYRRISKGSSCSFNRDFAAGVLDNPFYCGKIVYFRRMNRGRAEKDQREEITVRGKQEAIIPEEMWERVQTKRKQGAVRYEKDEPERISMLSGLVKCPVCGAGLVVKKSKTINRNRGGHYKPIHYYACRYYRKSEGRRCGFHHTYNQKKLDGAVMEILVQLTRTEEFQKAFAGAVGDSTSEAALEGKLKDLRRKLHGQEHLKYKLGGELDHLDALLDGYDKAYDAIQEKIDAAYDRIEQLETEIGKVRKKLAAVREGIHSSGQISRILDHFDRLYRKMTCAERRELCRQFIERIEVFPEEQDDGRILKSIAFRFPVFYDGEAASGDPELPDEMVSFELDCRKLPVTVPEAKATYAEIKAYVLETAGLKVSSLYIAQIKRKYGIEMGENYNKPEDPKARVPKCPKEKEFAILDALKHFRMVPETAEYEEAEA

SEQ ID NO: 15090 - protein, 563 aa, synthetic construct
MKNKEKCYLYIRVSTAMQVDGYSLDAQKDRLVKFAEFQGMEIVREYCDAGKSGKSITGRPEFQRMLQDVADDRDGVSYILVFKLSRFGRNAADVLNSLQYIQDYGVNLICVEDGIDSSKDSGKLTITVLSAVAEIERENILVQTMEGRRQKAREGKWNGGQAPFGYLLDSKNSTLIVNPEEAEIVRLIFEKFVHTDMGADSISKYLNQHGYSKKKLREQEVGHFTRSTVLKILDNPVYAGKIAYGKNATEKVKGTRDQYRRVKKEEYLLAEGLHEAVIDQETWEAARAKRKVTGVKWDKTHSLDHEHILSGILKCPVCGSGMAGTVRRRKNKKTGEYKDDFYYRCQHRKKIDEEHFCDFKPSLNQDELNVEVVQIIRDMVAMEKFRDFIQDKLHEKVDVSALEEEREQMKGRLLQVTGAKKKLVLMLDKLDVNDRHYERKYQDMQERLDNLYDRISELEEMLSDVETKISASCGEQITGKQVYQFLLEFDKIYGKMTDLEKKEFMRTFIKTIELYPERDGSGRIIKQIGFKFPVYYNGCEGDTIRLLNENTVEVIALMTRKAQ

SEQ ID NO: 15091 - protein, 501 aa, synthetic construct
MRGVIYARYSPGPRQTEQSIEGQVADCQQYAEEHGIDIIEIYADRKVSGKSVVGRDELQRMLRDAEKGRFDCVLVWKIDRFGRDRQDIAMGKMTLKRAGVKLMYARESVPEGPEGIILESVLEGLAEYYSADLRQKVIRGMRETAKKGQYCGQSLPIGYKVDAERHIVVDEREAAVVREAFKLHIAGGQIRDIVQLFADRGIMGRRGKPVSNAVVYRMLRNEKYLGEFYIQDVKLNVEPIIDKATFEEAAQHFKTSRNNAAGRAKVNYLLSCKMFCGYCGSMINAEAGTGKLGKVYRYYKCGDKKRGKACELKPFPKDHLEDAIILATVNDMLTDEMIEKLTVRILEVQEQENADDPVVGLRRRLDSNQKRQRNLLDAIEEGGARGLVSRLAALEEEEEQLVLEIQRAEIKRPRLTHEVVEAWLRSFRVGDVTDDDFRARLVDTFIARVELRNNEALIFYNIREKGPHSSVRVRPDYWTWRESNPRPKAHPLQYLPSQPLI

SEQ ID NO: 15092 - protein, 559 aa, synthetic construct
MRKQKCYIYMRVSTAMQVEGYSLEAQKDRLTKFAQFQDMEIVREYCDAGKSGKNITGRPEFSRMLQDVAEEKDGVSYILVFKLSRFGRNAADVLNSLQYIQDYGVNLICVEDGIDSSKDSGKLTITVLSAVAEIERENILVQTMEGRKQKAREGKWNGGQAPFGYELDSKNSTLIVNPEEAEIVRIIFDQFTRMEAGADSICKYLNQHGYTKKRLRDQEVSYFSRSTILKILDNPVYVGKIAYGKNKTEKVKGTRDQYCRVKQDEYLLADGLHDAIIDEETWEAAKEKRKRTGVRWVKTHSLDHEHILSGLIKCPLCGGGMSGTVQRRKNKKTGEYKDTFYYRCHHRKRVDGHICDYKPMLNQKVFNAEIEEFIRYMAGGEKFKEFLMEKLEEKVDVSSLEEEKKQLAGQFQQAQGSRKKLVQMLERLDPGDKHYDRKYQDMQERMDNLYDRIAELEEAITDVETKIGASYGKQVTGKKIYQFLLDFDILYGKMTDLEKKEFMRTFIESIELDPDEKDMGRIIKHIDLTFPVYYDGQEGDRIRMPKENTVETICKLVRK

SEQ ID NO: 15093 - protein, 638 aa, synthetic construct
MKRKKCYIYTRVSTAAQTEGYSLDAQQKRLKDFAEYKGLEIAGEYCDAGKSGHSIKGRPAFMEMMDDITSGKDDISFVLVFKLSRFGRNAADVLKSMQTLMDYDIDLICVEDSIDSSTQGGRLTLAILSAVSEIERENIRIQFMSGKMQKVLKGGWAGGPIPYGYRSREGELVIEPSEAEVIRLIYEKYLEPPMKLNSVVRWLNSHGYQRISQGTIRPFNSDFVSRILNNPFYCGKIVYYRRANKGSPDPKQEIVVQGKHEAIVTEKIWEQAQEKREQLARVKGKRDEEDRISLLSGLVKCPVCGGGLISKKNKSLNHNYGGYYKTVYSYGCRNYRTSEGRVCSFCHTYNQERLDAAVMEVIQKVTGTEEFRTAFARTVGNQMSEEAVETQLKMLRKEMHHQEHVKYKLGMELDHLDVLAESYDQQYEKLQAEVDAAYDRIGRIEDKIEKLKRKLLRMKQGIHSSDNICLILDHFDRLYEKMNYEERRTLCRQFIQRIEVFPEKGDDKRILKSITFRFPVYFDLGGNQEGDDEDTPDEMVVFTLDCSRLPITAAESKATYAEIKAHVLRIHGLKVSSLYIAQVKRKYGIEMGTAYNKPEKNKNHIPRCPKEKELAILDALKTYRMIPESTEYFEEAAE

SEQ ID NO: 15094 - protein, 692 aa, synthetic construct
MNSKVRTTHLERHAVVYLRQSTPTQVEFHRESTERQYALADRALTLGWDKSQIEVLDSDLGKSGQTTTGREDFHRLMAAVGLGEVGAVLALEASRFSRSQADWHKLLDICALTDTLVIDHDGIYDPNDFNDRVILGFKGTWSHTELHGMRLRLQGAKLNKAKKGELRCSPPTGYVYDPEGKLVLDPDEGVVAAIQLAFQQFRELRTAFKVMRYFCVNQIPFPRRRWRPGDIGTLHWGPANLSRITALLHNPTYTGTYVYGRRRSINVIEGGQIKKVKIQQLPQEEWKVIIHNAHEAYISWSEYLSNCERLRQNSPVSLSDGCPSTPREGFALLQGLVICGKCGRRMSPRYHGTGGCRAAYECSQARKQDGSMGVCWTVAGAAIDTAVAEQVLGAFTSEQLDISLAVLSELENQAFEIDKTWQLRLERARYEANRAERQYDATEPENRLVARTLERRWNEKLQLLAELEEAYQKARLVQRLELTAAQRQQILQLANDIPRLWHASTTTNLERKEILGLLVKQVAITPIDAPERSTRVQILWHTGATSCFVATRPTNAEKFRTPNQVIQLIEELAVGRTDSEIAHELNRRGLVGGKGRAFTKKGVAWIRWKFGIEKPLSNPQVAPNGVSPEGYYSTSALAEKLGVGIHTIYYWRDKGIIQAFQETERSPWWYKVTPEILDTLREKIRRVPVKSE

SEQ ID NO: 15095 - protein, 494 aa, synthetic construct
MVRRVAAYARVSTDMEEQAQSYRAQIDYYTKLINSRATWQFAGMYSDEGISGTSTTKRVGFQNMIRDALEGKIDLIITKSVSRFARNTVDSLTTVRRLKDAGVEVWFEKENIFTFDSKGELLITIMSSLAQEESRSISENVTWGHRKRFADGKVLVPYSSLLGYKKGKDGNLAIDPEQAKVVRRIYAQFLSGDSPAQIAQDLTRDKIPTPRGKQIWRPHTIRSILTNEKYKGDALLQKTYTADFLTKTIKPNNGQVAQYYVHANHEAIIESDVWEIVQAKLAYHAKDATSYKHPFCGRVICGQCGSAYGRKVWHSGTKYQKHIWRCCAKYEKNTRCNTPHVSEEDIQEAFTQAVTSRYATTKGVRSSLDLIEKKLLAIDELKTRQQKSQVNLEQVQARLSQLITLATHHAISAGEYDQQYHQLESERAEQEKRYQELGAEIARAEEKIAAAKNIARYLENQGVLEYSDTAWLTLVEHATIHTDGTVTITFKDEH

SEQ ID NO: 15096 - protein, 422 aa, synthetic construct
MAGRLEVITPTSVGERLRVAAYVRVSTEHERQLSSLSAQVSYYLHLIESTPGWEFAGIFSDEGATGTKRTGREGLADLMALARSGGVDVVLCKSISRLARNTTDLLEVVRELKSLGVTVRFERESIDTATAQGEVLLTLLAAFAQAESETNSANVKWGIRKKYADGTPHSRHPYGYAYQQGTLVVIEDEAVVVRRLFNNYLAGISPEKTAHMLNDEGVRPRSGRKFRGKTMRTWLENEVYAGRVVCQKYFRPHLATSTVKRNEGELDSWVVDGAHEPIIDPAIFDEVQQVLAMRRQVGRARTPSGGSMALTSKITCTVCSKHFHRRTKTRSGTSHKFWWCYNATRGQGNPCQAPRVREEVLKHICQDALGLDAWDEEAVITGINTITISPDRSVCVELAGGSIRRYQSDGHPSMEGEVRSVG

SEQ ID NO: 15097 - protein, 526 aa, synthetic construct
MSPTVTKIPATRALHTGKPLSATALKRVAGYARVSTDNEDQVSSYQAQVDYYTTYITDHPGWELVKVYTDEGITGTSTAKRAGFQTMVADALAGKIDLIVTKSVSRFARNTVDSLTTVRKLKDKGVEVYFQRENIWTLDSKGELLITIMSSLAQEEARSISENVTWGHRKRFADGKVTMPFGSFLGYDRGEDGQPVINEEQAKTVREIYSLFLEGKSLREIARILTERGRLTARGKTQWSRTAVRSILTNERYKGDALLQKTYTKDFLTKELVKNNGEVPQYYVTGSHEAIIDPLVWDFVQTQLAQSKGRRSRKHVLSHSIVCGQCGAFFTPKTWHAGTKNEKRIWRCSAKYEQHTHCTTRHYTTDQIEKAFETALATMLHANGKDPLTLVEQVSADLFDTSGLEAEVEIAWAVLNAASQALADLVEKGANATLTAGEYDQKYAAATCAYDQAQAKHSQLQEQVNEIRERKTRYDFYRRSLTDLTQEQVTFTPLLFHTLIDHATAQPDGQIRFTFRDGKLSHALTC

SEQ ID NO: 15098 - protein, 507 aa, synthetic construct
MKRVISYIRFSSEKQAKGDSLRRQSKMVTDWLKAHPEYYLDESLTFRDLGVSGFTGKHLQGGLGDFLTAIEKGLVKAGDTLLIESLDRLSRQDVDQASELLRNILRSGVDVVTLSDGEHYTKESLKDPLALIKSILIMQRAHEESLRKSERIQAAWDAKKEEAKAGIKISKRCPAWLKLNDDRKSFSVIPEKVETVKRCFQLRLEGKSIWDIVRTLNAEGHQTLNQYKAGSFGQTSVQDLLKNRSVIGYFTPKGCEEIAGYYPSIIPETDFYRVQQLSYSRYGRKPVSENPMAVNLFKGVIRCSECGHTLIINGFTEKRHGIYRCPCKQENRCNAKGLSRKQTDGTLLTLLSRIDRFEPEQINVIDTLKLQREGILKNIEKLVELSLIIDDMTAITSKLKQLKSDLSLIESDIGKENQRIKSIDTGSLSDCDLSTKAGRIEAQLIIRGVVKEAVLDTTNKRCKVVFHNGKVIDLPITENPSEAVTEAIQSLTEIASKGLLDIDEFSL

SEQ ID NO: 15099 - protein, 481 aa, synthetic construct
MNPQTTPRPRAVLYLRQSVAKEESISLEVQEDAGRRYAAQAGYTVVAVEADHGISGRTWNRPAVQRVMTMIESQQADVIILWKWSRLSRARLDWAVAIDKVETAGGRIESATEQVDVSTSTGRFARGMLAEFAAFESERIGDTWKEAQARRVTQGLPTHGKRKLGYDYDRNAGYTINTGEAAIIRECYRRFIAGDSVQVLCDYLETTDMAPVKASKPNTTGLWHTKSLRSALDSPFMTGHIIYKGEVHAGAHEPLVDPELFEAYQVARKRRHRAPNKSMTDYPYSGMLYCGICGHKYSGGRVGDDTVSAYRCDGYGSYRLHKGGYVSTQTLNQAVLPWITELATQINQAAEANHTELPHHDPTPKLRRALMKVEGRRDSLTTRLLDGLVPGDVYERMRDQLAGEKARLEDQLRDARVASVARPAAMDADLLGQWEVLPVERRKAILRELVKGIVVTPQRPRSLVRIIAKWDSEELPTKSMG

SEQ ID NO: 15100 - protein, 528 aa, synthetic construct
MEQQRKVKTIPATLKQFTSAPIGETKKRRVAAYARVSTDHDEQFTSYEAQIDYYTKYIKGRDDWEFVKVYTDEGITGTSTKHREGFKQMVADALDGKIDLIVTKSVSRFARNTVDSLTTIRELKEKGVECYFEKENIWTFDGKGELLITIMSSLAQEESRSISENCTWGQRKRFADGKVTVPFKRFLGYDRGPNGELIVNEEQAKLVKRIYRMFMEGMTPHGIASKLTKEGIPSPGGKERWWEGTVKAMLSNEKYKGDALLQKSFTVDFLTKKTKVNEGEIPQYYVEQDHAAIIEPEIFDQVQDELKRRFPGKNRHSGVHVFSSKIKCGQCGSWYGSKVWHSNDKYRRMIWRCNHKYDGGEKCTTPVLTDDEIKGKYISAVNTLFKDKDSILSDFEEILAGPLYSTDALKEKEREYEDEMNVAADLVQKEIRQNAVAPQNQEAYQKRYDSLTERFNTAKKNLAEVENEISRKELTRSSIRQFLDTLRKQTDLVTEFDAAQFQSLVDFITVYSKNDIRVTFRNGMEIKA

SEQ ID NO: 15101 - protein, 595 aa, synthetic construct
MKKITEIKKMKPVLPERKKVAAYCRVSMETERLHHSLSAQVSRYSELIQSNPQWEFAGIYADEGISGTKAGSRPEFMRMVADCESGKIDIVLTKSISRFARNTVDLLETVRHLKDIGVEVRFEKENIRSLSDDGELMLTLLASFAQEESRSISENEKWSVKKRMEQGIPTAKPPILGYKWVGNHLEVVPEEAAVVKRIFQNFLDGKSRLETERELEAEGIRSVNGNVMRDSQLKHILNNITYTGNTLLQKEFVEDPITKKRRKNRGQLPQYYIENTHEAIIDMKTWQYVQDEMERRRKLGALANKSLNICCFTGKIKCPYCGLSYMHNRRKKNGHEQEFWVCGSKKKKRTPDNNCPVGGTISEKALEKACCEVLEIPEFDEAVFLEKVDHIEVPEKYTLQFFLKDGTEITRPAPNTGHQDCWTAEYRAETSKKRREHPYAKGTTELSGRIKCAACGCNFRRCTQPASNPKKPKMHYWRCSAHGKGCITVGLREDVLKTQIAEVMGIPKYDAELFKQRIEVIYVKDKDLLEFHFRDGRIQTMHYIPPEKTFKPRSEEARDHMRKLMQERWTPEAKAEMSEKMKQIRSEKFWNSSGK

SEQ ID NO: 15102 - protein, 526 aa, synthetic construct
MERFDKILRVIILYRVSTKGQLYKTNSFDMSKDEIPMQKEACHKFLKTKPNWTLIDEMYEKGISGSKISAVNRDAIQSLKERALNKEFDVLLVWKFDRLGRIESETPQLLRWFVVEAGIQMWSVKEGQRVFETSADTLVNYITFWQADTESKNTAIRIKQRMEQLKEQGLYTGGPIPLGFKAVHKGRINKKGHPIPDLVPDKEFGEVVRTRIFYRVFKMGYGAYIIERELREAGITGPEGKPISVSSIKRILRNKKYRCSIIEKAVFDKVQDILNQRSDAKSESRQINMQARASALLSGNIFCGHCGHRLSSNLDRSSKNAEPRIRYVCYHKTQKKCNCDGQSTYKANIVDEAIENAVRDLLSKIKDRPKESVIKMRYESKMRGLKVKGTELQHIIIEEKNKLEKLQYEIVKCLSGDSVFDSNDLSKLIGEQKERISHYDKNLREVEKEIANKAVAMQSILPAYDRFKGWAEEYESLPLEQKRAVLCELVARIELKRGYEVKIIFNVEYEQFCRDMGDDIKLLKSS

SEQ ID NO: 15103 - protein, 541 aa, synthetic construct
MKKVRKIAAKNLGFHDIELNKSKLKVCAYCRVSTGSSKQVESFETQISYYERYIKSKAEWEFAGVYADQGISGTTAAKRTEFNKMIKDCERGKIDLIITKSISRFARNTADCLEVVRYLSSLNVGVYFERENINTMGAESELILSVLSSIAQDESRNMSENIKWAVQKRFKEGKIRVCTKRFLGYDLNDEGELVINPQEAEIVKRIYREYTNGKSMKEIKKGLERDGIKTITGKEKWQESTIKGILSNEKYYGDLVLQKTITIDYLTHKRKRNKGESPKYLVKNHHEPIISKEEYERVQEIMAKRAAEYGNIPEVRHKYNKRYVFSGKIICSNCGGVFKRRTWNSKSPSRQIVWQCSTYIKEGKNACSMKAVDDMTLKAVFVRVFNRFYTNREQFLSSFLKNVERGLEDKNSKNFEIETQIQNITEEIKRLIRLQIQGKISTEDYEKDYIDLKKQLDKLKKIQLDNLVNKQNNEELKIKTEQIHNYLKKHDGLLKDFDDEVFKTLVERVLVKTPTHLCFKLKNGIVLEEKFIKKKGKNGLI

SEQ ID NO: 15104 - protein, 534 aa, synthetic construct
MVKKVSIIPAKPIAAIKGLPKETKKRVCAYCRVSTDTDEQLSSYEAQVTYYEDYIRKRPDWEYAGIYADEGITGTNTKYRAQFNRMIEDAMAGQFDMIITKSISRFARNTLDCLKYVRILKEKGIGVYFEKENIDTMDSKGEVLLTILSSLAQDESRSISENSRWGIVRRFQQGKVRVNHKKFMGYDKDENGELIINEEQAKIVRRIFKEYLQGKSADKIAAGLMKDGILTVTGKKKWHPTVITKMLKNEKYCGDALLQKTITVDFLTHKRVKNEGQAPQYYVENSHPAIITKEMFEAVQKEMKRRSKLRGFGDKERRSKHSSKYPFSGKIICSSCGAVYRRKRWGPTNKYKKYVWNCRTRDENGPEACNMKAVDEEKLKAAFVRVVNKVIKDSDGFIKKMMGNIEKVLNENKDEAKLKTIDSRLAELREQITNLIRLNSRSSIDSDIYDEEYNRLVLEMENLRSQRLAYTKTEMECKNNYSRVREIEKILNEYELINSFDEELFRVLVEKIKVVSLIEVEFVLKTGVMVREIL

SEQ ID NO: 15105 - protein, 462 aa, synthetic construct
MKKVAIYIRVSTQEQAKEGYSIEAQKEALINFCKAKQWNIYNIYIDGGYSGSNINRPALDKLLNELDKIDVVLVYKLDRLSRSQKDTLYLIEEKFIKNNVDFVSMTESFDTGTPIGMMMVGILSTFAQFERENIKERITTGRIERAKEGHWVGTGRPPIGYDYIDGQLIVNKYEAMQVKEIFDMYLKGYGQIKIRNILHNKGYTTKYGSWLNSSEHTIYRIITNPVYIGKVAFNGEYYEGNHQAIIDEESFNKANMLIDKRKGKSTKRKHLLTGLLICKKCNKRYTTDKGNKYSYYICHNRKRGYKADVKKCFNKIWRVEELEKRVVNIIKEKTKDEESIREAYNKKIKNKTSNNNEVIDKRIKEIDNQINKLMDLYQFDKLPTNIISERIEKLYNEKKTLESQKVDTLENDFPTFEEVYKYMKNFNKIWDGLDRERKIAVLDDMIEAIYVDDDDIDVELRV

SEQ ID NO: 15106 - protein, 591 aa, synthetic construct
MTKLYSYIRWSSAKQSLGSSQARQTKKAQEFAILKGLEYTEIFDRGVSAFRGKNIRSTAALGHFIKEVESKSIPADSWLYVENLDRLSRDDVTNANELFLRLLNLGLTIVTGMDNKVYTRESVNLNPADLMFSIMMFMRANEESRTKSARVIGHVNKLLESHKQGLPVNIKSAGNCPWWIDDSGLQNESPKPHPIYFDIAREVIRLFLDGHGSYRIAKMLNRDREKYPAPSGWSKKISRTWSVRKLEYMRRSKALTGEYVITVRGVKHTLAKYYPAVCTETEFARLQDSVRNNRITQSEDRERIALLSGMNMLRCANCGGAMSFYLMEGKIRYCCGQARNQAEDGCSFWSVAGAPIEHAAFYALMYAAFDYEMGNSRVVDTEALNHDQDARRLRLQKIDRDLAYFTEAISLGTGPLITLVEKIQELEQQKSCLLLDIDNGNNQLLLAEQDDVGSRITDIIELLRSEVLTDITHPIRLKVREIVRRTIQHIAVAKREDKSIIAIFCLPNGEYFIANGIKHEVNGSIAKDVGVFKGALDENGAPLELKARTKADAKVIIKLLDAEKSLRRKIDAIAEQLKIPPLNGKDFFAQR

SEQ ID NO: 15107 - protein, 630 aa, synthetic construct
MTLSPLLATPTLSPQPATPDPLSVIGEMLTPKVAVLYLRVSTARQAQRGDEKEGFSIPAQREANRKKAQSMGAMVAKEFVDRGESAKTANRPALQEMLEYIREHSVDYVVVHKVDRLARNREDDVEIMKQLTAANVALISATESIDQSPSGALLHGIMSSIAEFYSRNLAHEVTKGMTQKVQKGGTPGRAPLGYLNVREFDIDGRESRTVRPDSDRAPLITWAFHRYTEPNVSLSQLALELAQRGLTTRRTPQVPSRALTDTDLHKILTNSYYLGLVSFAGATYAGKHEPLIDQETWDKVQDALQARRSGERRRRHDHYLKSTVYCGNCHNRLIVQMTRSKSGEIYPYFYCSARQAKRNDCTQKAVLIHVVEDKIVAEYQERLRLDRIARDDLERLFRDEFVATRGDGERQRAQIRTDLERLEREQLRLLQAHYADAIPLDLFKKEQDRIRSERTTAERDEARLTQDIADVEHAVQVALDVTMECTRLYKSAPDHIKRLFNQVFFERVLVHTDETITAELNEPFATITSQVVQASAHEKSTTPRSGARTLTSLLEASDGANAPIFCGKGFSNDTLVPLEGLEPPTCSLGRSRSSIELQRLAEPVYPSAGPSSQPAVDSTRQTCLVSYCTN

SEQ ID NO: 15108 - protein, 527 aa, synthetic construct
MTAAIYTRYSTDRQRETSLADQARVCQARADALGLSIFSTYSDDGISGSTPVARRPEGARLVADALAGRFAVLLVEGLDRLSRDMVEQERMVRRLEHRGIRIIGVADGYDSEGSGRKIHRTMRGLINEIYLDDLRHKTHRGLTGQLQRGGHAGGVPFGYRSVAVGDIHVLEVEPAQAATVREIYQRYGDGWSCQRIAADLNARGIKTGRGGTWSVSALYGSPAKGSGVLNNELYIGRMVWNRSQWVKDPDTGKRTRLDRPREEWIIEDHPELRILDQSLWDAVRARFGRPARESGGSGKGKRPTTLFGGLLRCGKCGGAIIATSGRHYGCAQRKDRGPAVCSGVLARRVAIDSRLLGDIRAELASGEQLASIQTKIRARLAETRAQADDLVRTKAGELATIEQQIANLVDAISQVGLSPAISERLAATERRRSELQAEIQRIEALSNVNLSRIPAMYRQMAFQLERALKTNVAEAREVLRPLIEGARVIEEGGQVWVESETGRAAIAVGLSLGMVAGAGFEPATFGL

SEQ ID NO: 15109 - protein, 533 aa, synthetic construct
MSRAVIYARYSTDLQNDQSVEDQTRLCRAHAERLGLLVVGEFHDRAKSGASMFGRPGLSNLMQAAERDEFEVLVSEAPDRISRDIADLAHIHKMLKFRGIEMNCVNGGAMDTVQIGMYGVIGQMQREEGAKKVKRGMAGVVRSGRNAGGKAYGYRPVIGKKGELEIVDEEAVVVRRIFNLYAGGVAPRSIAAILNRENVPAPRGDRWNASTINGNGQRGNGILRNPIYAGRIVWNRVRMIKDPSTGRRISRVNPESEHEEVSAPHLQIVNEDLFQAVQQRKEATGGADRAKAPRSKRILSGLLRCGACGGGMALVGPDRSGNRIQCSTFRESGSCGNGRRYYVERIETEVVDSLRRQFADTSIIEAYVEAYQAEQKRLRGDAQRARANAQRAMQDARDGITKIVEKISKGLIEDEEAAALLAPLRAERDRQKAILETTEEPPNVIEIQPKAVKRFRENIESLAQIVRERDGEPSPEIAAPFRQLVAAVVVNPTEKGQPYEINIKGYLSSLIDSELSVIKLVAEEGFEPPTQGL

SEQ ID NO: 15110 - protein, 550 aa, synthetic construct
MKVALYARYSSDNQRDASIADQFRVCRTYAEKQGWRVVEEYSDHAISGASLLRAGVQALITDALRGRFQVVLAEAMDRLSRDQEDIAGVFKRMAYANVKIVTLSEGEVTHLHVGLKGTMNALFLKDLADKTRRGQRGRVALGKSGGGNSYGYDVVKHFNESGEPIRGDRMINPAEAEVVRRIFRDYVVGKSAKRIAVELNRDGIAAPGGGDWGFSTINGNTKRGNGILNNEMYIGRIVWNRQRFIKDPETGKRQARHNPAAEWIIQEVPELRIVDDGLWNAAKARQAAIKTKRQDDGTEVQNSFRDRRRPKYLFSGLIKCACCGGGYAMISADLIGCSTARNKGTCDNRRSFHRARLEARVLNALRCHLMDPALFKEFCDELTREMNRLRMEGSASIEVARSELKRIERELDTLLNLILKGGAADRINAKMVQLEGRKAELEQQLTDAEVPPPLLHPEMATFYREKVGALHEALQDHTEATRLKAGEILRSLVKEIILTPEAGELKIDVRGDLAGILAISLKTKTPATGTGVSQFEMVAGIGFEPMTFRL

SEQ ID NO: 15111 - protein, 573 aa, synthetic construct
MTKKAAIYLRVSSIDQNYERQEIELKALAKCLGYEIKYIFEEKRSAVLKMDTRDELTQMRKLTKNEIDRIFIWDITRLSRRAIDFITLINEFTDKGICLHFKDKNIITLDEDGKQDMFVSMYLYILGLFAQMDAENLKAKMRSGRERGLAIGHAYTGCAPYGYKLINKQLYIDEKEAETVRAIFNNYVDGKSIQHIIDILNSNKIPTRTGILWTRNSIYAIITNPVYKGKPELTSITKRDENKKPLEKITRVFKAPVIIESPIWDEAQVQRKKHKSFIDKSKEREALLRGILQCGNCGKAYCTAINGSGVPTYICSDNRANINQKLNCKNGGVACYFLDSICWQTIKDIYAYKNFQDTFTKEKAKNQQLLQENQTQINNFIDKQIELDKENERVNKGYRIGIYTDSEAIRAKGEINNNKARYEKMIEELKAQNSILTAKIKQDFSHYKIPTVELSYEEKKAVCKELIETAKIYSYPPNNRIVQLQLKMGLIFNIVLNPKRRLYYIIDNSTVTFNNPQSAPIFLREELKDKDFTVTCDNNDYFNEEIFGEYSFAQMWNIMDKYGYIQDYPKVKK

SEQ ID NO: 15112 - protein, 586 aa, synthetic construct
MKAILLVRVSTDRQEYDEQEKIIYSQAIRDGYKDSDIIPIKEKESGIKLSEEERQGLNRMKEAIEADNEINCVYAWEISRIARKKKVLFSILDYLITRKIQLKIQEPSITLLNADGSINEASETIFTLFAQMAESEMRNKTARFSRSKTASKSKGKYIGGFYPFGYCVDEEGYFQIKEDEAEEVRFIFNSYVSERHSVKTISAEARLKGFKINKSYQVRNILTNNSYASLNEGGVKYPQIISKEMFQLSREIARKNNTNIGLKTKNFYLCAGLIKCHLCGYRYSGIKGTHQYTCRGKLSPDAYNLPHKCSAPSISINLLDAIVWEFTKKIESFNPSNLISEVARIEREIEELNKQIENCNHLLELNEKNRAKNNKMYKIDALSDDEYETENNKIKAERRNIENDIKTINEKINGLNDLKAYRTSYETVKGNLDNITDLPTRREIIRNNIEYIKIYNADISQHKIIKIKCKRYDYESFFIASTTSHKSYAKQYNHHTKFNKETKMIDVYIDDEYKCSYSWYQAMAEDALYSRTLVFNKELHYKDNYNAVKAKEQRDKNKEKRNARARELYRIKQEQLKRNQQTEQPE

SEQ ID NO: 15113 - protein, 532 aa, synthetic construct
MKRAVIYARYSTDLQTDKSVEDQISLCRDFAGRIGAVITNLYYDKAKSGASMFGRPGLAELMVAAEQNDFDILITESTDRVSRDIADLAHVHKVLKFRNIQLQCVNGGLMDTVQIGMYGIVGQMQREEGARKVKRGMMGVVRSGRNAGGKAYGYRPVPGKPGELEIIEEEASVIRRVFDLYAAGVSPRAIAGILNRDRIPAPRGRQWNASTINGNGQRGNGILRNPIYAGRIVWNRVHMVKDPSTGRRVSRTNDEADLETVDAPHLRIIPQDLFDAVQLRKDDASKMGSKTPRSKRILSGLLRCGACEGGMTLVGADRNGRRIQCSTHRESSTCSNSRRYYLNRIEALVLSRLRSQFADTSIIEAYVSAYQDEQKRIRSSALRDRAGAARLLEEAKKEITEIVRMLSKGLIEEDEASELLGPLRQQRDEQQVLLESIEEPTNVIELQPKAVRRFRENIENLSAILAQGEEEPPPELLGPFRQLVAAVVVYPTENGQVYEIGIKGYLSSLIDTDLSVIKMVAEEGFEPPTQGL

SEQ ID NO: 15114 - protein, 601 aa, synthetic construct
MTHGPRAAIYGRFSTDLQNERSTQDQTDLCDAFAKREGYHVVARYADKAKSGASLHGRDGIQRLLGDAQAGLFQIIIVEALDRLSRDMHDLAGMYKRLQFIGCKIIEVHGGEASTMTVGMRGLFAQLFREDNVHKVRRGMSGLLKQGLSAGGKAFAYQPDPSNPGKPRIVESEAEIVRRIFTEYERGRSPKSICKMLNGEGVKPPRGKLWTPSALIGAEERGSGILRNSQYVGRIVWNKNQMVKDPDTGKRVSRANPANERQAADAPELRIISDELFRAVQAQLTERAHKRRPDNMVAQRRPKRLLSGLIKCKACGAGMSVSGVDKSNRTRLRCSAHTNSGACPNPKTFYLEEVEALVIDSLTRELASPAQIQAYAKAHMEQRQAEAAHEGRRQTQIKARLADIQKKNGRLLELILNDVGDAATLSAKMKEQGEERDRLEEELTSLPPERRIIVNPASIASFAERLSAYRPKLEMALYMLDEMGELPRIVRELIKSISVTRDEDGKLSLAVTSWLKPFLAEEGAPVKASRGWGVVTLVAEDRRGLYRRLDSPGLIDFGNWQVSLRDAILEYLSGDPRQPKPDNDLVREIRPSKATGHPRDL

SEQ ID NO: 15115 - protein, 522 aa, synthetic construct
MGNVMVIPARRQVGNTVKQSDQKKLRVAAYCRVSTDSEEQETSYEAQVTHYTEYIQKNPEWELAGIFADDGISGTNTKKRDEFNRMIDECMAGNIDMVITKSISRFARNTLDCLQYIRQLKDKNIPVYFEKEAINTLDAKGEVLITIMASLAQQESQSMSQNIKLGLQYRYQQGKVQVNHNRFLGYTKDDNGHLIIDPEQAEIVKRIYREYLEGSSMDKIADGLMADGILTGAGKTKWHTSTINKILRNEKYMGDALLQKTYTTDFLTKKRIKNNGTVPQYYVEGDHEAIIPKELFMQVQAELVRRRVVHVSPTGKKRSFSCNHCFAQMVFCGDCGELYRRVHWNNHGCKSIVWRCISRLEPTSAEKNCTNRTVNELLLQEITVKAFNKILTKRDFFLKTLQQNIAKAVVSADTLSPGGIQARLEELQKELIKKANNKQDYDSIADEIFRLRDQREQSELDSHHREEAMNRLKELQNFIAGQETDITEFDEALVKKLIEKITVFADHFNVEFKSGLAIEIEA

SEQ ID NO: 15116 - protein, 519 aa, synthetic construct
MKKVTKIAETANSKVKLKKIRVAAYCRVSTDSDAQLESLEAQKTHYENYITSRDDWEFAGLYYDEGITGTKKDKRPELLRLIDDCKAGKVDFVITKSISRFSRNTTDCLELVRKLLALHIPIYFEKENINTGSMESELFLAILSSMAEGESVSISENSKWSIQKRFESGTYKVSYPPYGYDWDGEQMVINPEQAAVVKEIFAALLSGKGTHAIADDLNRRGIPTKRNGRWTATTIRGMLSNEKYVGDCLFQKTYSDSRFVRHNNHGEQTQYMVKDHHEAIISREDFEAAHAFIHQRATEKGVVKGSDKYQNRYTFSGKIICGECGDTFKRRIHSCTGYKYIAWCCSTHIKDKDKCHMLFVKDDDLKQAFVTMMNKLVYAHRIILKPYVDALKNTSSDDSLRRIQEIQTLLAQNTEKRETLTKLMTQGIIDPILFNKETNELLSQADSFRDEINALKNAVSGDVTKVTAATALLHFTEKGGILQEFDDDLFKEYVNRIIVRSRNEVCFELKCGLTLRERM

SEQ ID NO: 15117 - protein, 517 aa, synthetic construct
MKINELLMKLEEVEFNIGNFNRSDFYKNNKEADVNIGIYARISKKNSNLIEQQKKAIRLFLQWRIKLDTQTKVVEYYDDGFSGTQEGREGYSNMMRDLKLGKINVIITTNIDRLGRAIEKMISDIYPEGKVKYLYISLDNKIINAISNMTYIKEKAAAADDYAKTCSIKARRGIETRVQEGSAISSKAAYGYKIEEDSTTGLRKYLLGEDEEIETVNYIFQKYLLGETLGDISRSLTSNGIISPSGKRIWNKSTVESILKNPLYSGQLNQMRYQKQGYSYYGDGRKIVRVERNMWINSGNFKGIVDIEIYNTVQNMLNENRAVRSSKYNKRTFTGILKCGDCGRSLIFKEKWAGYKCSGSQHKEGNCSTHFIKEEEIWNLIFKKLKDKIQHNYEKLKKTVQEEINATNGIQQKQKRIEKNNEKIENATKRMANLYFEEDTKYANSVITEIKNKIIMIENENEELERRVQEGKKYRQDMLYILDNMDKCIKKENWIIKLFINEIKIYQSNKIEIIWRC

SEQ ID NO: 15118 - protein, 556 aa, synthetic construct
MSKLVAIYCRVSTIEQSEDGYSIDEQERLLSKYCEDNDYTIFKVYSDKGISGKSIKARPAMREMLKDADDKKFDMVITWKINRIARNMLDLLKIIDLLEKNDICFKSYSENFETETPMGKFSLQMMGAVGELERGTIAQNVKMGMMARAREGRWNGGIVLGYDVKERENSANKKRRDTELVINEKEAEVIRAIFTMYSQGNGYKAITNYINKFGYTTKKGKSFSVGSIKDILTNPIYIGKIRYNVRPNWSDKRRRNKNPNPLIVDGIHKPIIEQELWNKVQKQIEANKGKPSRIYDGEFPLTGILRCPVCGTGMVISRSIGTRKDGTKRKREYYCCGAWKNKGTAVCHSNSINVDKANQYVFGKLSELLNNDKLIKDIVANINTTRKVMVNPSKEELEKISKELEKVEAKKKKVFEAYEDEIITKKDFSGRMLDIKSREEMLQQEVNNLKSNILDDGVQEVSYEFVRDILSSFSKMLSELPSREQQKRLLHMLISKITINKTRDIESIELNINDNLIMYLSNGGEPNPDGTGGGSPSYFVYRRRLMINPVNIKICI

SEQ ID NO: 15119 - protein, 494 aa, synthetic construct
MLRIAIYTRKSVFKENSESIDTQIELSKKYFQGSHHFEVFIDEGFSGGNTNRPAFKKMMNMIKLRKFDIVATYKIDRISRNIVDFVGIYEDLKNNNVKLVSITEGFDTTTVMGEMMMFILSAFANMERENIKERVKDNMIALAKKGCFTGGFVPFGCEIEKKEGKSYLTITDEKTIQLIFNKYLELKSLYALKKYLLDNKINSLSTRSSLGRLLRNPIYCKSNSKVSNYFESKGYEVVGSPNKKGYMTYGKTSNYPTLIVGKHKACIEADIFLKVNILLDENKEVATKKESKTYWLTEVLYCPYCNSKYVLVNSGRNAYYVCQNRLNRGSNELGIDKEKEKCINSRYLNANLIEEKISYLIRELEDDNYYNYFKKDNVDTNKEEIEVLENVLSKNKAAIGNLVEKLMILSNEASIPVTRKIEELTTKNLELENKIYEFKTIELAEIKSKEENEIKSAIKRFKDLKSNKEKRENVRIIFKKLKYDPYKDSINIEF

SEQ ID NO: 15120 - protein, 523 aa, synthetic construct
MNNNIACYIRVSSDKQDQLQSLKQQRELLQRTYMDNEILMYSDVGTGTSFKREGFKKLLYDAGLNEKKLKDGRLTFEADEFREALFSEIVVLSTSRFARNIIIIDVLRTLWDYKKVNVKFLDVDKNSNNPSDMLLLQMLFTMAENEVKETSTRTKRGNKTTIMQNKIRNNSIFGWDFNKETNSLIANPKEAEAVKFIFETSLEYGLKRTAQITNEAGYRTKKGNLWSDSTIRTLIANPKYKGFNVRNKFSSENLFTESKVKYVRKENWIVMENERIEPLVSIELWEAVQKAQAERCLHGNKGTNSRKYDTRGKVVCKCCGATYIRAVEKRIIDKQQGQHYLICSHKKKYTKKYCQSENINIEILDNFIEEQRKVYYKNIQLQINLKIIKLKKELSKANAETIDMVNDLIKVENEKLYTCKNSLETLINSFISTTSKTMQDIIKAKIEGIEAEIVIIENNIISLENQKSDKDKYIRELNNKIIALKKEGQQILEKELTREEWLDKVDKIVVGGKNDLVAAYKLD

SEQ ID NO: 15121 - protein, 520 aa, synthetic construct
MNVAIYARKSKATKKGESISNQIELCKKYFLNTTNEDVNFLIYEDEGWSGGNINRPQFTKMMNDAKLKRFSALICYRLDRIARNVADFSSTYKILEESNIAFISITEQFDTSTIMGRAMINISATFAQIERETIAERIKDNMLELSRTGRWLGGTPPLGFKSVQITENNKRMYKLEVVEEEIEIVRLIYKLYPEYKSTVPIARYLVSNYIKGKNGGDFSRNTVLQILKNPVYCCSDENAIKYFESKGSTLNCSENNKYGLMVYNKRKGGKKENPIEEWIIATGKHPGIIPGAEWVECQNILSEISSKTSPRKATGNKFLLSGMLKCSRCGSSMCSWSRTSKGIYYRSYRCELKNRSSNRCDSKMVNADELEQFVIDLCKNINIEDIINIKRTKNNNASLKRELTSLNKNLNENDKLLQGLIKKLALIDDIDVLSMIQTEIKKIKTENDNINKRINEINISMFDVEDEENKKQLLLESHKLFINTIDLIEDVEAKRNLIMNFIEYFTYDSETNEVGYKLRL

SEQ ID NO: 15122 - protein, 491 aa, synthetic construct
MKKVAIYARKSVEVKDSISIETQVNMCRNYFADEECEFEEFKDDGYSGGNTNRPAFKLLHKKIELNMIDTLICYKLDRLSRRVVDIADFFDLLDKKDIAFICVKDKYDTSTPMGRAMMYFASVFAQLERETIAERVRDSMLQLAKKGCWTGGPAPRGYELVKHGGKTYLKLIDRELILNLYNWYLELGSLYQVDMRAKGKYNMLKGRDTVRRFLRSPLYVQSSSEINDYLMKNGWKVFGNTNGCGYLTYGVSVKEPIAIVSKHEAVITPLLWLKVQEKLDEVRESIFKRKSKVYWLSGVLRCPYCKKPYVIVNSARNHYYACRSRVNRFHEHNKKCKNNKYVNSIKIESVIEKYILSFRDKVDFEHIYKSNSDNIYNSGIEALNKKIKKNSKMIDNLVSKVALLSNSGAEILLKKIDELSKENKQLEDKVRNEQLNVLEIESKKFDKSFIYENILNFSKTDNPEDKRNYVKNIFKYIDYDPINEKIVCKFL

SEQ ID NO: 15123 - protein, 547 aa, synthetic construct
MKAAIYSRKSKFSEKGESVENQIEMCKEYLNRNYTNIEEIKVYEDEGFSGGNINRPEFKKLLTDAKKNKFNVLICYRLDRISRNVADFSNTIEELQRHSIDFISIKEQFDTSSPMGRAMMNIAAVFAQLERETIAERVRDNMLELAKTGRWLGGTAPIGYKSEAVKYFNQDGKDKKMFKLTQITEEIETVKLIYKLYLEKRGFASVATYLCKNKYKGKNGGEFSRATVEQIIINPVYCISDENIFNWFKDEGALTCGNPDGVHGLMVYNKRNQGGKKPNPIDQWIVAVGKHEGVISSSTWLKCQNILRENRAKSSPRSGTGNKFLLSGMVVCGECGSGMSSWSHYNKNKDFMERYYRCNLRNRASNRCRNKMLNAYKAEEYVENYLLDLDMSTLLHMYKSNKKRALNKNAVKNQLSKLKKQLDKNNKIIKGLVRKFALIGEDTKLIQIVKTEIDNTNIENDEIKNKISELTTSMESFEIREEFVGIVKEALSNFKKFYKLVDIEAKRVLIKSLVKNIVWHGNTETIEINPITNNKPLPQGTVKRRSN

SEQ ID NO: 15124 - protein, 545 aa, synthetic construct
MAAKARVYSYLRFSDPKQAAGGSVDRQLEYAARWAADNEMELDASLSLRDEGLSAYHQRHVRQGALGVFLRAVEDGHVPAGSVLIVEGLDRLSRAEPLQAQAQLAQIVNAGITVVTASDGREYNRERLKAQPMDLVYSLLVMIRAHEESDTKSKRVKAAIRRQCQGWIAGTWRAPIRVGKDPHWVKETEAGGFELANDRAAAVRLVIEMFKQGHGAVRIVRELADRGLKITDSGRSASSHIYRLLANRMLIGEKSVEVDGETFRLEGYYPALLTPAEFADLRYLAEQRGRRKGKGEIPGVVTGLGITYCGYCGAAIVAQNIMGRRRAADGRPYPGHRRLHCVTYSQSAGCKVSGSCSVVPVERALMLYCSDQINLTRLLEGDSGIDVLSAQLASARQHVEELDAQVQRVTDALLLDDGEAPVAVLRRVRELESQLANARRDVDSFEHRLAASASNGAPAAADAWQQLVNGVEQLDYDARMLARQLVADTFSKIVIYQSGFHPGDDEGIIGLILVAKRGTTRLLNVDRKTGAWRAAEEVNPLLFAT

SEQ ID NO: 15125 - protein, 555 aa, synthetic construct
MAAKARVYSYLRFSDPKQAAGGSVDRQLEYAARWAADNEMELDASLSLRDEGLSAYHQRHVRQGALGVFLRAVEDDQVPAGSVLIVEGLDRLSRAEPLQAQAQLAQIVNAGITVVTASDGREYNRERLKAQPMDLVYSLLVMIRAHEESDTKSKRVKAAIRRQCQGWIAGTWRAPIRVGKDPHWVRETEAGRFELAEDRAAAVRLVIEMFKQGHGAVRIVRELADRELKITDSGRSASSHIYRLLANRMLIGEKSVEVDGETFRLEGYYPALLTAAEFADLRYLAEQRGRRKGKGEIPGVVTGLGITYCGYCGAAIVAQNIMGRRRAADGRPYPGHRRLHCVTYSQSAGCKVSGSCSVVPVERALMLYCSDQINLTRLLEGDSGTVSLAAQLAGARQRVAELEAQVQRVTNALLFDDGEAPASVLRRVRELESQLVSERREVDTFEHQLAASASNVAPAAADAWRELVNGVEQLDYDARMLARQLVADTFSKIVVFQSGFRPDDDDGTIGLLLIAKRGTIRMLHVDRKTGEWRAAQEHDLAEDTLPFGLGNAEPA

SEQ ID NO: 15126 - protein, 421 aa, synthetic construct
MQQLIKDADTGLYDAVLVYKLDRLSRSQKDTLYLIEDVFQKNNIHFISLSENFDTSTAFGKAMIGILSVFAQLEREQIKERMSMGRVGRAKSGKIMEFNNPAFGYEVDGDNYKVDPLRAEIVKRIYKMYLSGTSINKIKETLNSEGHIGNKKNWSDTRIRYILSNPTYLGKIRYDGKTYDGKFSPIIDEETFNKTQNELKERQTATYKRFNMKLRPFQSKYMLSGLLRCGYCGATLFVNSYVYNGKRKLRYNCPSTYKSKQKTRTYKIMDPNCPFKLVYAKDLEPAVINEIKNLALNPQSIQKPVKKTPDIDVEAIQKELAKVRKQQQRLIDLYVISDDVNIDNISKKSADLKLQEETLKKQLAPLEEPDNDDKIVAFNEILDQIKDIDSLDYDKQKFIVKKLIKKIDVWNDNKIKIHWNI

SEQ ID NO: 15127 - protein, 532 aa, synthetic construct
MLLPQQRPPADADDEPWLGYIRVSTWKEEKISPELQEEAIRRWAVQHGKRLLEPLVTDLDVSGRHFKRKITSAIERVEEGEARGVAVWRYSRFGRDRTGNAMWLARLERAGGQLESATEQIDATTAIGRFQRGMILEFGAFESDRAGEQWRETHEHRKYKLGLPAQGRKRAGYIWHRRRIPDPVEPEGFRLQKERYEIDSEYGRVIADLYRKYIDGTGFHALAYRLNSAGWRSTQGKLWSEQTVRRYMDGGFPAGLLRVHDPNHRCGKADGSCHQYVYIQGAHEELIGYELWEAYQKRRREVAATPPRARASLYELTGLVRCAQCRGGTEVKGGGNVTVGYAYQCSTRTRHGSMGCDGCYARRTVVEEKAFQWLKGEAAKDIDAAPETPVEDGQDSAKHETAQALRARTRLHAEVERQRQALANLRAERAADPDSFEPGEYEDAVATIRAKRQQAEAELAAMPAEVEPLPERSAYTELIADTVGLWPAMNEAEKNRLYHKVLRRVALVKHGSGTAGTEFQFHPVWEPDPWAK

SEQ ID NO: 15128 - protein, 595 aa, synthetic construct
MSVAHTLMLPLTCDDVLMGEETDYNPADWIDLFCRKSQAVKSKASRGRKQELSISAQETLGRRVAALLGKQVRHVWKEVGSASRFRRKGARTDQDQALAAVVKGEVGALWCYRLDRWDRRGAGAILHIIEPEDGIPRRILFGWNEETGRPELDSSNKRDRGELIRSAERAREETEVLSERIKNTKDHQRANGEWVNARAPYGLEVVLVETLDEEGDLYDERRLRVSAELSGDPKGRTKAEIARLWHTLPVTDGLSLRSIAERLSDEGVPNPSGTAGWAFATGRDIINNPAYAGWQTTGRQEGQNQRRRVFRDENGDKLSVMAGEALVTDEEQLAAKEAVQGEEGIGVPNDGSEHSVKAKHLMTDASYCESCEGSMPWAGTGYGCWKTKSGQRAACEKPAFVARKAAEEYIGKRWQDRLIHAEPDDPILIEVAKRYRAAKNPKTSEHESEVLDALARAETALKRVWADRKGGLYDGPSEEFFKPDLDEATERVTAIQSELERVRGGSNKVDVSWIFDPDLVRHTWERADEKTRRMLLRLAIDEIWISKAAYQGQPFDGDSRITINWHGESPARRRVKTRKLPSGKVVPLIRPQKGK

SEQ ID NO: 15129 - protein, 515 aa, synthetic construct
MKTAIYLRKSRADLEAEARGEGETLAKHRTTLLKIAKEMNLNVLSVREEIVSGESLVKRPEMLALLEEIEDNKYDAVLCMDMDRLGRGGMKEQGIILETFKRSNTKIMTPRKTYDLNDEWDEEYSEFEAFMARKELKIITRRMQHGRVASVEAGNYLGTHAPFGYDIHRLNKRERTLTINSEEASVVRMIFDWYANEDMGANAIRSKLNDLGYKSKLGNEWNPYSILDILKNNVYIGKVTWQKRKEVKRPDAVKRSCARQDKSDWIIADGKHEPIISESLFEQVQEKLNSRYHVPYNTNGIKNPLAGIIKCGKCGYSMVQRYPKNRKEAMDCKHRGCENKSSYTELIEKRLLEALKEWYIDYKADFEKHKQDDKLKETQVIQMNEVALRKLEKELVDVQKQKNNLHDLLERGVYTVDMFLERSNVVSDRMNEITETMEKLKKEIKTEIKKEKVKKDTIPQVEHVLDLYFKTDDPKKKNSLLKSVLEKAVYKKEKWQRLDDFELVLYPKLPQDGDI

SEQ ID NO: 15130 - protein, 520 aa, synthetic construct
MKKITKIDELPQGQLPNTKLRVAAYARVSTDSDEQLESLKAQREHYERYIKSNPEWVFAGLYYDEGISGTKVEKRTELLRMIRDCKQGRIDFIITKSISRFARNTVDCLELVRKLIDIGVYIYFEKENLNTGDMESELMLSILSGFAAEESASISQNSTWSIQKRFQNGSYVGTPPYGYTNTDGEMVIVPEEAEIIKRIFTECLSGKGGGTIARGLNKDKIPASRGNHWSAGTVIDMLRNEKYMGDVLLQKTYTDSNYNRHPNTGEKDQYYYKDNHEPIISREDFAKAQDLIDERAKMKCKGVKKNVYLNRYALSGKIVCGECGRNFRRKTNYSAGRSYIAWSCIGHIEDKESCSMLFLRDGEIKATFTTMMNKLAFSNKLILEPLFKSISQIDEESDRERMDAIDKRMEQLMEERNTLITLMAKGFLEPALFNQERNVLDSEIKNLTTEKTNLVTNSTSGVLRANDIKDLIDYVSADNFNGDYTEELFEEFVENIIVNSRDELTFNLKCGLSLKEKVVR

SEQ ID NO: 15131 - protein, 520 aa, synthetic construct
MTEKNIMVIPARKRVGSTAAKEKIKKLRVAAYCRVSTETEEQNSSYEVQVAHYTEFIKKNNEWEFAGIFADDGISGTNTKKRDEFNRMIVECMDGNIDMVITKSISRFARNTLDCLQYIRQLKDKNISVYFEKENINTMDAKGEVLLTIMASLAQQESQSLSQNVKLGLQYRYQQGKVQVNHKRFMGYTKDEDGNLIIVPEEAEIIKRIYREYLEGQSLVGIGRGLEKDGILTAAGKPRWRPESVKKLLQNEKYIGDALLQKTVTVDFLTKKRVKNEGHLPQYYVENSHEAIIPKELFLQVQEEIHRRSNIYTGEGKNKRIYSSKYALSAITFCGDCGDIYRRVYWNIHGRKEFVWRCVTRIEQGPEVCKNRTVKEDELYGAVMTAINKLLAGGNNMIKTLEENIHAVIGETTEYQISEINNSLEEKQKELIKLANKGQDYEHLADEIDELRDKRQTLLVEDASLNSENERIDELIEFIRKNKFRTLEYDDKLVRKIIQNVTVYEDHFVISFKSGIEMEI

SEQ ID NO: 15132 - protein, 478 aa, synthetic construct
MGKTITVIPAKSRETEDQTTVHKKRVAAYCRVSTDHAEQLSSYEAQVKYYTDHIENHPEYDLAGIYADEGISGTSTKKREQFNKMIEDCHQGKIDRIITKSISRFARNTLDCLNYVRQLKDLGVGIIFEKENIDTLDAKGEVLLSILSSLAQDESRSISENASWGIRRRFESGQAQINHARFLGYEKNSDGELSIVPSEAETVKRIYHDFLDGKGSVQIAEELKEEGIPGWNGESKWRASTIERMLENEKYKGDVLMQKTYTVDFLTRKRMKNEGELPMYLIEDNHPAIIERDTWEAVQLEKQRRIAFVEETGSKKMTYNGDDYVFFGKVICGHCGSAFGRRTWHANDPNARRHVWLCKNRYVKGEKRCRVKNHHVNDLDLAPAFMQALKELLNQNNIKKWTEAKEQADPLLNYKLDKFIELAKSHQELSDYQPELVRRFLERVVVEEKQTLRFYFLDGSVVEMKANRYAEGWKNRIK

SEQ ID NO: 15133 - protein, 637 aa, synthetic construct
MAIKKAALYVRVSTLHQIDKDSLPFQRQELTNYAKYALNIEDVEIFEDAGYSAKNTDRPKYQQMMKRIRNGEFTHLIVWKIDRISRNLKDFSEMYEELKSYKVTFVSKNEQFDTSTAMGEAMLKIILVFAELERKLTAERVFSIMLSRAEKGLWNGATVPLGFVWSEEKKFPVEDPEEVAIVRLIYSLYEQTRSTLKVAYQLNEKAVKTKRGGRWTAKTVRDILRNPFYIGTYRYNMRESTGSRRLKDKGEWIVVEDNHPAIIDKEQFKRVNQLLSDNYRGLTDVQRADIHKHIFSKMIYCGKCDALLTSGLDVARKDGYRPSRYTCISSRTGSNRCSNYVSDLIIGPFIFNYVSNLIRLQERITTKHSTRDMERALLRGNAFIDVVGIDDTALKETYFALTNGMPDQEYSMATDDGNIMPNLDVDRLVKEKLKYEKALIRLEDLYLFGEDGISQKDYIFKKRDIQERLEGIEMEIDALQQKGEDRTSDAFIDHARHFLITREMQQARNVDYRALSETVGREALSDFMHTIIDRIVVADKRVQSITFKNGITHTFAYKPLLDSKGIAPARMQYKEYEEVVLEYLKENGPASRNDLQKATNITRDGFYKLLAELIERGLVTKTGQSTQTRYEYIEKLT

SEQ ID NO: 15134 - protein, 583 aa, synthetic construct
MHEVEVIKANRKISDRTAGKVADILRVAPYARVSTDSEEQLNSYKSQVMYYTDLVKKRKDWVLVDIYADEAITGTQVTKRENFQRMINDCMDGKIDMIITKSISRFARNTLDTLKYVRMLKERNIAVFFEDENINTLTMDGELLLVILSSVAQQEVENISANVKKGLKMKMKRGELVGFQSCLGYDYNPNDKSISINEAEADVVRYIFNRYIDGAGAYVIAKELTSIGYKTKNGNTEWHDTAVLGIIKNEKYKGDVLQGKTFTVDPISKRRLDNYGEEDQFYIKNHHEPIISEEIFEKAQAILERRGAKRRGVEKGKREKYSRQYAFSSKLECAFCGSNLSRRNWHSGSDHEKVIWQCVTATKKGKKYCPPSKAIEEKILESAFVESYKLLCQNNSDVLDELIERMESVLSKNDFQKQLVRVENEIHAIEQKRNRLVDMRLEETIDKATYEKKYSELESILEGLLTEREQLEQSSKEEINLEKRIAHFRKVLENNEVLKNFDRCVFESIVEKVIIGEIDEQGNANPYKLTFVYKTGYSNEVQSKMHKQIKKKKNDKGNLHSYSSPNTCGVRSIDDKCKKQISA

SEQ ID NO: 15135 - protein, 522 aa, synthetic construct
MTTRNVTVIPARKRIGNSAKAEELPKLRVAAYCRVSTDSEEQATSYEAQIEHYTNYIKSNPEWELAGIFADEGITGTNTKKREEFNRMIEECMQGKIDMIITKSISRFARNTLDCLKYIRQLKEKNIPVYFEKENINTLDSKGEILLTIMASLAQQESQSLSQNVKLGIQYRYQQGKIHINHNRFLGYTKDKDGNLVIVPEEAEIVKRIYREYLEGSSMLQIARGLEADGILTGAGNPRWHTSTINKILRNEKYIGDALLQKTYTVDFLSKKRVPNNGIVPQYYVENSHEPIIPREIFMQVQEQLVKRRCVHISKNGKKRNYSNKHPLSQMVFCGNCHEIFRRVHWNNRGKKSIVWRCVSRLENTGLFCTASTILEDTLKEKIVEAINVAVSGKNSFLAILKKNIETVLSVDLDETTADIDKRLEELQTELIQKANLKEEYDNIVNEIYRLRDLRQETLSRNALRQDKRDRIAEMTDFLNTQTGDITEFDDKLVRKLVEKATVYDDRILVEFKSGLEIEVNL

SEQ ID NO: 15136 - protein, 574 aa, synthetic construct
MRKCFLYSRVSSDVQISGDGLGRQEDKLKQYLLQNALRLNLSVDDCEILVDSGVSGWKGSNMGDTAALGQLFRRVESGEIDGSVLIVESLDRFSRENPFRVAGYIAKLAEHSIDIIDVEQNLVIGTSNPWSSTIASIIANRAHEESTLKSKRIKAAWNSRRRKAEESGQYMIKNTPFWIDVLDDKYVANADASIVREIFDLYLQGYGSFTIAKKMNEAGKVIRNKRWSTPKICALLRNPRCNGDFISHSLERDYEKGTSTSVEHVIKGLYPKIVTDEEFALVLNRLNDGSKNKRVCKDRKVTILNGLLKCSICGGALTVRSAGAYRYVGCLKTIEKGGCYSKPIRYDALEKIVVNHIRNMDLGKVYESNDSQEVISKERIKSLMSHIEEYKAGITQLRERGKKPSFDMLTELQNSEDELELLKKELEQLSLSKIDLSEFAVSTELFDITQIALRTRLERTISSLLNKIKVYHTKDLSFSLIEMIYVNDVVKHVLVADKKGDVTGDVVIRRNGESTTYESCSVKIIKDEDGVFSLDCNISEVVLNDYLLLMNVVDFVDSEAKEFLNLHLNAVLAH

SEQ ID NO: 15137 - protein, 613 aa, synthetic construct
MEYDTSKLTDLLMADSQINTRAAAKIAVSYPRVSSKKQAEKDGDPDGYSLPAQREANRRKAATLGAVVVEEFVERAESAKSADRPKLQEMLNYIRQHKVDYVIVHKIDRLARNRADDVEISLAIKQAGAELVSATENIDETPNGMLLHGIMSSIAEFYSRNLAVEVTKGMTQKAKIGGTPGKAPLGYLNVQKITANGSQVRTVDIDPVRAPLITWAFHAYASGDWTLKALAAELERRGLTTRPTPKTPARPIKYNSLHKILTTPYYKGIVVFSKATYPGKHKPLVDEVTWAKVQEVLSSHATGEKQREHPHYLKSSVFCGNCDSRLVITNAKNPSGTVYPYFICLGRHQKITDCEQKAVLIAKVEQQVADHYRTVQLDHESRGQIETMLRDEMATYRTTAEIQHKQLSLQKDRLERERTSLLQAHYAQAVPLDLLKAEQDRIARSLAEITERLTATNMEFEQFERALASALDYAMNCHRAYIGAAHVVGGKQIRRLLNQAIFTRLYIDDGDIHGDLAEPFRTVLSDELANAAQQHAANKGRGMADDGKRHLTSDNSPGISLTEALEKTNKKPDDSVASLKLTTLVPSAGFEPATPAFAARESCLFSRSPVNPT

SEQ ID NO: 15138 - protein, 620 aa, synthetic construct
MSTRHTSADLLQGYTKTAPAGDGADLAVTLLRVSTKKQLYTAIDIDADGNSIATQRDVTALKADALGATITREFIEPGNSGKTVDQRPVFKELLGYLHEHPEVRYVIVYMRSRAFRNHFDAALVQIQLAKIGVRLVSAKEDFGQGAAAVAMEGMVDIMNGFQNTLQGLDVQAKMGRKARAGGTVSLAKIGYLNIRAEFKGKLVNTVGLDPERAPLLRKAWELYASGEYTITRLEATMADLGLTSRPTKTIPPGRPVSSSTLQKMLRDPYYAGFVRYKDELYTGRHEALVSQALFDQVQDVLDARSREGQRDRIHMHYLKNTLFCERCRRNGENSRLIYTKVKGHNGSYYEYFLCRGRQEGHCDLPHQPVHLVEEAIVDYYATLGLPETFITEVRERLESTVQDNQTSTRELHASLTRKLAAIDTKESRLIDLAADDLMPRDKIRQKLNELKQERARIEAGLTSTDEQLSVGAQVLRDALHLVEDPQQLYRDAPNNVRRHLNSAFYERFYLDDLVVADADKTPLFDDLHEAADAHHSARIRRTRPTGVNSAKSPEKGPEMARNPRNAGVPSGVTGLDHPNLVTVLTVPSSSTASLVGVAGFEPTTSSSRTKRATKLRHTPL

SEQ ID NO: 15139 - protein, 490 aa, synthetic construct
MNEISTGILRIVLYIRVSTEEQAKEGYSLISQETVLRREAKRLGAVVTAVYTDDGYSAKNMKRPALKKMLIDSHKGTFDAILFTRLDRFTRRSKDFHNIIDMLGKNDVGIISLAEKIDTTSAIGRFQLELSVSLAQLERETNSERVSQVMEERALKGLRNGGPSALGYKVIDGKYTIDPIGVKAHDKVFDLYREGNGYKGIAHIMLADPEMSHLLKWSSAGVKYILQNPICLGINRYKYVDKNNHLTGNPILTNSDIPAIKDQETFDWVQFEIKRRKKGGKSFTSEHVFSAVLRCGWCGANMQGFSYKHKTKVYKTYRCGDKIEKGTCAFPNTRENGVTEAFLEHIDLSKFDMTQVPLTEQDNEGRIKEIKNQLARLEQRKKNWRLAFANDLLSLDELREHLSEDKEKEDKLLTELHSLESNSSSKWLRSEVMEELKLLKQSWAGIDDKAKKLFIQNAYKHMVVDIAPGQKAGQGLRPKLVIRDYQFITQ

SEQ ID NO: 15140 - protein, 491 aa, synthetic construct
MGARVSVLSGPQKVSHEAQIDTATKWAKAHDYPVVGAFEDLGVSASVPPDERPDLGPWIRERSHEWEVIIWSKLDRAFRSMRHCSDFIKWAETNRKVVVFAEDSMTLNYLNPSTGIDSILGELFVQIAAAFAQIELNRFKSRAEDMHRAIRPTTRWAAGLPPLGYQVVDHPSGRGKGLAIDADAASLVREMADKLVDGWSFVRITEWLNESGKLTSQGRSRKARGLEPKGRWTTTNVIEILTGYRTLGIKTHKGQPVLDGDGEPVRLAPPLFTPERWDEVQRAAQLRKGKPRTPSETANPMLEVGFCAVCGSSLAQQFSKTRPRKSDGHVTFYRYYRCSRTPINCKAVFVVADDLDELLSEQFLLERGDRRVTERVFIPGEDNSYELDFINQRVELLREDRASGLFPSGEDEVVYRNQMKQLLARRDELASVPVRQPGYENVQLEKTYREVWPAATPEEKRKMLIDAEISIRLGESPGKSLRAELVIGTPY

SEQ ID NO: 15141 - protein, 522 aa, synthetic construct
MTTSLVRAVVGARVSIFTDGKESQITQRTKGTAYAESQGWTVVGAFEDLDVSAIKKSPWDRPDLKQWLTDRADDWDALVFAKTDRVFRSAADCVKLSEWCRDHKKILVLVDDGIKLDYFHPDSQQDAFAGAMSKVFLILASVFAEIEGQRFVQRALDRVTQYRHQPRWAYGVPPYGFQVVDRPEGGKTLGHDLEAQQVLQGIATRLLGGDSLTRITADLNETGVLSPADRLRQRTGKELRGSRWTVITVQTILTNPATQGIKTAKGKPVLDAGGEPVRVGPPSFDSETWGRIHSELAQRSQSGQQRRHSDNPLLGVAKCGVCGKNMRHFQRTKGGRHYRYYICGSTPKACPGVLINADNAELAVETSFLDVHTNRRIKERVWRAGSDHSSELEQTTNTITALWEDRALGLFTTPEDQDMFRSQMAALVAKRDALAQTPVIKAGWVDVETEQTYGAVWPDATPVERRKMLTDAGMKLTVYRANKYETYVDLDKAIGEGSVGEHLHSELEARAAEERRRWGMPD

SEQ ID NO: 15142 - protein, 523 aa, synthetic construct
MRFFCYGRKSVFSDKSDSVDNQLRMCLDYCESKFHGKIDSWECFSDEDFTGANTDRPQLQLMFSRIRENAADALVVYQLDRLSRNVRDFSNMYAMLEEHGVMFISIKETIDTTTPIGRAMMFVTAVFAQMERETIAERVSDNMLGLARKGYWTGGNPPVGYVRKSIVEHGRKHVTIIPDPDGVDYVNRIFDTFLSSNRSLQGMETQFKNSGIKTLSGKFFSSTQLYKILTMPFCVEATPEVYDYYANKGCIMDPDSPREKWDGSVGVMVYGRTTGKNKKHQLQPPEKWTVCLGHHEPFMKADKWLLVQSRFSEHKCIKDAKWPVPLMKGVLRCKCGSLMSVSRKKRVDGSCSSWYYCRKRMRQGVSYCDMGQTACDKLDSRLISIFRDIAADPRLINQYLKKTEDKPLRDPKAILSSITSCDSKIGRLTASLALAESSSISKYIIAEIKRLDSEKSRLQKELTDIEHESKRKMTREKDSLKAIAEITRLISGLDGFNDKERNEIVRSVVKTCTWDGVNLFITL

SEQ ID NO: 15143 - protein, 452 aa, synthetic construct
MIVVFRVDRIVRRLFDLADVIRWCQEHRVAFVSATESFLDLTQPFGDIIALLVAKVAEMELAAISERNRSAAQHNLRAGKYRGGPAPWGYMPVHTDEGWKLVQDPEQVVVIHEVVERVLSGEPLRSVAHDLTERGVLTPRDRFAQLRGREVKGYTWHPGGLKRALTSPTLLGRIAVTDTSQGAQDRPEASLVVSDDGTPFVRTEPIIERDKFDRVGVELAGRENRKEPTKRTTSLLLGIIHCGVCGKPAYKLKGGTGRKPRYRCASSQYKNPCSNRSIPLEYAEDEVESKIMHAFGFHPRMLRVWSPGSDHSSDLAEVDAALADLVDSLGTPAFRRGTPARAKLDARIEALATRRDELSSKPTQPAGWTYEATDELVIEWWATATNEERNVWLRQLDIRVEWRSHSEGTRTVVDEFKMSGGVDALQRFVEDGEWTFDVGTTVDIESLTAGRG

SEQ ID NO: 15144 - protein, 502 aa, synthetic construct
MEGETKRALIVTRLSRVTEATTSPERQMEICQGLCDDRGYEVVGHAEDLDVSGSVDPFDRKRRPNIARWLANEAEPFDVIVVYRVDRLTRSLRHLQKLVHWAEDNDKLVVSATEPHFDMTTPFAPVLIALIGTVAQMELEAIRERNSSAARHNIRAGRWRGGQPPWGYVSSNASGEWRLVPCPEQVELINEVAARVLGGEPLQRIAHDLTSRGIPTPKGRTEWNVTPLKRSLTSEAMLGYVMSGDKPLRNDDGSPIVRAEPILSREVFDRVKVELESRSRRGEPTKRSSSLLLRVLYCGVCQLPAYQFNGGSHSKSPRYRCSSTGKSTKCENLTVRMDLADQAFTENLLDMFGDSERLERIWDTGSDHSAELADINEVLEDLTGLLGTGPYKAGTPQRSALDARIAALATRQTALSAEAVRPSGWAWKPTGEMFAEWWGNQDTESRNVWLRSMNIKVTYNNSSGPVTWGLDWGDLKKFEEQLKFGKSAQQAVRQVTEASPDL

SEQ ID NO: 15145 - protein, 522 aa, synthetic construct
MATSLVRAVVGARVSIFTDGKESQITQRTKGTAYAESQGWTVVGAFEDLDVSAIKQSPWDRPDLKQWLTDRADDWDALVFAKTDRVFRSAADCVKLSEWCRDHKKILVLVDDGIKLDYFHPDSQQDAFAGAMSKVFLILASVFAEIEGQRFVQRALDRVTQYRHQPRWAYGVPPYGFQVVDRPEGGKTLGHDLEAQQVLQGIATRLLSGDSLTRITADLNETGVLSPADRLRQRTGKELRGSRWTVITVQTILTNPATQGIKTAKGKPVLDAGGEPVRVGPPSFDSETWGRIHSELAQRSQSGQQRRHSDNPLLGVAKCGVCGKNMRHFQRTKGGRHYRYYICGSTPKACPGVLINADNAELAVETSFLDVHTNRRIKERVWRAGSDHSAELEQTTNTITALWEDRALGLFTTPEDQDMFRSQMSALVAKRDALAQTPVIKAGWVDVETEQTYGAVWPDATPVERRKMLTDAGMKLTVYRANKYETYVDLDKAIGEGSVGEELHSELEARAAEERRRWGMPD

SEQ ID NO: 15146 - protein, 514 aa, synthetic construct
MATSSKLIRAVAYPRYSSDNQREESIIAQMRAIEEYCRQKGYVLVNSYPDEEKSATTDKRPNFQRMIQDSSKHLFDVVIVHKLDRFARNRYDSAHYKRILKRNGVRVESVLEHLDNSPESVVLESVLEGMAEYYSLNLAREVRKGMRENAEQGIHNGGLPPYGLKIDPETRKLVIDPARYRAVQIYFDCIEKDVPNEQIAEILNGQGFRTLAGRKFTKSSFATWASNRKYKGDYVFDASAPKDDEGKRNTNNKKPLDQQVINPGTVQAIIQPDQWDRVNQKKNARKRKPGRMKAKVNYLLTGKIYCGNCGALYAGNSYTNPKSSEKTVLSYYKCQGKCGNTNVRKDDIEHLAIKNLLGECFSVDGMAEIVQSVQKLYQKERHQTENDIEPIKQELKELDMKISNWMEALGAGVKSVIDSIKQAEQRKEALEYELQKAEIMKQTSVLDESLILKILESKKDLLLSGDEDEKKQVLQEYVDRVVIQPSKDINRFDADITYRVFSNGGEGSRTPVRR

SEQ ID NO: 15147 - protein, 495 aa, synthetic construct
MNMLAYTFLVRAYLRVSTDEQAEKGNSLVEQKERIIAYCTAMGWAAPIFYIEEGYSAKTTNRPKLTELLEDVKASSEPGIVITTKLDRLSRSLFDILGLIKYFDKYNYKYVSQSEAFDTSTPAGRLVLQMLGMVAEFERERTSERVRENMLSLAKNTKRVITRPCFGFDVIDGQMEINIEESIILRRGAEALLAGKPSRTVIRSWNTRGIKTKDGNEWHSKTFRELYQRETLIGQFVYNKTYKKGTQVIKRDPSEWVIVEDHHEPILDNETFQQLQELFAGRKSVGKHMSDDTYLLSGLVICGHCHSKMNGKLNRSFSKKLNRENLHYQYLCDGYLKKAKCFHHFAKRDEIEAVIIDRIKQLSVAAPDTLELLTYSKTENSDTEAEKKKITSRLEKLEKNMQKQIDAYNDDIITAHDLKLASERAKKEREELKKTLSDIDENKPSKTAAQIVERSKKLLPDIASPDRLKVKQAIRGIISKIVVDNGEDISIVWRA

SEQ ID NO: 15148 - protein, 494 aa, synthetic construct
MGSRVSHLDDDKATTRKVSHKAQTEEGERWAKSQGYEVVGAFEDLGVSAGKTTPFERPDLGKWLAPERLHEWDVLVFSKIDRAFRSTSDCVDFARWTKENRKILAFSGDGVVLDYLHPKGESLDQMMSEFFIYVGSFFAAIELNRFRTRATDRLSYLRMTDRVSHGVPPLGFRTVPHPSGQGKALERDPEGYALLHEIKDKLLHENYSLTGVVQWLNETGRQTAVAKARKGDAKWSVTSLKRTLTNERTQGLRMSGGKAVLDSQGIPIRMAEPTFTDDEWEQIQQAVNQRSTSGRARYMTDNPFAGIVYCVCGYAVAQHRRKSSSGKEHTYVRCGQGCRGAWKLADVHELLDISFLAGYGDQEMSKLVFVPGEDRSDELSGIERSIARLRWESDNDLVDDEDLYQSRMASLLSRKREIGRIVVPARWERQGTGKTYQELWADPETDRRQVMRDARIRLVLHFIPKGSDAPFVTHAHFVDMWNPEEELNVVPGRR

SEQ ID NO: 15149 - protein, 615 aa, synthetic construct
MKPYDITATMFGTPTEDATVDVKDAVSLLRVSSKRQMDTAIDIDPDGLSIATQRRVVELKANSVGTHVVKEFLEPGYSAKTIDERPIFKELLHYLNTHPNIGFVIVYMRSRAFRNQYDAAMVQMHLQKRGIRLISAKEDFGEGPYAEAMEGMVDIMNGLTNKLQGLDIQTKMYEKARHGGTNGQTRLGYLNVRDVYDGKPFNTVRLDPKRAPLVKKAWELYATGDYTLERVADTMTDLGLTARANRRWPERPVSYKWYHRMFKDIYYLGFITYKGKGEQTQIFPGRHEPLIEQELFDRVQDVLNQRSRKGQRDRIHQHYLKGHLFCARCERHGRTSRLIYTEAKSRNGSYYGYFMCRARQDKLGCDLPLLPAELVEDTITDHYHTLALPADFIDSVRELLSQTLADEQGSVRTMHAQLAKRIKDLDQKEERLIDLAADDSLPQDKIRIRLRRIQNDRASAQAGLLSTTAELNTGADVLKSALAALSNPASYYQRADDTTRRFMNQTFYTKFLLDDEGVVDHHLNPPFDDFHQAKAAWNTTKPATLTDYLNAHPPQTQKRLPSRETPSHNLEPTLAGIVSVPGLSTASMVELRGIEPLTFSMRTRRATNCAIAPRR

SEQ ID NO: 15150 - protein, 581 aa, synthetic construct
MSAARSDAVGNQHATAKIAVSYARVSTKEQAQRDGDPEGYSLPAQLEANRRKAESLNALVVEEFVERGESAKSADTRPELQRMLAYIKEHTVDYVIVHKVDRLARNRLDDAQIHVLIQNAGAQLVSATESIDETPSGMLLHGIMSSIAEFYSRNLANEVVKGMEQKAKIGGTPGKAPLGYRNVRVLSEDGREVRTVVLDSDRAELITWAFNAYSTGNWTLKQLVAELERRGLTTRATPRSPARPLKYNSLHKILTTPYYKGEVTYRGVRYPGRHQPLIDEITWARVQDVLSSHATGEKNREHPHYLKSSVYCGECDSRLIVTMSKSRHGKVYPYFICVGRHQKRTNCNQRAMLISLVEQAVEEHYRNHQLDPNLRDQIEATLLEELSSLRQSTDLENQRLTTQKEQLTNERARLLQAHYAGAVPLDLLKSEQDRIARRLADIDARLIAVDIAFDKIETYLRESLHYATHSYKAYTHATPQERRLLNQAFFTRITVHEDDVEVELAEPFMTLLSDEMATVARVAASQQPENPRSPTSEKVKPARGDGAGLKQTTLVELRGIEPLTFSMRTRRATNCAIAPRR

SEQ ID NO: 15151 - protein, 461 aa, synthetic construct
MGAFEDLGVSASVPPDERPDLGPWIRERSHEWEVIIWSKLDRAFRSMRHCSDFIKWAETNRKVVVFAEDSMTLNYLNPSTGIDSILGELFVQIAAAFAQIELNRFKSRAEDMHRAIRPTTRWAAGLPPLGYQVVDHPSGRGKGLAIDSDAANLVREMADKLVDGWSFVRITEWLNESGKLTSQGRSREARGLEPKGRWTTTNVIEILTGYRTLGIKTHKGQPVLDDDGEPVRLAPPLFTPERWDEVQRAAQLRKGKPRTPSETANPMLEVGFCAVCGSSLAQQFAKSRPRKSDGHVIHYRYYRCSRTPINCKAVFVVADDLDELLSEQFLLERGDRRVTERVFIPGEDNSYELDFIKDRIERLREDRVAGLFPSGEDELVFRNQMKQLLARREELESVPVRQPGYENVELEKTYREVWPGATPEEKRKMLIDAEISIRLGESPGKSLRAELVVNCMSATPD

SEQ ID NO: 15152 - protein, 472 aa, synthetic construct
MSAIKQSPWDRPDLKQWLTDRADDWDALVFAKTDRVFRSAADCVKLSEWCRDHKKILVLVDDGIKLDYFHPDSQQDAFAGAMSKVFLILASVFAEIEGQRFVQRALDRVTQYRHQPRWAYGVPPYGFQVVDRPEGGKTLGHDLEAQQVLQGIATRLLSGDSLTRITADLNETGVLSPADRLRQRTGKELRGSRWTVITVQTILTNPATQGIKTAKGKPVLDAGGEPVRVGPPSFDSETWGRIHSELAQRSQSGQQRRHSDNPLLGVAKCGVCGKNMRHFQRTKGGRHYRYYICGSTPKACPGVLINADNAELAVETSFLDVHTNRRIKERVWRAGSDHSAELEQTTNTITALWEDRALGLFTTPEDQDMFRSQMAALVAKRDALAQTPVIKAGWVDVETEQTYGAVWPDATPVERRKMLTDAGMKLTVYRANKYETYVDLDKAIGEGSVGEELHSELEARAADERRRFGIPD

SEQ ID NO: 15153 - protein, 577 aa, synthetic construct
MSNNTFATTESTTAVKIAVSYLRVSTKEQAERDGEPDGYSIPAQRDANQRKAISMSAVVQMEFVDRGASARSADRPQLQEMLRYLENNHVDYVIVHKVDRLARNRADDVEISLAIKKAGAELVSATENIDETPSGMLLHDIMSSIGAFYSRNLAVEVLKGMDQKAKTGGTPGMAPIGYLNIPKLNANGSQVRTVEVDPVRGPLIAWAFQAYATGNWTVTALAEELSTRGLTTRPNSRTPGRPVSRSSVHQFLINPYYKGIVTYRKATYDGRHEPLTDAVTWARVQEILRDHAVGEKQREHPHYLKSSVYCWSCGSRLVVTMAKNRHGTVYPYFMCVGRHQKRNACQQKAKLIPVVEQEIEDEYDRQLVHLKAEERDEIEAMISDGLQDFRRSSETNRKTLTVQKDRLVSERMRLLQAHYAGAIPLDLLKQEQDRIASQLASIEERLTSSNTEFDRFEQLIKRALDLATYAAKAYRHAATVKGSDQIRRLFNQAFFTRIRVSDDRATGELAEPFKTLLSPEMAAAAKHHRQTKSAAQNATHTPTGAITGENNKPAPRGAGLKETFLVPPTGFEPVLPP

SEQ ID NO: 15154 - protein, 415 aa, synthetic construct
MQHYQDYIAQQDDYDLVDIYTDEGISGTNTKKREGFNRMIADCREGKIDRILVKSISRFARNTLDCIKYVRELKELGIGVTFEKENIDSLDAKGEVLLTILSSLAQDESRSISENATWGIRKRFERGEVQVNATKFMGYDKDEEGKLIINPEQAQVVRDIYELYMDGYSPELIARYFNKEGVKGWSGKANWCPGAILKMLQNEKYKGDALLQKTYTVDFLTKKRIQNDGQVNQYYVEDSHEGIIDEETWETVQLEIARRKTYREEHQLKSYIMQSEDNPFTTKVFCGACGSAFGRKNWATSRGKRKVWQCNNRYRIKGVEGCYSSHLDEATLEQIFLQALELLSENIDLLDGKWEKILAENRLLDKHYSMALSDLLRQEQIDFNPSDMCRVLDHIRIGLDGEITVCFLEGTEVDL

SEQ ID NO: 15155 - protein, 418 aa, synthetic construct
MTVRKIESKTRKPKRLRVCAYVRVSSMEEEQLASFENQIAYYHNHYKERSDVDFIGVFMDRGISGKKTARPEFQRMLELCRQGRIDFIHTKSISRFARNTETILSVSRELKLLGVDIFFEEQNIHTLSSEGEVMLTVLASYAEEELTSHSFNVRWGYQKKFQRGEFHINAKRFLGYDVEDGQLVINQEEAEIVRYIFESYVSGKGANRIAKELNANKVPTVTNRQWHESTIRNLLSNEKYKGDWHFQKFYTPSLGHQSQLNQGQVDSYYMEDHHPAIVSKELWQQAQECRQRRNGTTNPADYAKRYPYTGKLFCPYCKKSLRRQLPYRTPTWMCATYLKQGKSTCEGIKIKESLLDSWKLDLTKQYTIKKKENDRGKADYTYTCQEGAGGDNTPTQTQVEGGRLLSSVHRPRRTAIKL

SEQ ID NO: 15156 - protein, 479 aa, synthetic construct
MAKVAIYTRVSTSMQADEGYSLDEQIDKLKAYCDIKDWTVYKVYSDGGFTGSNIKRPAMTNLVSDAKAKKFDTVLVYKLDRLSRSQKDTLYLIEEVFIKNDIDFLSLNENFDTSSAFGKAMIGILSVFAQLEREQIKERMLLGKVGRAKSGKSMMWAKSSYGYKYDKKTGTLNIVPAEAIIVRKIYELYLSGKSITKLRDYLNENNLLTNKKVKWSYRTTQSVLTNPVYCGLIRYDGEIYHGLHEPIITKETFDLAQEVIKERQMTALTYINPRPFKAKYMLSGLARCGYCGAPLKIMLGAKRKDGTRTMRYQCTNRFPRKTKPLVIYNDNKKCDSGYYYKEDIENIVLNKIYAIQTDEKVADDIFGKEEIIDNSKIEKEIKQVNLKIERLNDLYLNDLIGLEELKAKTSNLIDQKNLLENEIKDRENKKENHLKKQALKKISTKNIFELSYEDQAIIAKSLINRVYIKENAIEIDWKN

SEQ ID NO: 15157 - protein, 481 aa, synthetic construct
MKSTNKVAIYVRVSTTNQAEEGYSIDEQIDKLEAYCKIKDWTVYKVYTDGGFSGSNTERPALEKLIKDANKKKIDTVLVYKLDRLSRSQKDTLFLIEDVFIKNGIEFLSLQENFDTSTPFGKAMIGLLSVFAQLEREQIKERMQLGKLGRAKAGKSMMWNKTSYGYDYHKETGTVTINPAQSLAIKFIFESYLSGRSVTKLRDDLNDKYPKPIPWSYRAVRTILDNPVYCGYNQYLGEIYKGNHEPIITKEVYDKTQKELKIRQRTAAENVNPRPFQAKYMLSGIVQCGYCLAPLKILMGVIRKDGTRFIKYECHQRHPKKTKGVTTYNDNKKCDSGFYYKDDIEAFVLQEVNKLQHDTDYLDEIFSDNQKEAIDRASYQKQIQELTKKISRLNDLYIDDRITLEELQAKSAEFLNMRALLEKELEDDPALKQEETKNTIKQSLSKGDILKMDYEAQRDIVRALIKKVQVTADSILIKWRI

SEQ ID NO: 15158 - protein, 508 aa, synthetic construct
MKKAIAYMRFSSPGQMSGDSLNRQRRLIAEWLKVNSDYYLDTITYEDLGLSAFKGKHAQSGAFSEFLDAIEHGYILPGTTLLVESLDRLSREKVGEAIERLKLILNHGIDVITLCDNTVYNIDSLNEPYSLIKAILIAQRVNEESEIKSSRVKLSWKKKRQDALESGTIMTASCPRWLSLDDKRTAFVPDPDRVKTIELIFKLRMERRSLNAIAKYLNDHAVKNFSGKESAWGPSVIEKLLANKALIGICVPSYRARGKGISEIAGYYPRVISDDLFYAVQEIRLAPFGISNSSKNPMLINLLRTVMKCEACGNTMIVHAVSGSLHGYYVCPMRRLHRCDRPSIKRDLVDYNIINELLFNCSKIQPVENKKDANETLELKIIELQMKINNLIVALSVAPEVTAIAEKIRLLDKELRRASVSLKTLKSKGVNSFSDFYAIDLTSKNGRELCRTLAYKTFEKIIINTDNKTCDIYFMNGIVFKHYPLMKVISAQQAISALKYMVDGEIYF

SEQ ID NO: 15159 - protein, 546 aa, synthetic construct
MRAAIYSRFSSALQSEGSIEDQERLCMARAAREGWHVVARFEDRAISGASMVRPGLQALLDAAQAGKFDIVLTEALDRLSRDQADVAAIYKRLCFAGVAIVTLAEGEISELHVGLKGTMNQLFLKDLAAKTRRGLRGRVEAGRSGGGNSYGYKVVRRLGDDGMPVTGEREINPSEAQIIQRVFKEFAEGQSPKAIARRLNDERIPGPRGKLWRDTAIRGHQQRGTGLLNNELYIGKLVWNRLRYIKDPETGRRVSRQNPKEEWIITDVPELRIIDDTLWKRVKTRQGEITDTDRVQNIKATRFWEKRRHKHLLTGLLTCGCCGGGFASVGRDYVACSNARKLGTCDQRKSFQRNALETAVLDLLRTKLMQPEAVAAFVKEFTLEMNAAKGQQSDDRARLVSEQSQIKRKLEGLYDAIADGLRTTGLKDKLLALEGRLAEIETSLAEPAPSPVRLHPNLSELYRRKVEQLAESLRDPAIRPAAVDTIRGLIEAVTVNIDDAGDVTLALDGALSAMIDTSQPGVLRGVDAGSVKVVAGTGFEPVTFRL

SEQ ID NO: 15160 - protein, 532 aa, synthetic construct
MRVAVYIRVSTEEQVERGTIENQIEFATKYCDLHKLEITEWYKDDGISGTIPLEQREAGKQLIQDGKDKKFDLLLIYRLDRLGRAARVILNAVHELEGYGIKIKSMTEPFDTSDPSGRFLLTILAGVADLERSTILDRLWQGANRAARDGKWIGGIVPYGYRVNEDGYLEINEDPLPGLDLSEAGVIRLIFDLITNQDYGSIKIGEHLDALGIPTAYTKDKRKVKRGDGKRREKTSGIWQQSRILGILKNEVYKGIHFYGKRASRQRELIERTVPAVISEEQWEEAQRALKRHRIESQVGSLNNILKGLVKCGECGRSYYLHSYGQKGKTLYYYVCLGKTTHHTRNGGRCSSKNVPREWLDSMVWNDILNFAANPGNILEELKPDVEKQQDNRERLQQQRNLLRKALKEKETEKQSILDLFRKKFISSIDVEIQLGKIEKETKQLQQEEKNLSFLIENEQVVETQLQNAESVLNELQTKVSQDIDFEAKFRIVHSLVKEVKVHTIKNPEGRDKAEVAIRYLFMQTPIHMGTD

SEQ ID NO: 15161 - protein, 676 aa, synthetic construct
MAGTKKSSTSRISTGTAAWEQDVRVGTYTRRSTTEDNQPYSIEAQDARLDSYINSQPGWRHTTSFTDDASGASTERPGLQRALQAARAGLIDVLVVYRVDRFSRNLRDLVTLLDELDRAKIVFRSATEPFDTSTPMGRMLVQMLGMFAQFERDTIIDRVIAGMERKAAKGLWKGGKRPYGYRVDKTTQTLVVDEAEAVVVRMIFDLYTCRRLGARAVAAELNARGHRASTGREWSGHHLLRILNSRIYLGELTFRGTTVTDTHPALIDTAAFDHAQAVLEARGESHAHRAANSSDYLLTGRLRCPRCGRAMIGTRATGRSRTYRYYTCFNRARYNSDKCDFTRLDADSVDAAVLEALGNFYRTRHDLISQAITAQQRCHRDSSNDTRIELDAVTAELAKAQQAIERYLNAFENGTLDPELLAGRLSELRAKTGQLITRRDELTAALANEPTAPKPATLDGIADHIADIITNGTRSQAKALIETLVAQVAVTGPDRLVPTFRIPQPGNDIGAGTASAIPAPMESVRAMPRLVDLMRSYSNQGPLTSSLEQLRKRVSDQQESRAPVEPGKPHALKRRLTDTDRTAILAAYEAGASANQLAADFRLGKASILAVLRAGGAAVRKQRRLTNDEIDHAVTSYHNGESLARIGQRLGVAHTTVRTALQRRGIQRRDTHGRLR

SEQ ID NO: 15162 - protein, 631 aa, synthetic construct
MTNAVMYARVSSARQKKNETIGSQIEALRAHAADLGLEVPEQWIFCDDGHSGATLIRPALERLRDLIAGVDIDVVLCYSPDRLARKFAYQALLIEEFTRAGVRVEFVRGPRGDTPEDQLMVQFQGMFAEYEKAQIMERYRRGKTHRAKSGSVNVLGGAPFGYRYLRKTDHSGAVYEIAEHEATLVAEMFRRYADDGASIADLTRWLTDTGTPTRTGKTRWDRSVIWGMLRNPAYAGRAVFGKTKVVHESADLNRVARLAGRSTPTASKTVDRPREEWIEIAVPAIVSQATFDRVAARLAENKRTTGRGRGRGHTESYLLQGLSACARCGYGYYRTATRTTNKRISYYRCLGSDNYRYEGGRVCDNKPVRADYLDDVVWDHLTALLADPALIRTEIDKRLDTAKSSDPVVAQRKRLDTALAKTRSGIAAMIEAFGEQLITIDELRARMPELRARETSLRNQIGALDAQQADREGYLALASDLEGFLAQLRSNAETATVDDRRRVVKLLVKDVLIGPEKITIRHRIPLRERTNSGEESAADTDTEGEHCQLRWGRNQSVAGEPVHALRVRRVDEPGVPEHPVRTLLRRRGGALRQRVSGLSGPGRDRCPVGADRVGVASGQDAHRLLQGRRSA

SEQ ID NO: 15163 - protein, 567 aa, synthetic construct
MTNAVMYARVSSARQKKNETIGSQIEALRAHAADLGLEVPEQWIFCDDGHSGATLIRPALERLRDLIAGVDIDVVLCYSPDRLARKFAYQALLIEEFTRAGVRVEFVRGPRGDTPEDQLMVQFQGMFAEYEKAQIMERYRRGKTHRAKSGSVNVLGGAPFGYRYLRKTDHSGAVYEIAEHEATLVAEMFRRYADDGASIADLTRWLTDTGTPTRTGKTRWDRSVIWGMLRNPAYAGRAVFGKTKVVHESADLNRVARLAGRSTPTASKTVDRPREEWIEIAVPAIVSQATFDRVAARLAENKRTTGRGRGRGHTESYLLQGLSACARCGYGYYRTATRTTNKRISYYRCLGSDNYRYEGGRVCDNKPVRADYLDDVVWDHLTALLADPALIRTEIDKRLDTAKSSDPVVAQRKRLDTALAKTRSGIAAMIEAFGEQLITIDELRARMPELRARETSLRNQIGALDAQQADREGYLALASDLEGFLAQLRSNAETATVDDRRRVVKLLVKDVLIGPEKITIRHRIPLRERTNSGEESAADTDTEGEHCQLRWGRTLPAAGQYRPVGAG

SEQ ID NO: 15164 - protein, 654 aa, synthetic construct
MTNAVMYARVSSARQKKNETIGSQIEALRAHAADLGLEVPEQWIFCDDGHSGATLIRPALERLRDLIAGVDIDVVLCYSPDRLARKFAYQALLIEEFTRAGVRVEFVRGPRGDTPEDQLMVQFQGMFAEYEKAQIMERYRRGKTHRAKSGSVNVLGGAPFGYRYLRKTDHSGAVYEIAEHEATLVAEMFRRYADDGASIADLTRWLTDTGTPTRTGKTRWDRSVIWGMLRNPAYAGRAVFGKTKVVHESADLNRVARLAGRSTPTASKTVDRPREEWIEIAVPAIVSQATFDRVAARLAENKRTTGRGRGRGHTESYLLQGLSACARCGYGYYRTATRTTNKRISYYRCLGSDNYRYEGGRVCDNKPVRADYLDDVVWDHLTALLADPALIRTEIDKRLDTAKSSDPVVAQRKRLDTALAKTRSGIAAMIEAFGEQLITIDELRARMPELRARETSLRNQIGALDAQQADREGYLALASDLEGFLAQLRSNAETATVDDRRRVVKLLVKDVLIGPEKITIRHRIPLRERTNSGEESAADTDTEGEHCQLRWGRNLDAMRSWHGLVVGLFATRRGADTTVARSGRLSLLINCDHLTYAAIFHGWRRNCTDPACHATTSDDGSWRKPYDSAPILDHAHTPSYPFDAPQPGDWSFHS

SEQ ID NO: 15165 - protein, 607 aa, synthetic construct
MKSDPHQKVQASHLKRNAYLYIRQSTLRQVFENTESTKRQYALRQRAVALGWSEDRIIVIDSDLGQSGASSADREGFQRLVAEVGVGHAGIVLGLEVSRLARNSTDWHRLLEICAITDTLILDEDGVYDPAHFNDRLLLGLKGTMSEAELHVLRARLQGGILSKARRGELQMRLPVGFEYNAAGAVVLDPDQQVQHCLRWLFDTFRGTGSAMATARAAHHLELAFPRRCCKGPHKGELLWGSLGHSQVVRILHNPRYAGAFVYGRTHTRKTVDGRTRVIRAPRDQWDTLIPGAHAGYLSWEEYEQNQKRLHESAQAIGADRRRGAPREGPALLQGVVVCGRCGNRMTVRYHSRQGCLCPEYICQREGIEQAGPVCQRIHGAAIDEAIGELLVEALNPLAIEVSLAVQRELQSRIEEADCLRHKQVERAQYEADLAQRRYMRCDPENRLVADSLEADWNHKLRALTEANEEYQRRREQDARILTDEQRAVIVSLASNFPRLWRDPATPDRERKRMIRLLLEDVTLNRDQQVTAQIRFKGGAHRTLSLPLPLKSWQRWVTPATVIEEIDELLNHHTVLQIANILNERGAPSGTGRPFNAKMVARLQRNY

SEQ ID NO: 15166 - protein, 525 aa, synthetic construct
MKQRAVYYARVSTDEEKQLNALEKQIQENKDVIASNGWKLVDEYIDEGKSGTSTKRRNEYKRLLKDLSEDKFDIVVCKDQDRLQRNTLDWYLFVNQIVTNDIKLFMYLDNKYFSSNEDALITGIKAIIAEEYSRNLSKKLNNTNKRRIEMAKQGFEVSALGNGKALGYKIENKRWVKVPQEIELALFIWDLYEKYDSIRKVRDILNNMGYRNSVGKPFSLESISRVLKNEKAKGILVMGRYKHDFDKKRVIKTAEENWTRITMPELAYVSEERWQKVNDRLKSKKIGKRGKYMGADPLSGKIFCGKCGSVYWRRFSKGYISWYCSKAYSKGSIICNGSNPMSGIKLKKIYAKLSEGLVVNREVVKESIITWLEETKNALTDDTKRKTASLDLQKALQKKEKLTEIYLEGIISKDEYKVKYADLNEQITELQMLVKPVEDNKDVVEIKEILKNIDAEIDAYINLDEFEDSKIDFLIEHTKKITVDNKHLIIELDLIGGAIIAGEDFLLFVHDSGEITNAGIYRSIA

SEQ ID NO: 15167 - protein, 613 aa, synthetic construct
MIEYTNKITALYSRLSVGDEDRDGGESNSIVNQKAFLERYARDKKLINIRHYIDDDESGRFFDRSAYTQMISDVEQGKIGIVIMKDMTRWGRDYLQVGNAMEIFRRNNVRFIAINNGIDSIDQNTLEFAPFINIMSEWYARDISKKVKTGIKTKGANGKPVATEAPYGYIKDPENKDYWIVDKEAAEVVKLIFRLFMEGKNRNQIAVYLKEKEILTPTFYMKRQDRGTAKSKPLNEENRYNWNKATITRILKRQEYCGDVVNFKTEKHYRDKRNHYVDKSKWQITENVHEPIIDRITFENVERMLKNAPVKRPNGDGEIHALSGLMYCKDCGTKMHIRTIHKNGKVQHVTYCSEYAKGKAKHPKCNSPHRIDVDEVMENIAEVLRNIAQYSLENKVEFEKIVKDSLYKEQTEEVKKNQKRMPQITDRMEQIERVMNKLYEDNALGNMDTERYEQLSRKYAEEYYTLKEEKEEIKERLSECENASQRTKNFIRLAESYSNFEELTPNIINEFISKIVVHERDVKRAKYVVQRIEVYFNYIGKFENELTKQIEPTEQEMLQMREEIEEAKKEKSRAYHREYSKAYRAKNLEKCREYEKLKAREYRAKKKLLQAIT

SEQ ID NO: 15168 - protein, 624 aa, synthetic construct
MKKDVKVIKGDTTLKRTASGCVERSIKRVAAYCRVSTDTEDQINSYNSQVEHYTEFIQKNNDWTLAGIYADEAITGTQVDRRIDFQRLINDCMNGDIDMIITKSISRFTRNTLDTLKYVRKLKEFNVAVFFEEENINTLTMDGELLLTILSSVAQQEVENISANVKKGLRMKMERGEMVGFQGCLGYDYDPETKSISINEKEAEIVRYIFRRYLEGVGGMVISRELEEQGYLSPRGYKKWTETTVLGIIKNEKYKGDLLMGKTFTVDPISKRRLDNFGEQDKFYIENHHEPIISEEDFEKAQGIRLRRAKNRNTVANNGGKREKYSRKYAFSSMLECGFCGHMLSRRNWHSSSEYKKVIWQCVNATKNGKKYCPHSKGIEEEAIEKAFMESYRQVCHNNVEITNEFLKTAEEELKDNSLAKDLKKISNQLDKILKKEKDLVELRLNESISMDIYQEKYNEISISKEKLLEEKRALEITLTDEKALKKRLEGFKKLLESNKYLEEFDRTVFESIVEKIIIGGTNADGEIDPAMITIIYKTGKKDSQDGRLFKSRRKNAKAAEENDGNKLYPQSSNEVNKLYSYTIDNTAVSSGGVWRMRGKLPKFYERYGLKKENEVILMGRELK

SEQ ID NO: 15169 - protein, 556 aa, synthetic construct
MSNTKRTGQTALYERLSRDDEMQGESNSITNQKQLLESYAKRNGFVNIYHYTDDGVSGTTFDREGFQKMIKAVEENKVSTVIVKDMSRFGRDYLKVGFYTEILFKEKGVRFIAINNGIDSEKQAESDFTPFLNIMNEWYARDTSRKIQSIFRARMEEGKRVSPSVPYGYYRNPKNKQELLVDKESAKVVKRIYRLVIEGYGVTQIADILTKDKILIPSAYAETHYPENNHSSKKRGIEDPYFWTPTTVGYILEKREYMGHTVLGKTISLDYKTKKRRKAKENELIIFKNTHEAIIDEETWNNAQRLRKTVRRSPKYGTTSHPFTGLLICSDCGGKLSYREPAEHKEKKYDCDYCFVCQHYRHRKGSCSMHYIKVKTVNEILLKSIKEITDFAKEEKQEFLKVMNKLSDEKREEKYQEDKEKLEKLSSRNAELTTLITKLYEDHALGKIPVKHFDRLFNTYDMEQQDLEKQIQYFEQEIESYHQRKVDTDKFLKMIEKYTDIEKLTVPMINEYIEKVVVYEATGGRQGKYRKQQVDVYFNFIGNCQVPQKVDIEKMA

SEQ ID NO: 15170 - protein, 603 aa, synthetic construct
MATNKKITALYERLSRDDEMVGDSNSIINQKKMLEDYANKNGYTNILHFTDDGYSGGSFERPAWKKLIEGVENNIIDTVIVKDMSRVGRDYLQVGFYTEVMFREKGVHFIAVANSVDSNKTESAEFAPFLNIMNEWYIRDASKKIKSVLKSRGLEGGHHTSNHAIYGYRKDKDNPSKWIIDEEAAEVVRRIFQMSLEGNGPYQIAKILTEEKVERPSYYLAQRGMGNHISNYNSTEPYLWRGTTISNILSRPEYMGHTVNFRTYKESYKSHKSKKTSKDEWVIFENTQEAIIDEETFNTVQKLRKTIRRTDSVGIANPLTGLVFCADCGAKMYNHRGKAGFKRDWLGRKTDKRRPLKDEYICSTYNLARGNFEEKCSSHYIRSEVINKLVLDTIREVSEYVKLNEEEFIKKVYRASKEQQEKTSKLLKKRLAKEEKRISEINSLIRKLYEDNVSGKLSNKHFDMMLKDFETEQTALEKSIEQTKDTLRDFEEDSIRADKFIALVKKYTDFSELTTQMINEFVDKILVHEGKWENYERIQEVEIYLNFIGKFELPQKEAKELTQEELEELEKLRKKREKKREYNYRYMKKVKDRIEAEGISGKV

SEQ ID NO: 15171 - protein, 557 aa, synthetic construct
MIADKITALYCRLSQEDVQTGESESIQNQKLILQKYADEHHFFNTRFFIDDGFSGVSFERKGLQAMLQEVEAGNVSTVITKDLSRLGRNYLKTGELIEIVFPEYEVRYIAINDGVDTAREDNEFTPLRNWFNEFYARDTSKKIRAVKQAKAQKGERVNGEVPYGYIADPNNRNHLLPDPETTHVVKQIFAMYIRGDRICEIQNWLKENKILTVAELRYRRTGKCRHPRPHPTCIYNWPDKTLYDILSRKEYLGHTITGKSYKVSYKSKKTKKNPEEKQYFFPNTHEALIDEETFDLAQKRIATKHRPNKINEIDLFSGLLFCGDCGYKMYLQQGAGTPERKHAYTCGKYRNRIRTGEICTTHYIRKSVLKELVLADLQRVLSYVKTHEKEFIRHANEYNAKSMQKALSRQKKELEKATVRMNELNILFRKLYEDNALGKLSDEQFVFLTSGYDEEKETLTRRIAELSQEIDKVTERSVDVRKFVAIVRKYTAIQELTYENVHEFIDRILIHELDKETNTRKIEIMYSFVGRVETGDQPTESISYFRQIGANVKSYAI

SEQ ID NO: 15172 - protein, 528 aa, synthetic construct
MQETNISINEIIMYLRKSRSDDPYMTVEEVLARHERQLQEYALSSFGSIIPEERIFREVVSGETIADRPVMQSVMKYLESGQIKGVLVIEPQRLSRGDLEDCGRIINAFRYTNTLVLTPPKTYDLSDEYDRKFFEMELTRGNDYLEYTKKILNRGRLASVKQGNYIGSIAPYGYRKIKTGSGKDTAHTLEIVPEQADAVRMMAQLYLAGNGFTRIAAHLDSLGIKPLKSDHWSPAAISDILSNPVYIGMIRWNHFKTIKTMQNGQIVKSRPTNHDTDYILVPGKHPAILDQGTFDAIAQRRGKSPKIKRGHELRNPFAGLVYCGTAGCGRSMTFKQFTNYRSKVPRRSESMICPNQRICHTKSVQYSAFVERVKEILSKTVDDFEIKLQNDDGNIVRIHENIIRNLEQDLLKLKDKDLRQKDAYEDGIYTKEEYASRNAKLQEQICEVQLSIQRAKDTMPPEVDYQERVSRFSDCLSKFEDTDISASEMNLLLKSCIEKIIYHNSSESKPGIGRFVANPFELDIYLRL

SEQ ID NO: 15173 - protein, 501 aa, synthetic construct
MEIQIREGSREQKRKLKVCAYCRVSTDADEQENSLENQVRHYEMVIKANPDYEYAGVYSDFAISGFKEKRPGLQKMLADAEKGKIDLILTKSVSRFARNTSIVLEATRKLKELNVGVFFELQNINTLSGEGELMLTILAAFAQAESESGSAGAKMVYQRKYEAGIPVQYLERSFGYTKDERGVFVADEAEAVWVRKIYKMAAEGYTPASIKRYLNENGIKTVGGVQWVDSTVFRLLENEIYKGDYIMHKHFVNEERKLVRNRGEVDAWYIEDDHEAIVSPELWQKAQDALEAKRDYLAEGSVIKKFTEENYPYMNKIYCAKCGYPLYKRIYSKGNRLNWGCSGMKRYGKSFCDGINIPDGVLRSAWHFEENTYIDEKASDKGVKEFSYLKERSWKRRHKKKQPPSFPENTEAEYPYRDKIFCALCGSRLVRYVETKNHKVTWICNGRKRKGKDFCDGTRIPDHILKGWGEIKKDIYIQRKDDKNGKKHYSYTSKKPSGIGA

SEQ ID NO: 15174 - protein, 463 aa, synthetic construct
MARSITVIPARNRQASGHRAAPQKKIRVAAYCRVSTDQEDQLHSFEAQVDYYTKYINDHENYEMAGIYADEGISGTNTKKREQFKRMIVDCGKGKIDLVITKSISRFARNTQDCLMYSRKLKNLGIGIIFEKENINTLDSTGELLFTILSSLAQDESRNISENCKWGIRTKFKNGEMHLNTFKFLGYDKDENGKLIINREQAKTVRRIYRDFLWGLNPAQIAKELEEEQVPGCLGQTKWYASTVIGILKQEKHMGDALLQKTYTADFLTKRQVKNNGEVAQVYVRDSHKGIVDKETWNAVQEEFERREKFMQKHGTDRYSYGSECYPFCEKIFCGECGSLFTRHSWKSRGIIQWQCKNHRKDGKVACTNAYVDDADLEKGFIKAFNRLVGEREKHIERWNSMKLDGTPLEKIRAGQMMEATESGQLQQYVPEAAQLVLEEITIFGAKKYEFAFLEGSRVKVSV

SEQ ID NO: 15175 - protein, 537 aa, synthetic construct
MLRQTNQQPITALYPRLSHEDELQGESNSISNQKRILETYAKQNGFSNLRWYTDDGYSGANFQRPGFQAMLADIEAGKVGTVIVKDMSRLGRNYLQVGMYTDMIFPQRGVRFIAINDGVDSAQGDNDFAPLRNIFNEWMVRDTSKKIKAVFRSKGMSGKPITSQPVYGYLKGEDGRFIVDEEAAPVVKQIFSLCLAGNGPTKIARILTEQQIPTPGTLEYRRTGSTRRYYPDYPYKWATNTIVHILERKEYLGHTVNFKTEKVSYKVKSSVENPEEKQVIFENTHEPIIDLATWERVQELRKQRKRPNRYDEVGLFSGLLFCADCGSVLYQQRYENKTRKQDCYICGNYKKRTHDCTAHFIRTDLLTAGVTANLRKVTSYAAKHEKQFMKLLIEQNEDGGKRRNAAKRKELDAAEKRIAELSAIFKRLYEDSVTGRISDERFAELSADYEAEQKQVKSRAAELQAELAKAQEATVNAEKFMKVVRKYTSFEELTHTLLREFIEKIVVHECSYDENGTRRQDIDIYYSFVGKVELPDE

SEQ ID NO: 15176 - protein, 574 aa, synthetic construct
MTRVALYARYSSDNQRDASIEDQFRICRERTMREKWTIVNSYKDAGISGASMILRPGIQALLQDAQSRAFDIVLAEALDRISRDQADVATLFKQLRFAGVPIVTLAEGEITELHVGLKGTMNALFLKDLAAKTHRGLRGRVEGGKSGGGLCYGYRVIKRLDERGDRIRGDREIDPAQAGVIRRIFRDFAAGISPRAIAVKLNAEGIAGPETQLWNDTTIRGHVKRGTGIINNELYVGRLVWNRLHYIKNPSTGKRISRLNPEADWIVTKVPELRIIEDELWDRVKAKQSEIAEKFINVTVAVREHHSNKRLNSARRPKSLFSGLVLCGLCDGPCSLRGADRFVCSAHVSNGSCSNGRTLARSELEHRVLGGLKDRLLAPNVIAEAMRAYAEEMNRLNRDRRARGDAWRAELAKVEKQIHGMVEAIKEGMFQQSMIAAMDALEARKTELSALLAEAPADTPDILPSASQVYAKKVAHLTEALNRPEDRAEAAQALRGLIERIVLRPGAKRGQIDATLHGDLGTILSWTAARNAEKAAQTKTPAASATGVSVSVVAGTRNTRLLRLVEQEIPRLVA

SEQ ID NO: 15177 - protein, 460 aa, synthetic construct
MRTVTEIPATIDRYTHSSLVAKKKKRVAGYARVSTQFEEQQGSYIMQMKYYRDYIKAHDDWKLVKVYGDDGVSGTSTSKRGDFQAMMKDALKGKIDMIVTKSISRFGRNTVDTLVAVRKLKERGIGVYFEKENIYTLDTKGEVLITIMSALAQDESRNISENTTWGHRKKFASGRFSLAYSKFLGYDKGPDGKLVINEEQAKVVRLIYRLFLEGYTHKLICRILEEKGIKTAAGRSKWYWLGVNGVLTNEKYKGDALLQKTFTTDFLTKKEKKNEGEIPQYYIKDDHPAIIPPAIFDMVQDEIAKRKKLHRNSSGEDLFMFTIKCGNCGAWYGRKTWHSNDKYRSHKYICNSRYDKGKKKCPSPALTETDIVNVYIKVVNKLFRGVQQDVVDGIASLKEVMPDKADVFERLAARLTDDRKPIKAYDRELWRNFIDEIDVFPDMHFNVKLKDESTTTVYLD

SEQ ID NO: 15178 - protein, 542 aa, synthetic construct
MTRIAIYARYSTDLQSQSSIEDQIRLCEERAKANGGEIEQSYTDHAVSGASLMRPGIQMLMQDAAAGKFDVLYAEALDRISRDQEDIAAVYKRLSFAGIAIITLSEGEISQLHIGLKGTMNALFLKDLADKTRRGLRGRVEKGLSGGGKCYGYDVVPGEERGQRTINDVEAAVVRRIFEDYGAGKSPKAIAAALNKEGILSPSGKGWGQSTINGNRQRGTGILNNELYIGRLVWNRLRYLKDPQTGKRVSKMNPEDDWIIQEVPDLRIVSEELWEKAKSRQAGLNSKPKLWQTNRPRNIFAYLIKCGVCGGGCSTVSKGRIGCSNARNKATCDNKQTIPRVELEETVLGSLRDHLMNEELCEVFCEEYARHMGELTKRHNASLYQYEAELQKLQREKKKVVQSILDGVSAEFLKDDAARIEKRMGHLEKLLDGKIERPSIFEPGIAARYKREVKRLIESLNSSEHREEASELIRSMIEAIVLTPSVERGMPIIDLVGDLAGILSVASGRDKPALTVGLSEFNPDGCEALVAGVGFEPTTFRL

SEQ ID NO: 15179 - protein, 413 aa, synthetic construct
MTKIEQVTPVRPVRVKLVNVAAYTRVSTASERQLSSIATQVSYYSRLIQSTPGWTYAGVFTDEGITGTKTSGRQGLSDLMNLARNGGVDIVLCKSISRLARNTVDLLRIVRELKNLGVSIRFEREHIDTASADGELLLTLLASFAQEESASLSANVKWAIRQGFKQGKTNSFVLYGYRWDGQRFHIHEREAEAIRRIYTGFLAGTSPEKIVDQLNAEGFRSLTGKPLEPNLARRILKNERYTGNQMLQKTFIPQIGTNREVKNTGELERYWVEDSHPAIIDMETFQQVQAELARRRRLGLAATPSLTTGCFTSRIKCASCGKNYQRKTRYRKAGAYKIWRCWGACLGKGNTCGPDLKETHLKQAVIKILALAKWDEEEIMSRLSCITVTKDKLTLTHDNHRQTVIALARLDGE

SEQ ID NO: 15180 - protein, 521 aa, synthetic construct
MATITAIPATKTRIHDSALSGFSPKRRVAAYARVSTDMEEQASSYQTQIDYYTTYIQSRADWVFAGMYADEGISGTSTKHREGFQSMIADALAGKIDLILTKSVSRFARNTVDSLTTVRQLKEAGVEVYFEKENIWTLDSKGELLITIMSSLAQEESRSISENVTWGHRKRFQNGKVMVPYSSLLGYKKGTEGNLAIDETQAPTVRLIYQLFLDGSSITEIRAELQRRGILTPRGKTNWSTSTVRSILSNEKYKGDALLQKTFTADFLTKRIEVNEGEVPQYYVTGNHEPIIDPAVWDQVQYELATRHATNTAKIGLFASRLKCADCGSWYGRKTWASNTKYKHTIWRCNQKYDHAQPCQTTTLRDEQIQTAFLAALNQLAEQYRGQSHLLEVIEAMFNTDQLEAESARLDKKIRALASEIEALVAENQRVAQDQDQYLAKYTQLEAKYQKTLGHKQAIDADIAAKQAKATAIKTAYTQLADKPIEHFQSGQWNALIDHAIISANQIRFIFRTGKEINVNL

SEQ ID NO: 15181 - protein, 416 aa, synthetic construct
MEICKLPPKPAALKLTRVAAYVRVSRESERLTHSFSAQVSYYNKLITNTPGWEYAGVYSDYATTGTSTTGRGEFNQMIEQALAGSIDIILTKAISRFARNTVDLLSTVRALKAAGVSVRFEHENIDTANAEGEVLLTLLASFAQAESESISANAKWGIRKKYKDGLLHSRHPYGYRYHHGQLDIIEEEAVIVRRVFAEFLDGISPEKTCKQMNQEGLRSRGGGKFSASVTRDWLENPTYIGTAILQQYFSAHAGDNTPTLNRGELDKYIVEDSHPPIIERSVFDAVQAELARRRATGGRGLTPTGGSSALTHRITCTICGRNYHRRTRRLAHSTYKYWWCETATKGKGNPCHAHQLREENLHTIIKRLLGLHAWDDQQVVDRIERIEVCPNWLLTIHLSSGNTATVDYRTGEEVTA

SEQ ID NO: 15182 - protein, 499 aa, synthetic construct
MELDATLTLKDEGLSAYHQRHVTQGALGVFLRAIEDGRIASGSVLVVEGLDRLSRAEPIQAQAQLAQIINAGITVVTASDGREYNRASLKAQPMDLVYSLLVMIRAHEESDTKSKRVKAAIRRQCEGWVAGSFRGLIRNGKDPQWLHWGEQGWELIPERVSAVRRALELYQQGLGAGRAAKLMHDEGFELSSWGISGQQVYRLIKLPALRGAKRLAVDGEAYMLEEYYPRILSDTEWAELQHLASQRHRRRGAGEIPGIITGVGLAYCGYCGTALVAQNIMQRRRADGSLADGHRRLQCTSYSKNGGCSASGSCSVVPIERALLNFCSDQLNLQRLLQVGDDGQGIRQQLVIARAAVEKNTRQLGKITEALLDDESGSAPIAFVRKARELEAQQVVAEQKVLQLEYALATVSGTSQPAQAERWEELAELVGTGDYGAREKVRQLVMDTFERIVIYMRGLEPDGRKGQLIDVQLLSRTGQHRLIQIDRRSGEWVSSEDWD

SEQ ID NO: 15183 - protein, 476 aa, synthetic construct
MEVAAYLRVSTDEQAESGHSLLEQQERLKAYAKVMGWDKPTFYIDDGYSAGSLKRPQLQKLIRDIENRKVSILMTTKLDRLSRNLLDLLQIIKFMETHDCNYVSATESFDTSTAAGRMVLHLLGVFAEFERGRTSERVKDNMTSLARNTNIALSGPCFGFDIIDKQYVLNKKEAKYGLKMVEMTEAGHGTRSIAQWLNSMNVKTKRGKQWDSTTVRRLLRTETICGTRVINKRKKVNGKTVMRPKEEWIIKENNHEGFISPERFKNLQNILDSRKINKQHENETYLLTGILKCGYCGGTMKGSSARVSRGDKKYEYYRYICSSYVKGSGCKHHAAHREDIENAVIIQIESITNSSNKELQLKVVTSNEDEDVFELKRALESLNKQMMRQIEAYGKGLIEEEDLERSNKHVKEQRQLLRNQLDSLEQFNTPKALKEKAKILLPDIKSLDRKKAKTTIAQLIDSLVLTDGELDIVWRI

SEQ ID NO: 15184 - protein, 520 aa, synthetic construct
MARPKRKPRTPSLQPARLDSLDHVRVGIYVRRSTDDEHQPYSIEAQDARLESYVDSQPGWHIAMRFADDASGATTDRDNLQRAMRAARTGLIDVLLVYRVDRFSRNLRDMVGLLDDLDQYGVVFRSATEPFDTSTPMGRMLVQMLGMFAQFERDTIIDRVINGMERKAAKGLWKGGRRPVGYLPDPVTHTLIPHPDEAPTVVLIYRLYTRDRLGSRAIAHILNERGHRTTTGGTWSGHQVVRTLSNPVYIGELSFRDITVADCHPPLIDIDSYTEAARLLAERGEDHAHRRANASDYTLTGRMRCPSCGTAMIGTRAHGKTKVYRYYTCHSRSRYDSTRCNGYRLNADEVETAVLHSLATFYRTQHTLITDAVTAAQREHHAGRDAHHAELSAINTKITDTNNKIDRYLTAFENGTMDEQLIGDRLTDLRATGRQLTHRRDELTAALDTAPTGPDPATLTSIADHISELITTGTDHTHKGMIETLIAEVKITSPDTVVPVFRIPQTPVSYTHLTLPTNSR

SEQ ID NO: 15185 - protein, 556 aa, synthetic construct
MVMMNGMEYTGMDAILAGSFRAAIYCRLSKDDDLDGESASIANQRDMLENYCEKQGWEVVAVYQDDGYTGLNMERPDLKRMLKAIERRQANLVITKDLSRLGRNYLQTGFLIEDFFPRHGVRYIAMNDGIDTMRDNNDIAPFKNILNEMYSKDISKKVHSSYLLKAQKGQFTGCLAPFGYQKDPEDKNHLLIDEETAPIVRRLFAWALEGHGPNYIRRRLEEEKIPCPTYWNRVRGLRNVSTKWEKKDPVNGRYIWDFTVIKDILMNPVYTGAIASQKKEYRFKIGTIGEKKPEEWIVVENQHEPLVDRKTFDIVQRKLKSRQRPRQTGEISLFAGLIKCGECGKSLTIRYTNEKHPKQIYSCKTYNAYGKQHCSQHRVEYDTLYRLVLNKIRECARAALMDGEAVAGKLSDTCEAEQKGQREALERSLAKDEERIDVLEKMVLRLYEDMVAGRISEANFNLLMEKTQKEQAELKTRVEEGRKKLADEIRLACDARQWVEAIQEYADITELDAATLNRLIKEIVVHESIDSDKTRHISIEIHFNLKPIPEVEQVTA

SEQ ID NO: 15186 - protein, 578 aa, synthetic construct
MFMTLSKYIESVRLMDKDGTKDAKIRDLLAYYERYNKTVKPGPGVFYAVIYARYSSHSQRDESIEGQVREDLEWAARNNIIVLGVYIDRKLTGKEADRRDSFQDMIRDAAKRRFQFVICWKVDRFARNRYDAAIYKARLKKYNIRVVYARESIPDGPEGILLESVLEGQAEYYSASLSENIRRGQDDNALECKVNGGGLTLGYKIGADKRFEVEPAEAAIVRMIFEHYDAGKTFKEIEDFLNSRGYKTSRGKPFNKNSFKRILRNRKYIGVYQYRDIVKEGGIPAIIEKELFESVQKKLDKNENARAHKKGDVEYLLTTKIYCGLCGKAMIGESGTGRHGGKFHYYTCVGRKRDRICKKKPVKKDWIENLVINETIRLVLRDDIIAEIADGVMAYQARERDQTVLNSLRVELNDVERAIKNLLSAIEQGIITPSTKSRLEDLEDEKGRLQNGIAEESMARPLVDRDQVVFFLERFRKGDADDPVYRQTLVDVFVNSVYVYDDKIVITYNYSGEHNKVTLEQVDEAVERAESGGAPRGDGLSGGSVESSSPPPKESQTNTAPVVYMLGGVFVLVYPLTI

SEQ ID NO: 15187 - protein, 477 aa, synthetic construct
MSNSFSSPAKISAIYCRESTEKQNIQSLIDMCKKAAKKINLQNIKVYYDVASGYNKDREQYSKLKEDIQNNLVDTLVLYESSRLTRDELEHHIFYGLLRVHNVKVYTVTHGWLDLQDADDTFLTNLLNLLDAREGRKTAKRSKDRMTELAEQGRWTGGPAPLGYKLVNKELVIVPEDAEKVKTIFKLFLDGKTRQSIANFFGYEVKKVRRLLENPVYIGKLKFHSVEIINKKKILHKDYKVLNGIHEPIIDESTFSLVQGKLKNIKVERNTDVYIFKDLIKCTCGRKMYRVVNKYNYLKKSTNEISRKTENLYYCRTSDKYKSLGCGAIGIHEEELFEEVMASLKKIIFSLEVENIDTKFDDYQSQLVLYKKELASLSGKEELLARQLLNSLISEEVFEKLMKELKEKKAFPEEKIKNLTTLITNKKNTNKNSEILKKYFFKLEKEKAPEKINNFLKLIIDEIEMVNDYRFYIHLKF

SEQ ID NO: 15188 - protein, 536 aa, synthetic construct
MIRKKSRAAAYCRFSSSNQREESIDAQLRAIYKFMGEHDYTPVGDYIDMALTGTNTDRPNFQRMIEDAKKGLFDVVIVHKMDRFSRNVRDTLNIESELAQYGVKVISVIEQFADTPEGQLQQIIQLGVGQYYSQNLAREVMKGLRENAYKCLHNGGLPPLGYDVDPITKQYIINEKEAESIRIIFKKFLEGWSYRELAEYLNVLGYRTKIGNKFSANSSFYDILVNSKYKGEYVFGRSLSKPKQPGMKRSHRKNKDESEIIRVPNGLPAIVDEGTFEQVQKLLASRQRSKGASKAKEVYLVSGLIECGECGSAYHGSARIGGRNKQKYVSYRCSKRKKIENPCKCKEINRTLLDSFIVNQLFTTILNPQHLEMLHQKVNEKLKQKFSEMDDDLPKLEKQLKEVNQKASNLVQAIAVGGLGSIDTITAELQRLEQQKIVLTNEIQNHQVKQSEVNLTLDQMKDVLEEAKEYVLKNNDEMMKFILSRFIHKIIIHNEAIEIEYNLGGFFVEFKKVVLIETKVYSKKEIYAYSPLKEVS

SEQ ID NO: 15189 - protein, 645 aa, synthetic construct
MALIPYARVSSGKQLDGLSMSLQGDSKLLENLAKEYKTTISDLVYNDEGVSSYKGKNVSHGELGRLVSDIERGLIKDGDIIVMRALDRLSRQKLTDSENLYNSIVGSNVCILTTIDNHLYKRDCVMSSVLKTLAFKTANEESAKKSHLTNTYASHRIQQFLSNEKPDNGTAYDIGIGRHPFWIEIKDRVIQKGKHFALARIMFEKAMQGYGVARLQKFALEQGLELSYSAVGKMFRSHTVFGDLHITHQGKKYTLKSYYPALATESEYYKVRAIKDRLTKESNSQRKHVSILAGMQKLYCGCCNSSVGISRNTKQDINYYSCINKLEKCYQPLRQDIIDNIVLNAIDTHIFSNEASDTTVVDGLELEFSEKKKQHENAVERFILLGDSAGDNAVQTIHTLKAELDNIQKKIEVEKNKTASCAIDYDAITSFHDAMADYQAQQDKITEYVHGDNELKQEIKDILKLVLKRITIDHRHMITIELLDGSIIYRYLLRRKDGKRLHDRYFVPIKVHDEETIKIVRNSTPELVNWVTESELDSLDLYFEDVTNPFLAIERKRHVRDLEQEFFNLLQGNVYEWKRAGIIKAGATTTQWQDFKGADVSKYGFTKAECTITTKHYTKQHKSIIYRELDEAELINHFGCKRIEF

SEQ ID NO: 15190 - protein, 530 aa, synthetic construct
MRKVYSYMRFSRPEQARGTSIERQSHFAEQYALEHGFELDKSLTMMDKGLSAFHGIHKKKGAFGQFLAAVSAGKVKSGSVLVVESLDRLSREDPLIAQSALNDLILSGITVVTAADNQVYSREEIQQNPFKLVMSLVVMIRANEESETKQRRSNAFLKSALNQYQTNGKVRRLGADPSWLDFNKDDGTYSFNERIEVIRQVLGLYNQGLGSLKIARRLTQENVPTLSGKRSAWGQTTVANIVKSHALYGMKRINVQGVDYDLEDFYPELITKSKWLALQQHRTKRSKSMHGRGETVHLITGHGKGFTTCGYCGGGLGAQTQKQYKRSGEYSKTVTRLHCLTHKETSSCCPSVFLEPIENSVLFAACIGVEPQSLVPTANNVNYSALIDDIENKVKHIVEQVAEGAPWHLFKDSHDRLNSEKQKLIKERDSQKPDVNQSDVQKWVEKLIELADKARADNKEARLKCRTLINSICKSIVIQLRGHDLKSEPLITITFVTDEQFEFKVGKDGAVRFIDNDMVVNKRLKPLLTE

SEQ ID NO: 15191 - protein, 521 aa, synthetic construct
MKKITKIEGNTTNSFIKPKDRVVAYCRVSTGSDEQLVSLQAQKAHYESYIKANPEWEYAGLYYDEGISGTKKGNRSDLLRMLSDCETGRIDLIITKSISRFARNTTDCLEMVRKLIDLGVHIYFEKENINTGSMESELMLSILSGLAESESISISENTKWAIQRRFQNGTFKISYPPYGYQNIDGQMIVNPKQAEIVKYIFAEVLSGKGTQKIANDLNQKGIPSKRGGRWTATTIRGILTNEKYTGDVILQKTYTDSHFNRHTNYGEKNMYLVENHHEAIISHKDFEAVDAVLNQRAKEKGIEKRNSKYLNRYSFSSKIICSECGSTFKRRIHSSGPRKYIAWCCSKHISQITECSMQFIRDDDIKTAFVSMMNKLIFGQKFILRPLMDGLRNQNNAAGFRRIGELETKIENNMEQSQMLTGLLAKGYLEPALFNKEKISLEAERERLLAEKDQLTRSINGNFAKVDEVDRLLKFTTKSKMLKTYEDELFENYAEKIIVYSREIVGFELKCGITLKERLVN

SEQ ID NO: 15192 - protein, 435 aa, synthetic construct
MIEECMAGNIDMIITKSISRFARNTLDCLKYIRQLKDKNIAVFFEKENINTMDSKGEVLLTIMASLAQQESQSLSQNVKLGIQYRYQQGEVQVNHKRFLGYTKDENKQLVIDPEGAEVVKRIYREYLEGASLLQIARGLEADGVLTAAGKAKWRPETLKKILQNEKYIGDALLQKTYTVDFLSKKRVKNNGIVPQYYVENSHEPIIPRDLFMQVQEEMVRRANLRGGKGGKKRVYSSKYALSSIVYCSHCGDIYRRVHWNNRGYKSIVWRCVSRLEEKGSECMAPTINEETLQTTVVKAINELLANKEPFLSTLQKNIATVFNEENDNATNDIDSKLEELQQQLLIQAKSKNDYEDVADEIYRLRELKQNALVENAEREGKRQRIAELTDFLNEQPCELEEYDEQLVRRLIEKVTVHDERIEVEFKSGISIEIEN

SEQ ID NO: 15193 - protein, 497 aa, synthetic construct
MIKERLQKLAIELGHPPQAYLYARISREDYKDETNPQHAIESQLSILRRVVSENNLNVYKEKAEIESGVTAEDAQREILELIKSRTINILIIKDWSRFARNRAWAEKMLDYAELFKKTFILYSLSDREGVYNPVARMYWDLNNVFNAQYVRDIVSKMKTAKEESAKQGFYMTRLFGYMRVNKKTYPDTVEPLKAQIVRELHDLFDKGKFKNKHQMLDYCKEKYPQYKFDYTRIDSFFFNPAYKGTVIYGKVKTYKGKIIMENTEEEIIEVNNSPNIIPLIPPALWDKNNLKLRQVTEVYRAKSEGAYLFSGKIFCYCGSKIYGNEEYYKCNSNSINENHKHSNNKIICDWKPKRVEVLENYILDKIITEFNHIEHCNTSLDDEIEAQLEFLNENIDKCNKYIKNIKESTKIGIYTPLEAKKEIENINKELYRLEKEKKSLEEKKKQQSLDINKEEIFKLIIEYSKKNNRVMLKRLLNCYISRIVFFNYFNAEIYTYF

SEQ ID NO: 15194 - protein, 529 aa, synthetic construct
MPYCLYLRKSRADIDAEANGEMETLARHEKILLDLAKRMHLDVTEIYREVVSGETISSRPVVQHLLTEVENEMWDGVLVVEIERLARGDTIDQGIVSRAFKFSNTKIITPLKTYDPNNEYDEEYFEFGLFMSRREYKTIRRRLTQGRMSSAKEGKHTGSKAPYGYDRIHVESGKGYTLSPNEKETPIVKMIFDWFVNGQLQEDGSYRKLGAHAIAHRLTNLSIDSPTGNPTWNPRSVYWILHNPVYTGKIRWGYKKDKKIIVDGAVKRTRIIPPEEEQILVEGLHPAIISDEIFNQAQELFLRRGNPSVVIEKELKNPLAGVVVCGICGRPLRYRSNANRRDFGVECRTYGCPCKGSYIYIVEKRIIDALRDWVNEYKLSWDDMPREMHSLLIVKEQAYNAAIKELNTLTKQLDKTHDLLEQGIYDTETFLIRSKSLSEKIAESEKNIAKLSADINNEKLRENNRKNLIPKVENLIDIYWQLPNASAKNDMLKEVLEKVEYTKLHTVGRSKTKKLDDFDLVLYPKLPRT

SEQ ID NO: 15195 - protein, 549 aa, synthetic construct
MSRKKQVYEKITALYCRISLDDGGDNESMSISNQKLMLRDFAEKHGMFQYEYYVDDGYTGRNFNRPAFQRMIADIEAGKIGCVITKDLSRLGRNYIEAGSYIEIFFPKHNVRYIAITDGVDSLTRQEMDITPFKNILNDMYSRDISKKVLAGRMTRSRQGKYGGGPTPLGLMRDPEDKGHLILDPETAPIIRKIYDYALDGLGCMRISKRLMEEKIPITHVKANTECDANYYAWGGARISHILRNPFYKGAHLVCRTHQKGIRSNTYDIIPREDWEVIEGCHEAIVTPEEWEQVQEIIDRRPTIMKGNACPFYNLFHGLVYCATCGKSMQVRYEKVGRTGKNRFTGEMREPIDKAYYICQTYNRMGCKVCSSHKIEARDLYNLVLKDIQELAAQAMKDADAFYQRLSIRMEHRYLVDASQTEKERKRLEARNQEIDGMFLSLYTDKAKGILTEQRFMKLTAALEQEQEANQKRLHDLAVMQSRVDAQESEVRTFIKEIRRYAAIEELDEAVLNRLISKILIGEVKKVDGQKVQEVKIVYNFVGEIPGIN

SEQ ID NO: 15196 - protein, 501 aa, synthetic construct
MEIQIREGSREQKRKLKVCAYCRVSADADEQENSLENQIRHYETVIKANPDYEYAGVYSDFAISGFKEKRPGLQKMLADAEKGKIDLILTKSVSRFARNTSIVLEATRKLKELNVGVFFELQNINTLSGEGELMLTILAAFAQAESESGSAGAKMVYQRKYEAGIPVQYLERSFGYTKDERGVFVADEAEAVWVRKIYEMAADGYTPASIKRYLNENGVKTVGGVQWVDSTVFRLLENEIYKGDYIMHKHFVNEERKLVRNRGEVDAWYIEDDHEAIVSPELWQKAQDALVAKRDYLAEGSVIEEFTEENYPYMNKIYCAKCGYPLYKRIYSKGNRLNWGCSGTKRYGKSFCDGINIPDGVLRSAWHFEENTYIDEKASDKGVKEFTYLKERSWKRRHKKKQPSAIPENTETEYPYREKIFCALCGSRLVRYVNPQNYKVTWVCNRRKRKGKEACDGTRVPDTVIKGWGEIKKDIYIQRKDDKNGKKRYSYTSKKPSGIRV

SEQ ID NO: 15197 - protein, 519 aa, synthetic construct
MNIAAYCRVSTDKADQLNSLETQKEFFSEYTKRTGDTLVRLYADEGISGTKIKNRKEFLRMMSDAEHGLFDMVVVKDISRFARNTVDLLQNVRKLKSLGIETQFLTANMTSMGNSEFVLTIFGALAQEESANTSKRVKFGKKMNAEKGRVPNIVYGYDKTIGDYFNLAINKEESKVVQQIYKWYTEEGYGAAKIANMLNEKGYKTKRNCKWSQNATCRILTNEIYTGKIINGKQEVSDFLTGQRRDKDETEWMVVERPELRIIEDETFEKAQEILRGRHDAFNLSHERQSNKHLFSTLIKCKECGWSFRRTVRTYKNTYVRWVCSGRNGRGVDSCPNKTVVDEEELIEVLQEYFTNVLKQKKKVIAHVVNEFQRVYKAKDENVEYEKELNAELAKLQKTRQKYMDMYTDDLISREELNEKIGGSRQEMERIENELKMVSYHLTKGEQLENILNNTFKEIEDITDVHQMTNQQLKRLIQKIEVDKDGNVDIYLRLLGDLGLDESVLIEENETVLNCDDQT

SEQ ID NO: 15198 - protein, 630 aa, synthetic construct
MFMTLSKYIESVRLMDKDGTKDAKIRDLLAYYERYNKTVKPGPGVFYAVIYARYSSHSQRDESIEGQVREDLEWAARNNIIVLGVYIDRKLTGKEADRRDSFQDMIRDAAKRRFQFVICWKVDRFARNRYDAAIYKARLKKYNIRVVYARESIPDGPEGILLESVLEGQAEYYSASLSENIRRGQDDNALECKVNGGGLTLGYKIGADKRFEVEPAEAAIVRMIFEHYDAGKTFKEIEDFLNSRGYKTSRGKPFNKNSFKRILRNRKYIGVYQYRDIVKEGGIPAIIEKELFESVQKKLDKNENARAHKKGDVEYLLTTKIYCGLCGKAMIGESGTGRHGGKFHYYTCVGRKRDRICKKKPVKKDWIENLVINETIRLVLRDDIIAEIADGVMAYQARERDQTVLNSLRVELNDVERAIKNLLSAIEQGIITPSTKSRLEDLEDEKGRIQNGIAEESMARPLVDRDQVVFFLERFRKGDADDPVYRQTLVDVFVNSVYVYDDKIVITYNYSGEHNKVTLEQVDEAVERAESGGAPRGDGLSGGSVESSSPPPRKAACRFIAGGFTFYDNTLYNTFLFNSFANKSPMAAAVCSESLSSACPYCPKVSMLRECPTSDFMVPSGRYFAMETNV

SEQ ID NO: 15199 - protein, 534 aa, synthetic construct
MPTAFSYVRFSSDQQKHGASLARQRDMVAEWLKAHPDHTLSDLRFEDLGVSGFKGDHLDNAFGRLLAAVKSGEIQPGDSILIEAIDRAGRLPPDTMLNLLTSITSAGVRLVSLDDGLIYDSTPARSSNLFLLVAKCQQAWQYSDALSRRVKDAYQRKRAKAAAGEGAKRRTPLWIDEAGQLIPDLAPLITQCFEDYAAGIGERRIMARIRGQHPALANLNASTVKKWLRNPTALGRWGEIENVYPPVVTPDLWFRVQKRLESQYKPKSASTQYFLSGLVKCGRCGANFGVLKFPHSPPAMTCMSRHRLGAAGCSNKRSIPYEVLDHIRAQTSHSALQRAAQSQNLTQSEKRVIEVDGELRELHRKSSDLVEALAEFGNLPAIREKLAAVSQQIAALENEQTLLKASPAPLSLDDVIEAENDYLDDDPQKLNALLQGVGYAIHCDDKTITVHEPSFGSDSTTQVFRYSHVNRPSSNYVLYQGDTEIRIPVPNAQHFTEQAQQVAELEQPSTKTITYRGGQLIDDATGESVSLDTL

SEQ ID NO: 15200 - protein, 416 aa, synthetic construct
MAHISVVTPVRSPAPKLVNVAAYARVSTNGTEQLASLSAQVSYYSRLIQSTPGWAYVGVFTDEGITGRSTKSRQGLADLMDAARSGGVDIVLCKSISRLARNTVDLLATVRELKDLGVAVRFERERIDTLSADGELLLTLLASFAQEESRSLSQNVKWAIRNRYKSGGTNSFVVYGYKWADGQFTIIEEEAKIVRLLFANFLDGISPEKTATMLNAEGKRSRGGGRFYGSVFRRMLENERYKGCQMLQKMYRPTIQAPTCALNDGELPRYWVEQALPAIIDEVMFDAVQAEIAHRREVGPAATPSKNTGVFTGRICCGACGKNYQRKTRTYKSGTSYKFWRCWSACTGNGNPCRGHNLRETLLEHACADMLGTQGFDPVHVAEQVVMIEAFEHQLTFHLADGTMMPVGLTSEGWLA

SEQ ID NO: 15201 - protein, 467 aa, synthetic construct
MSVEGTNVRYMRTAIYLRQSLDKAGLELGIDRQREDCLALCEARRWSHPVEYMENNTSATRGIRTEYQRMLTDIAEGRISAIVAWHPDRLYRKLRDLLPLIELCNERGVTIATVESGDLDLSTDSGRLVAKILGAVSEGEGERRTARQKRAMRQLAANGKGWGHRSFGYVYDHVDPRLDPAEAEAVRQGYADLLRGATLYRIAKQWNEAGLRTTQSGNLFDSTSVGRVLRSPRNAGLRAYKGDVVGPGDWPAIVDRATWEAACVVMSGKGRQWGADRARVQLLGGLLVCGECGKGLGTGRRENGGPRIYKCKTMGCYKVNRKVDELDAWVSELMVQTLSRRQWARPDTGEDVSVLQAQADVIRARMDSLAIEFAVGELTASQLRAATETMKASLAEVEEKIAASVHRHAVQDVLSYADLSAEWDSLEVDRKRMLIQTLTTRITVNRLGKGGKSFPVGTGIEVEWRSA

SEQ ID NO: 15202 - protein, 494 aa, synthetic construct
MARAIGYVRVSTDKQLDNTSIEKQKEEIEKYCKNNQITLVHIYDEGAYSAENIRDRKQFKQMYNHAFDKEENIDYVVAFKSDRISRDNLDALYIYKRLTEANKHLICIADNIDTRDRNAKLLYQFMSLVAELERDTIKFRTSTGMEKNYEKGNFNGGRVYGYYTENKELKMDANEAKVVKYIFKKYAIDQWGYRKIAANLNEQGFRTRLGKFWSITAVRTILNNRIYIGEVKWRGNYRKGKHIRIIDDILWNKTQKMLQIKSYLPRKLHPGTYPLSGLIKCPECDSPMVQGNSGKKYKYYQCNRNKSSGRSACHSNLVAKEYAEQYVFNHFFNTLKTLNLTSPIINSTVSTISSEVEPIEDKIIMMKKNLQHLSRKKSKIISWTSEGTLDEETFRQEMKIIQQEESEQTQFLDVLEAQLKQRKKPNLCENIAMAVNEIESFFAIMADEDKKKILHSFIDSINVNPGNSTKERTIKEIKFKFDLRHISQLYQSAS

SEQ ID NO: 15203 - protein, 602 aa, synthetic construct
MDKIRKVAIYCRVSTEEQASEGYSIQAQLQTIRNYANLYNWQVSNEYVDEGISGKNIKGRPAMQRLMADVELNKFDAVIVWKISRLSRNMLDTLVMLDKFEENDVKFISYSENFDTGSPIGRLVVQLMASIAEMERNTLSENVKLGMKQRALEGSWNGGIVFGYDSIKKELVINEQEAKVVQLIYEQYLSGKGLKAIANLLNKSGHRTKRNRLFSINGVAQILDNPVYNGKISWLKVEDWDTKRRKGKNPNPILVEGKHQAIISDDIWHLVQARRKSRSFKQRQSNKPFLLNSLLRCPVCGQGMVPAITTYTRKDGTKRKHRYYVCSDFQNKGSTACRSNGIKAYEAENKVLERIENFLANKERFISTIQYLNKESLHSISELKRELKQTEQELIDIQQLQEKYLEAFEQNLFPITILQERLQQVDKDKTHLEQKKNELSIQLSSSDAKFIPHELVRILLEKFIEIYNVSSRDGKKQLLQLLIGKISIRQLENRSRTIQQVELDFDFSEVNISKTFTLIHLLYRKTDKDVGFSQPLPASDNKIPPYLQLFLPLFVVRFPPNNPKRPIHLLHQYQSHQLMRKCHFRKRQAFISSTHHVGAQSE

SEQ ID NO: 15204 - protein, 627 aa, synthetic construct
MAGIRTENKIYEVGIYCRLSKDDGTDNESASIATQKSILTDYVKRQGWHLAKTYVDDGYSGTNFQRPSFQNMIKDIENGLINCVITKDLSRLGRNYLDCGLYLEVFFPEHNVRYIAVNDGVDTLNKSAMDITPFRNILNEMYSADVSVKIKSAYRARFQQGKFMGTTAPYGYVKDPADHNHLLIDDKVAHVVREIFDLALAGNGIAKIRKHINKQHILRPAAYAVEQGATGYERYFEDNEENRYIWSENSVRGILRSPIYAGNLAGYKRIAANMKSKKRPSKLPEEWEVIPDTHEGIVTQEEFDTVQQLMTSRRREQNAGGFENIFSGVIKCADCGYAMRAASANRRKRPDIIDCVQYTCNNYGRYGNVMCTAHSIEARDLFNAVLADINRFADMAVNDEKAVRAIERRLTETDQSRAKSLEKEKKKLNKRLAELDRLFSSLYEDKVMERITERNFEMMSGKYQKEQLEIEARLKEVTETLNDSYEKSQGVRDFLSLIRNYQGLKELDATIINALIDKILVSEREKLADGTVRQEIKIYYKFIGFVGELHITPTKRWTALKPKNCTVCGVEYVPSSGISKYCPACAKRIQREKSNESKRRSRERNRRACIELSAKNDRLILSNVMVG

SEQ ID NO: 15205 - protein, 416 aa, synthetic construct
MEICKLPPKPAALKLTRVAAYVRVSRESERLTHSFSAQVSYYNQLISSTPGWEYAGVYSDYAATGTSTTRRGEFNQMIEQALAGSIDIILTKSISRFARNTVDLLSTVRALKAAGVSVRFERENIDTANAEGEVLLTLLASFAQAESESISANAKWGIRKKYKDGLLHSRHPYGYRYHHGQLDIIEEEAVIVRRVFAEFLEGISPEKTCKQMNQEGLRSRGGGKFSASVTRDWLENPTYIGTAILQQYFSAHAGDNTPTLNRGELDKYIVEDSHPPIIERSVFDAVQAELARRRATGGRGLTPTGGSSALTHRITCTICGRNYHRRTRRLAHSTYKYWWCETATKGKGNPCHAHQLREENLHTIILRLLGLHAWDDQQVVDWIERIEASPNWLLTIHLSSGNTTTIDYRTGEEVTA

SEQ ID NO: 15206 - protein, 521 aa, synthetic construct
MNRKITTIQANKDLSRQSKLPSIKKKKVAGYARVSTDNEDQTSSYETQMKYYEEYISSRKDWEFVKMYSDEGISGTNTKKRLGFQEMVNDALAGKIDLILTKSVSRFARNTVDSLSTVRKLKDVGVEIYFEKENIWTFDSKGELLITIMSSLAQEESRSISENITWSKRKQAAEGKVTFPYNNVLGFKPKEDGGFEVDKEQARIVRYIFGQFLSGKNPNQIAKHLTENKISTPRGKEKWSYSSVRSILTNEKYKGDALLQKYYIADFLNKTQKRNNGELPQYYVENSHEAIIDKEVFDAVQVQLSENKKWYTEKNYFGKIRCGCCGSSYVRHLWHSTNKYKETIYRCKDKYKNEEKCNTPHIRDDEIQRWIVSALNKVIDNRKEIIGNIKLLMKMIKEDRGADDEIIQLEEKLEDIRNDVEKLIITNSKIAQDQEEYTRKYNKLIEEYKLLEKQLEQRNLDLLSKNKRVRELKIFIDSLEKQGELLTEYDAKLFNYLVDTIIIHEGKRIEIHLKNGEVISI

SEQ ID NO: 15207 - protein, 557 aa, synthetic construct
MKNKKAYVYTRVSTSMQIDGYSLDAQEERIKQYAKAYGIEIIETYKDAGKSGTSISGRNEFIAMLNDIEAEKDKVDYVMVFKLSRFGRNAADVLQSLQVMENHNVNLICVDDSLDSSKDSGKLVITILSAVAEMERENILSQTMEGRKQKAREGKWNGGFAPIGYSLDNGELVVNEDEAKAVRMIFDLYANSDMGANGVSKYLVSLGINKPIRQNGKNPYFSASLIRQILDNPVYNGKIAYGRRKTIKDKTTGKIKLEKSDHYIIAQGNHEALIDDELWNTVQEKRKSQAKKYEKINRGKDERVHILSNLIKCPYCGAGLYGNKSRKRNKNKEGEHYKDYYYYGCKHRQMMNGHKCTFNKQIRAELIEKEVETIITQVVSNPTFAKKIEEKINIQIDTKEIDEVINKHLAKIRQLTGTKASLINQIDSLNFEDKHYDRKYTDLNLRLDAIYDQLEYAEMQLNDSRKRKEAILEEKITSDNIYKILVNFNSLYTVLSDIDKKRLLNEMIEEIQIYDEKTEKDTWIKSVVFKLPLIDNEIDFGLDNKDNVETIALIQKM

SEQ ID NO: 15208 - protein, 617 aa, synthetic construct
MRNFEKITALYERLSRDDELEGESNSIVNQKKILEEYASKNNLTNIIHFTDDGISGTQFDRPGFMEMMNGVNTGNIGCIIVKDMSRLGRDYLKVGQCMEILRQKGVRLIAINDNVDSFYREDDFTPFRNIMNEWYARDTSRKIQSTFRSKGESGKHTASTPPYGYIKDEKDKNKWIVDEKAAEIVRRIFNLTMDGAGPYKIAKILEADKIDIPAYHQQKLGYGLHQSKNFEHPYRWCSSTIASILKKKEYLGHTVNFKTRKHFKDKKSKYVSEDNWLIFENTHEAIIDQETFDNVQRIRGNVKRYPDGWGEYHPLTGLMYCADCGSKMYVHRTSNYKNIPYYNCSAYTKVPCGTLCPSAHRIKAEVVLNLIQETLKDIKNYLDEDNEAFTRSIQNEMEEKEKVEIEKKKIRLTESQNRLQELERLMCRIYEDMILNKIPNNRYEILNNQYETEQLTLSKEIKDLEIAISRYEKETDRARKFISLISRYENFDELTTTMINEFIEKIIIHERDRKGSQTSKQKIEIYFNFIGNYEVPKEELSEEERSKLEEEERKINERRDRLHQNYLKRKANGKQQEYEERYKERREQKKQEKLKVLKRAGILMKDYKNKESFKESV

SEQ ID NO: 15209 - protein, 499 aa, synthetic construct
MGQKCVIYTRYSSDRQREESIEGQIRVCEDYAKRNGLEVLHIYADRAMTGRSDQRPEFLMMIKDAASMTFDTVLVYKLNRFARNRYDSAKYRHRLKKYGVKVVSAMENIADDPSGILLESVIEGMAEYYSVELAENVVRGMTENALEGKWPGGIVPLGYKLDADHHLVIDEPNALVVRRIYQMILDGRTPASICRTLNAEGKRTATGRPFNHNSITRLLQNERYIGTFIWRDIRRTGVVPRILDDRTFYAVQELRKSRQHHKGVAKRSENYMLTGKIFCGRCGSPMVGKSGTGKGGVYYYYNCQHHIDGSGCPARPVRTDKLEDQVVQVTTKILSQPDAIKAIARQAIAIQKERRESLEVQSLKAQVSDLSKKLDNCLKAVDNGAFSETLCNHMREYESRLRDLKTALSRAQLMDRGGKLTERQIEFFFFAISRQLKQEPRYKEILLSSLVRCVIVNDDSIEIQYNYKKELPTLANPVKVRSSHKVLMVIHPGFEPGTP

SEQ ID NO: 15210 - protein, 498 aa, synthetic construct
MKSQLRAIVGARVSVLNGPQKVSHHAQLETATKWAESNGYEIVGAFEDLGVSASVPPAQRPDLGQWLTPEGADGWDAIVWSKMDRAFRSTKHCVDFAQWAEENQKVVVFAEDGLKLDYRPGATKGIDAMMAELFVYLGSFFAQLELNRFKTRAEDAHRVLRGMTRWPGGTAPLGYRVVDHPSGKGKGLEPDPEGKARLYEMAGLLLDGWSFTRIADYMNEKGYLTNKDRALVEQGKQPKGRGWSVTTVVGFLTSARTQGLKVTGSDYGGKMVLDDQGQPIRLAPPTFDDATWDQIQQAVALRKLNTRSRTWTQNPMLGVGYCSCGASLSQKCTPNNYSTGTTYRYYQCGRTPTRCTGTSVKADELDELLEGTFIAKHGHKHVTRKVFVPGEDHTYELEQTNRTIDNLREDRALGLYSSPADQEKYRQQMAALVANRDRLAAIPARSAGWTTEVLPETYAEVWDTRGHRELLLEKGVRMTLISSKPVLNIDLFVPDDEP

SEQ ID NO: 15211 - protein, 556 aa, synthetic construct
MATAVIYLRVSTKDQAQRGGEAEGFSIPAQRDACQKRAESLGADVIMEFIDAGESARSADRPELQQMLKFLQQQSCDYVIVHKVDRLARNRVDDVEINVAIQRSGAKLVSVTENIDETPSGMLMHGIMSSIAEFYSRNLATETRKGMAQKVKNGGTPGMVPFGYLNVRTRTPEGYEIRTVTVDPERADHVRWIFDAYASGDWTMTQIREELERRGVTSVPRPKRPKRPMATSHIENILSNRYYLGFVKFEGTWHPGRHEPLITEEQWEKVQAVREGRVRSREKPQQHPHYLKGTLYCGHCGDMLGVEVVRNGQGTRYPYFYCLGRKTKRTSCNFKAVSIATVETLVEDHWETRQLPETLRIAIRDDVVTYLDILLPMRDKRVKVAERRVKQLTGERDALLRAHYAGAVPLDQLRTEQDRITTALTNSQRELAERQLTRDQLHNSLDRALSLLHDSYSLYVGSRSRDRRAMNQALFQRLYVYDEAVDAELTELFECLLSPDLKELLDEELTSARLPARATTPITSKSSNLRPDYQDTSSNFRTMVAGTGFEPATSGL

SEQ ID NO: 15212 - protein, 553 aa, synthetic construct
MWGMAAKSRVYSYLRFSDPKQAAGGSIDRQLEYAARWAADREMELDASLSLRDEGLSAYHQRHVRQGALGVFLRAIEDGQVPAGSVLVVEGLDRLSRAEPLQAQAQLAQIVNAGITVVTASDGREYNRERLKAQPMDLVYSLLVMIRAHEESDTKSKRVKAAIRRQCEGWIAGTWRAPIRVGKDPHWVRETEGGGFELAADRASAVRLVIEMFRQGHGAVRIVRELAERGLQISETGRTHSSNIYKILANRMLIGEKSVEVDGETYQLDNYYPALLTPAEFADLRYLAEQRGRRKGKGEIPGVVTGLGITYCGYCSAAIVAQNLMGRKRLPDGRPYPGHRRLHCVTYSQSVGCKISGSCSVVPVERALMLYCSDQMNLTRLLEGDAGTASISAQLASARQRVAELEAQIRRVTDALLFDDGDAPAAVLRRVRELESQLASERRDVESFEHHLAASASNVAPAAADAWRELVQGVEQLDYDARLMARQLVADTFSRIVIYQSGFQPETDHGTIGVVLVGKRGNTRMLNVDRRTGEWRSAEDIELSGLATIPLPA

SEQ ID NO: 15213 - protein, 505 aa, synthetic construct
METTKIMQNFIPSRELKRVAAYCRVSTGSDEQLKSLKAQREHYQHYISNHPGWELAGIYYDEGISGTKKNKRPELLHLLRDCAAHQIDLVITKSISRLARNAADCLDIVRQLKDLNIPIIFERENLNTSNMDDEFILTVLSSMAESESKSIAANNRWSIQTRMANGYFKVSTPPYGYDRNFEIIPSQAKVVKQIFTDFLNGQSSLTIAKNLTVPAPSVGKWSDSTIRTMLRNESYTGNLRLQKTYTDDAFNRHINYDEETMTWYQGHHEPIISFDEFERTRALLTQRAKQRNTKTRSQKYRQKYLFSGKLNCHCGGTFKRQKKAKRVTWTCQTHIKEKKSCPVKPVDERQIEVAFVTMINKLIFSRTKLLQPYLQSLRNQPANHKYKRIKELESAILSNTEKRDTLMTMLSQDLIEPKEMMTKMTKLIDQSNQYRQELSKLRSTIGKNDSLIIATRELLNYVDSHPIQTEFNPRLFEEAVEKITIEDNSHLVFHLFCGLNLPERI

SEQ ID NO: 15214 - protein, 526 aa, synthetic construct
MPNKKMKIIPARRHIGSKPVPFEEDIPKLRVAAYCRVSTEYEEQNSSYQTQVSHYTNYILNHDGWDLVNVYADDGISGTNTKKREQFNQMIEDCMAGKIDLIITKSISRFARNTLDCLHYIRQLKEKNIAVYFEKENIKTTDAKGEVLLTIMASLAQQESQSLSQNVKLGLQYRYQQGKVMVNHNWFLGYTKDEEGHLIVDPEQAKIVKRIYYEYLEGYSCKQIARRLTTDGIPNGAGNTKWGDSNIASILKNEKYIGDALLQKSYTIDFLTKKRIRNQGIMPQYYIKDDHEAIIPKDLFRRVQEERKRRRAGIKVPCGKTRHYNNRTCFSLKVFCGRCGDIYHRVAYNYSDENGQVVKWLCMTGHDHDLVTCHGRAISERQLKEVCLRAFNKIIEPNKIFQAKLQNNIRHAINQVNEEQATKLDRELDRLQILLINQTPHSKDYDKISDEFNRIQQQRDELQLTLDRQNEVVQKNVNLQNFIDINSKQLNEFDEHLVRQLIKKITIQETYCEVEFQNGDSIKINL

SEQ ID NO: 15215 - protein, 554 aa, synthetic construct
MKVVLYARYSSDNQRDASIEDQLRACRDYADTQGWTIIDSYSDRAISGASLIRPGIQELIADANSGRFQILLTEAMDRLSRDQEDIAGLFKRMSFAGVKIVTLSEGEINHLHIGLTGTMNALYLKELANKTRRGLRGRVELGKSGGGLCYGYDVVKQRDSHGETICGERAINDEQAQIVRRIFRDYADGKSPKAIALSLNAEVHRGPLSGAWSPSTINGNRERGTGILNNELYIGRLVWNRLRYIKDPSTGKRVSRLNPESEWVLQNVPDLRIIGQDLWDAVKARQSKTTWSQKSRGTGTHPLNALQRPTHLLTGLIKCGCCGGGFSMISQHHLGCSTARNKGTCENRLTIRRDVLEKSVLNGLRTQMMDPALFKEFCDEFTREINRLRMEKGADLVALKSELPKINHELDKAIQAILDGVPGSRLKDRIGQLEARKAEIETRLADAPTQPPLLHPNMAELYRQKVATLHESLQKAGSDTKTVEAIRSLITQICLIPENGVLGIFLEGDLAAMLNFASNKKNAEHHPDAGVLSKFLVQDSLVAGAGFEPAAFRL

SEQ ID NO: 15216 - protein, 561 aa, synthetic construct
MLILKGEERLNTEQIMGLIGRINAIIYVRVSTADQAKKGYSLESQIDRCKERAITKFGYKDSELIALIEPGKMGDDPNRPALNHALYLMEKGLGKKFIVLHPDRLTRDNTLQGIVSRKIWSMGVDIEFIEFEVDPTNPESMLMYNIQGSIAQYNKAKISANSKRGRFAKAKKGEFPSFKRLYGYTFNKETDIPEYNEEERAILLEMKNMLLIQGMSSNEIAKELSRRGLPAPDGDIWYQATVSRILQNEDYTGDFYYGKSKVVQINGEKKQVPTPEEEWVLIKIPPMWDHETRDQIIKHLKANRKGGRRSPRDYLLKNKAKCGRCGSSCGSGSVSRSKSGVYKYYACRRKNAKGYHNGKKVLQCHGKNWRVDIVDDVFWKWFKKLLKNPTEFLERLLAETSNEKKIEELKNKANKLEKQIEGIDSEIANYVILFGKGKINEDMFDKLTQPLEQNKKYVENELSVVKSQLKTNKEVEDKNQKIMQYVESFSEMVDKDLSMDEKRKLIDFFIEKVTLFDDDHMEIVWKGNDDQKTQGVLFNEEMGAILDNSHRNLNHIQTYGR

SEQ ID NO: 15217 - protein, 526 aa, synthetic construct
MYNPNLASVEPPKITVISAKSQEVAKLRVAAYARVSSDSDDQQNSYIAQVDYYTKNIATHEGWELADIYADEGITGLVASKRDDFNRMIQDCRDGKIDRVLVKSISRFARNTKEYIQYVRELLRLGVSIHFEKENIDTGKMTSEQIATIYGAFSQMESQNHSNNMRISIRIRMEKGDYVSPATPYGYKLEERTLVVIPEQAEVVRRIFTAYLSGQGKEDIANELNRLCIPRTKDRKMWYSTTIGYILTNISYTGDMVWQKSFATNDIPFRQVRNKGEKPKYFVENCHEPIVSKDEFQRVQALLETRRAQIAGTVSSALLKKKLHCGNCGTLFRRKIVNEKVYWICRRHDSHKDLCPISQVPEEQIITAILRMYHKLKRHREQILSPLLSQLTELREKELRSNRKINDIDKEIAQLTEQNLVLVRLKSKGYVDSALYLSQTGDIDFKLRELRRLRRRIMETTGEDGQIKATEAMLDYLESSPEHLGELTEELFETLVEKITISSETEMNLTLYNGLTLKETIERTVR

SEQ ID NO: 15218 - protein, 539 aa, synthetic construct
MPATATRKVTVIPADPIYAQKDIRKKALRVAPYCRVSTNSEEQLDSYQAQIEYYTERIAAQPEWTMVDMFADEGKTATSTKKRKDFLRMIKACEKGKVDLVITKSVSRFCRNTLDGLDYVRKLKRMGVGVFFEKENVNTLYMDNEMILTFMMSQAQAESESMSGNIRWGHRKNFKDGKVYYHYAGFLGYRKGEDDLPEIDPEEAEIVRRVFSRYLVGHSVAKIIADLEADGIKTVRGKEKWNDGVIRGMLKNEKYIGDALLQKTFIADLFTRQSKKNNGELPQYYVENCHPAIIDKLTFQRVQEEMARRSSLRKVSANAKTELAKYSGKYVLTELLSCGNCGSPYRRVTWTRPEGKKIVWRCINRLENGKKFCKDSPTLEEGRIHTAVVSAMNEMFSLKTMKSLLQDSILSALSGNSGETSIAAIDSRLSELRARQYELLQFAASVGANSTQYDEDLNEVSMEFSALVSKRSELEKNQQGIAQADQRAEQIAAELDKMDTGITCFDELTVRQLVGAIKVLGEDKLLIRFKDGTEIEQLM

SEQ ID NO: 15219 - protein, 539 aa, synthetic construct
MKNGAKVYSYLRFSDPRQATGSSADRQLQYAQTWAAARGFELDETLSLRDEGLSAYHQKHVKQGALGVFLLAVDEGRIPAGSVLIVEGLDRLSRAEPIQAQAQLAQIINAGITVVTASDGREYNRAGLKAQPMDLVYSLLVMIRAHEESDTKSKRVKASIRRQCEGWQAGTYRGLIRNGKDPQWVRWTGEGWELIPERVEAVRAALDLYRCGLGAGRAAKRMFADGHMLSDWGISGQQIYRLVRLPALRGAKRISVDGEDYLLEEYYPRVLSDAEFDELQLLAGQRYRRRGAGEIPGIITGVGLAFCGYCGAAIVAQNLMGRARADGSLADGHRRLHCTSYSKGRGCPDGGSCSVVPVERALLAYCADQMNLQRLQQAAVDGPDLRQQLAEARLQVEELDKQLARITDALLADESGAAPLAFVRRARELEQQQVAAQARVQQLERELSVAAVHVEPAQAERWAELAALVEQGDYGAREQVRQLVLDTFERLVIYMRGIAPDGRRGRTIDMMMVPKGGAPRLIQIDRRSGAWVASEDWAG

SEQ ID NO: 15220 - protein, 525 aa, synthetic construct
MGKVRIIPAHQQHGNSINRSPDEPQSERLRVAAYCRVSTELDEQANSYETQVSHYKELIQKDPSWDFAGIFADDGISGTNTKKRDQFNKMIKACKAGKIDLIVTKSISRFARNTIDCLKYIRDLKAINVAIFFEKENINTMDAKGEVLITIMASLAQQESESLSQNVKLGLQYRYQQGKVLINHNHFLGYTKDKEGNLVIEPEEAKTVKRIFYSYLQGMTMKQIAEALKADGVLTGGKKTNWHSSGIALILKNEKYMGDALLQKTYTVDFLTKKRVKNNGIMPQYYVENDHPAIIPKSVFMQVQNLIQRRHNGITTKNGKHRRVNSKYCFSQRVYCGKCGDIFQRNMWYNPVKVAVWRCASRIKRSKKGSRCMIRNVKEPLLKTATLDAINQLIESHELADKQIKANIMKIVKNSKGPTIEELDKRLEEAQLKLIQAANQHQNCNDLTQQVMELRNQKEKVQRIESENQAKLHNIDQVSDFVDEHQHGIQEFDPQLVRRLIEKITIFQRYIEFAFKDGEVIKVKM

SEQ ID NO: 15221 - protein, 561 aa, synthetic construct
MLILKGEERLNTEQIMGLIGRINAIIYVRVSTADQAKKGYSLESQIDRCKERAITKFGYKDSELITLIEPGKMGDDPNRPALNHALYLMEKGLGKKFIVLHPDRLTRDNTLQGIVSRKIWSMGVDIEFIEFEVDPTNPESMLMYNIQGSIAQYNKAKISANSKRGRFAKAKKGEFPSFKRLYGYTFNKETDIPEYNEEERAILLEMKNMLLIQGMSSNEIAKELSRRGLPAPDGDIWYQATVSRILQNEDYTGDFYYGKSKVVQINGEKKQVPTPEEEWVLIKIPPMWDHETRDQIIKHLKANRKGGRRSPRDYLLKNKAKCGRCGSACGSGSVSRSKSGVYKYYACRRKNAKGYQNGKKVLQCQGKNWRVDIVDDVFWKWFKKLLKNPTEFLERLLAETSNEKKIEELKNKANKLEKQIESIDSEIANYVILFGKGKIKEDMFDKLTQPLEQNKKYVENELSVIKSQLKTNKEVEDKNQKIMQYVESFSEMVDKDLSMDEKRKLIDFFIERVTLFDDDHMEIVWNGKNDQKTQGVLFNEEMGAVLDNSHRNLNHIQTYGG

SEQ ID NO: 15222 - protein, 482 aa, synthetic construct
MKAAIYVRVSTMEQAEEGYSLDEQVDKLKKYCEIKGWNIYKIYRDGGFSGANTDRPGLSEMINDAKLRAFDTVLVYKLDRLSRSQKDTLYLIEDILAANDIAFVSLNENFDTSTAFGKAMIGILAVFAQLEREQIRDRLLMGKIGRAKSGKAMAWGIPPFGYVLPESNREKYEIVPVEAEIVKKIYHDYIAGKLVAKICDELNAEGHIGKREPWVHANMKRTLTNPVYAGFIRYRGEVFEANHEPIVSKETFDLVQEQIELRQTRAYQKFNNPRPFQAKYLLSGLIKCGICGARFEVIQYKPRADGSRIRYYKCVSYSPKNHAPSMWKNSDGCTSPKYYLDDLEKELLSELEKLRDDPSLITSYVSKTNQIDVSGLKKRLKTLNNQLKKLVTLFIDNDFPKDVIESKKKIIMDEKKLILDKINEAESIKPEVSTNEVIDELGQIKISMFDLDYEEQKRIARKLIKEIILYPDKMEIHWAFAI

SEQ ID NO: 15223 - protein, 496 aa, synthetic construct
MYGYNLKPCLTRRNTLKRMEQITPPPISASPLVKVAAYARISMETERTPLSLSTQVSYYQQLIHDTPGWTFAGVFADSGISGTTTHRPQFQEMLVLARKGAIDLILTKSISRFARNTVDLLETVRELKDLGVEVRFEKENISSTSADGELMLTLLASFAQAESEQISQNIKWRIWKGFEEGKANGFHLYGYTDSADGTDVQIIEEEAAVVRWIFAQYMKKTSCEKMAAQLIAEGRVPHLADNKMPGEWVRHILKNPHYTGDLLLGRWSTPEGRPGRAVRNTGQLPQYLVENAIPAIIDRDTFTAVQTEITRRRELGARANWSIETVALTSKIKCVSCNCSFVRNVRNPKTQNSISTEHWICTERKKGRKTGCGTCEISDTALKGFIARVLGIDTFDQEVFNERIDHIEVQGKDHYTFHYTDGTSSSHTWRPNLKKSSWTPARKAAWGELLRARWAEAKRLGLNNPRQAPTPPEALAKYRAVAKAEAERLRAERGER

SEQ ID NO: 15224 - protein, 528 aa, synthetic construct
MARTVTAIPATRALHTGAPLGQTTLRRVAGYARVSTDHDDQVTSYEAQVDYYTRYISDHAGWQFVKVYTDEGITGTSTKHRAGFQQMVTDALDGKIDLIITKSVSRFARNTVDSLTTVRALKDKGVEVFFEKEGIWTFDAKGELLITIMSSLAQEEARSISENVTWGHRKRFADGKVTVPYSRFLGYDKGEDGSLVINPEQAKLVRRIYNMYLGGMSIGTIARTLTDEPETFTAAGNKTWYYRSIRAILTNEKYKGDALLQKSYVADYLTKRQVINQGEVPQYYVTASHEAIISPAVWDFVQAEIAKGARDQRTQHRTRPFSSTLECSQCGHFFGSKTWHAGSKYEKVIWRCGHKYAGQEKCATGHISDQRLKDMFLKAIRLRFGSPTDTGVNQAVLDALDTSDLEVEAAGLLAQINEVAKKLQSMIAHNARVAQDQQTYEKAFNASHEQHQALLAEHTAVVAEIQNKNNRLAAYHYYRQETANLELDQLVFSPYLCVALLEKGTVDVDGNVTFQFRDGSTQVVAIKP

SEQ ID NO: 15225 - protein, 501 aa, synthetic construct
MEIQIREGGREQKRKLKVCAYCRVSTDADEQENSLENQVRYYETVIKANPNYEYAGVYSDFAISGFKEKRPGLQKMLADAEKGKIDLILTKSVSRFARNTSIVLEATRKLKELNVGVFFELQNINTLSGEGELMLTILAAFAQAESESGSTGAKMVYQRKYEAGIPVQYLERSFGYTKDERGIFVADEEEAVWVRKIYEMAADGYTPAAIKRYLNENGVKTVGGAEWIDSTVFRLIENEIYKGDYIMHKHFVNEERKLVRNRGEVDAWYIEDDHEAIVSPELWQRAQDALEAKRDYLAEGSVIEEFTEENYPYMNKIYCAKCGHPLYKRIYSKGNRLNWGCSGMKRYGKSFCDGINIPDGVLRSAWHFEENTYIDEKASDKGVKEFSYLKERSWKRRHKKKQPPTIPENTEAEYPYREKIYCALCGSRLVRHVDTKSHKVTWVCNGRKRKGKDFCDGTRVPDTILKGWGEIKKDIYIQRKDDKNGKKRYSYTSKKPSGIGA

SEQ ID NO: 15226 - protein, 463 aa, synthetic construct
MARSVTVIPARNRQASGHRAAPQKKIRVAAYCRVSTDQEDQLHSFEAQVDYYTKYINDHENYEMAGIYADEGISGTNTKKREQFKRMIADCEKGKIDLVITKSISRFARNTQDCLMYSRKLKNLGIGIIFEKENINTLDSTGELLFTILSSLAQDESRNISENCKWGIRTKFKNGEMHLNTFKFLGYDKDENGKLIINREQAKTVRRIYRDFLWGLNPAQIAKELEEEQVPGCLGQTKWYASTVVGILKQEKHMGDALLQKTYTADFLTKRQVKNNGEVAQVYVKDSHKGIIDKETWNAVQEEFDRREKFMQKHGTDRYSYGSECYPFCEKIFCGECGSLFTRHSWKSRGIIQWQCKNHRKDGKVVCTNAYVDNADLEKGFLKAFNRLVSEREKHMERWNAMKADGTALEKIRAVQMMEATENGQLQKYVPEAAQLVLEEITISGAKKYEFVFLEGSRVKVPV

SEQ ID NO: 15227 - protein, 464 aa, synthetic construct
MNSTYFRPQPELFGLRVVKYIRCSHDGQVLHGDTLEAQDALLDEFIKVNRMVLVDTFVDEALTARKKFTRRKEFVRLLDGVRSRSFDMILFTKLDRWFRNIGDYHKIQEILEENGVQWKAITESYDTTTTNGRLHINIRLSVAQDECDRDSDRIKDVFAYKLKNKTYLSGSLPRGLKLDDEKHVIIDPEWKQFALDMFDHFEQTNSKRGTLLYLKEKYGIYLCYDTISRNLRNSLYKGMYRDDPDFCEPLIEPERFDRIQVLGKRNVRQRYSNRTYIFTGLLICSSCNHYLVGQTTHRTLSDGTEKHYPSYRCNQRYQSHSCDRNRSYREDYVEEYLLQHIRPALSEYVAEYEVTGTTPARKNPAAEAAKIRTKMQKLYELYMDDLIDRDTYKRDYSAFQEKLKELDSIVVAPSRDLADLKKLLEQDYEEIYRTFSPQEKNAFWKSFVQSITVHEDGEMDIVFL

SEQ ID NO: 15228 - protein, 465 aa, synthetic construct
MPEKILRCAIYIRVSTFEQSVHGKSLQAQKECLEQYATDNNMSIVGVYADEGKTARKELKKRKAIHALVEDVKRDKIDVIIFWRLDRWFRNLSDFYKVQDVLDEHGVRWISVSEPGINMETRDGRLQLNVVLSIGQNEVDTTSERIKFVNEASIRQKKLIFGDANMPFGYKTGVVDGKKCMVKDSETEHMVEDFFEYFRNHNSKKGAIRYMQETYGIDFSYGMLRTMLSSEFYKGTYRGYPYCPAYLSEKEWDEMQTISKRNIKNTPSGRIYLFTGLMRCPVCGQKLVGTGCSSIINRKTGEKRTYCYYRCNRALIDHICTYRHRVSQNLIEKYLLENLEREYEKYKVRTNQISEELKKQKKAKDPKKLRKEMERLNLLFQKGRISFEYYDTEYNRLEEEYVHSSNPCQQKEEARNTRYIEELLQTDFRQMYNSLSLENRRSFWRSTIQEIYLNDDNTIKAVDFL

SEQ ID NO: 15229 - protein, 446 aa, synthetic construct
MNPPKPIRKVRCAIYTRKSSEEGLEMEFNSLDAQRESCEAYITSQKAEGWVPVPDHYDDGGFSGGNLERPALKRLLADIESGLVDVVVVYKIDRLSRSLMDFSKLVEVFDRNAVTFVSVTQSFNTTTSMGRLTLNILLSFAQFEREVIGERIRDKFAASRRKGMWMGGVPPLGYDVVARKLVVNQPEADLVRHIFDRFLKVGSATLLVKELNAAGHHTKSWTTQDGKHRDGAPITKNFLYKLLDNRVYLGEAVHKGEVHAGEHPAIIDRAIWDKVVAVKTDNAPRKRANAVRSSTPAPLKGLIHCAHCGRAMTPSHTRKKGRLYRYYTCMKAIHSGHESCPVRSIAAGEIEAAVIGQVRALLRAPEIRARAERMAPTMSLADLHAALDRFEALWDELFPAEQARILQLLVEKVAIAPDGAEIRLRAEGLASVIADITAQTGDRSAA

SEQ ID NO: 15230 - protein, 520 aa, synthetic construct
MTVAIYSRKSKFTGKGESIENQIIKCRKFIEFKFTDEITEKDIEIYIDEGFSGKNEDRPKYQEMISKVKNGEINKIIIYQLNRLGRNARDIHNTMEMCTSLNCIIYSATEGFDSSTSFGRAVIGILASLAQLEREQLAERIKDNMYTLAKMGRWLGGQSPLGFNYIRETYKDENMKERSMALLRKNNEELKIIKKIYSKYLDEQSLSQVSKWSLINNIKGKNGGNLDKSAINLILQNPVYVQSNDEVCNYLKTLGYDVCGEPNGNGILRYGKGAEKVAAISKHKGIIPADKWLEVQNVLKKNKEKAPRMGRTHTALLTGILKCQCGSGMRVSYGRIKPDGTKTFYYTCCMKNNSGGVRCKSKNLNGKDLEELVINKIKIRTAEDIFNNLNNLTDSIDTVETNNNITRLNKEKESLKTKIDNLINKLSLTSDNDISQLFINQIAIFKSKIIKIDNELGEFKNIEAKIAEAHREVNINLKRLDDFKNNFDYMDFEEKKKSLNDILEKITWNSDNNEIILKYT

SEQ ID NO: 15231 - protein, 509 aa, synthetic construct
MKRIAIYSRKSKETDTGESIKNQISICKNYFKNQNFKCSFEIFIDEGFSGGNTNRPAFKKMLKLCTLKKFDIIAIYKIDRIARNITDFFSIYNKLEQNNITLISVTEGFDATTPIGRMMMTMLAGFADMERENIKQRVKDNMYELAKLGRWSGGTPPTGYKSITKVINGKKYTYLSLINEECNNIISIFELCAKGYTSTQIGKRLNMNPKTILNIIQNPTYLKSDIPSKNYLESIGFKVYGEINGKGYLSYGRRPRKNGQKLNNAPNMFVSVSEHEGIIDSSLWIKANNQLSKRSKKAKPRTSTNSFLAHLVKCSCGNYMFISSGRKRKDGSKSFYFRCTSKVNKNLVCNNKKSLRVDLAEEYVLNELLNIKISEDLLKEYILNNTNHNNLNDKIKSIKNKIQSNNIAINNLSKKLLYVNGNTLSILNDKINNLSLENSNLNNELLDLNKKSILGNVTINSDVLKKKLNILLKNFRSLPLDQKQIFIRSLIKEIIFDGDESIEIIFNDC

SEQ ID NO: 15232 - protein, 458 aa, synthetic construct
MKKAKSETTLVRAALYIRVSGEEQKIKGLSLEAQEERLRDFCKERGWLICGVFIDAAKTARKNIRKRVEFQHMIDGVKKDQYDILVFCRLDRWFRSVADYYKIMDILNAHNCGWVTSDEDYDTTTANGRLYINVKLSIAQNESDICSERISVVFDSKIQHGTVLSGFSPFWLDVKDKKLVVNDERAAIVRDAIDYFEKDMTQNGTVRYIRNKYGINWDINMLKRVFKNKLLIGVYDSNGRYNDHFCDPIISVDQFNRVQSIFDKRIKVVPTKRVYIFTSILKCPVCGCRLSGQAAGTNTRYYYRCNRHFIRKDCSYGKITNERLIEKWLLENLKSKLSECEVAWNVKQVKKRLEPSAKQKASLKRKLSKLKDLYLNELIDLEDYKRDYIMYSSALSELSTSQKEETPPDFAAVHRILDNDFLSTYNTMDRTEKRTFWQSIIKEMVLDDNGHVTSLSFV

SEQ ID NO: 15233 - protein, 573 aa, synthetic construct
MTTRRPHVYTRISKTTQTEGSGLDEQTARIEQYLKDKRHLFEGDVTYWQDIGLSAYGNKNIQDGQLAEFIKQVDEGKIGEGDALIIYSLDRLSRRSSWDETTIQHLVKKGVEIHDVSTPVVLNREDSMSKIIMELIVTRGNNESKIKSERSTAGWEKRLNDTLKDGRVFTNKLPRWLGSNDDQYVVLKDEAEIIKRIFREYTNGMSSPMIARRLNEEGIKSTGKSLWRPNTISKLIKDERLRGNLVREKITLIPNIFPKVIDDELFVLANRILSTNAVGKKGRPRENNVTREVNNIITGLVRCGKCGSKVTTTKNGKGMRYITCLNRLNYKICGQKSIRLEEVERIVINHVKQVDMSKVLSISNVDTSSEAQLQAELIELKIEEQSCIVKIEERKILKQRTSLPLANALTDIQDRIEEVTNEILNLQVQEPLPDISSESISALLNASNVELRMSLRKYLVQVVDKLTFINIGDYNIIEVKYNNNVYCHAIITDKKLKVLHEVDITFSGDTTTYNSGEFSIVESESEGICTFEGIDNVSVTDYFLLANYIGSLPEKQWVVDVMYLQQNMDAVLK

SEQ ID NO: 15234 - protein, 556 aa, synthetic construct
MKKKRAYVYTRVSTSMQIDGYSLDAQEERIKQYAKAYDIEIVDVYKDAGKSGTSIIGRNNFITMLDDIKEEKDNVDCVLVFKLSRFGRNAADTLNSLQVMEEHGVYLISVDDGLDSSKDAGKLVITILSAVAEMEREYIIAQTMEGRKQKAREGKWNGGFAPIGYKLQDGELIINEDEAKAIKMIFDLYTNSDMGANGVAKYLASLDIRKPIRQNGKSLYFSASLIRQILDNPVYNGKIAYGRRKTKKNKITGKISQEKADNYIISKGIHESIIDDELWELTQKKRKSQAKKYEKINRGNDEKTYLLSSLIKCPVCGAGLYGNKSRKRKNNGEHYKDYYYYSCKHRQLMNGYKCNFSKQIKADAIDSEVATIITKIISNPSFAKKLEEKINIQIDTDEIDKIIDKHMAKERQLLGTKASLINQIDSLDFEDKHYERKFEDLNLRLDAIYDQLDYVELQISDSRKRKEAILEEKITSDNIYKILINFHKLYSVLSDVDKKRLFNQLIEKIEIYGEKNESGRWVKSLTFKLTLIDEDINLSLDNDSSVESVVLMSKAD

SEQ ID NO: 15235 - protein, 595 aa, synthetic construct
MNTKVKVIKASNTGARNRNALDLDLKRVAAYCRVSTDSKDQLESYKSQVDYYTNLIKNNKNWTLAGIYADEATTGTTATKRADFMRLISDCQNGDIDMIITKSISRFARNTLDTLKYVRLLKENNVGVVFEEENIDTLTMDGELLLTILSSVAQQEVENTSAHVKKGLKMKMEKGELIGFQGCLGYDYDPATKTISINEEEAKIVRYIFKRYLEGNGGSVIGRELEEQGYLTPRGKTKWSDTTVLGIIKNEKYIGDILMGKTFTVDPITKRRLANFGESDKYHIENHHEPIISKEDFEKAQEIRLRRAQNRNTIANKDRKREKLSRQYAFSSMLECGFCGEILSRRTWHTSSIYKKINWQCVKSTKKGKKYCPHSKGIQEAAIEKAFVESYRQLCHADSTIIDDFLKIIEEEINDNTLVKDLKKIENQLNRIISQERKLVDLHLEDSIDEEVYAKKYKKLTKQKEELLDEKKTLELTIKDEDSIKERLKQFKKVLENKEIIEEFNRTVFESIVDKVVVGRIDKDGTVHPYDLTFYFKTGVKDSQDSNNFKDKRKNAKDNDINKLCSYKNDEDKKLCSQSKDNARGDYSIDVKEIE

SEQ ID NO: 15236 - protein, 518 aa, synthetic construct
MKKITKIESNQKEESILRVAAYARVSTDEEAQLVSLKTQKAHYEKMIAENKSYTFAGLYFDEGITGTKKECRDELLKMLKDCEEGEIDFILTKSISRLARNTTDCLEIVRRLLDLNIGIYFEKENIDTRTMESELMLSILSSIAESESRSISENNKWSIKKRFQNGTFIISSPPYGYENIDGKMVVNEEEGKIIKEIFEQYLSGKGTHKIAENLNKRKIKGQKGAKWHGSTINGVLKNEKYIGDVIYQKTYTDENYNRHKNKGEEDQYKIIDNHEAIVSREDFGKVQELIKIRAIAKGNGKDTKRYQNRYSLSGKIKCGECGSSFKRRHHYNGKEKYIAWTCSEHLKDINKCSMKFIKDRDIKLAFVTLVNKLIFGKDKILTPLLESLKRVDSREEVKKIEKIEESLEKLKERKEVLNKLITSGVLDTSIYTKEISEISNEERNLLKEKERSKKAILGNDEEIRELEKLIGILDKSKMIDHFEVDLFEEIIDNIQVVNRETLDFYLKCVLVLREEVKK

SEQ ID NO: 15237 - protein, 567 aa, synthetic construct
MPTSSAADAPATFRRRKRASLYVRLSVAADAENLSLDGMIEDMRDLCARENLEEVALHIDDGKSGGRRDRDKFQAWLNDARTGACDVLVNPVTDRLTREGLNVAATILDIVEGKDPATGAPSHKPVRLVDCNGLDSLHGDAFRFRFVIQAEVGRSERERIRQRSRDRERRLKRAGRWGGGTAPFGYKAVPNPEKDEEGNPKGWVLVIEPAEAKAVREAADALLKTPPDAFNKVVRRMNHNGPAPRRADHWSRVTLRRVLTGDAILGRVSENGRPLRDAKGEIVAPFPPVLTLAQVTALRARLAGTGVQAKLADGRPSRVLSGLLTCHSCQADLTVHHSVRRYRVGKEKRLKEVPQITYRCPTRGYGGTCEKPVAVSAEPAEQHIVGLYLATVGHMPRYEERTTVSGLEEMAAVEEEIKEVLADLATNADADTFARLQQLQARQKELSEKDLTTRTELVPTGQTLAEYWAGAMVDDRRDLLDEAFEELTILPGKRGIKGFQEDRLIRRWAEDDEELDEDQEALLDALPAPAEAVKPSPDEVLAELAPYVETVKRLKADGVDVDSYLVM

SEQ ID NO: 15238 - protein, 634 aa, synthetic construct
MKLEHFSHTEPQIYSYSRFSNIRQEKGRSLARQKKFIDEVSAKFNLKINKDLVMTDRGLSAFHGHHKTKGALGVFLAAVEKQLIKPGSVLIVESLDRLSREQPYIAQATLASLVNADIVVVTAADEKIYSKETMAKDPLGTMILSVLEMVRAHKESLRKTEASIDFLHGQIATHEEGGVSDLAGPLPFWISRKQRPHPKIKTGFELNEHEEIIRLIVDMHFKQGMGLRPISVELLNRGIKPPSQLKHSPANSRKPKNDVWGVSTLSHIVSNQALCGRYVVNLNYQKDGKKHVEDYVLRSYYPAIMSEEEFDTFQAIKKRRYGSNKGDKSKRNGLVYLLTDYGNKSVCAKCGRSIGSQPQKQKHGIRRRLHCSKHKETANCCKSIIQDYIEDAFLISVARHIDYNLINTQVKPADIIRNSDRLEEIDLEMANVIDMRRTVKDEKIKLKLKFDYETLENEKEELIKQKLEFKQFKIAPDDIKKFIRTVNDARNYNNNEARTFVKSILMQCIRKIEVHMEKKKLECYGYPNLFENAIVNVVDVEFYTDKKLSIFVSAETNALLFSKISDEFADESLGSFTEEQLKAWNDVGFDNFQNLGERGTLVNENENSTENLWFASDLAEAFMNEMINQSEDES

SEQ ID NO: 15239 - protein, 579 aa, synthetic construct
MTTIETSSTAKRVAIYARYSSDLQTDKSIEDQIRVCQQRAEAEGWAVVECYTDHAISGESLFRPGIQALMAAAPTGHFDIVISEALDRVSRDLEGAAKVFKHLRFNDQQMFTLSEGFINELHIGFSGTMGAMFLKELANKTRRGLQGRALKGKSAGGIVYGYDISHEVGPDGTIERGGRKINEAQAKVVQRIFNAYVTGTSPAALAKQLNAEKVPAPNGGTWGPSTIYGNRERGTGILNNELYIGRQVWNRLRYIKNPETGKRVSRPNPEDKWVITDVPDLRIIDQSLWDKVKTQQGVYNRKDKPLHKRNRPTYLLSHLVKCGCCGGGFAMHNQTRLACSTAKSKGTCRNGLTIKREDLEQTVLNALNKNLMDERLVAAFCAEYTKRMNALRSQHNASRNDFIKEQRKLEREKQKIVQSICDGVPAEMIKDRAVIVNNRLNELEQLLSTQKEEKVIFHPNMADRYHKEVRGLMETMNNPETRAEASQHLRAMIDKVVLTPNETGEELTVDLIGDLAGILSVATSSESARVAAELSKLQQVHQGLSARTTKAPEGALVSCSTLQVELVAGVGFEPTTFRL

SEQ ID NO: 15240 - protein, 441 aa, synthetic construct
MAGVSRTRPNKAVIYCRVSGAKQVREGDGLASQENRCREYATYKDYDVVEVFKDDMSGKFERRPAMDRMLAFLRLHPKGSVVVIIDDISRFARNVQAHIALRETLSDAGGILESPSIEFGEDSDSRLVEHMLASVAQHQREKNAEQTSNRMKGRMMNGYSVFAAPVGYVYKKTKAHGRLLKRPDINEDFPLRGAVVCACCDKPMTAYFARSATGKRYPYYNCQTRDCSEYRKGIRAEKIDTGFEAILRAMAPTEKMLSMATSMLHDALGQSKEQVAQAKSALKRQIKELDKQQDALVERLVETSNPKVIAALETKVAKLENDKLLLNDKLSQETQSVFPLGEIIELLRDFLSNPWNIYEKGSLLVRKTILKAAFKAPLAYDRKNGYRTPQVSEIFEFLGIFTSKCEMVRSRRLELPRVLPHSDLNAARLPIPPRPHCLDLV

SEQ ID NO: 15241 - protein, 507 aa, synthetic construct
MSKNNKKNMRNKEVRRKKRAYAYLRKSPNKFTDNTSIEKQLEEIKKYCEENDIELVDTFTDDLKSGKSFEGRDGFKEMYNNVIRSKDNVDYIIVFKQDRISRDTLDTLYIMKRLNSLGKHLISIKDNVNTEDPASKILVHILALVAELEREFINMRTFSGMEKRAEEGKFLGGKVYGYKTVNKELVVVPHEVEVVKFIFKKYAIEKWGYKKIASYLNIQGIKTKNKQHWTINAVKTILQNQIYIGNTKWRGKYQKGQHEKIIEIPLWNLAQETMKTRSYKQEKVHPGSYPLSGLLKCPECGSSMVQGNSSSKYKYYQCSKNKNSGKAACSSNLVKKEYAEETILLELNNFFQNLNLAPYIKSATDSLLCFELEPLYKEAEKIDKEIKHINKKMETVMDLLDDETVPFDDKVFKNRLLGYQEQLNKQKLKLEEINTQIRFKKRQTSNEIIAYSVKNFSDLYEVLSDEERKSLCHYIIKEIHIFKEENTKQRKIKSIIYNFSPDNLSLV

SEQ ID NO: 15242 - protein, 570 aa, synthetic construct
MEIQKVAIYARVSTEEQASEGYSISAQLQTLRQYANLYNWEIVDEYVDEGISGKNITGRPAMQRLVADVEQEKFQAVLVWKISRLSRNMLDTLTLLDKFEDYGVKFISYSENFDTSSPIGRLVVQLMASIAEMERNTLSENVKLGMKQRALEGSWNGGVIFGYDSIEKELVINKEEAEVVKQIFTLYSQGKGLKAIANQLNKNGYRTKRDRHFSINGVATILDNPVYNGKISWLKVEDWDKKRRRGRNDNPILVEGQHEAIINDELWSLVQSRRKSKSFKQRQSNEPFLLSSILRCPDCGQGMVPSITTYTLSDGTKRKHRYYVCSDFHNKGSAACKANSVKAYDAENALFQRIESFLSNKQKFYETINSLTKTSIESIKILKKELEETDSKLEETLALQNRYLEAFEQNLFPVTVLQERLQQVAIEKSAIEQKRNNLITEISKSDTKVIPPELVHLLLGKFVEVYKSSTRDKQKQLLQLLVKKITVGRTNDHLRQIDKVELEFDFTEVNLSNTFTLIHMLYLETEKEGLSTPSNSESNGKYPPYLQLFLPLFVIRFTTINPKRTVNLFN

SEQ ID NO: 15243 - protein, 474 aa, synthetic construct
MKCIVYVRVSTDEQAKHGFSIAAQIEKLEAYCISQGWELVDKYIDEGYSAKDLQRPAFEKMMDTLKQGNIDVLLVYRLDRLTRSVMDLYKILKILDDNNCMFKSATEVYDTTNAMGRLFITLVAAIAQWERENLGERVRLGMEKKTKLGMWKGGMAPYGYKIVEKKLVVNDKEKAVVQEIFKQTTTFGFYTLAKHLTNKGFSTRKGGEWHVDSVRDIANNPVYAGYLTFNQNSKDYKKPPREQTLYEGSHEPIISKEEFWALQDLLDKRRNGGGKKHTSNYYFSTLLKCARCGHSLSGHKSAGKKTYRCSGKKAGKNCTSHIILEDNLTKTIFSMFDKLVGNIYNSTDSSNYSDEKINELTNELKNLEKLLDKQKKMYENDIIDIDELIKKSNQLREREKEINKELKSINQSSKTANEETKYIISNIDTVWEYSTDHERKQLMNSIFTQIVIDTKEEYKRGTGNPREIIIVSAK

SEQ ID NO: 15244 - protein, 611 aa, synthetic construct
MRTVKAYIYSRVSSLQQVDAFGLDRQISTVLDFLENAKLPAELGYQLDPSNHEVLDSDKGLSGYAGHNFTKGSLGRFKERVRSGEITEGCLLIESVDRFSRKQGYDAIDEFTFLIKRNIDIVEVETGQIYSYKLDHKLSTLSTSIERAYQESKRKARISKKSWQKRKKDSVDTGIALNNNTPDWLSLSQDKKSYELDVQKVQTITKIFELYRDGYGVTQIVNLLNKEGERYNGKGWNTVTVYNKLRDRRLNGYLVGKYTTIPKKDNESTNDAEKRILENTKIKKEANDNAKRIYPVVIEDDLFSRVQSMMDRNVSSKKQKSTTTKQRNLFNGLTKCNECGSPMIVQSMSNGGQYLRCYRQRTKDEKCNSKMLRYFETEKVLLQHIKNLNLDEIYGDEKSNQSLDTLKRLLSDVNGKIALLNEKVQSANDESELFAIMEFKRKRILEKDELIAKINSLENQCEAVTLNYTYDIEQLTNQDNTVIRRKANEHIAKVISSVKCRRIDSSYIGAYYLYDITYHRDILKHILITDNSGKLISEITISEKDNERTYVVREEDQTVFKVESNGNAWVMYASRTKTIDDLLYYINTMMVGREPDDFAYQLNEDHIEWID

SEQ ID NO: 15245 - protein, 506 aa, synthetic construct
MSKNKKNMRNKEVRRKKRAYAYLRKSPNKFTDNTSIEKQLEEIKKYCEENDIELVDTFTDDLKSGKSFEGRDGFKEMYNNVIRSKDNVDYIIVFKQDRISRDTLDTLYIMKRLNSVGKHLISIKDNVNTEDPASKILVHILALVAELEREFINMRTFSGMEKRAEEGKFLGGKVYGYKTSNKKLVIEPKEAKVVQFIFKKYAIEKWGYKKIASYLNLQGIKTKNKQYWTINAVKTILENQIYIGNTKWRGEYRKGVHKKIIELPLWDLAQETMKTRSYKQEKVHPGSYPLSGLLKCPECGSSMVQGNSSSKYKYYQCSKNKNSGKAACSSNLVKKEYAEETILHELNNFFQNLNLAPYIKSATDSLLCFELEPLYKEAEKIEKEIKHINKKMETVMDLLDDETVPFDEKVFKNRLLGYQEQLNKQKLILEEINVQIRFKKSQISNEIIAYSVKNFSDLYEVLSDEERKSLCHYIIKEIHIFKEENTKQRKIKSIIYNFSPDNLSLV

SEQ ID NO: 15246 - protein, 616 aa, synthetic construct
MEIQKVAIYARVSTEEQASEGYSISAQLQTLRQYANLYNWEIVDEYVDEGISGKNITGRPAMQRLVADVEQEKFQAVLVWKISRLSRNMLDTLTLLDKFEDYGVKFISYSENFDTSSPIGRLVVQLMASIAEMERNTLSENVKLGMKQRALEGSWNGGVIFGYDSIEKELVINKEEAEVVKQIFTLYSQGKGLKAIANQLNKNGYRTKRDRHFSINGVATILDNPVYNGKISWLKVENWDKKRRRGRNDNPILVEGQHEAIINDELWSLVQSRRKSKSFKQRQSNEPFLLSSILRCPDCGQGMVPSITTYTLSDGTKRKHRYYVCSDFHNKGSAACKANSVKAYDAENALFQRIESFLSNKQRFDETINSLTKTSIDTIKILKKELEETDSKLEETLALQNRYLEAFEQNLFPVTILQERLQQVAIEKSAIEQKRNNLITEISKSDTKVIPPELVHLLLGKFVEVYKSSTRDKQKQLLQLLVKQITVGRTNDQLRQIDKVELEFDFTEVNLSNTFTLIHMLYLETEKEGLSTPSISESNGKYPPYLQLFLPLFVVRFPPINPKRPINLLQQDKLHQLMRKRHLRKRKLIIRPLQNLLAQSKRPANDKCNFAFPIRS

SEQ ID NO: 15247 - protein, 548 aa, synthetic construct
MTMRVAIYARYSDDKQNPGSIADQLALCRRHARARGWTIINEYTDAAISADLLVTRPGAQALLRAAETGAFDLILVEHQDRLFRNLAENATAFKRLTYFGVGIATLAKDRLQLMDIAIEGLMSELYLQNLSDKTKRGMHSNGEKGLSMGGRVYGYRSTPGGEMTIVEDEAAIVRTAFGLYNEGWSCRDIADHFNKGDTPGPTGGLWNASAFSGSRQRGNGILRCELYVGVKVWNRFDKSKDPDTGKRVQTIKPEGEWKRTPVPQLRIIDDATWSTAQERLAITSETKPSTLANQAKPGVFTGLLKCGACGENYIVAGRARLQCSTIRNKGRHACANGRTVGRAAVEDRILTGLKDRLLSPEAAAIYVRAYHERWKANAGDRRARRAPLERRLAETQRRIDRALNAILDGYASADLKTRLQSLEDERDALKHELASIGDDDPITLHPGLADVYAQRISDLQERLAAYTKGKPSPKDRQAIAAARALVDRIEIMPTSHARGAHVEITLFGDLARFLRPDLNEAQCMSLLVAGAVCKSEPTSVLGLVRVAV

SEQ ID NO: 15248 - protein, 540 aa, synthetic construct
MRVALYARYSDDKQNPASIADQLALCTRHAQARGWTIAATYTDAAISGAHMANRPGVNMLMAAAEERAFDLILVEHQDRLFRNLADNARAFERLSYLGIGIATLRTDRVQLMDVAIEGLMSQLYLDNLSAKTKRGMHANAEKGLATGARIYGYRSAPGGEMAIFEEEAAVVRRIFAGYAQGLTGVEIAGVLNDDKIPAPGGGIWGATSVIGSRQRGNGILRCELYIGVKVWNRFDLRKDPATGKRVQQIRPESEWKRTPVPHLRIVDQVDWEAVQARFLLSGAHRKPHLANRHKPGLFSGLLKCVECGGNYTIKGKGRLVCSVYVGKGPSACNNRRSIMRDEVEDRVLEGLRAKMLSPAAVAAYVRAYHAEYEAAAAAAQSRRAPLEKRLAELNRGIARLVDAICDGTETPAMRARLVSAEADKAEIEAQLASADQQAPITLHPRAAEVYAEQVRALQERLAELKDGKPSADDRRVIELVRGLIERIEIRPVDQSRGAPIELTLVGRLADFMKPSWEENRNESGFRLVAGGGIEPPTCGL

SEQ ID NO: 15249 - protein, 481 aa, synthetic construct
MNTINKVAIYVRVSTSVQAEEGYSIDEQIDKLKSYCQIKDWTVYDVYKDGGFSGGNINRPALEKMIIDAKKKRFDTVLVYKLDRLSRSQKDTLYLIEDVFSKNDISFLSLQENFDTSTPFGKAMVGLLSVFAQLEREQIKERMQLGMIGRAKSGKPMMFTNVSFGYTYSPKTQQLTINQAEAVIVKQIFNEFLGGMSPLRLMAYLNENNILRNGKEWNYQGIQRILRNPVYIGKIKYNNVIYPGLHEPIIDEESYYKAQKLLDARQDEMRVKGKNRQFKAKYMLSGTAKCGYCGAPLRIKIGNKRLDGTRLKVYQCCNRYPRKYAVVTYNDNKKCNSGNYQKEDLEQYVIAEIRKLQLKPEKIDKLFNKVSKIDTVQINKQIASIDKKINRLNDLYLNDMIDIDKLKADAEKFKEQKRVLEKELDKDLKIQEQEKNKEDFKKTIGFKDVTKLDYEEQSFIVKSLIDKILVKKGLIKILWKI

SEQ ID NO: 15250 - protein, 474 aa, synthetic construct
MKVGIYVRVSTLEQATEGYSIQEQTDKLKKFCDVKEWSVGEVYTDPGFSGSSLKRPGMQKLINDVEQQKIDAVLVYKLDRLSRSQKDTLYLIEDVFLKYNVHFVSLNENFDTSTPFGRASIGMMSVFAQLEREQITERMQMGKVGRAKAGYFHGGGTIPHGYDYNDGELIPNEKEAKIVNYIFDQYLDGWGVQSIAKHLNAKHISGKRSAKWSHKVINEVLCNNLYIGKITWKNEIYDGTHTPIIDEDKFYKVQELMAKRKSTAAKNNQRPFKAKYMLTGIAYCGVCGARMFTLQSYSSKQHKYIRKYGCYSQSTIQHMVKDPNCDNDKYDGPELETYVLQRVKKLSMNPKTIKRITNQTTSIVSTDGTKAQIKETEEQIERLLDLYQNGAITFAKIESRLDDLNAKKSNLEEQLKRLESEKLNNGSTTDVLDLLSTASDVVDSKDYGAQKRLVHALIQKITLKRDKVTIKWTF

SEQ ID NO: 15251 - protein, 474 aa, synthetic construct
MKVGIYVRVSTLEQATEGYSIQEQTDKLKKFCDVKEWTVSDIYTDPGFSGSSLKRPGMQKLINDVEQQKIDAVLVYKLDRLSRSQKDTLYLIEDVFLKYNVHFVSLNENFDTSSPFGRASIGMMSVFAQLEREQITERMQMGKVGRAKAGYFHGGGTIPHGYDYKDGELIPNEKEAKIVNYIFDQYLDGWGVQSIAKHLNAKHISGKRSAKWSHKVVNEVLDNNLYIGKITWKNEIYDGTHAPIIDEDKFYKVQELMAKRKSTAAKNNQRPFKAKYMLTGLAYCGVCGARMFTLQSYSNKQRKYIRKYGCYSQSTVQHMVKDPNCDNDKYDGPELETYVLQRVKKLSMNPKTIKRITNQTASIVSTDGTKAQIKETEEQIERLLDLYQNGAITFAKIESRLDDLNAKKSNLEEQLKRLESEKLNNGSTTDVLDLLSTASDVVDSKDYDAQKRLVHALIQKITLKRDKVTIKWTF

SEQ ID NO: 15252 - protein, 525 aa, synthetic construct
MRLSRDDELQGESGSIQTQRMMLRQYAAEHGLNVIDEYIDDGWSGTNFDRPDFQRMIDDIEDGKINCVVTKDLSRLGRNYILTGQYTEIYFPSKGVRYIAVNDNVDTINGENELAPFLNILNEMHARQTSKKVKAAMRTRFANGAHYGAYAPLGYVKDPDKKGHLLVDPETRWIIEKIFDLAVHGRGAASITRILVEEKVPTPGWLNFQRYGTFANIYAGAPEEKAYAWTIAQVKSILKEETYIGHSVHNKQTNISFKNKKKVRKPKEEWYRVENTHEAIISEDVFRQVQEQICNRRRRQKNGTTQIFSGLVKCADCGWSLAYGVNSQNKNPYAHFHCSKYGQGLHQCSMHYIRYDVLYAYVLSRLQYWSVLAQQDGDKLLKRLLNASDKERNTARKRQTAELKKAEKRKAEVDTLFAKMYEDWSAGRITEYNFNMLSEKYQGEQRELDAKIERLHEAMEAAAQTAVDAEKWIGLMKQYVNPTELTAELLNTLIEKILIHEAVKSEDGSREQEVEIFYRFIGKIE

SEQ ID NO: 15253 - protein, 488 aa, synthetic construct
MNKKIKAIGYIRQSDEREDKEDISEQTQLSKIQQYCDFNDWDLVEVFKDIDYSGFRIKYTKRPGLMQAIEYIKNNPVQKLVIFNLSRLTRRRKDFLLIQESLNKLEVDICSTAEQLDFGSPTGRLVANILVNFNEYYSDNLSDVTMDNKKTNAEKGRWNGGPAPFGLKKDGDSFTADGDKADAIRLAFRMAKDGKGPYLIAKKLNELSVLTETGRSWSPRRIRYVLTNPTYAGMQKWQGKLYPLKSCEKLVEWDDFQYIQDTLFGKEKVWKGKERQLLSSLLRCPVCGGKMHARFSTGKKSRRYVCNKKNTLGHCPSPNYDLPTLDEAVVQAIGAMAKKRYEASELILELNESQEDNTNTLKNLRDEYNRLDAAKQKIFDDYYINNKLTEDQFNTLMTRYEKRQKEIDEALQKIPLPQSKSYGHYDDIIGEFTEALEVLPKQEKRKSIELLIDRIIPGEPTKVIFKWGDEMEIKPREMKKYNQKVYFY

SEQ ID NO: 15254 - protein, 520 aa, synthetic construct
MRTAIYLRKSRADLEAESRGEGETLTKHRKALMKLARVQKLTIVRVYEEIVSGESLFHRPEMNELLKNVDNNEYDAVLVMDIDRLGRGNMQEQGLILDTFRRSNTKIITPRKTYDLNDEWDEEYSEFEAFMARKELKIITRRLQGGRVRAVEEGKYLGTRPPYGYDLHFEKGIRTLKPNPAQAPYIKMIFDLYTHPDPKKRLGSGKIAKKLNELKVPTSTGKQWEPSTVIFILKNAVYAGRIQWKKVERKKSTIPGKKRSTQTRKKSEWIDVKGLHEPIISIEKFNLAKDILSRKYHIPYQLKNGVRNPLAGLIVCGKCNRKMVYRPYGKQKPHLICINQDCDNKSSRVEYVEDAVIKSLQEWLKNHEVKVNKGDSLEESENNEFEIKVKALHSLENELKELEKQKLNLFDFLERGIYSEDTFIERSQNIAVRITNTSEALEKVKYDIDSLESKNKQREQLIPEVIKVISLYRTLGDPSEKNELLKRVVDHAIYTKEKKQRNEDFNLNLYVRMKTDNINM

SEQ ID NO: 15255 - protein, 536 aa, synthetic construct
MQAAIYVRVSTGLQAVEGTSLETQLDYCLRKAFELGISQNDIHIYREEGASGEDLDRPALNRLRQDVASGTFSVLILTHPDRLTRDLTDKLFICRELESRNIRLVFVDTEYKNTPEGQLFFNLMSVIAQYELSLIKKRTVRGRLKAVEKENKIMPMRTAPYGYDIIGSKLVINEEEARFVRYIYEWYVHQRWTIRQIGEKLVELGAIPKRKESRSWSASSIQRILTSEIYIGRYYYNRRKTGKVKGQKTPSGSNRKLLEWRKEEDWIRVEVPAIIETGIYEQAMQQRQRNRKKSGHVKESYLLRGLIRCGECGRSWQATSYSGRADPMSGAKKKYLCYRCPNKTPATFGTTRLICTAPSLKAEWLDQNVWKSILVFLTDFTYIHNRLCEQEEGIRRELAGKKAALQEQFKQTDQELDRMKWMFQKNVLTEEELLRGTAELNKRNKELAKEIEIAVKQEKQVLQRLENRNEINRTASEIAAWICQKEWPVGEKRKIVELLVEEIVITVKGKRVYVSVKGPLGELLRKKQTKVKQEVN

SEQ ID NO: 15256 - protein, 520 aa, synthetic construct
MKNKIAIYVRVSTTKESQKDSPDHQKWACIEHCKQIDLDTADLLIYEDRDSGTSIVARPQIQEMISDAQKGLFNTILFSSLSRFSRDALDSISLKRIFVNALGIRVISIEDFYDSQIEDNEMLFGIVSVVNQKLSEQISVASKRGIKQSAAKGNFIGNIAPYGYQKVNIQGRKTLIVDIEKAKVVREIFDLYVNKKMGEKEITKHLNENAIPSAKGGTWGITSVQRILQNEIYTGYNVYGKYEIKKVYTNLKNIGDRKRKLVKKDQELWQKSEKRTHPEIISQELYKKAQEIRQIRGGGKRGGRRKYVNVFAKIIYCKHCGSAMVTASCKKPDKYRYLICSKRRRHGASGCPNDKWIPYYDFRDEVISWVVEKLKKMINSETGSEYSINFVSSINQNIGKEIDKINKLIESNRRLLFELRKSKMLGEIDEKQYGFEKEEYEKEILQLEEKLIKLTENERHDKDFEKIRKEIKQSVDELVTMGNYDDVEKTRIILSRLIQRIVVDSDGQIDVLTPLGVVKD

SEQ ID NO: 15257 - protein, 466 aa, synthetic construct
MKKRAGLYIRVSTEEQVDNYSIPEQKRRLEAYCQSHDWAVAEEYIDGGFSGAKLDRPAMQKMITDTKAGNLDVVVSLKLDRLSRSQKDTLHLIEDIFLPCHVDYVSVNESFDTGTSFGRAMVGILSVFAQLEREQILERMHSGMEARVRSGLIHGGLPFGYDRKEKGLVINESQAAIVREIFDYWLKGASYSEISRIMTKKYPGALAWHAITSVIQILKNPVYIGKVNFNGEVLDGLHDPILSDAVFEQAQVLIQTKTRWQGKQTRYLLTGILWCAKCGERYGVRSTKCNGVQYSYYCCCPNRKKPGSEFKKKCKSKSWPTHKLDSMIIDTIKRLSFDRQYFEELSNPAADSNINNLTRLDKEISECDQQVEKLMDLYTLDKLPLDKLNKKINALYEKKKKLEDDLSKLRKPVVQSYEDYKEIFDSVDIILETGDIKQKKALIRSIIKRIEINDDDVTIIFNFQNG

SEQ ID NO: 15258 - protein, 519 aa, synthetic construct
MYLEIEGAERYRAALYIRLSREDETDGPSESVSNQRAMLEDFARQRGVPVAGLYVDDGWSGTSFDRPEFRRMLRDIEAGRVNMVITKDLSRLGRDYIMTGHYMERYFPEHRVRYISLLDGIDTGVDSSANEITPFRAIMNDMYAKDISKKISSVKRDKQRKGLFIGGKPVYGYQMHPAEKNKIVVDEGAAPVVRRIFRLALEGLSCRQIAAQLNAEGIPSPGCYAGLYPSGTGQWSGERISEMLQNETYIGNMVQGRRRKVSYKSKKCIRQLPEDWVVVEGTHEPLVTPETFERVGRLLASRRHTRSRTYEFPLKGLLFCHECGHPLAVLNRKNSRGEDVRYLVCRTYQRFTKTGVCTCHSIQEQTVTRAVVAKLREACGACLEPAALLPAARSAVAEAHGGENPTAEIRALRAKIGRLTTVLDRMYLDQLSGLLAEADFARLYRQAREERGALERRVTELERRESPEAGDKAGALVQRFLDEAGDNRELLVSLIERVELTEQRELIIHFRFCPPEALF

SEQ ID NO: 15259 - protein, 540 aa, synthetic construct
MKQPYNTTIYNTALYLRLSRDDELQGESGSIQTQRMMLRQYAAEHGLTVVDEYIDDGWSGTNFERPSFQRMIDDIEDGKINCVVTKDLSRLGRNYILTGQYTEIYFPSKGVRYIAINDNVDTINGESELAPFLNILNEMHARQTSKKVKAAMHTRFANGAHYGAYAPLGYVKDPDKKGHLLIDPETRWIVEKIFDLAVHGRGAASITRILVEEKVPTPGWLNYERYGTFANIYAGAPAEKAYAWTIAQVKSILKEETYIGHSIHNKQSNISFKNKKKVRKPQEEWYRVENTHEAIISEEVFQKVQELIASRRRKRRNGTTQIFAGLIKCADCGWSLAYGENKQNKNPYGYYHCSKNGQGLRQCSMHYIRYDVLYAYVLARLQYWSMLAQKDEDNLLKRLLNASDRERNSAKKKQAAELKKAEKRKAEVDGLFAKMYEDWSAGRITEYNFNMLSEKYQNEQKELETKIRQLHETMEAAVQTAADAEKWIALMKQFVNPVELTAELLNTLIEKITVHEAVKGEDGSREQEVEIYYRFIGKID

SEQ ID NO: 15260 - protein, 494 aa, synthetic construct
MTAVIYARYSSDNQREESIEGQIRECTAYAEKNGITVVKHYIDRALSAKTDNRPDFQQMIKDSEKRLFDIVLVWKLDRFARNRYDSAHYEYQLERNHVKLVSATEPISDSPAGIMVKSMLTGMAEYYSAELSEKVVRGMTENVLKGKYNGGTIPIGFKVDEEKFFQIDPLKAPFVVEAFQRYNDGATMKELMNWLNDSGVTTNRNQKFTYNSVQTLLTNKRYIGENHFKDIVMPDSIPAIVDKDLFEEVQQKIKKNSRAPARHKAEDDYLLTTKLFCGMCGAMMFGECGTGRNKVVHHYYKCATAKRFKTCKKKTVRKEWLEDLVIAETMKLIQDDAVIDAIVAEVMELQEQENTTLPLLEKQMREVENGIENMLNAIQAGVLTNSTKLRLEKLEAQQKELEVRIAEEKIARPRLSENQVRFWLIRFRKLDPNVKSHRETLINTFVNAVYLYDEKVLITFNYKDGTKTITFDEIAAKDAPEGNGSDLGCFAPPR

SEQ ID NO: 15261 - protein, 529 aa, synthetic construct
MTTTQIRRKRVTAIPATKTPGHNATAQGVQRRRRVAAYARVSTEAEEQASSYEAQIDYYTRHIQSRSEWEFAGMYTDEGISGTSTAKRQGFQRMITDALAGGIDLIVTKSVSRFARNTVDSLTTVRALKEKGVEVYFEKENIWTLDSKGELLITIMSSLAQEESRSISENVTWGQRKRFADGKIMVPYSSLLGYKKGDDGNLAIDETEAPIVRRIYARFLEGATPQTIAKELTADQIPTPCDKTVWLPSTVRSILANEKYKGDALLQKSFTTDFLTKTMKVNEGEVPQYYVTGNHEPIINPATWDAVQAELARRAGKGTSNTHPFANTITCSDCGGSFGRKVWHSTSKYRRHIWRCNNKYKKTHRCATPHVTEDQIKDAFVAALTERVTGNDVLDDTMHLLDDTIFNTRELETQQNRLGERLEETITLMNQLITAAAATVHDPDDYDRRYHELENRHRQLETEHQHISEQIDDLRHRRAQAIKVRDYLATQPPLAYSDQAWNTLVDHATVTADGVITILLKDEISTSKD

SEQ ID NO: 15262 - protein, 547 aa, synthetic construct
MTQRNANTDQAKATVQKAVIYCRVSSIHQETEGNGLVSQETRCRQFAEQNGLHVEAVFPDTKSGGGDFMQRPGMVALLSFLDAQPDESFVVVFDDLKRFARDRDFHFRLREAFRARNAHIKCLNFNFEDTPEGEFIETIMAAQGQLERMQNARQVAQKMKARMQNGYWVHNPPIGYQYKTVRGHGKVLTACEPLASIVREGIESYASGRFQSQAEVKRFFESFPDFPRNKHGEVKQQRVTDMLTNPIYTGHICSETYGINWLKGHHDGLISVATFDKVQERREGVAKMPARKNIGDDFALRGFACCAGCGVPFRSSWSKGKSKHYAYYLCQTKSCEHYGKSIARDKMENAVGEVIKQLEPSPQLITLINAMFKQAWNARLEQAKAIQSSAKRKLQTCEKQIDALLDRLVQTSNQSVVAAYENKIAVLEHDKALLSEKATQALPGQRSYEEKLELAVKFITSPWKLWASNNIKLRRLVLKLAFADRLIYDRNKGARTPEFTLPFKALEGVMSSNLKNGAVEKTRTSTGVTPQRPQRCASTNSATTALS

SEQ ID NO: 15263 - protein, 545 aa, synthetic construct
MSQSNQGKITALYCRLSQDDGLDGESNSIQNQKRILEQYAIDHRFPNIQFYVDDGYSGASFNRPDFQRMMSDMEDGKIGIIITKDLSRLGRNQLHTGLYIEERFPQFGVRYIAINDNVDTENAESNDLMPFKNLFNEWFVRDTSRKIRAVQRAKAQRGERLGTRAPYGYKKDENAKGKLVVDEEAAAVVRRIFALCAAGRGPSQIAKQLRAENVLCPAVYTYRKLGSGHTCLDLSQPYNWSDSTIANILENETYLGNTVNMKFTTKSYKDKRYVQHPREECLVFEGTHPALITREVWDIVQRVRQNRKRPTKMEELNKYSGLVICADCGSTMVLHRARTMKPTQNNFTCRTYKKAGSEVCTAHYIRECVLDEIVLEDIRRVTAMAREHTQEFAAYICDRQSAELRREIRRQELELSGMKKREAELEAIFKRLYEDSVLGRITTEQFQTLSASYVAEQEQLKTAIPQKEREVAKLKATVSGADNFIARAKRYTDIQKLTPELLRLFIEKIVVHEKDVKWSKHASQTVEIHYTDIGVIGNMNITKSA

SEQ ID NO: 15264 - protein, 536 aa, synthetic construct
MKTMKFPIDLSMLTEEEIDQFRQDPSTLFEGDTDVSLYLRFSSERQREQSIEGQLRDCRTFCKLNSYRITAIYVDRATTARKDVEKRVHFQEMIRDSEKKPWEYVVVWKLDRFARNRTDSALFKFRLRKNGVKVISATENISEKPEGIILEAVLEGMAEFYSADLSQKITRGMRESALKCHSIGGHVPLGYKIEDHKLVINPATAHIVREAFELYANGETVADICRMFNTKGYRTAKGVEFNRNSFKSMFRNKRYIGVYTYKDIEMEGGVPAIIDKELFETVSRRLSKNAEAPARGKAKVDYLLAGKLFCGHCGGSMNGESGTSKTGAVHNYYTCYTRKRKHACEKKPLKKEWIEYIVAQDAMELLTDDTIQELADMAISQTEQDLRENTRIPELTERMKETESGIANITNAIEKGIASDALMNRLVELEKEKKNLLRLLAEEEKYVCKIERSQIVYWLTEFKGGRIEDERYRRIIIDLMVNSVTVWDEPDGFRITTAYNLTSCQSKTFRIDPSSEKGFGFEGSKSTKKSQQTMVC

SEQ ID NO: 15265 - protein, 511 aa, synthetic construct
MNVVIYARYSSDRQTEQSIEGQLKECYEYARRNGYTIVGEYIDRAISGTTDHRPEFLRMIADGDKKLFQAVLVYQLDRFARNRYDSATYKAKLKKNGIRVLSARENISDDASGVLMEAVLEGMAEYYSVELSQKIRRGMDINAEKCLSTGGNLALGFRVDSEKHIQIDPDTAPVVQKIFEMYASGQSMADIIRYLNANQIKTSYGNEFNKNSINRILRNKRYIGVYTYRDKEIPDGLPRIVDEDLFWEAQRIMEKNKKAPARAKAKVDYLLTTKLFCGHCKAAMTGISGTSKTERKYHYYQCVTNRRDKSCDKKTVGKEYIEDLVVNRLRDFLTPDNISTIAREVVDLCERESNNGNTRRLKKLLAENEQATENLLKALESGQAVDIIADRIAQKKKEHEKLSLQLLVETSQHPTPSVKEIRFFLNQFRKGDINDPKYRQGLVDMLVNKIYLYDDKMTVLCNTQDGHFDVDLKEVSSLKGQLVEAGGVEPPSENVSTGTSPGADGLLDFPS

SEQ ID NO: 15266 - protein, 521 aa, synthetic construct
MTAKQQALIYCRVSSRAQEAEGHGLQSQETRCREFAANKGYEVAAVFPDTITGGGDFMKRPGMMALLSFLDAQPDQKFVVIFDDLKRFARDTRFHLDLREAFRKRDATIECLNFKFDDTPEGEFIETIMAAQGALERKQNGRQVAQKMKARMQSGYWVHNAPVGYRYKTVKGHGKLLVADEPLASLVRDAFEGFAAGRFQTQAEIKRFFEAHPDFPRSKHGEVKQQRVTDILNQPLFAGYICSETYGLNWLKGQHQPLISLETFDKAQKRLKGTALAPARKNIGESFALRGFVTCGDCNVPLRSSWSKGKNKHYPYYLCQTKGCGSYGKSIPRDKVEGDFGEVVKTLEPSPTMFALAKTMFHAAWDGRSEQIKDAKASVKRQITEAEKQIDSLLARIISATNDSVIGAYEEKIARLEKSKVRLHDSLIHQAPKQGRLEEMLEHSLQFLANPWKLWDSGNITLRRMLLRLAFADRFSYHRIEGARTPELAIPFKALRVFQYREKSNGAGEGTRTPTPRGART

SEQ ID NO: 15267 - protein, 463 aa, synthetic construct
MTKPQTALLRVALYIRVSSDEQAERGDSIRDQKERGIKYIDDHQNMVLQDTYIDDGVSGQKLDRDDFTRLIGNVKAGLVDLIIFTKLDRWFRSLRHYLNIQVILDKYNVAWTAIDQPYFDTSTPYGRAFVAQSMTWAELEAQNGGLRVADVFRNKVVHGEVITGKVPRGYMIQNKHLVFSDEAPAMLDSIQYFHREQGLAKTVNYMRENHGINMSIQNLKNSILRNEKYTGRYRGNENYCPRLISDEMYQDIQRVLDNNSTIRSSQKYPYIFSGILICDECGHKMSGCHINVVSRRTSGKVYRYKYPAYECLQYRAYKKCSNGGEIREMRIEEYLLEHIREELSGYLVDFETGEAKRIDNRAKKNKIRRKLDRLKDLYLNEVINLEEYKKDRAEYEEQLAALPDMEQPIKNLKPLKQVLDCNFEIIYNNLNNEEKRAFWRSIIKEIRVSKSIGRNRKYQIIFL

SEQ ID NO: 15268 - protein, 532 aa, synthetic construct
MRQVAYSYTRLSSAKQILGHGATRQRENIEALCEARGWTLSDKTFNDLGVSAYRAKNRSEGALGLFIDAVEQGVIPQGSILVVESIDRLSREEVDKSLRLMLTLLDLGILIFTVSDQKLYRSGSPNAMLDIMTWLIVASRANEESAVKSKRIRDAKMRHKAQARETGRIITRQCPKWLTVNQSKTQFIIDEVMVKTIKSIFQWYSEGIALRGICDKLNAYGATWKPATITSLLINRKVLGEFQPLRYTEQGKEIPDGDVIPNYYPRIIDDTLFTQCQIIRESKKSRGRTASEPYANLFKGLLVCGECGSGIGLSTDRNGKRVYKNLRCANRSEVKCSAKRWKYDVIETIIIVALQHLPWNTGSRSASEALCASLSDSIEILNAEYQMLATKAENALEALIALPTNKILQAKAEAIDHDMQEKGERLVKLRAELEQADRVRLVDSLDHVDLHQVLDGLYSDDEDARAKTNLFLHKHVSEITMDTFNDDPKLHGRLSLRMTSGETASVEVWNDYKGYSITMSDGSQYWSEIERV

SEQ ID NO: 15269 - protein, 502 aa, synthetic construct
MSETTQIGVIYARYSSDKQRDESIDGQIRECMAYAEREGITITNTYIDRALSAKTDDRPEFRQMILDSNKQAFNYVLVYQLDRFSRNRYDSAIYKAKLRKNGIRVISVKENIKDDPSGIILESVLEGMAEYYSAELSQKVMRGMTDNVLQGKWVGTVVPYGYKLSNNRQLEINEHEANVVRKLFDMYLQRHTLSEMASYMNANGHLTHKGKPFNTNSIKAIISNEKYIGVYSWGSERIENAIPPIIDKSIFEKAQHKRNLRAKKKGNRSELYQLCGKLECGRCGGNYVGSTGTSKTGALHHYYVCSNRRRKNACKAQNIRRDALDDIVISQTLAILNKPNVINKIAKYAANSGKNLQSETVAQIDIIDAHIRDLKKSLDNYMTAIANGFISDVLKHRIETTEQELKDHIEIKTSLENTIIPVELTEDHIRFFLLKMAKENPSTLRGRARIIEAFVHHVTIYEDHIEIVFNYKNELSEFHDKTLESSLLNDLVTQKGFEPLAF

SEQ ID NO: 15270 - protein, 523 aa, synthetic construct
MQLDASLTLRDEGLSAFHQRHIKQGALGVFLRAVEDGRILPGSVLVVEGLDRLSRAEPIQAQAQLAQIINAGITVVTASDGRKYNRERLKAQPMDLVYSLLVMIRAHEESDTKSKRVKAAIRRQCEGWVAGTWRGIVRNGKDPHWVRQVENGAFEFLPERELAIRTMIDLFLAGHGAIEIARILAERELYVSNAGNYSTHMYRIVRNRALIGEKSLTVDGEEFRLAGYYPALLTPDAFATLQEAMSERGRRKGKGEIPNILTGLSISSCGYCGLALVSQNTAIRPAKGRAFTRRLGCSGATFNTGCPVGGTCDARIVERALMHYCSDQFNLARLLEGDDGAARRVAQLAVARQRAREIETQIQRVTDALLSDDGVAPVAFMRRARELESELEQQHREIEVLEHKIAASNAHEIPAAAEAWAQLVDGVLALDYGARMKARQLVADTFRKIVLFQRGFTPFGNAPADRWKRSGTIGLLLVTKRGGMRLLNIDRKTGQWEAEDNLDLAPHHADEIPLPPTVQGMEC

SEQ ID NO: 15271 - protein, 557 aa, synthetic construct
MAAKARVYSYLRFSDPKQAAGSSVDRQLEYAARWAADSEMELDASLSLRDEGLSAYHQRHVRQGALGVFLRAVEDGQVPAGSVLIVEGLDRLSRAEPLQAQAQLAQIVNAGITVVTASDGREYNRERLKAQPMDLVYSLLVMIRAHEESDTKSKRVKAAIRRQCQGWIAGTWRAPIRVGKDPHWVRENNGGGFELISERAEAVRHVIAMFKQGHGAVRIVRDLAERGLQITESGRTQSSNLYRLLANRMLLGEKSVEVDGETYRLEGYYPALLTPAEFADLRYLAEQRGRRKGKGEIPGVVTGLGITYCGYCGAAIVAQNLMGRKRLPDGRPQPGHRRLHCVTYSTGAGCKVSGSCSVVPVERALMLYCSDQINLTRLLEGDGGTAGLCALLASARHRVAEIEAQVRRVTDALLLDDGEAPAAVLRRVRELESQLDVERRDVDSLEHQLTSAASAGTPTTVDAWRELVRGVDQLDYDARLTARQLVADTFSRIVIYQSGFRPALDGGKIGLVLVAKRGSTRMLHVDRKTGEWREAEDVVLPPDRELPLPPTMTAMLA

SEQ ID NO: 15272 - protein, 515 aa, synthetic construct
MKRIAIYLRKSRADLEAESRGEGETLAKHKKALLKVAKQLQLNIVRIREEIVSGESLLYRPEMQELLKEVQAHEYDAVLVMDMDRLGRGNMQEQGLILETFRQSKTKIITPRKIYDLEDEWDEEYSEFEAFMARKELKIINRRLQGGRIRSIEDGNYIGTRPPYGYLIEKKGKERYLIPHPEQAPVVKMIFEWYAHDDYQKRLGTSHIANQLNKLGYRTYTEKTWTAPSVLVILKNAVYIGRVQWKKTSYKKSTDVTKKSEKKLRPPEKWIDAKGKHAPLVSEALFYKAQEILQKKYHVPYQLVNGITNPFAGVIKCDLCGSSMVYRPYGNNAPHLKCYNQRCKNKSSRFDYVENAIIKNLKKWLKQYKANWDAYKEPEAGTSSIKLKEFAVKNLTRERKELENQRSKLHDLLERGIYDEKTYVDRSHRITSRMDATKAAIIQTQEELRLELQKEKAQHDMIPRVETVIDLYEKTDDPAKKNHLIKSVLDKVIYRKEKHQRNDQFEITLYPKLPQ

SEQ ID NO: 15273 - protein, 447 aa, synthetic construct
MKAALYIRVSTQEQIENYSIETQRERLEAYCKAKEWSIYDIYIDGGYTGSNINRPGLQRLLHELDKIDTVVVYKLDRLSRSQRDTLTLIEEHFLRNQVDFVSITETLDTSTPFGKAMIGILSVFAQLERETIAERMRMGHIKRAEEGYRGMGGDYDPAGYKRNNGELLLISEEAKHIQAAFDLYEQLHSITKVQRRLKELGYEVWRFRRYRDILSNKLYCGYVSFANQYYKGRHEAIISEDQFARVQLLLSRHKGRNAFKAKESLLSGLVTCGSCGEPYLSYHCTAKGKHYRYYICRARRFPSEYHEKCLNKTWNYQGIEEMILQELNRIIIDKQLTNKETVIVDYDTQLKKIDSKIERLINLYADGNIEKSILDKQVEKLNYEKQALHIQKLHQEQISQTTITNSKLKEYVIDLRVAEFSDRQAIVQKLIRKITVFGDTLEIEWNF

SEQ ID NO: 15274 - protein, 523 aa, synthetic construct
MQLDASLTLRDEGLSAFHQRHIKQGALGVFLRAVEDGRILPGSVLVVEGLDRLSRAEPIQAQAQLAQIINAGITVVTASDGRKYNRERLKAQPMDLVYSLLVMIRAHEESDTKSKRVKAAIRRQCEGWVAGTWRGIVRNGKDPHWVRQVENGAFEFLPERELAIRTMIDLFLAGHGAIEIARILSERELYVSNAGNYSTHMYRIVRNRALIGEKSLTVDGEEFRLAGYYPALLTPDAFATLQEAMSERGRRKGKGEIPNILTGLSISSCGYCGLALVSQNTAIRPAKGRAFTRRLGCSGATFNTGCPVGGTCDARIVERALMHYCSDQFNLTRLLEGDDGAARRVAQLAVARQRAGEIEMQIQRVTDALLSDDGVAPVAFMRRARELEGELEQQHREIEVLEHQIAASNAHEIPAAAEAWAQLVDGVLALDYGARMKARQLVADTFRKIVLFQRGFTPFNNAPADRWKRSGTIGLLLVTKRGGMRLLNIDRKTGQWEAEDNLDLAPHHADEIPLPPTVQGMEC

SEQ ID NO: 15275 - protein, 542 aa, synthetic construct
MAAKARVYSYLRFSDPKQAAGGSVDRQLEYAARWAADNEMELDASLSLRDEGLSAYHQRHVRQGALGVFLRAVEDGQVPAGSVLIVEGLDRLSRAEPLQAQAQLAQIVNAGITVVTASDGREYNRERLKAQPMDLVYSLLVMIRAHEESDTKSKRVKAAIRRQCQGWIAGTWRAPIRVGKDPHWVREMEAGGFELADDRAAAVRLVIEMFKQGHGAVRIVRELADRGLKITDSGRSASSHIYRLLANRMLIGEKSVEVDGETFRLEGYYPALLTPAEFADLRYLAEQRGRRKGKGEIPGVVTGLGITYCGYCGAAIVAQNIMGRRRAADGRPYPGHRRLHCVTYSQSAGCKVSGSCSVVPVERALMLYCSDQINLTRLLEGDSGTVSLAAQLASARQRVAELEAQVQRVTDALLLDNGEAPAAVLRRVRELESQLVSERRDVDSFEHQLAASAANVAPAAADAWRELVNGVEQLDYDARMLARQLVADTFSRIVIYQSGFQPDTDDGTIGVVLIAKRGGTRLLNVDRRTGNWRTAEDYTHVE

SEQ ID NO: 15276 - protein, 518 aa, synthetic construct
MVTHLKNLDIAIYLRKSRKDIETEREAALRGEEYDTLTKHRKELLAYARKNEHNIVDIFEEVVSGEYIAERPEMQALLQKVKDLNYDGILVMDLDRFGRGDKMDQGRIERTFKESQTLILTPQETLDLNEESGEFTVEVKTFLARMEYKQIKKRLQGGRRRGTTSGRDQSTKPPYGYRKDDSLRLVIHEEEAKIVRMIFQWCVDVGMGRSAIAQRLMDLEILSPTGLPQWQHVTIGRILKNPKYKGDQVFGRTKWSKNEDGTYSYTKVHDIEQMAYLEGAHEPIVDPDLWEKAQEALSRRREAPVKKNHDILNPFAGILKCKKCGKAMLANKPTNRPNKYLSCYTTRCDTKMIALYKVEEVFLRQLETIFDHLRATAKKRRSQPDDAALDLAKKKVLRIKEDIKKTNLRKTNLHDLLEDGTYDKDTFLERSRLLQEQLKQLDNELEAAEKQVELEAGRLNQALKVLPMIKKALTEYKSAGSIKEQNALLKEIVREIKYRRETDWTGQYQFEIEIHLYD

SEQ ID NO: 15277 - protein, 602 aa, synthetic construct
MTRVALYARYSSDSQRDASIEDQLRLCREQAAREGWSVAGNYEDAAISGASTVLRPGIQHLVRDAQRGRFEVVLAEALDRISRDQADVAILFKHLKFAGVAIVTLAEGEISELHVGLKGTMNALFLKDLALKTHRGLRGRVEKGKAGGGLCYGYQVVKKLDAAGEPIRGDREIVPEEATIVRRIFREFAAGKSPKAIAVDLNKEGVAGPLGRHWGDTSVRGHVIRGTGVINNELYTGVLVWNRLHFVKDPATGKRVSRANPPAKWIRTEVPHLRIVEDELWQAVRERQKSIASQFEVVAIATRKARARKLHTMKRPVSLLSGLLTCGCCGGRYGLFTRDRYACLNHQRRGICDNGRTITREKIEQRVLAGLRERLVSADNVAEAIRAYAQETNRLNQERRAQGEQDRKALDKIERAIAGIMAAIEDGLYQPSMKARMEDLERQKAEITVRLAAAPTDVPDLHPNIATLYKKRVEQLTQALADHEDGRPAAEALRSLIGEIVLTPGDKRGEVHAELRGELFGILELAKPDPSQLSDDVMTKGASCPRNQHSTARMASSLRAVRVFADAGRRFEPVISGPQAGKAKAAGQKTQSLPQNQHKTAR

SEQ ID NO: 15278 - protein, 536 aa, synthetic construct
MRTVVYARYSSQLQNSRSIEDQIAVCRERADREGWTIVDVFTDYAISGAAGIGEAQRPGLNAMLTAIEAGDIDQILTESTDRIARHQGDAFAIRERIQFAGARIFTLMDGEVDDITGTIKGLMDARFRKDLGARVKRGQRGAVQQGRAAAGIAYGYSRANRLDERGELIRGLRAIDPEQAAIVVRIFTEYANGQSPKAIAARLNAEGIPAPRGETWRMTTILGDRKRQNGMLNNRLYIGELIVNRTSKVVNPVTRRTVIRPNPETEWIIEAVPSLRIVGDDLWTKAQAVKESLQGVPFDQTRRPKHLLSGLGQCAVCGGGWIKYNRDQWGCGRYRDGRGCSNTRSISTKQFEKRVLAGLQDELLHPDLVASYVRAWHVENARRAQVTTRERAAIERRHDEAARRVDRLIEAVACGADDFREIRDVLAKARAERDALASQLADLDALPVIALHPGLADDYRRQVAALNEALDENDASRLEAVPRLRSLIDRIVLSPHDSGRGVSVSITGRLDEIVRLATGCPAMIVTKSGKRRASNT

SEQ ID NO: 15279 - protein, 557 aa, synthetic construct
MNIPPRAVIYARYSSDLQRDASIEDQIRLCREYAHRQGIEIVGTYSDRATSGASLMRPGIQSLIRDAQNGMFNLVISEALDRLSRNQADIASLYQRFQFLGCMIETTSEGAISEMQIGFKGTMNALFLKDLAAKTRRGLKGRAMAGKNTGGKTYGYDNIIKYDEIGEPIRGDRKINPIQAAIVRRIFKDYAAGISPRKIAEDLNKERVPGPTGRVWGQSTIHGNRERGTGILNNELYIGRQIWNRLTYVKDPDTGKRVSRLNPESEWTITDVPNLRILDDDLWNAARSRQGALKTKDTDVPVWDRRRPKTLFSGLMTCGCCGGGFSKVSQTQFGCSTARNKGPALCTNRLTISQSALETLILSALEENLVSEEALAQLCEDYTRERNRIREEASQNRSTLEKELATVIRDHAKLVEAIIAGVPAEQIKDRMIGLDDRRKELERRLSATPAPDPIRFYPKMAATFKLRVKTLIAQLGHSGDALEAKEVLRSLVDRITLTPNQETGKLSVFLKGGLAAVLKLSMGQTPTAPFWGLQGTDIVNELVLVAGVGFEPTTFRL

SEQ ID NO: 15280 - protein, 510 aa, synthetic construct
MYRPLIKCAIYTRVSTDHQADSTINQEAQGREYISRLGPEYDKTDIIVYRDEVVSGYYTSVFDRAEMKRAIQDAKENKFKLLIFKEVSRVGRDKQENPAIIGVFEQYGVRVIAINDNYDSLNKDNITFDILSVLSEQESKKISSRVSSARRQKARRGQWGGEAPIGYKVNRETKKLEIDPENCYIPKLIFDLYVNHGLGTFKVAEHLNGHGIRTKNGNLWGRVSINRVIRNQAYIGNVVYGTRRNALQREYDDTGKMSKKKVQIKIDKTEWEVAEDVHEPIIEKETFYNAQKILLSKSHGRTPRRAYHPLTGILFCAKCGQGMVCQKRTCKDKEYRYYICKTYHKYGRSVCSQANVNADVLEQDVIDIVKNELNSIPADKVEITGSKTNDIERLGKEIKKNNVKREKLKKDQIDIFNQRELFDESTYQQQMLEIKSQINHIDEEIQIIENQIKVLMEQVAESSTLDYLIEEVKNISLNDPEKLRVLLHDIIKSIELKEKHLQIEFNYDFR

SEQ ID NO: 15281 - protein, 523 aa, synthetic construct
MTRPINLDVIIHLRKSRKDIEEEKKALETGIPFDTLDKHKRELMELVRREQHNVIKIFEEIVSGEFLSERPEAQEMLRNVEDEECDAVIVMDLDRLGRGDMIDAGTIFRAFKYSETLIITPTEVIDCNAEGAELLFGVKSIIAREELKQINKRLQGGRRRAVKDGRHIAKNPPYGYLRDENLKLYPHPEEAPVVKKIFELLAEGSGRYKVIDYLMRSGYKAPSNKDIWEQSTISYIVKNEVYLGHLVWGKKKHTKRNGRRVTKKLPPELWTRHDNAHEPIVSQELFDRANEAHTGRLRVSRKEGTAISNPLAGIAKCGVCERTLTQTHSYDRPNPQIRCNNPACKSVQKGSLTHFFEEKLISSLEELVEQRKMTQSELSNSAERKNKNEERIIALTNYIQKATTELNEQHSMRETTFEMLERKVYTEELFLQRHKIISDKIKQLEAEMEKSQEEIAQLKIRMKMQAQLIPKIHKVIQAYKSLEDPEQKNNLLKTVIEKVMYIRKKEWLKPEQFELEVILRFPT

SEQ ID NO: 15282 - protein, 527 aa, synthetic construct
MSKKKSKEKVVEFSKLTNKVAAVWTRVSTERQADTNGSLESQRRICTEYAESHAIRIKKYYGGTNESAKVEGKLYREMIAEVARDKEINIILVYSFDRFSRAGYEAMMTKAYLKAKGIYVVSATQATDPDSAAGGFMEDVIFLFNQFENNLRKDKCITGMVECLRNGNWYSKPPLGYDKLKVGREHVLTVNEKGKILRNAFIWKATEGIKDIEIVHRLKGLGLSIDRKHLNKILHNPFYCGYIQHSLLGDEIIKGNQEILIDEATFNKVNDISNAGYEHKEITEPFPLKRHIICSDCGGYLTGYTVKARGRDYYKCNKKGCKSNHSTEKLHQKYINLLNEYNIPDELIPILTDVLRKVFEEYNQSKGETKKVLLKRKTECENRINAVKVRFGLGEINSEIYTATMSELNSRLAEIRRELEDAGKNLSNMMKYINQTIEMSCKLGGLWSDSNFSNRQKIQNLVYSSGIYFDKENDDYRTENENEVFKIFRRFTASCEGGKEKATTDFARLSPSVGMRRLERPTPTSRT

SEQ ID NO: 15283 - protein, 584 aa, synthetic construct
MSDKPLAYSYLRISTDNQRHGSGIERQMKAGAAWAEANGYELAETISDIGLSAYTSTHAKKGGFGRFLAAIETGQVPAGSILIVESLDRLSRAKVTEAFTQLVGLLKHGIKIVTLVDNQVYTESSLNENFGQLFMSLGVLLRANDESETKSKRGKAAWNHRRQNAAKKKITKNAPAWLELSENRSEFVIKPDRAKTVQKIFELAAAGQGAYSITKYLNGNLKKHPGFGHSGNWADSYINKILNSEAVIGELQSYSGTGKNRVKVGDPIPNYYPRVISDDLYYLVQAGIKERKTGAAGRKGDYFSNLFSGLLECGNCGGTIFMRNKGKEPRGYRFLRCSNSLKGNGCNCPAWRYDEFERQFINFVKDISFAEVFSGKSADTQMLELRGRKAVELDKIAQAEQKYSAVVEQFTDANLPEMLKESLIKKSVELENEIGAAKEAVEIIEVELTKLSTSNVEADQSEFLESYEQLLSGDKDKLREVRFAMHSILRRNIDSISVHNGTYCEPWEEMPASLRAELADKGIISQNDIETYLSKPHGKRLRDKHDRHFLVHFKNGVRRRVGAEYTLLDVSKSDLALIEKFESK

SEQ ID NO: 15284 - protein, 542 aa, synthetic construct
MKETQQDKQAIIYCRVSSRAQEADGHGLQSQETRCREYAVSKGYHVAAVFPDTFTGGGDFMKRPGMVALLSFLDAQPDTRFVVIFDDLKRFARDTRFHLDLREAFRKRKAEIECLNFKFEDTPEGEFIETIMAAQGALERKQNGRQVSQKMKARMQSGYWVHNAPTGYRYKTVKGHGKLLIPDEPLASLVKEGLEGFASGRFQTQVEVRRFFETCPDFPRNKHGQIIQQRISDMLTQPLYAGYICSETYGLSFLKGQHEPLISLKTFDKIQKARRETAYAPARKDIGEDFALRGFVTCGDCCVPLRSSWATGKYKRYPYYLCQTKGCPSYGKSIPRDRLEADFGTVVKTLQPSASLFALAKVMFQHAWQARLSQAEEAVASAKRQITQIETQIESLLGRIMATSNDTVIGAYEAKIAGLEKDKLRLMENAQNGVPAAGRLEDMLELSLKFLSSPWKLWESGDMTLRRTLLRLAFTDRIAYHRNAGARTPSIALPFKALGVFQQGQLKNGAVEKTRTSTGVTPQRPQRCASTNSATTALSVTW

SEQ ID NO: 15285 - protein, 514 aa, synthetic construct
MKETQQDKQAIIYCRVSSRAQEADGHGLQSQETRCREYAVSKGYHVAAVFPDTFTGGGDFMKRPGMVALLSFLDAQPDTRFVVIFDDLKRFARDTRFHLDLREAFRKRKAEIECLNFKFEDTPEGEFIETIMAAQGALERKQNGRQVSQKMKARMQSGYWVHNAPTGYRYKTVKGHGKLLIPDEPLASLVKEGLEGFASGRFQTQVEVRRFFETCPDFPRNKHGQIIQQRISDMLTQPLYAGYICSETYGLSFLKGQHEPLISLKTFDKIQKARRETAYAPARKDIGEDFALRGFVTCGDCCVPLRSSWATGKYKRYPYYLCQTKGCPSYGKSIPRDRLEADFGTVVKTLQPSASLFALAKVMFQHAWQARLSQAEEAVASAKRQITQIETQIESLLGRIMATSNDTVIGAYEAKIAGLEKDKLRLMENAQNGVPAAGRLEDMLELSLKFLSSPWKLWESGDMTLRRTLLRLAFTDRIAYHRNAGARTPSIALPFKALGVFQQGQLKNGAAGEN

SEQ ID NO: 15286 - protein, 539 aa, synthetic construct
MAGVINKPTKAVIYARVSGAKQVREGDGLASQENRCREYATYKDYDVVEVFKDDMSGKFERRPAMDRMLAFLRLHPKNSVVVIIDDISRFARNVQAHIALRETLSDAGGILESPSIEFGEDSDSRLVEHMLASVAQHQREKNAEQTSNRMKGRMMNGYAVFSAPIGYTYKKTGSHGRLLTRDEPLASIIKEALEGYASGRFSSQADVKRFLESQPEFPKDLPSGAIRQQKVTDMLNRVIYAGYIEHEPWGITRRKGHHEALISLETYGVIQERRNSRGVAAKRPDIHQDFPLRGAVNCACCDKPMTAYFARSSTGKRYPYYNCQTRDCTEYRKGIRAEKIDSGFEKILRSLTPTKSLMDIAVSMLKDAWDQRGDQAKLAKTEIKRQHKELDKQQDALVERMIETSNPKVMAALESKIAKLEEEKLLLSDKLSQTVKPKSTLGEVIELLREFLSNPWSIYEKGTLEVRKTILKTAFRGPLAFDRENGYRTPQLSVIFEFLSDFTSKCKMVRSRRLELPRVLPHSDLNAARLPIPPRPHCL

SEQ ID NO: 15287 - protein, 604 aa, synthetic construct
MVASVLVRDESGSSPLSTESMETASLQRNPLAGTVYTETLRGVRCVRLSVLTDETTSPERQREADDLAAAAHNISFGEGDQLREAVDLDVSASKTSPFDRPALGQWLARPDEFDALVWWRFDRAIRSMADMHDLAKWAREHRKVLVFAEGIGGGRLVFDFRNPMDPMAEFQMMMLAFAAQVEAQSIKDRVTGAMAALRKMPLRWRGSKPPYGYMPAPMPEEYGGVGWTLIPDPEAVKVIERIVRELLEGKAVSAIAGGLNADKVPTPRDHWSITKGRKTGGKTGGLAGLKKDAFHWKPIVISRLLRNPVLIGWKMHNDKPVRDAQGNPIMATETPILTREEFDRIGAALDARSRDKRDRSDTNALLLRVIHCDSCGGRMYLNRQESKPNQAPIYKCNPYSRGTKCEAPANIRGDWTDEYVETEFLRRVGSIQTTHVVEIPGYDPEPELRATLAEFEEHQEQKGRQKSKHAARAWQERADALDARIADLETREKREPQRVVTPTGKTFADEWAEKDTAGRRAMLIEAGVHLNVRRGTRGGWRKLDTRRLDFTMSGELDPAAEALAGEASALESEVRGDSPTPGSKVRVANPAPASTEPAGELVAA

SEQ ID NO: 15288 - protein, 515 aa, synthetic construct
MKTAIYLRKSRADLEAEARGEGETLAKHRSTLLKIAKEMNLNVLSVREEIVSGESLVKRPEMLALLEEIEDNKYDVVLCMDMDRLGRGGMKEQGIILETFKRSNTKIMTPRKTYDLNDEWDEEYSEFEAFMARKELKIITRRMQRGRVASVEAGNYLGTHAPFGYDIHRLNKRERTLTINSEEASVVRMIFDWYANEDMGANAIRSKLNDLGYKSKLGNEWNPYSILDILKNNVYIGKVTWQKRKEVKRPDAVKRSCARQDKSDWIIADGKHEPIIPESLFEQVQEKLNSRYHIPYNTNGIKNPLAGIIKCAKCNYSMVQRYPKNRKETMDCKHRGCENKSSYTELIEKRLLEALKEWYINYKADFEKHKQDDKLKETQVIQMNEAALRKLEKELVDVQKQKNNLHDLLERGVYTVDMFLERSNVVSDRITEITSTMENLKKEIKTEIKKEKVKKDTIPQVEHVLDLYFKTDDPKKKNSLLKSVLEKAVYKKEKWQRLDDFELVLYPKLPQDGDI

SEQ ID NO: 15289 - protein, 501 aa, synthetic construct
MKPNIKEVAIYLRKSRDESDGKEDVLAKHESLLLEYAKNHNLKYKIYKEIGSSEYIDSRPEMVRLLSDVSQKLYDAVLVVDLDRLSRGDLEEMGRISRVFRDSTTLVLTPSKTYDFNNEDQALINNFEMVFANHEYRMIKKRMLRGKLQGTKAGKWTNGRPPFPYVYNRLTKELDVDPDKVKVYEQMKKMFLEDMKATYEIAWRLNELGFKTNRNSYWYENTVRRILKNEVHLGKVVYGKTSGSGSKKKLNANGVQIKDRSEWIIAEGSHQPLKTEEEHQRILAILESRRYTPKGTRTNVQVLSKLIYCGKCNRIMSFTGKASGKRYVKTCLTTDRFGYRCHNRSLNVEVIYAQLFLDLEHYEQQLLNHEPKEKQGDSSTLQLAIHNKLEELERLEKGIDRIKDLFIDEVIDKLEMKKRIEKQQQLMQTKKEEIRSIEQSLAVIENVRTDDDRLHAIREFKKAWNTEGIGKRELNTLAKQLIDRIEYVREGNNINMKIQFL

SEQ ID NO: 15290 - protein, 501 aa, synthetic construct
MKPDIKEVAIYLRKSRDESDGKEDVLAKHESLLLEYAKNHNLKYKIYKEIGSSEYIDSRPKMVRLLSDVSQKLYDAVLVVDLDRLSRGDLEEMGRISRVFRDSKTIVITPTKTYDFNNEDQALINNFEMVFANHEFRMIRKRMIRGKQQGTKAGKWTNGRPPFPYVYNRLTKELDVDPDKVKVYELMKKMFLEDMKATYEIAWKLNELGFKTNRNSYWYENTVRRILKNEVHLGKVVYGKTSGSGSKKKLNANGVQIKDRSEWIIAEGSHQPLKTEEEHQRILAILESRRYTPKGTRTNVQVLSKLIYCGKCNRVMSFTGKASGKKYVKTCLTTDHFGNRCHNRCLNVEVIYAQLFLDLEDYEQQLLNHEPKEKQGDSSTLQLALHNKLVELERLEKGIERIKDLFIDEMIDKSEMQMRIEKQKQSMQTKKEEIRSIEQSLAVIENVITDDDRLHAIKEFKKAWNTEGIRKKELNTLAKQLIDRIEYVREGNNVQINIKFL

SEQ ID NO: 15291 - protein, 515 aa, synthetic construct
MKTAIYLRKSRADLEAEARGEGETLAKHRTTLLKIAKEMNLNVLSVREEIVSGESLVKRPEMLALLEEIEDNKYDVVLCMDMDRLGRGGMKEQGIILETFKRSNTKIMTPRKTYDLNDEWDEEYSEFEAFMARKELKIITRRMQRGRVASVEAGNYLGTHAPFGYDIHRLNKRERTLTINSEEASVVRMIFDWYANEDMGANAIRSKLNDLGYKSKLGNEWNPYSILDILKNNVYIGKVTWQKRKEVKRPDAVKRSCARQDKSDWIIADGKHEPIIPENLFEQVQEKLNSRYHVPYNTNGIKNPLAGIIKCSKCGYSMVQRYPKNRKETMDCKHRGCENKSSYTELIEKRLLEALKEWYINYKADFEKHKQDDKLKETQVIQMNEAALHKLEKELVDVQKQKNNLHDLLERGVYTVDMFLERSNVVSDRITEITSTMENLKKEIKTEIKKEKVKKDTIPQVEHVLDLYFKTDDPKKKNSLLKSVLEKAVYKKEKWQRLDDFELVLYPKLPQDGDI

SEQ ID NO: 15292 - protein, 515 aa, synthetic construct
MKTAIYLRKSRADLEAEARGEGETLAKHRTTLLKIAKEMNLNVLSVREEIVSGESLVKRPEMLALLEEIEDNKYDVVLCMDMDRLGRGGMKEQGIILETFKRSNTKIMTPRKTYDLNDEWDEEYSEFEAFMARKELKIITRRMQRGRVASVEAGNYLGTHAPFGYDIHRLNKRERTLTINSEEASVVRMIFDWYANEDMGANAIRSKLNDLGYKSKLGNEWNPYSILDILKNNVYIGKVTWQKRKEVKRPDAVKRSCARQDKSDWIIADGKHEPIIPESLFEQVQEKLNSRYHVPYNTNGIKNPLAGIIKCSKCGYSMVQRYPKNRKETMDCKHRGCENKSSYTELIEKRLLEALKEWYINYKADFEKHKQDDKLKETQVIQMNEAALRKLEKELVDVQKQKNNLHDLLERGVYTVDMFLERSNVVSDRITEITSTMENLKKEIKTEIKKEKVKKDTIPQVEHVLDLYFKTDDPKKKNSLLKSVLEKAVYKKEKWQRLDDFELVLYPKLPQDGDI

SEQ ID NO: 15293 - protein, 515 aa, synthetic construct
MNKKVKAGIYIRVSTEEQKQGHSLEAQESMLKEFADRKGYEIYDVYNDGGYSGKNFNRPEIQRLLRDLKDDKIDAILVWKVDRLSRNNTDVMSLIDTELTPRKKNLIITSIDMDSSSPTGHMFISLLSTFARYERATIIDRVKAGMQKRAEKGYWNGGSILGYDSVDKKLIINENESEIVREIFQLRAEGKGYKFIVNILNNKGIKTKTGKNFSIPAIKVIVNNQIYNGKMVWKKHQDWNTRRRTGKSEPIIVEGIHDAIIDEGLWTRVQKVNELQKNSFSSNRNFNGNFLLTGILKCPKCGAGTVMSKTKKRNSDDYHLYYMCQAYHNKGSSVCSANLIRKDQVEQQVLNIISLLVNENDIINALIDELNSDNNKTNESHIAHIKMLKKQLGKAYEKRKKLDNDYFEGNIEGSTYNRLMNELQLDINKLKRNVRESESEIIKNDSTINKKEVIYALENFNKLFKIVNDEEKKLLIRSLIREVQMEANRKDVKEITFWFLPSSVLPSNKVRRTIS

SEQ ID NO: 15294 - protein, 488 aa, synthetic construct
MNYAIYVRVSTDKDEQVSSIQNQIDICRYWVEKNGFEWDEAAVYKDEAVSGTEWFKRQAIQLILAKARNRELDTVIFKSIHRLARDLRDALEIKSILLGHGVRLVTIEEGYDSYYEGNNDMKFEMYAMFAAQYPKTMSVSISAALNAKVRRGEYNGGRVPYGYRVVDQKYVIDDEESENVKALFDLYNQGLGYLKVALYMNDKGFRFIDGKLWRDYHIRHIINNPFYIGDYIAQKYTKVKVDGRRKQTVNPKEKWVVYKNHHPAIIERDLWDKIHSFEKKEKNRMKRRVSVDNELRGLVYCAHCGQPMKAETVKKTQSEGVIKYVYMRCSKYRRTGGRECVKHVPLYYSQVRELLVEKLKEKEQDLEEQISGEHKNKNKQKINKVNKEIKEWESKKEKLLDLYLDGQNISKDVFTQRDKKIDKIIREKNMELLKLSSLEEQIKEDDAAKEAFILLENSENLYECFNKLIKQIDITQNGGLDIYYRFEE

SEQ ID NO: 15295 - protein, 515 aa, synthetic construct
MKTAIYLRKSRADLEAEARGEGETLAKHRSTLLKIAKEMNLNVLAVREEIVSGESLVKRPEMLALLEEIEDNKYDVVLCMDMDRLGRGGMKEQGIILETFKRSNTKIMTPRKTYDLNDEWDEEYSEFEAFMARKELKIITRRMQRGRVASVEAGNYLGTHAPYGYDIHRLNKRERTLTINSEEASVVRRIFDWYANEDMGASAIRNKLNDLGYKSKLGNDWNPYSILDILKNNVYIGKVTWQKRKEVKRPDAVKRSCARQDKSDWIIADGKHEPIIPESLFEQAQEKLNSRYHVPYNTNGIKNPLAGIIKCSKCGYSMVQRYPKNRKETMDCKHRGCENKSSYTELIEKRLLEALKEWYINYKADFEKHKQGDKLKETQVIQMNEAALRKLEKELVDVQKQKNNLHDLLERGVYTVDIFLERSKAVSDRINEITSTMENLKKEIKTEVRKEKVKKDTIPQVEHVLDLYLKTDDPKKKNSLLKSVLEKAVYKKEKWQRLDDFELVLYPKLPQDGDI

SEQ ID NO: 15296 - protein, 515 aa, synthetic construct
MKTAIYLRKSRADLEAEARGEGETLAKHRSTLLKIAKEMNLNILSVREEIVSGESLVKRPEMLALLEEIEDNKYDVVLCMDMDRLGRGGMKEQGIILETFKRSNTKIMTPRKTYDLNDEWDEEYSEFEAFMARKELKIITRRMQRGRVASVEAGNYLGTHAPFGYDIHRLNKRERTLTINSEEASVVRMIFDWYANEDMGANAIRSKLNDLGYKSKLGNEWNPYSILDILKNNVYIGKVTWQKRKEVKRPDAVKRSCARQDKSDWIIADGKHEPIIPESLFEQVQEKLNSRYHVPYNTNGIKNPLAGIIKCSKCGYSMVQRYPKNRKETMDCKHRGCENKSSYTELIEKRLLEALKEWYINYKADFEKHKQDDKLKETQVIQMNEAALRKLEKELVDVQKQKNNLHDLLERGVYTVDMFLERSNVVSDRITEITSTMENLKKEIKTEIKKEKVKKDTIPQVEHVLDLYFKTDDPKKKNSLLKSVLEKAVYKKEKWQRLDDFELVLYPKLPQDGDI

SEQ ID NO: 15297 - protein, 491 aa, synthetic construct
MGLAAIYLRLSRNEEQLNIDEILLNHRNALTKLANQQKLTYDIYQEISSGVNTERPELNLLLSRLDDYDALLVMDIDRISRDNAHAEEIKKMLIIHDIKILTPQGAIDLSQESNEMLFSFQAMMANFEYKQIRKRLGRGRLAAAEQGKWTMSNRVPLGYKKNEEKRLEVVEDEAKIIRFIFQKTLERVSANEIAKQLDILGWRSRQGKVLTSTHISNMRRNVVYYGVVKAGRKVNGRVVDEVFVEDAHEPIVSKQMFLEVQKILEENTTGNFFNKLKATRKLQNLIYCNCCKRKRYIQCDGNGIDYIKSCIYKVDNNKCRDRGYKYEPIEQFVLQKVKEKKPAFEQELQMLKSLDTTEVEKKLSIQRESLEKQINRFNKRQRNLKEMRMDGEISKAEFYEMRDENEEQIKQVKQQMELIDIKLENLSNTDEEQARLQDAIKTLDKLEELKAESCNTFLKKFIKKIWFSSNTEANHDTTRPKEDATIEIEWL

SEQ ID NO: 15298 - protein, 457 aa, synthetic construct
MRCAIYRRVSTDEQAEKGFSLENQKLRLESFATSQGWEVVEDYVDDGFSGKDTNRPALQRMFSNVDKFDVILVYKLDRFTRSVKDLNEMLETIKENEIAFKSATESIDTTTATGRMILNMMGTTAQWERETISERIKDVFGKLRENGIFSTGHPPYGYRYSGNKSIEIVEEQAKMVRYIYELSKTMGLFKISVELNRKGIKTRRNNKFGQSAVKRILHNPFYCGYMEVNNKWVPIKNESYIPIISEEEFKTTQKILTKRNKAQTRSRSVSYYPFSGIVLCPECQRAMRGDRAKYGDYYYRYYRCVYGRENINCTNRKRIRAEQVDKAFAEYISGSFENTTIKLDSRNIKSDIEYELNHLDSKIERLSDIYIEGDITKSKYNEKMNSLLNEKEKLKKDLTSCKENVDAQFVRDQINKLESIWHLIDDKTKSESIRSIFDTIKIKQDKNKVTIMDHTLL

SEQ ID NO: 15299 - protein, 628 aa, synthetic construct
MPQLYSYIRWSTDRQDKGTTRTRQVAAAKAYAEEAGLEMVEIIEPGVSAFRGKNRAGKLGDFIDAVKNAAIPSDSWLYCENLDRLSRDQVDEALRLFLELIGLGLTIVTGMDRKVYNRDTIRQNPTDLMISILMFIRGNEESETKSNRTVGNVVALVERHKEGLPVNIKSVGRHPFWIDDTGSQYEAVKKHPFYWNIAREIIDMFLSGNGVYSVKKYLDEKYPNGLKGREWDYQVLKKMRDNRALIGERTINLRGVPYKLENYYPWLCKDEAEFFLLEKRKQQNNYKSKKDGADTIKLLSGLSILRCSKCGGTMHSFMNHGKARYICTNGVHLQKNCSGWSITAQLVEHCTMIALLIGYMDKSRKNGSDTTLIEEELNEKEKLIKALDSKISNLVTAIAIAPDVNSLAHSLNEINSKRKELVLSVEKLKERLVSLQGKGSFEVDIMEFLILIQWAFFTNMEDNDRDKIRKIIDAIIEYIVVDKTNDCITIKIKYYGNDEVLVFGGVDRKPHWRFSIDFDTGKEGVLTVLENDLKDVPEIQKAVSYLHKLEKGYLAMYDSAVTMLAEVGYPEIKGTQFWPNSGKHEKVTVAFDGVEHTISLNGRLPKAIVSAIETTGLNRQQFIEKFKV

SEQ ID NO: 15300 - protein, 558 aa, synthetic construct
MSPTKTQNPQTNPLVKLAVSYQRVSTEAQGEEDRSGFSRQGEALTRWKRDHPDYEVRVIKEAISGRKNVKEGLLGRFLEDAQKGSVAPGTVLVVETFSRLSRDDMQGCMQLMLDIFKAGLGVSFCDFGNQILRSLDETGGTVHQIVGAASNSHREWLEKRDRTRGARRWRREQIAENASGGKSAVFGNYRFKPRSECPIDPGYPRWLDVDADGNWVQLEKEVAWVQRAFRLAKEKGAVTISQALRDIGVTQARSDTPIKVGDVDVLLRNIAVMGWRQHFEDNVAIGDPVKGVYPAIITPAEFDAVQVALKSRNYKRVPNGRHRHNLFEAQTFCDCCGAKLGLRNGRNGHAFYCSSKKNKTCDAPNIRYDEEAMLNRLHHFRWADFFGSDKHEAELANARRVVLTLTGELGALQDKVEEKRLQIMDAEPGTPVNVLNLWDKRLEKVEAAVRSKEQELTRAEDTMQSLERRPTGRKAEREVRRRLKAFMDGDRTDLSHRNEFNGWLVRENLGFAINTRTGRMEFGRLKTENYKLVEIDCVMDDAAAMGLDLDKVAAMIPS

SEQ ID NO: 15301 - protein, 492 aa, synthetic construct
MNAYLYQRISSTKQTAGVGLDRQLENALSYCLSHSLNVIDIQQDVASAFHAKHLDGHLGAFLQAIKDKLIEVPSALVVESLDRLGRDHTLSALSRFIDIIRAGVEIHEVSTGIVYTATETHLLHLALAIMERAHNESMMKSKRSHDAIQRKLAQAVHGKIIRKNTPVWIDVVDESLQLNEHAVTVKLIFDLYLSGMSFRAIARELDERAIQYPVKQAAKKMKVQKWNSARVSTMLSSPSVYGTFTPQTGDPIDDYFPPVVDIATFEKVRSIREARQVKATKITGLLSIVSSCCLCGECNHSYICHYRNWTNAEGLVERINLRCNGRMSGMPCKGKSVPMEVVERFILEVLPDVDISKLNRNKMRTLDNLKAKRAQLQTEMENLIDLVASGSAVAKAKFKQTEERATLLDEKIEKASQRILPDEKDAVTDLALNTSNLELRRKVNSALQLMGLRVVLHTEHANTVLCEVFLKGTLVASKKLAWGRKKRIDSKS

SEQ ID NO: 15302 - protein, 477 aa, synthetic construct
MRVAIYARVSTDEQFKEGYSIDSQKENILNFVKSQGWEVHDFYVEEGVSAKNLKRPSMQRLIQDTVDRKFDVVVFYKLDRLVRSVSDLDSLLQLFDENKVAIRSVTEPFDTTTAIGRFLITLVAAIAQWERETISERVVINMVKKATLGERNGGRAPYGYRLKEGKLIINDEEARFVKDIFNLYTSGKGIRSIVLYLNQFGVNKDIRTISRMLENPVYSGRLRWANNSKMDSITSDGLTHHPIINLELYEQTQQLRNQRAKEGKKATSPYPFSGVLKCGRCGSSLSGYYKKARGSKHYICIAKKNKGTCDLPMFTESALTKVFLESLSPDNAEKFLSLTSNFELESPKEENNDNKIKELEKELSIIKTRKKNWLLALGNGVISQEEYLTMTKDDTKNEDVIKEQLSGLSPQKVVIDKDSILNLLLSLTDLWNTATDYEKKSFINELFKNIVVDVPADYYRAPGKTPTVIIKEFTLSE

SEQ ID NO: 15303 - protein, 524 aa, synthetic construct
MAKTVTTIPATLTRFTAAPLNEVKKRRTAGYARVSTDSEEQQTSYEAQVDYYTNYIKSREDWEFVEVYTDEGISATNTKHREGFKRMIADALAGKIDLIVTKSVSRFARNTVDSLTTVRKLKEKGIEIFFEKENIWTLDSKGELLITIMSSLAQEESRSISENCTWGQRKRFADGKVTVPFNRFLGYDRGEDGNLVVNPKQAATVRRIYSMFLQGMTPFGIASKLTADGVLSPGGKERWNAGAVRSILTNEKYRGDALLQKSYTVDFLTKKKKPNEGEIPQYYVENNHQAIIQPDVFDMVQRELARRGQNRSHHSGVHLFSGKIKCGQCGNWYGSKVWHSTDKYRCTIWQCNHKFGGDEKCGTPHLTEEDIQRYYLSAVNKLLTDRDDIISTFELAKSAAFDTTALATERDELQSELLVVSELLQQCIQENAHVALDQTEYQKRYDGLTERFNKAKARLDTVTATISDKQARQATIEAFLDELRRLDIVSEFQPALWYSLMDFMTVYSKDDVRVTFKDGTEIRA

SEQ ID NO: 15304 - protein, 515 aa, synthetic construct
MKTAIYLRKSRADLEAEARGEGETLAKHRSTLLKIAREMNLDVLTVREEIVSGESLVKRPEMLALLEEIEDNKYDVVLCMDMDRLGRGGMKEQGIILETFKRSNTKIMTPRKTYDLNDEWDEEYSEFEAFMARKELKIITRRMQRGRIASVEAGNYLGTHAPYGYDIHRLNKRERTLTINLEEASVVRMIFEWYANEDMGANAIMRKLNELGYKSKLGNDWNPYSILDMLKNNVYIGKVTWQKRKEVKHPDATKRSCTRQDKSEWIIADGKHDPIIPESLFEKAQEKLNTRYHVPYNTNGLKNPLAGIIRCGKCGYSMVQRYPKNRKHTMDCKHRGCENKSSYTELIEKRLLEALKEWYINYKADFEKNKQDESTKETQIIQMNEATLRKLEKELVDVQKQKNNLHDLLERGVYTVDMFLERSNVVSNRINEITETMENLRKEIKTEITKEKVKKDTIPQVEHVLDLYFKTDDPQKKNSLLKSVLEKAVYTKEKWQRLDDFKLLLYPKLPQDGDK

SEQ ID NO: 15305 - protein, 515 aa, synthetic construct
MKTAIYLRKSRADLEAEARGEGETLAKHRTTLLKIAKEKNLNVLAVREEIVSGESLVKRPEMLALLEEIEDNKYDIVLCMDMDRLGRGGMKEQGIILETFKRSNTKIMTPRKTYDLNDEWDEEYSEFEAFMARKELKIITRRMQRGRIASVEAGNYLGTHAPYGYDIHRLNKRERTLTINSEEASVVRMIFEWYANEDMGANAIMRKLNELGYKSKLGNAWNPYSILDMLKNNVYIGKVTWQKRKEVKRPDATKRSCTRQDKSEWIIADGKHDPIIPESLFEKAQEKLNTRYHVPYNTNGLKNPLAGIIKCGKCGYSMVQRYPKNRKQTMDCKHRGCENKSSYTELIEKRLFEALKEWYINYKADFEKNKQDENTKETQIIQMNEAALRKLEKELVDVQKQKNNLHDLLERGVYTVDMFLERSNVVSDRINEITETMENLRKEIKTEITKEKVKKDTIPQVEHVLDLYFKTDDPQKKNSLLKSILEKAVYTKEKWQRLDDFKLVLYPKLPQDGDK

SEQ ID NO: 15306 - protein, 522 aa, synthetic construct
MTTRNVTVIPARKPIGNSAKAEELPKLRVAAYCRVSTDSEEQATSYEAQIEHYTNYIKSNPEWELAGIFADEGITGTNTKKREEFNRMIEECMQGKIDMIITKSISRFARNTLDCLKYIRQLKEKNIPVYFEKENINTLDSKGEILLTIMASLAQQESQSLSQNVKLGIQYRYQQGKIHINHNRFLGYTKDKDGNLVIVPEEAEIVKRIYKEYLEGSSMLQIARGLEADGILTGAGNPRWHTSTINKILRNEKYIGDALLQKTYTVDFLSKKRVPNNGIVPQYYVENSHEPIIPREIFMQVQEQLVRRRCVHISKNGKKRNYSNNHPLSQMVFCGNCHEIFRRVHWNNRGKKSIVWRCVSRLENTGLFCTASTILEDTLKEKIVKAINVAVSGKNSFLAILKKNIKTVLSEDLDESTVDIDKRLEELQTELIQKANSKGAYDNIVNEIYRLRDLKQETLSRNALRQDKRDRIAEMTDFLNTQTGDITEFDDKLVRKLVEKATVYGDRIVVEFKSGLELEVKL

SEQ ID NO: 15307 - protein, 523 aa, synthetic construct
MGKVTRIDGNNALQAFKPKVRVAAYCRVSTDSDEQMASLEAQKSHYESHIKANPDWEFAGIYYDEGISGTKKENRTGLLRLLADCENKRIDFIITKSVSRFARNTTDCIEMVRKLTDLGVFIYFEKENINTQRMEGELVLTILSSLAENESLSIAENSKWSIRRRFQNGTYKISYPPYGYDYADGKLFINKEQAEIVKRIFSEALAGKGTQKIADGLNLDKILTKRGSHWTATTIRGILSNEKYTGDVILQKTYTDENFKRHYNRGEKDQYMIKDHHEAIISHEEFEAAQEILKQRGKEKGVIKGSSKYQKRYPFSGKIKCAECGSSFKRRIHGSGDRKYIAWCCTKHIKDASSCSMKFIREDTIHQAFVVMINKLIFGHKFILRPLLQSLKKTNYSDNIAKIQELETKIKENTERVQVIMGLMAKGYLEPALFNTQKNELSKEAALLKEQKEAINRAINGSQTILVEVEKLLKFTSKAEKQIDAFDSEIFEDFIEEIIVFSQEEIGLKMKCGLNLRERLVRC

SEQ ID NO: 15308 - protein, 543 aa, synthetic construct
MKKVTTIAAKTREEIQGRPQEARLRVCAYCRVSSNSNEQMESFETQVAYYTKYINSRPEWEFANVYADGGISGTGREHRTEFNRMLKDCQNGKIDLIVTKSISRFARNTADCLEAVRFLKSLGVAVFFERENINTQDSESELILSVLSSIAQEESRSISENIRWSLKKKFRQGKVTVTTKRFLGYDTSESGELLINPAEAEIVRRIFREYIAGKSIREIKRGLEGDGIKTVTGLDKWPEATLRGVLTNEKYYGDAILQKTYTVDYLTHKKKKNRGEVPLYHVKGNHEPIISKEEFDLVQKLMAERAAKYGNLPEHRERYASQYVFSGRLICGNCGSTFKRRTWNSKSKAKQIVWQCSTYIKEGKNQCGMKALDDITLKKVFLRVFNRLYRNKEAILKPFMENVQKVLLDELKSEPVKAIDARIEYITGRMKQLIRLQIKENIAPEVFQREYGKLKAELDKLREERNSYGSLDDRCEELLKRTEKLYEYLQGMEDILTEFDDDVFKALVERILVISPTHLKFELKNGLVLEEKFIKKKGIHGLR

SEQ ID NO: 15309 - protein, 528 aa, synthetic construct
MEQQRKVKTIPATLTPITATPIGENKKRRVAAYARVSTDHDEQFTSYEAQIDYYTKYIKSRSDWEFVKVYTDEGISGTGTKKRIGFRTMIDDALAGKIDLIVTKSVSRFARNTVDSLTTIRELKEHSVECYFEKENIWTFDGKGELLITIMSSLAQEESRSISENCTWGQRKRFADGKVTVPFKRFLGYDRGPNGELVVNEEQAKLVKRIYRMFMEGTTPYGIATKLTEENIPSPSGKQKWHAGTVKAILSNEKYKGDALLQKSFTVDFLTKKTKINEGEVPQYYVEKDHEAIIDPEIFDQVQDELKRRCPGRNRYSGVHVFSGKVKCGQCGSWYGSKVWHSNDKYRRTIWQCNHKYDGGEKCKTPVLTDDELKGKYISAVNKLFADKKSILADYNEILAGPLYDTSGLERKRTEYEDEMSTAAELVQKEIKKNALEPQNQAEYQKRYDTLTERFNAAKKSLADTEAEISRKELARSSIRQFLATLGKQKDLVTTFDAVQFQSLVDFITVYSKDDIRINFKNGMEIKA

SEQ ID NO: 15310 - protein, 595 aa, synthetic construct
MKKITEIKKMKPVLPERKKVAAYCRVSMETERLHHSLSAQISRYSELIQSNPQWEFAGIYADEGISGTKAEKRPEFMRLIADCDAGKIDIVLTKSISRFARNTVDLLKTVRHLKDIGVEVRFEKENIRSLSDDGELMLTLLASFAQEESRSISENEKWSVKKRMEQGIPTAKPPILGYKWVGNHLEIVPEEAAVVKRIFQNFLDGKSRLETERELEAEGIRSVNGNVMRDSQLKHILNNITYTGNTLLQKEFVEDPITKKRRKNKGQLPQYYIENTHEAIIDYDTWKYVQDEMERRRELGALANKSLNTCCFTGKIKCPYCGFSYMHNHRNKNGHPQEYWNCGSKKKKQKPDKKCPVGGTISQKALEKACCEVLGLSEFNEAVFLEKVDHIEVPEKYTLQFFLKDGTKITRPAPNTGHQDCWTAEYRAETSKKRREHPYAKGTTELSGRIKCTACGCNFRRCTQPASNPNKPKMHYWRCSAHGKGCITIGLREDVLKKQIAEVMGIPEYDADLFKNQIPVIYVKDKDLLEIHFKDGRVETTQYAPPEKTFTPRSEESREHMRQLMKERWTPEYKAQMSRKMKQIRSEKFWNSSGK

SEQ ID NO: 15311 - protein, 525 aa, synthetic construct
MTAAIYTRYSSDNQDETSTQDQMRLAMQYAERHGLRVCGVYSDEELSGFMTVERRPQGAKLLAACARGEVKTIIIESLDRLSRNLVDQETIVRRLEFSGVRIVSTSDGYDSLRDDREMQRGFRGLMNEQYLRDLKKKTHRGLSGQVHRGYHAGGSVYGYESVPDGKGFKLTINEEQAKHVRWIFEQYAAGKSCQKIAAELNLNRIPSPRNSTWAVSALYGCPAKGSGILNNATYVGHYIWNRSRWEKHPDTGKRVRIDRPKEEWQIMERPELRIIDDALWQKVRNRIDKPSLKGGSKGAGRPARTLFGGLLTCHQCGGPMIAVNAHKYGCANHKDRGDAVCDSKLLVSREKTDQRLLSLVREELLSPAALVEMQNAVKQLIESEQSSASASHHAAKKRLAEIDKEIGRLVDAIAAVGVSPALAEKLKAAEAEKAALKEAPAQGKPSIEMAAMVARYKEMVLDLQNALAKDTNHARTLLAELLGKVVLVPAEGGVCAEIENGPAIAEPSSLIMVAGAGFEPTTFGL

SEQ ID NO: 15312 - protein, 523 aa, synthetic construct
MRFFSYGRKSVFSDKSDSIDNQFRMNREYCESKFSGQVDSWQQFSDEDFTGANTSRPDLQRMLSFIKGGFCDVLVVYQLDRLSRDVRDFANIYALLEEHGVMFISIKENIDTTTPIGRAMMYVTVVFAQMERETIAARVTDNMLGLAKKGYWTGGNPPVGYVRKHIVVNGKKHCSIEVDPDGARYVTQIFDTFLAYNCSLQGMETRFKNQGIRTQSGKFFSTTQLHKILTMPYCVEATPEVYDFYAAKGCIMDPGSPREMWDGSVGVIIYGRSTEKNKKHQAQPPEKWTVCLGKHKPFMPAEKWLAVQSRFTQNKCIKDAKWPVPLLKGVLRCKCGNLMQVSRKKKVDGTCSSWYYCRKRMRQGVDACDMGQIKCDLLDEEVLELFRGITADPALIQKFVKAETPADVPDLKAAQARVSACERKIGRLAASLALAEDSAASKYIIAEMERLDVELGALKREASLAEMESHRAAASAKDAKATAAEIAKLIHGLDGFDDKEKNAIARAVIQECTWDGERLFITL

SEQ ID NO: 15313 - protein, 441 aa, synthetic construct
MLRVAAYCRVSTSQEDQRNSLENQRRYFSEYISRQPDWELVEVYADEGLSGTSSDRPAFRRMLAAAAEEKIDLILTKEVSRFARNTVDTLAYTRLLRRQGVGIVFIGDHIDTRQNDGEFRLTIMASVAQEESRKISERVKWGQQRSMERGVVFGCNNIYGFTLKNGELTVKPEQAVIIRKVYRWFLLDGKGTCMIARELTADGIPPPSGKGKSWSSTMVLRLLRNEKYCGDLLQRKSCTPDFLDHRKVKNEGQSPQVYLRDHHEAIVPRSMFEAVRRELERRQATRKAGSRPSARYWCSGKVVCGLCGSRLVPRRGAQADGGLRWVCGKRVQHGVAACAAPAVGNRILLDCMKQIVQDLPIDMEMVLRQTLRAIPDLTRTERQRFCTILRKKLYSETVYSALLDHITATGEGLTVYLHGVSEPLYFDLSGREKPSVQRTDG

SEQ ID NO: 15314 - protein, 572 aa, synthetic construct
MTIPVASLYRVSTAKQLKNNEEDSIPLQANVIREFVAQHPEWELVKEYAEEGVSAFKYSKDDRDILQNVLADALMGKFKILLVFKADRLSRKSLEYPIVLWQLHRAGVEVIAVADVPGGKKLELKDQYDKLLRFIEGWQSETESVNTRIRVSHVMRQKAKQGCWTGGRPPYGFRLSESKKGLPLEVDREEAAVIKEMCRLYLEEGLGSKRIAAALNEHGYRTREGRLWTDTRVRQVLQNPIICGLPAYDRTKPGNTPTSRVRIKGYTDLNNFIIPRDQNGNPKPVPEYSIIPLETWQRLIRKMQENCMSKTQKGGTPNPRAMSSSALLTGFLVCGYCGRGFISSGHNWRKRNGKVYPCKKRVYRCVTHARVGGGEKLCEGQGSYSQKKIDRIFLQELENFLSGLNCEDLLQYVEQKQVDYLAEATNRVKALEKELSKNRKIYNAWVRRLDDYFADPDGSLYSEQLLAEKVNEYGRIVESLEKELEEVKSQARVEKHRRSQLMEFSMRAPHWFKLFMEAPVETKKQMLAQIISKVVLYRDKIEIHYNVDLAEFLGREEKLEQERFELKVLATF

SEQ ID NO: 15315 - protein, 549 aa, synthetic construct
MRAAALYRVSTLKQVKNNQEETIPLQQHAVYAFVAQKGWELAVEYFESGVSAYKKSFKNRDVIQDIIKDAAAGKFDVLLVFKADRLSRNSFEYPLVLWELSKLGITVISVADEKVLNIEDQAEKLIRFIEGWQAETESRNTSIRVSRAMMDMARKGKWSGGRPPYGFRYSQKKNVSIEIDPEEARVIQIMFEMAEDGAGGNKIAKWLNQQGYRTKNGRLWTGYTVRRVMQNPIVAGLPAYNRSTRRDKSSCSYDLNNPEIIIPRDENGNPLPIPGLQIIPLETWLKVTQNMRQIAEHSKISGRAIESTSLLTGFLKCGSCGRGFLSSTRRLPNGKIRRAYVCSTKNRRGSQFCNGQTQYEQHIIDKIFMDELEQFLQKIDLGDLAEYLRGKQAASLSIAQKRERELNREISKAKRILDSWVERLNMYFADPHSSLYSEERIATEISKWEKNIRELEESLSAVRNELQTEVCEQDKIKAFMRVAPRWLELFKSSPVPIKKKMLAQIVDRVVLSGKRIEIHYNVNLLEVERTVGASEQQQGEIKLKVIRSI

SEQ ID NO: 15316 - protein, 438 aa, synthetic construct
MKKIIGYVRESTQWQVANGYNLGEQKRKIEEFCKYKYEMGSYELEIKEERGVSARNLKRPQIQSIIELIKAKSIDILVIHNLDRLTRSVKDLAYLIELLEEYSIELVSITESIDTTTPSGRTFILMIGVISQWEEDSISWRTKRGMAEALERGYYCKPRGPFGYARDPHDKRYLIIDDEKAEYIRYIFETVAKSIKTANEIYLDFKKEKVLGKKWGQDDVYRILKNKAYTGDVELFGKVYEGVIPAIVTKELQKEALERVKLRSRKKKYRYPFRGILLCSECGSTLKCDSTHKKIRGKVYKVYQYYFCEYCKNRISQNCIQEQVENKLSRLLDKEHTKEIRKSFLKHLKQVEKDINAVIDLILSQGRSEILIKKYEALVNEREELFKKAEKQDEGNIPLIDMDNLKDLIYKYISHIKVDLIRKSIDVEYKKKFLNKTK

SEQ ID NO: 15317 - protein, 538 aa, synthetic construct
MAVALYARVSTVKQADKDLSIPDQLRQMQEWCKGHGYLIGETYIEAGASATDDRRPVFQEMIAEATKTPAPFEAIIVHSLSRFFRDSLEFALYERKLKRAGVKLVSITQQTSDDPSGEMARKIFSIFDEYQSKENGKHTLRAMKENARQGFWNGSRPPFGYKTVEAEKLGNKGKRKQQLAIDPAESAQVRQIFDLYLNGKGHGPMGAKQIASYLNETGRKHRNASWTRSRVHEVLSNATYVGDYYFNRMENKSRQLKPESEWILLKVDPIIDVQTFQEVKSRKASRAFDQVPSRTLTSETLLTGMIKCGCCGAGMTTATGKGGQYRYYKCNTRIAKHIQQCSNPAVPMDKMDSAVIDALADKLFTPDRVKQILARLQTQIKATQAKDEHGVKALQVELSELQQASERLFEAVEKGILPLDELLQQRSRRLQTRRQEVLTEIASHKRRADMPAIRPRQVELFCKALKEKLHDRNSGFAKAYLRQIIGEIRVTGNEAVVTGNSLALAMAVADTKKGTSVEVPKSVFGWLPDLGSNQGPTD

SEQ ID NO: 15318 - protein, 538 aa, synthetic construct
MAVALYARVSTVKQADKDLSIPDQLRQMQEWCKGHGYLIGETYIEAGASATDDRRPVFQEMIAEATKTPAPFEAIIVHSLSRFFRDSLEFALYERKLKRAGVKLVSITQQTSDDPSGEMARKIFSIFDEYQSKENGKHTLRAMKENARQGFWNGSRPPFGYKTIEAEKLGNKGKRKQQLAIDPAESAVVRQIFDLYLNGKGHGPMGTKQIASYLNEAGRKHRNASWTRSRVHEVLSNATYVGDYYFNRMENKSRRLKPESEWILLKVDPIIDVQTFQEVKGRKASRAFDQVPSRTLTSETLLTGMIKCGCCGAGMTTATGKGGQYRYYKCNTRIAKHIQQCSNPAVPMDKMDTAVLDALADKLFTPDRVKQILARLQTQIKATQAKDEQGVKALQVELSELQQASERLFEAVEKGILPLDELLQQRSRRLQTRRQEVLTEIASHKRRADMPAIRPRQVELFCKALKEKLHDRDSGFAKAYLRQIIGEIRVTGNEAVVTGNSLALAMAVADTKKGTSVEVPKSVFGWLPDLGSNQGPTD

SEQ ID NO: 15319 - protein, 518 aa, synthetic construct
MKTAYGYGRFSTDRQREESIEAQEIAIRNFCKQNNISLIAFYADRGLSGTNDNREQFQNMLDDADKGGVDYVIVHKLDRFARNRYDSVIVRKRLADHGVKLLSVLERVNDDSPEDIILLSVLEGMSEYYSKNLSREVKKGMYRNVEKGIYNGGFLPYGYKVNVNNETHFVEIDENEAAIVREIYSLYLENNGYVTIANKLNERGLKTKRGNIWTADTIGKLLKNEKYKGTYFHGKTKVIKNGRRQKVIKNKDWKQEETYPVIIDAEIWEAAKRRRTMNKPKGGKKHEYLLVGYAKCKKCGANYIGSSSAPYNDHVYRFYTCSRHNRKKCDAKIINADMLETIVIDFIKEKFFESESLDQYINDCIKLLNTDINNDDKIEAINKEIKSCTKKLDRLVELYIDDNISQEKYCDKKNELDCRVKSLEHELNLITIDRPVISKKEVKKIVNNFIKNMDDSFKYKKMLIDTFLDSVTIDDETFEITLIYNLFSKTEKIICNIDNASPYSSKKAFTASPPLQIN

SEQ ID NO: 15320 - protein, 506 aa, synthetic construct
MKRCYGYVRVSTVKQGEGVSLDAQKEAISDFARRNGFDIIEWFKETETAAKRGRPRFNAMLAALRRGKADAVIFHKIDRSARNFTDWGKVGDLIDAGIDVRFAHEDMDMRSRGGRLTADIQAVIAADYIRNLKDEIRKGINGRLKQGLYPWPAPIGYLNNGGGKPKTLDPKTAQLIREAFELYATGEHSFNSLLLEMRKRGLSGRQNVKLSMRGLETIINNPFYCGIIRIRSTGETFDGVHEPIIPVSLFEHVQQLKSDKCGKKVTRHNHIFQGLFRCGLCTGPMVPELQKGHVYYRCKRRECVTTSVREEIIEEQIRKLFEQIRLEENAIHRTMEQVDAWVNQRASGFVDPKNSILLAEAESKMERLTDALIDRLIDQETYSKRKTKIQFEITKLKQERAKASDLRQKAVKIREVAELAKSLGNAYDLANRTQKRQLVKIGSSNRHVIEKDVYLAPSNWVKRIEDMVLTFGGEPHGGDGRTAETDKLSNDFTKILLDVESLNTNT

SEQ ID NO: 15321 - protein, 556 aa, synthetic construct
MAMMNEMEYRTIGKALAGGYRAAVYCRLSKDDDLQGESASIANQRDMLEKYCERQGWEVVAVYQDDGFTGLNMERPDLQRMLRAIERRQINLVITKDLSRLGRNYLQTGHLIEDFFPRNGVRYIAMNDGIDTLRDNNDIAPFKNILNEMYSKDISKKVHSSYLLKAQKGQFTGCLAPFGYRKDPEDKNHLLIDEETAPIVRLIFGYALNGHGPNYIRRRLEEEKIPCPTWWNRERGLRNTRTKWEKKDPENGRYMWDFSVIKDLLMNPVYTGAIASQKKDYRFKIGTIGEKKPEDWIVVEGQHEPLIDRMNFDIVQNKLKSRQRPGQTNEISLFAGLIKCGECGKSLTIRYTNAKHPQRIYSCKTYNAFGKNHCTQHRIDYDTLYSHVLRKIRECARAALMDGEAVADRLTNTCEAEKREQREAMERSLTRDEERIEVLDKLVMRLYEDMVAGRISEQNFNTMLEKTQTEQTELKARVSEGRKRLSDEVQLANDAKQWVEAIQEYANITELDAATLNRLIKEIVVHERIDDDKTRHISIEIHFNLKPIPEVEQVTA

SEQ ID NO: 15322 - protein, 578 aa, synthetic construct
MKPKDTPKQYVIYSRKSKFTGKGESIENQIELCRQYIAMHFGEDAAENVLVYEDEGFSGGNLERPQFKKMMKDSQKIAFAAIVVYRLDRISRNIGDFAKLIEDLGDRHIDFISIREQFDTSSPMGRAMMYIASVFSQLERETIAERIRDNMYKLSKTGRWLGGTTPTGYASESLSSVTVDGKVKKACKLKPIPEEIQLVKTIFSVFMETGSLSKTDQYLLEHRCVTKRGKQFTRFAIRGILTNPVYMIADGTAYQYLKENNVDLFAERAEFDDEHGVMAYNRTLQRPGKANQIRPMEEWIVAVGKHPGIIAGSDWGRVQAMLDVNKSKSYRRPRSNAALLSGLLRCDECGDYMRPKLTNRKNADGELIYTYMCSTKERSHGTVCSMKNCNGNTLDAKIIKEIRKLSADRETLTRLLAQTKKVISGSKEGYDAELALLREKHTETEERIKRLVESLSVASDTSAKYVMEQIDELHRESETQQARLSELEALTEQSRMLHQEFAFHQEMIEFFASAVDSATLEEKRRLLRTIVKKVVWDGKNAYVYLFAEDGEADLPPVGQLMCPSGEDSEINTYRSDYR

SEQ ID NO: 15323 - protein, 542 aa, synthetic construct
MKRAAKHAPAADPARKQAVIYARVSSKEQEKEGFSIPAQLKLLKEYAAANGFAVAQEYIDVETAKQTGRAAFGEMVAYLKAHPSIRVMLVEKTDRLYRNLKDWVTVDELDVEIHFPKEGVVLSRESRSSEKFMHGIKVLMAKNYIDNLSEEARKGMQEKAEQGIWPTKTPLGYRNITGPDGKKIIAVDPTLSPIVSQMFDWYARGDISLKEAARKAHAAGLTYPKSGAKVPVSTVHTILRNRLYTGWFEWHGKLIHGKHEALVPVELWERVQGVLDGRFASKAKRGKHDFAFSGLIACHACGCAVVGEIKKQRYVYYHCTGYADKCQGNPASCRRKHVREEALEAQFTELLGRLRFDDEVLEWVRDALHASHADERREHEEAVKRHQAEHKRLNDRIHAMYVDKLDGLVDTAFFEKMSNQWREEQNRCQREIERHQNADKSYLSEGVALLDLARNAQRLFEKQQPREKRRLLNFVLSNCTWEDGEVVATFREPFDMLAETTTAAARIEAGEGAISAKTEIWLPGLESYYASIYLEKRQKSDS

SEQ ID NO: 15324 - protein, 564 aa, synthetic construct
MPRAQKAAIYCRVSTLHQVDKDSLPMQRQDMINYAKYVLSIKDYEVFEDAGYSGKNTDRPAFQEMMERIEHGEFSHVLVWKIDRISRNLLDFATMYARCKKLGVTFVSKNEQFDTSTAMGEAMLKIILVFAELERNMTSERVSSTMNARAAEGKWNGGRVPFAYAYDRETDSFSIRDDEAKVALELKDTYLRTHSLTYTARLLNEAGRRTRRGYAWTPATVAIILRSPFYRGTYRYNYRDESEVTFSFKGRNEWIMCAKHHPPLFSEADCRQIDFWLTKNRRQHGKATHVQRKLVHVFAGLIRCGFCGSNYIASIDRVRASGYQPSMYNCGGRRQKGMCKNRYVTDIRIGGFVFNYISNVIRLRDAFRPQWSKARIQRFLLHGDDFCGASLSDDTLRRVRAALLGSRLSTAEYQPADEQHDDSPTQTHKANLQAELEKNRRALSRLMHLFLYAEDEMPQADFLREKKHLQDTITRLQAELEKAQQSSVFTSSLTDEEFLGKAARLLFQSAMVRGSIDFPELAMRVGNLELKNFVNAVIKQIIVLDGRVTQITFANDEIHTFLYH

SEQ ID NO: 15325 - protein, 536 aa, synthetic construct
MPKKVVMEIPANPMLGDLRKRKRKLRVAAYCRVSTEEEEQQNSFEVQVDYYTEKITHHDGWQLAGIFADDGISGVRTKKRDQFNEMIELCRKKKIDLILTKSISRFARNTLDCIKHVRILKSWGIPVIFEKENIDTSNMNSEMILTCLSSFAQAESESISGNVTKGIRMGYKQGRFAFRYTGFAFQKGLDGEPEIIPKDAQTILMIAREFLNGDSLKGIKEKLEKAGIPSPAGEPKWTTQTIQRILQNEKYAGDVLLQKTYTADFLEGRVKKNNGELPQYYIKDNHPAIIPREMFFEIQEELARRRSKKPANTKKAKTNRGRFTSKYALSERLVCGDCGCYFRRVTWNIHGRKQIVWRCINRLEFGPKSCGKSPSLEETALHTAILEAIRSLVHGQQEEMAAALQDTLIQCIAGEKEETSPIVIENKIKELETEFDRLLVLAADENDIIDYKLKQISGTILKLKQQKKRIEYTAERSEVMESKAKEVMGLISAEDLDLTEYSDALVYRIIERITVLSKEEIRIRFIGGFEITQPLR

SEQ ID NO: 15326 - protein, 513 aa, synthetic construct
MPQVKVIQPIAEQAKKLRVAAYARVSSDSADQMNSFATQVDYYTGYIRSKEEWEFAGLYADEAVSGTTADKRSDFQRLLTDCRAGKIDRILVKSISRFARNTIDCIQTVRELGQLGISVEFEKEDIDTGKMGSEMLLSILGSAAQEESLSISKNLKWSYRRRMKSGDFITCSAPIGYILKNKTLIPNPQEVPIVEYIFNSYLAGKGIVEIASELTEMEIRNKDGDAKCWRSVTILNILKNEKYIGDALVQKRFTTEELPFQRKQNHGELPQYYIKNSHQGIIPIEVFEAVQKLLKQRSFTHAPKNEIQQFPLSKVVKCGLCGSTFYRKPKNQSIKWICYQHLKGKELCPTKAISQDEIYQAFLRVYNKLLDNRDFVLKTMLNQLLELQAKTAFARPDIIAANEKISELVKQNHSLTRLQTKGCIDSAIFIERSNRNNQKIEELRRELRQLQGPDQTSSLIDSTKLLLDLLEEAQPMLEFEPSVFKSMIKQITAYPDKFCFHLINGLVLDEGRC

SEQ ID NO: 15327 - protein, 540 aa, synthetic construct
MKQPYNTTVYNTALYLRLSRDDELQGESGSIQTQRMMLRQYAAEHGLTVVDEYIDDGWSGTNFDRPSFQRMIDDIEDGKINCVVTKDLSRLGRNYILTGQYTEIYFPSKGVRYIAINDNVDTLNGESELAPFLNILNEMHARQTSKKVKAAMRTRFANGAHYGAYAPLGYIKDPDKTGHLLVDTETRWIIEKIFDLAVHGRGAASITRILVEAKVPTPGWLNFQRYGTFANIYAGAPEEKAYAWTIAQVKSILKEETYIGHSVHNKQSNISFKNKKKVRKPKEEWYRVENTHEAIISEDVFRQVQEQIASRRRRQKDGTTQIFSGLVKCADCGWSLAYGENKQNKTPYGYYHCSKNGQGLRQCSMHYIRYDVLYAYVLSRLQYWSQQAQQDEDKLLKRLLNASDKERSSAREKQASELKKAEKRKAEVDGLFAKMYEDWAAGRITEYNFNMLSEKYQGEQKELDEKIQQLHEAMEAVAQTAVDAEKWVGLMRQYVNPTELTAELLNTLIEKIFVHEAVKGEDGSREQEVEIFYRFIGKID

SEQ ID NO: 15328 - protein, 595 aa, synthetic construct
MNTKVKLIKASNTGARNRNALHLDLKRVAAYCRVSTDSKDQLESYKSQVDYYTNLIKNNKNWTLAGIYADEATTGTTATKRADFMRLISDCQNGDIDMIITKSISRFARNTLDTLKYVRLLKENNVGVVFEEENIDTLTMDGELLLTILSSVAQQEVENTSAHVKKGLKMKMEKGELIGFQGCLGYDYDPTTKSISLNEEEAKIVRYIFKRYLEGNGGSVIGRELEEQGYLTPRGKTKWSDTTVLGIIKNEKYIGDILMGKTFTVDPITKRRLANFGESDKYHIENHHEPIIPREDFEKAQEIRLRRAQNRNTIANKDRKREKLSRQYAFSSMLECGFCGEILSRRTWHTSSIYKKINWQCVKSTKKGKKYCPHSKGIQEAAIEKAFVESYRQLCHVDSTVIDDFLKIVEEEINDETLVKDLKKLENQLNRIISQERKLVDLHLEDSIDEEVYSKKYKKLTKQKEELLDEKKTLELTIKDENSIKERLKQFKKVLENREIIEEFNRTVFESIVDKVVVGRIDKDGTVHPYDLTFYFKTGVKDSQDSNNFKDNRKNAKDNDINKLCSYKNNEDKKLCSQAKDNACGDFSIDVKEIS

SEQ ID NO: 15329 - protein, 547 aa, synthetic construct
MSKEKIKVYLYTRVSTSIQIEGYSLEAQKSRMKAFAIYNDYEIVGEYEDAGKSGKSIEGRIQFNRMMEDIKSGKDGVSFVLVFKLSRFARNAADVLSTLQIMQDYGVNLICVEDGIDSSKDAGKLMISVLSAVAEIERENIRIQTMEGRIQKAREGKWNGGFAPYGYKLEDGKLFINEEEAVAIRTIFDQYVNTTIGANGLSKYLENHGIRKIPRQNGKNPLFDAGLIRKILKNPVYNGKIAFGRRTLEKVHGTRNEYKQVEQDEYLISEGIHEAIVSDEVWQAAQVKLKSQAKKYEHVNKGKDTRTHLLSGIVKCPICGVGMFGNKSIKKKKDGTKYKDYYYYGCKHRQMIRGHKCTFRKQIREELLDDAVAEVIVKIVSNPKFASMMQEKINMKVDTSEIEKEIDNFQKELRKSHSTKFKIIEEIDNLDVDDKHYKRRKQDLDDRLYRMYDKIDELESSLIDAKAKKQTIEAEKLTGDNIYKVLIYFDKLYKVMNDVERRQLITALISEIQVYEEKQPNGQWLKSITFKLPIIEENLNIGLDNDE

SEQ ID NO: 15330 - protein, 520 aa, synthetic construct
MNSKVIVIPAKKKKGNSIKESEKKKLRVAAYARVSTDSDEQATSYDTQVDHYTNYIKKNPDWEFAGVFSDEGVSGTYTKKRDGFNKMIEEAMEGNIDYIITKSISRFARNTLDCLKYIRKLKENNIPVYFEKENINTMDAKGEVLLTIMASLAQQESQSLSQNVKLGFQYRFQQGQVQVNHNRFLGYTKDEDGKLVIVPEEAKIVKRIYREYLEGASLRDIKLGLEKDKIINGAGNKKWHVSNLNQILTNEKYMGDALLQKTYTVDFLNKKRVKNDGIAPQYYVENSHEAIIPKEIFMRVGEEMYRRANMVSSKGKRRIYSSKYALSSIVYCSKCGDIYRRIAWNNRGKKYTVWRCCTRVTHGPEACEARTIKETDLQEAVVEAINQLISESSELKEIIKENIKNAITGDGSGQIEEIDKEMLEVQEELLKFANAKKDYTDLADRVEELRNEKEKILLDLAEEKNEQSRLMELEEFLDNQELEVESYDEELVRKLLEKIVVYEEKLKVIFKSGIEIDINK

SEQ ID NO: 15331 - protein, 520 aa, synthetic construct
MKKITKIEANQKEESILRVAAYARVSTDEDAQLVSLKTQKAHYEKMIAENKSYTFAGLYFDEGITGTKKECRDGLLKMLKDCENGKIDFILTKSISRLARNTTDCLEIVRRLLDLNIGIYFEKENIDTRTMESELMLSILSSLAESESRSISENNKWSIKKRFQNGTFIISSPPYGYENIDGKMVVNEEEGKIIKEIFEQYLSGKGTHKIAEDLNKRKIKGQRGANWCGSTLNGILKNEKYTGDVIYQKTYTDDSYKRHKNKGEEDQYKIIDNHEAIVSREDFEKVQNLIRLRAIAKGNGENTKRYQNRYSLSGKIKCGECGSSFKRRHHYNGKDKYIAWTCSEHLKHINKCSMKFIKDKDIKLAFVTLVNKLVFGKDSILTPLLKSLKSVDSKGEVAKINKIEEGLEKLKERKDVLSKLISSGVLDASIYTKESSEISSEERNLLKEKERSKKAILGNDEEIRKLEKLIGILDKSKMIDHFEVDLFEEIIKHIQVVNRATLDFHLKCGLVLREEVKKDV

SEQ ID NO: 15332 - protein, 530 aa, synthetic construct
MIAAIYSRKSKFTGKGESIENQIQLCMDYAKNLGINEFLVYEDEGFSGKSMDRPKFKEMLKDAKDKKFDYLICYRLDRISRNVSDFSTLIEDLNKLNISFVSIKEQFDTSTPMGRAMMYISSVFAQLERETIAERVRDNMYELARTGRWLGGMPPYGFISTQINYYDENMNQRKMYKLKVDEDTIEIVKLIFDKYLELRSLSKLYKYMYENGIKGTRGGNLDPSALSLILKNPAYVKADKSVVDYLRKSNIDVMGDTDNIHGILTYAKNTDSPIAAVAKHKGVIDSDKWIEAQRLLNANKAKAPRAGTGSKALLSGLLKCSKCGSNMRITYKNSKSGTIYYYICGTKKSLGVSACDCRNIRSDKAESKVIDELKNKSIKSIMSSYKDSKLENSKNSKNIKTEINSINNQIKEKETYIDNLVMQLAKVTESSASTFIINKLESLNNDLSNLKSQLESLNTMSMENKQVDININMLIDNLNKFNKEIDTSDINKKRLLLSTVVDYMTWDSDTDTIKVNLIGINPSNTIASDK

SEQ ID NO: 15333 - protein, 502 aa, synthetic construct
MEIQIREGNSRQKQKLKVCAYCRVSTDADEQENSLENQIRHYKEVITSNPDYEYAGVYSDFAISGFKEKRPGLQKMLADARKGKIDLILTKSVSRFARNTAIVLEATRKLKELNVGVFFELQNINTLSGEGELMLTILAAFAQAESESGSVGAKMVYQRKYEAGIPVQYLERSFGFKKDERGVYIADEEEAVWVRKIYDMAAHGYTLAAIKRYLNENNVKTVGGAEWLDSTVLRILENEIYKGDYIMHKHFVNEERKLVRNRGEVDAWYIEDDHEAIVSPELWQKAQDALEAKRDYLAEGSVIEEFTEENYPYMNRIYCARCGHPLYRRIYSNGNRLNWGCSGTKRYGRSFCEGINIPDGVLRGAWHFDENMYIGEKQTDKGKKEFTYLKEASWKRRHKKKEPEPIPENTKTEYPYREKIFCGLCGSRLVRHVNTKNHKVIWVCNGRKRKGKDFCDGTRVPDTIIKGWGEIKKDIYIQRKDDKNGKKRYSYTSKKPKGADRT

SEQ ID NO: 15334 - protein, 464 aa, synthetic construct
MARSVTVIPARSQKVRTGHKTVQEKKIRVAAYCRVSTDQEDQLHSFEAQVEYYTKYINEHENYEMASIYADEGISGTNTKKREQFKKMIADCEGGKIDLVITKSISRFARNTQDCLAYSRKLKNLGIGIIFEKENINTLDSTGELLFTILSSLAQDESRNISENCKWGIRTKFKNGEMHLNTFKFLGYDKDENGKLVINKEQAKTVRRIYRDFLIGINPAQIAKELTEEKVPGCLGQTKWYPSTVIGILKQEKHMGDALLQKTYTADFLTKRQVRNNGEIAQVYVKDSHKGIIDKQTWNAVQEEFDRRERFMEAHGTDRYSYGADCMPFCEKVFCGECRSLFTRHSWRSRGIVQWQCKNHRKDGKVACTNAYVDNADLEKGFVKAFNRLVTDRDKHMERWQQMKSDGTPLEKIRAGQMMEAVGNEPLTRFVPEIAQLVLCEVTVLGAKKYEFFFLEGSRVKVSV

SEQ ID NO: 15335 - protein, 560 aa, synthetic construct
MISEDVSSITENDLCFYSRKSKFTGKGESIGNQIEMGKDYASRNFGAMLKDENVYEDEGYSGGTTDRPKFKLLMENIKKRKYKILIVYRLDRISRNIIDFADIIETLNKYNVAFISIRESFDTTTPMGRAMMYIASVFAQLERETAAERIRDNMIELAKTGRWLGGITPQGFISEPITRIDHNGKERHQFKLVPDPNELELIKLLFEKFTELNSLTKLESFCVQNNITTRNNIDFSRFALRSILTNPVYATADKEVYSYLVNNGFEIYADERDFDGMHGLMVYNKTSQEKGHSNKIRDNAEWIVAIGAHPGVISGKQWVKVQNLIQQNKSKSYRKVKNSESLLSGLLRCSNCGSYMRPRISRTNKDGVTVFYYMCELKEKSKKTRCDIKNVHGNTLDSLVIEEIKKLASSDSELSTRIGKEKLNIEISKNSISNEIELLENNIKENELSISNLVNTLSQAQNTGATKYIIAQIDEMDKQTASFRERLAELRERSQNANLMDEGFDVMKDILSTFSQIIDTLDIPEKRNMIRSLVEKITWDGQFIDLIMFGANAKKKETAL

SEQ ID NO: 15336 - protein, 543 aa, synthetic construct
MKHGRGSRGDARLRAYMYLRLSVDKEDGKAQSIEAQRTAIHDYARRNSIEIVEEFADTGLSGQSANRPAFNRMIEQATDTPSPVDIVLIYRIARLARNMRLFFNSLDGLADAGVEVISITENFGEGRRTKRLGQTISAMVAEQQAIDASIYTSKSRRENARQGFYNGGPVPFGYETYVARKDGDKERMKLRVVPSEASVLREIFDWADMGRGGRWIVQTLNARGTTLRGAKFSNGNLAGILGRITYTGVYYDKTVDDDGNVPDPEDWIAVSCPVIIEQAQFDRVNALRASRNPRRTAPHIAAGTTMLTGIAKCGMPGCACAMTIRSGKAGQYHYYVCANRVNKGQACAGPSMRREVLDGLVLDAVEKQLLAPERLETLLSDVLNLSDQKRIQREEELLHARAEQTRLRTAIERLLILVETGQMGPRDPIFAKRMDENRSALATATSRIDTLETQLTKGSRKITPTSIKRFGELLSARLRDDDSTLRKAYLRMLVSNVTVSKEQIVISGPKAVLENGVCNGAPRLEGMVPIFDREWCRLRDSNT

SEQ ID NO: 15337 - protein, 536 aa, synthetic construct
MLIALYARVSTVRQAENDLSIPDQLRQMQDWAKQNGHIVVAKYVEPGASATDDKRPIFQKMMSDALAKPPMFEAIIVHSHSRFFRDGIEAGVRERMLKRNGVKLFSITQPTTEDSNGELVRNIIRMFDGYQSQETSKHTSRAMKENARQGYFNGSRAPFGYVAVSTDVSGARGRKKKKLAIHADEANVARQIYRLYLSSLGMGFKEIAIHLTKSGLLMRGRPWNVQKVSTILSDTLYMGEYYFNVRDSRSNCNRPPEEWVKTLIPAIVDANQYEQVRKLRESRSPENATIPPKTLASPLLLAGVIKCRCGRAMTLATGKSGTYRYYKCTRKRNEGGHACDSRNLPMEKVDQIVIEQLANRILAPDRIQSMMETLRQRIQARKDVRHTRVSDLERQLKAQDERQHRLLEAIESGIVELDELTHQRMQNIKTAREALTIQIAEEKCSGELPREIEYLKPSQVEQFGRALRNQLLSKNSGIAKAYISLLVDEVLVNDDEAVIKGSYTALAHGLHQMKMGTSNQVPTFMHDWCAGRDSNS

SEQ ID NO: 15338 - protein, 413 aa, synthetic construct
MATITELTTPAIKPTLIRVAAYARVSTESDKQLHSYAAQVSHYQQLIATRAGWAFAGIYTDNGITGTSTVKRDGFQDMMAAARAGEIDLILTKSISRFARNTVDLLEHVRELKTLGVAVQFEREKIDTSTMDGEILLTLLASFAQAESESNSQAVKWAVRKKYQEGYAHSITALGYQTIGREIRIVPDEAELVRRLFHGYLSGISPEKVAQQFRDEGLTPTSRGMVVNPNRARTVLDNPIYIGTIIGQKYIMPTVGGTACLNQGEQPQYLIENHHEPIIDKETFDAVQAELKRRKEAGHLTLTPSIGSSALTHRIHCTVCGRKYHRRTKHRKTLSYKFWWCETATKGKGNPCNAKQIREVQLHRIVLDALGVPTWNDEEILSLLDHIEISPALELRLVLKTGDTMTRTLAGEK

SEQ ID NO: 15339 - protein, 436 aa, synthetic construct
MPKTVNKVSHKPRLAQQKKVAAYARVSTGKDAMLHSLSSQVSYYSKLIQGHEGWSYVGVYADEALSGTKDSRENFQKLLADCCAGKVNMILTKSISRFARNTVTLLETVRKLKALEVDIYFEEQNIHTLSAEGELMLTILASYAQAESLSASENQKWRVRKGFENGELINWRFLFGYRITKGEIEINTETAPIVCEIFKRVIVGDTFGTISRDLNERGIPGALGGKWCAQRIRETAGNEKYIGNAMLQKHYRNNHLEKKKCRNKGELPMFYAEETHPAIIDVDSFNAAQMVLQKMCDAAKTRPVPQQSEFTGRIYCPHCGKNFKRTTSNGSVGWNCSTYLSQGKAYCHGKKIPETTLQSVCADVLGTGKYDSTVFGTLIERIEVPEDNHLRFVFNDGRTEERSWADRSRRDSWTAEMKHTAAERTRQRRKNSCQEQ

SEQ ID NO: 15340 - protein, 527 aa, synthetic construct
MSRAVTMIPATKNKFTALPTASIAKRRVAGYARVSTDSDEQFTSYEAQIDYYTKFIKARDDWEFVTVYTDEGISATNTKHRDGFNQMVQDAMGGKIDLIVTKSVSRFARNTVDSLTTVRKLKEHGTEIYFEKENIYTFDSKGELLITIMSSLAQEESRSISENVTWGQRKRFADGKVSMPYKQFLGYEKGDDGTPVVNEEEAKTVRLIYQLFLEGKTPAGICSYLDMRGTPTPSGKQKWSQTTVYSILSNEKYKGDALLQKCFTVDFLMKKMKVNEGEVPQYYVEHSHDAIISPTDWDMVQAEIDRRKTLGRAYSGNSIFSSKLVCGDCGGFFGQKVWHSTDAYRKVIWRCNSKFKGEKKCGTPHLDTETIQQKFLLAYNQLMQKRDGVIADCTQMRRKVSDCTALDAEIEKLTEEIDIVAEMVKACVKENASSALAQEEYTKKYGSLVKRYEKTAFRLDTLSAERARKQDRDRELRLFIEAIKQQPLVLEEWNERLWVGLLEKATVFHEGRMVFQFKNSTEIEVEL

SEQ ID NO: 15341 - protein, 520 aa, synthetic construct
MPAHTPQSPETAPTKALIYCRVSSSKQATEFHGLDSQEARCRSHALHMGYEVEAVFPDDVSGAGDFMRRPGMVALLSYLDAQPDRKNYVVIFDDLKRFARDTEFHIKLRKAFRMRGAQIECLNFRLEDTPEGKFIETILAAQGELEREQNSRQVVQKMKARVMAGYWCFSPPKGYRYKKVAGHGKLLVRKEPLASIIKETLEAFACGRLESVAEVKRFLESQPAYPRDHRGEVHFERVAELLNRMLYAGYIEVPKWGMSFIPAKHEPLVSLATWQRVQERLKGPPKAPVRKDLNEDFPLRGFVCCASCNQPMTACWSKGRTKHYAYYLCDTRDCPDRRKSVRKEIIEGEFETLLASLKPSAHLFHAIYEMLRDQWNDRLARSEEMARAVAGELQRVEVKVRQLVDRVMGASTSALAEAYEARLRELHEHKAALSEKAASIGKPQATFAETYRTAFAFIANPCNLWHSPRLEDRRAVLRLVFAERLAYQRGSGYRTAQTALIFKMLGDKNMQMEEVVEPRG

SEQ ID NO: 15342 - protein, 510 aa, synthetic construct
MRVAAYARYSSDQQREASLEDQLRNCRAYCTRMGWPAPVVFQDAAISGSRSDRPEYQRLLAAAAAFDVVLVDDLSRLGRDSEEVQRAVKRLRFAGVRLVGISDGVDTDQKGHKVNVGLRGLMSEIYLDDLAEKTHRGLMGRALNGASAGGLPYGYRVGAKPGERVINPEQAAVVRRIFAEYLAGQPARAIAAGLNRDCVPSARAGGTWAASAIHGDRRRGIGILANPIYAGQQIWNRSHWVKHPETGRRLRKERPRTEWVIQEQPELAIVDRATWDAVQRRLDQQGACKGKRGGPGRPPKYLLSGLLRCGECGGPLAMIDAVAYGCSVAKQRGTCSSRLRLPRRDAEAALVAGVQEQLLSAEAFAAFRRAYAAAMKRQQPDTRGPQQRLAAAERVRENLLAALRAGIITPSTKAELERAEADVAAAQAELERARVAAPARLLPHLEQRWKGIVAVLAQRVRDVPAARDALRELIGQATVRNENGAILAEIAPCPINVVAGAGFEPATFGL

SEQ ID NO: 15343 - protein, 631 aa, synthetic construct
MTELDSIPIHPDQLELDGIYSGNGQEPQYPDGIPKGKRAVAYLRVSTPKQMRQDFGPEGISVPAQRQECYRAAEKHGLTIVDEYIEPGRSAREITKRVEFQKMLERIREVKDVDAVIVYKLSRFSRNRLDDAVVAAELKQRHVKLISATESIDETPVGQLMHGLLAAFNEYRSAEDGADISYKMGQKAQSGGALGRAPIGYINTLQRVDGREVRDVTVDEERAPLIRLAFELYGDPDATLRDVLDEITHRGLTTRPTPTRPAGPINVSTLQRILQNPFYRGYVKYREELYPGRHEPLIDQQRWDKTQELMRARGYSRERRRVIQHYLKGSVHCGECWHREKRVQRLVIQRARNRHGDEYLYFFCPETKREPFRCSAKYSNVLRVEAAVAEHYRTVQVDQGFANSMREVLEKALLEDEVSQRERHSQLEKRLVQLEEQESRLIDMLADGDMPKLKVKAKLHEIERDKGRLQEELSNVVDTLTNVAEFVDVSLDLLQDAHTLYVQADDEIRRRLNQAVFTRIFINRDEVTGHELDEPFGDLLTMQTIYRSGKAGERLERTREKAIDTWGKHHPGTSPGTKKGAARMGDAFCGRLIQLNENGPDWAIFWHKPHRVETAGIEPASDLDFRGLLRV

SEQ ID NO: 15344 - protein, 521 aa, synthetic construct
MRQSRYTKPNTDTPRQALIYCRVSSRAQEADGHGLQSQETRCREFAASQGHEVAAVFPDTITGGGDFMKRPGMVALLSFLDAQPDTQFVVIFDDLKRFARDTRFHLDLREAFRVRGATIECLNFKFDETPEGEFIETIMAAQGALERKQNGRQVAQKMKARMQLGYWVHNAPVGFRYKTVKGHGKLLHPDEPHASTVREAIEGFAIRRFQTQAEVKRFLESKSDYPHIKDGKVRDKRVTDLLTNPLYAGYVCSEVYELNWLKGQHEPLVSMATFEKVQARLNDTGYAPARADIGEDFALRGFATCGDCGAKLRSSWSKGKTKYYPYYLCHTKDCESYGKSISRAKIEGSFEEVVKSLQPSPTYMVLVKKMFKRAWEGRIEHTKDVARSTKRQITETNTQIEALLTRIMRSNDDSIIGAYEKRIAKLERSKVLMVENLTKTPKKSNSYEAFLELALTVLSNPWKIWESGDANLRRIVLRLGFSGGFSYHRIDGPRTPEIALPFKALDMISGGIKVNGAAREN

SEQ ID NO: 15345 - protein, 519 aa, synthetic construct
MKKVTKIAETASSKVKLKKIRVAAYCRVSTDSDAQLESLDAQKTHYGNYITSRDDWEFAGLYYDEGITGTKKDKRPELLRLIDDCKAGKVDFVITKSISRFSRNTTDCLELVRKLLALHIPIYFEKENINTGSMESELFLAILSSMAEGESVSISENSKWSIQKRFESGTYKVSYPPYGYDWDGEQMVINPEQAAVVKEIFAALLSGKGTHAIADDLNRRGIPTKRNGRWTATTIRGMLSNEKYVGDCLFQKTYSDSRFVRHNNHGEQTQYMVKDHHEAIISREDFEAAHAFIHQRATEKGVVKGSDKYQNRYTFSGKIICGECGDTFKRRIHSCTGYKYTAWCCSTHIKDKDKCHMLFVKDDDLKQAFVTMMNKLVYAHRIILKPYVDALKNTSSDDSLRRIQEIQTLLAQNTEKRETLTKLMTQGIIDPILFNKETNELLSQADSCRDEINALKNAVSGDVTKVTAATTLLHFTEKGGILQEFDDALFKEYVNRIIVRSRNEVCFELKCGLTLRERM

SEQ ID NO: 15346 - protein, 522 aa, synthetic construct
MGNVMVIPAKRQVGNTVKQSEQKKLRVAAYCRVSTDSEEQETSYEAQVTHYTEYIQKNPDWELAGIFADDGISGTNTKKRDEFNRMIEECMAGNIDMIITKSISRFARNTLDCLQYIRQLKDKNIPVYFEKESINTLDAKGEVLLTIMASLAQQESQSMSENIKLGLQYRYQQGKVQVNHNRFLGYTKDENGNLVIDPEQAEIVKRIYREYLEGSSMDKIAAGLMADGILTGAGKEKWHTSTINKILRNEKYMGDALLQKTYTTDFLTKKRIKNNGTVPQYYVEGDHEAIIPKDLFMQVQAELVRRRVVHVSPTGKKRSFSCNHCFAQMVFCGDCGELYRRVHWNNHGCKSIVWRCISRLEPTSAEKNCTNRTVNELLLQEITVKAFNQLLTERDVFLKTLQQNIAKAVVNADTLSPDGIQSRLLELQKELIKKANNKQDYDAIADEIFRLRDQKEQSELDSHHREEAMNRIKELQDFISEQETDITEFDEALVKKLIEKITVFNDHFTVEFKSGIAIEIEA

SEQ ID NO: 15347 - protein, 523 aa, synthetic construct
MEPVKNITVIPARRRVGNTAKESEIPKLRVAAYCRVSTDSDEQATSYEAQVEHYTDYIRKNPEWEFAGIFADDGISGTNTKKREEFNRMIDEARAGKIDMIVTKSISRFARNTLDCLKYIRQLKEKNIPVYFEKENINTMDAKGEVLLTIMASLAQQESQSLSQNVKLGFQYRYQQGQITVNHNRFLGYTKDEKGQLIIEPDEAEVVKRIYREYLEGASLQQIGRGLEADGILTGAGKKKWRPETLQKILKNEKYIGDALLQKTYTVDFLEKKRVPNNGLVPQYYVENSHEAIIPRDLYMQVQEEMVRRANLHSGQNRKKRVYSSKYALSCIVYCSKCGDIYRRVVWNNHGKQSVVWRCCTRVEHGPGACNADAIHESELQNLVVRAINMALGKKDTMNETLQRNVEAVLTGTDGVPIAEIDARLEELQKELLKVANAKGNYDSIVDEIYSLREAKQNAQVDNAEREGMKQRISEMQQFLTEQTQNITEYDEQLVRRLIEKITVYGGKVTVEFKSGTSVDVRR

SEQ ID NO: 15348 - protein, 520 aa, synthetic construct
MKRITKIGANESSVQKKKLKVAAYCRVSTASDEQLISLEAQKAHYENHIRANDEWEYVGLYYDEGITGTKKDVRAGLLSMIADCEDGKIEFIITKSISRFARNTTDCLEMVRKLTDLGISIFFEKENINTGSMESELMLSILSSLAESESVSISENSKWSVQKRFQNGTFIIAYPPYGYDNDNGTMVIVPEQAEIVKEIFAACLAGKGTHAIAKDLNARGIKTKKNGKWGAGAINAILTNEKYTGDVIFQKTYSDSNFNRHINYGERDRFLCENHHEPIISHEDFEKVRMVLDQRAMEKGNGTDTYRYQNRYCFSGKIKCGECGTTFKRRQHYKPSGNYVAWTCGKHLENKQECSMLYISDDSVKLAFLTMMNKLTYGHQVVLKPLLRTLRGMDDKDRLLRIQELDICIESNTDRKQILTNLMATGVLEPNVFNQENAALTMEEQKLRAEKEKLVNFVGGDKTRIKELQKLMTFTTKGVMLTAFEDETFLAYVESITVESRAKIVFHLKCGLNLTERLVS

SEQ ID NO: 15349 - protein, 685 aa, synthetic construct
MTQDKKREKAIIYCRVSSAKQRKAGDGIRSQETRCREFARMKGYKIVAVFGDDASGSTIERPGVKEALAYARNHRKDGIVFLIDDVSRLARGVEQHIQLRSAILAAGAVLESPSIEFGEDSDSILVENLLASVSQHQRQKNGEQTRNRMRARVVNGYWPFQAPTGFRHQRVTGRGMILTRDEPVASIVQRVLEGYAHGEFENQAEVMRFLQDEPLFPKSATGRVTNQRVAILLRNPVYAGYVEARKWGVSLREGQHKGLITFDVHRRILARLDGATYTPRRKNLNEDFPLRGHVACADCGTPLTACWSKGSHGRYPYYLCPKRGCDSYGKSIRRDRIEGELESLLKELQPSENLFRIACGMLREWWNHIGEQTQSQSRSLGKRLTEIDRQIEQFLERVVEAKTPSVIGAYEDRIAKLEEEKLVVRENMADAKRPKSSFDDTLRTALGFLANPWNQWVSGKLENRRTVLKLAFADRLRYARETGFRTANLSLPFRVLGALGDGENGMARPKGFEPLTPRFVVWCSIQLSYGRAGPRPGRPADGRCRHPQTKPLPNEDAGEKQAGAGENFALSAGGPARPPRCADAATAQRKPAGGGRGAGRNVAGRGRCPAPSSGHGAAHARPDRAIPAIKRSPCAKDGRPDRPARHVRRHPPVGMRIAGPVSGVVDRPGCATGSPGLPRRPAMAA

SEQ ID NO: 15350 - protein, 546 aa, synthetic construct
MTDCILYARYSTALQSQESVEDQLRLLRERATREGWRIIGEQADPAVSGTIRDRPGLIEAMTAIERGEADVLLSESLDRISRDQEDLAAIFKRVRFNGSRIVTLSEGEVGSMHIGLGGTMSALFLEQLAAKVRRGHVGRVKAGRVPGGLSYGYRKVFAFREDGEPERGLREIDEGQAPVIRRIFESYAKGKGAKAIAQELNREGIPSPRGGLWRANAISGNRKRGNGILHNRLYAGEIVYNRQAFRKDPDTRKRVSRPNEQGDHVVQEVPELRIIDADLWEKVQTRIAEAARASGGARRKKRLFSGKLRCACCGGPVVIISTDRWGCSAARQTGTCDNRATITDEALQRRVWAAIRRDLLHPDVVGAYLDEFRLAWADERRRLIAGRADIDRQLAEIDQAEDRIAEAIIAGIAPDRLKAKADELAARRADLTSAQNELPEIEPMVAHPAIIDDYRAQVEIMAQIANGDAATIAEARPLLDRLVDHIEARPRADGKQGLDLILHGELATILGFSNPENTNPADPKAGGDCMLALVAGVGFEPTTFRL

SEQ ID NO: 15351 - protein, 537 aa, synthetic construct
MRAAVYARVSSEEQAERGTIKNQIEFATKYCDLHQIEIVDFYKDDGITGIIPLEERPEGKRLLEDAKNKKFDLVLVYRLDRLGRSARIILNAVHEMEQNGVKVKSMTEPFDTGDANGRFLLTVLAGVADLERETILERMWHGTNRAARTGKWLGGIVPYGYRVNEDGFLEINEDLLPGLEMSEADVIRTIYYLIAEQGYSTIKVADYLNALGVPTAYVKDGRQVTRGKRKVNTSGIWTPGRIRNMIVNTTYKGIHYYGKRSKKNRELIPREVPAIVPEEIWEKAQQKLKENQLEATKNAKRKYLLRGLIKCGLCGLTYQGQSYKSSGGKSRAYYVCGGKTAYRGPLQGKCPSKNLPAEWIENLVWEECVKFIENPGETIKELANTMETKKTQRKELEQEKQMALKALKERELERQDILDLYRKKLITADDVEKQFQKIKEEMETLEKRVREIEEQIITEETLLSSFNTAEELLANLRAKLENNPPFEVRREIVRTLVKEIVVDTKFDEKNRPYAIIKVKYNFSDVPRTVKDSSRGSI

SEQ ID NO: 15352 - protein, 552 aa, synthetic construct
MDFIVNKEIAGRKTIEYCRKSTESEDKQIFSLEDQHFVNKKTAERYNLKVIKTFKESASAKKRGRPLFNEMIKMIEERKADVILTWALNRLARNAVDGALLIELMDQGLLFAIVTPGKIYFNSGDDKLLLQIEFGLAKKYSDDLSPTIKRGMHGKAQRGYWPGTLKLGYLNIHEPGEEPKTTHDPERFPLLRKAIDLFLTGNYSVNEILTILNDKWGFRTRKSKKLGGKKLSKSVFYQFLRDPFYYGEFKWGTETYKLHPNIPRLITEDEYWRIQELLERKGVKRPQKYHELPYRGVFKCGECGSIWIPYVRPKKLKNGKIKNYFYIRCNHDPLRHNCHQKQMSLKDLENQISKILEMITIPQEFSDWAIKWLKEEHKDESSNQQLILNNLNSELEKNQAKLNRALDLHLESLISKEEYLKKKEELEKERENIKKELATLNNRTFNWLELVEKTFNFAKNVKFHFDNGDANTKTAIIRTLGSNFFIKDGKVLIELAKPFLILKENHQALENEAKTIELNKKIGTITQNQNFQYQFPTLWRCPELNRSPRKPF

SEQ ID NO: 15353 - protein, 453 aa, synthetic construct
MITRDAPAVRTLRCAVYTRKSTDKGLEMDFNSLDAQREACEAYITSQKHEGWVCLRGQYDDGGFSGGNMDRPALQKLIADIEKGRVDAVIVYKIDRISRSLLDFAKLMELFEQHEVAFTSITQQFSTTTAMGRLTLNILLSFAEFERAIASERVRDKIAGAKRRGKYLGGTPAYGYDVDYANKRLVVNPKEAETIRWIFKQYLATTSLIGIAKELNAKSITTKSWKTKKGIQHQGSLWTSQHVYRALNNRMFLGLVEHDGEFYPGEHEAIIDQKLWDGVQKVLESGVGRQRRQQAHETNALLHKLIRCGYCGKAMTNSYTRRRGKVYRYYVCGTAAKLGYDSCPIRTVPAGDIENAVLDHLRTILRSPELIAQTFRAMQVQAADTLDPAVTSLAEHDVADLLNTLDPVWNELYPAEQYRIMRALVERVIVTEGGIDIMLRADGLYSVACELRE

SEQ ID NO: 15354 - protein, 491 aa, synthetic construct
MKAIIIARVSTEEQKDAGNSLPAQIARLESYCERKGFTIIKKFSFDESAYKNQREEFDKILDFIINQKEKIVVCFDKVDRLSRNVFDVRVATLYEKALKDEIELHFPSDGQVINSKISAVEKFQFGINLGLAKYFSDAISDNVKRAQEQMLRSGIWPGKAPYGYRNIDKEDGNKWIVVESMEAQVVEKMYEWYSTGSYSMIEIRDKIKEVFGLKFSKGKIDFILKNPFYCGMMTYNEKEYPHYYDRIITQEIFDKVQEIKAGHHKKHFKYAGLPFLYRGLIRCADCGCLITPERKIKKSGKTYHYYHCTQYNGKHGAEWLTEEELTKQFADAFNQLKMPQEVVEDIVETLKTNHRQKSDFYRGLLKRYQTEYQQYETGIERAYDDYLLGSITKDKYEEKRKEYRAKQREIKDKMNKLHFADEEYYLTSEYLLKLASNAGKLFESSEVYEKRLLLKITLQNLRLDGKKVQFDWINPFDKIASLASRQAWLLG

SEQ ID NO: 15355 - protein, 565 aa, synthetic construct
MAIKAKVYSYLRFSDPKQAAGSSADRQMEYARRWAAEHGMTLDSELSMQDAGLSAYHQRHVTRGALGLFLQAIDDARIPAGSVLVVEGLDRLSRAEPIQAQAQLAQIINAGITVVTASDGREYNREGLKAQPMDLVYSLLVMIRAHEESDTKSKRVRAAIHRQCQGWTAGTWHGLVRNGKDPHWLRLVGQAFEIVPERGEAVRTAVSMFREGHGAVRIMRTLADRGLQITNGGNPSQQLYRIVRNRALIGEKVLEVDGQEYRLAGYYPPLLSPAEFADLQHLTAQRSRRKGTGEIPGLITGMRIAFCGYCGAAMVSQNLMTRGRREDGRPQNGHRRLICVSNSQGGGCPVAGSCSVVPIEHALVTFCADQMNLSRLLDSGNRADGIAGQLTIARVQVSDTTARIDKITDALLASDAGQAPAAFLRRARELEFELAEQQRRVEALEHELAAVALSPEPAAAKAWAGLVEGVEALDHDARIKARQLVADTFDRIVVFHRGRKPEQSRSWKGTIDLLLMAKRGGARLLHIDRQTGDWKAGEEIDTVQIPLPPGVAEATPQSEASLGPV

SEQ ID NO: 15356 - protein, 565 aa, synthetic construct
MAIKAKVYSYLRFSDPKQAAGSSADRQMEYARRWAAEHGMTLDSELSMQDAGLSAYHQRHVTRGALGLFLQAIDDARIPAGSVLVVEGLDRLSRAEPIQAQAQLAQIINAGITVVTASDGREYNREGLKAQPMDLVYSLLVMIRAHEESDTKSKRVRAAIHRQCQGWMAGTWHGLVRNGKDPHWLRLVGQAFEIVPERGEAVRTAVSMFREGHGAVRIMRTLADRGLQITNGGNPSQQLYRIVRNRALIGEKVLEVDGQEYRLAGYYPPLLSPAEFADLQHLTAQRSRRKGTGEIPGLITGMRIAFCGYCGAAMVSQNLMTRGRREDGRPQNGHRRLICVSNSQGGGCPVAGSCSVVPIEHALVTFCADQMNLSRLLDSGNRADGIAGQLTIARVQVSDTTARIDKITDALLASDAGQAPAAFLRRARELEFELAEQQRRVEALEHELAAVALSPEPAAAKAWAGLVEGVEALDHDARIKARQLVADTFDRIVVFHRGRKPEQSRSWKGTIDLLLMAKRGGARLLHIDRQTGGWKAGEEIDTVQIPLPPGVAEATSQSEASLGPV

SEQ ID NO: 15357 - protein, 542 aa, synthetic construct
MRFSDPKQASGSSIDRQLEYAKRWAAEHDMALDSELSMQDAGLSAYHQRHVTRGALGVFLAAIDEGRIPSGSVLVVEGLDRLSRAEPILAQAQLAQVVNAGITVVTASDGREYNRERLKAQPMDLVYSLLVMIRAHEESDTKSKRVRAAIHRQCQGWVAGTWRGVIRNGKDPHWLRLVGTAFQVVPERAEAVLLAIRMFREGHGSVRIMRTLEECGLQLTDGGNPAQQLYRIIRNRALVGEKVLEVDGQEYRLAGYYPAIMEQQAFDDLQHHVGQRRRRKGAGEIVGIITGQRLTYCGYCGASLSAQNLMGRGKRDDGRPQDGHRRLICVGNSHGSGCSVAGSCSVVPIEHAIMSYCSDQMNLSRLLEGGDQSQALAGQLSAARARAADTAIKVERITDALLAEDGAEAPAAFRRRARELEQQLAAQQAEVEAIERQLAATASAPTPAVAQAWAELVAGVQTLDYDARMKARQLIGDTFDRIVVYHRGVAPSGPHSKKGTIDLLLVAKRGATRLLHIDRQSGEWRAGEDLDAADLPLPPLLA

SEQ ID NO: 15358 - protein, 565 aa, synthetic construct
MATKAKVYSYLRFSDPKQAAGSSADRQMEYARRWAAEHGMTLDSELSMQDAGLSAYHQRHVTRGALGLFLQAIDDARIPAGSVLVVEGLDRLSRAEPIQAQAQLAQIINAGITVVTASDGREYNREGLKAQPMDLVYSLLVMIRAHEESDTKSKRVRAAIHRQCQGWMAGTWHGLVRNGKDPHWLRLVGQAFEIVPERGEAVRTAVSMFREGHGAVRIMRTLADRGLQITNGGNPSQQLYRIVRNRALIGEKVLEVDGQEYRLAGYYPPLLSPAEFADLQHLTAQRSRRKGTGEIPGLITGMRIAFCGYCGAAMVSQNLMTRGRREDGRPQNGHRRLICVSNSQGGGCPVAGSCSVVPIEHALVTFCADQMNLSRLLDSGNRADGIAGQLTIARVQVSDTTARIDKITDALLASDAGQAPAAFLRRARELEFELAEQQRRVEALEHELAAVALSPEPAAAKAWAGLVEGVEALDHDARIKARQLVADTFDRIVVFHRGRKPEQSRSWKGTIDLLLMAKRGGARLLHIDRQTGGWKAGEEIDTVQIPLPPGVAEATSQSEASLGPV

SEQ ID NO: 15359 - protein, 530 aa, synthetic construct
MYSTEGKEVETMKRITKIEANEKLQNAPKKLRVAAYARVSTDSREQLVSLEAQKSHYETSIKSNPNWEYVGLYFDEGVSGTSMAKRDGLLKMLDDCEAGKIDFIIIKSISRFARNTTECLEAVRKLIKLKVFIYFEKENINTGDMESELLLTIFSSLAESESVSLSENEKWSIEKRFQNGTYIIASPPYGYKNEDGLMVINEDEVDVVRCIFAECLAGKGGHLIARALNDKGIPTRKKREWTSGTVLSILRNEKYKGDVLFQKTFTDGTFARHINNGEKNQYYIAEHHEAIITAEDFELAQTIIKRRSNEMKIQKGEGKYQNRYPFSGKIICGECGATWKRRTHTKSKVQYFAYACKTHIKRVDQCSMQFIRERNIEVAFLNMINKLVFSKKVLLQPLQTSLKDLNQGEVLARLDKLDVALEDNLNKRQKITELFAKEYLETAVFNEQNSGLLTEAKQISDEKETLYASLTHEHEHLEALNKLIKYINSVGTLREFDEAAFEEHVEYIIVFKRYEIGFVLKCGLTLRERM

SEQ ID NO: 15360 - protein, 510 aa, synthetic construct
MSDKKVDIEVVIKDVAIYLRKSRGETEKDLINHKNELVEICEINRWNKDIFEEIGSGDTIEMRPVIQDLLEDIKNDLYDAVLVIETDRLGRGKSSDMERIKDILVNSKTFLCERGKLLDLSKDQDEFVYDMRTFIARQEYLMIKRRLRRGKIQRAKRGFWTNGKPPIPYVYNKETQSLSIDQSHLITYRHIIDAVVIHRKNLNEIAHELNKLGMKTAAKKGHGLWSDKTVRDTLLDSTHLGKIVIGKTKGNGHKKRPKDADGVVMVDPKDWKEYQGLHKPVKTQEEHDFIVMHLARKTKMVKRSTAKTIYPLTKILKCGFCGHFLGFQQRQERQVEVRKCWYTDPYGVRCPNMAVSMAQINVAVQQAVEKQIRDVELKITSVDTTRIEYLNNKVIELNKGVKAKERDLVKEQEAYRAGVYDVDEYKVIVLELKATIAALNNEIVATQTEITFLEESSSPDKLNVLLEFKQLIANPDLTYEMQNELYKTILEYVEYKRTEAGGIELKILFK

SEQ ID NO: 15361 - protein, 543 aa, synthetic construct
MWTYKAYFFILQLHMKKCYIYCRKSSEDRNKQIQSNEDQERVLRELALNKNLKVEKIFIDVKSAGKPFQREGYTQMMNIIKKGKIKTVLVWKIDRLSRNSIDNGEISWMLQNSLIEAIITPDRVFRPEDNVLLFYVEGAMANQYLRDLSKNVKRGMKSKIEKGIYPAFAPVGYLNSGFHKGQKTIEVDPIMFPRLKALWNYLITEKCQLSELYKLMKSQYPIIGKQGQPVAFSTFHRIFQNPFYCGIFRWGGKLHVGIHKRMITKTQFDRIQEILKRKPKTRVVDHEFMYRGIFSCGCCGSAITAERKKKFIKTKGITRGFVYYKCPHHKKNIVCSELPISRKGIDQQLHKWIKKIHLPTEVIQYGIKVLGKESDELINLKEQIGSFDRQLLELDKKIQKVSDNFVMESDSEFRELMKDKVLELKMKRLELMEGKQSLIGTEKNFRIKIQSQLMVMKSSKEILKTGLWEDRKRLMNAIGENWTVKNKKLSCEPFILAQVILKYNRNREKFGLKNPCHHADDEDFCSIACVWRGIWELIRNSIE

SEQ ID NO: 15362 - protein, 540 aa, synthetic construct
MSNLNSFQSFAREDNSVKVSGNNAVIYTRVSHVSQEDNTSLESQEKYCDNFAEKKGLNVVAYFGGTHESAKTDDRKEFKRMLKFIKQSKNISHIVVYSYERFSRSGVGGAKIADDLLRDYGVVTLAVTQELDPTTSSGSFQQKILFLFGQMDNEMRRDKTITGMSELLLKGYTPHHPPKGFTNLKKGKSVNQQIVVNDQGKLIRKAFMWKAKKGLPNTVICRKLNALGLKLDRRRLQEIFSNPYYCGLIVHSLIPNKVVQGKHEELVSPSIFLKVNEIISENRKSNNHPTTHKEVDENLPLKKFMLCGDCNTPMTGYLVKAKGLYYYKCRTTGCKHNTSAKKIHEEFSNLVSLFELDHVNVPLVEEGVLTYFDAFFSDHAEDKELLEKNRKSLIQKIDQMEERHALGEIDSNIFNKFHKKYSTELAELEVEYKKYHLGSSNLKKGLKKALEICLNPKLWWESGSIDDKIKLQKMLFPEGISVSKQNRVVRTIRLNSIFVPILEFAKVLRENKNGQPVNLNKLSALVTPAGFKPATLRAEI

SEQ ID NO: 15363 - protein, 526 aa, synthetic construct
MKAAIYARYSTDKQREASIEDQFTICTRRAEREELEVAQRYSDDGVSGSTPVARRAGGARLLMDAFNGRFDVLIVEGLDRLSRDQVEQEQLVRRLEHRGIVIIGVADSYDSRMGGRKIMRGVRGLINEMFLDDLRHKTHRGQAGQVERGYAAGGKSYGYDIVRDHLGSKYQVNDVQAGWVRWIFARYAEGWSVQRIAHELNARKVPSPRASTWVVSAIYGSPNKGSGILNNCLYQGLYIWNRSQWVKDPDTGKRQRVDRPREEWREIEVPELRIVDDELWQTVRKRLDGRLPGRKQGAPVRTLFGGLMACPYCGGAIVAINSRLYGCANRKDRGPTVCKGIHFKRETADKNLLETLRDELLSPAAQEQLRRQVQAIIAERQRSSAADGAAAAVRRKELDGEIQRLVDAIASIGASQALADRLRAAEAERGQLAASKPRAGSDGPSAGEIGERIKKTMANLESALAADVQQARILVAELYGKIDVVAEGENIYAEYNNAAEKLLLASSGMSLKLVAGAGFEPTTFGL

SEQ ID NO: 15364 - protein, 518 aa, synthetic construct
MTQKIKKFFLYARKSTEWDERQVQSLEDQVDVMKKKAKDYGIQIVEVFQESMSAKAPWRYKFNEMIWRIHNWEAEWIIAWKLDRLSRNPIDSGSIQYMLQTWALSQVITNDREYNPEDSGLLMSVENGMSNQFIIDLKKNVIRGMNSKTEKWIFCWQVPEWYLNNRLEKTIEVDEINFPLIRKAWDLMLAWTYTVPIIVDILNSDYGYKSNKKWRDKITESWLHGIFKNLFYTGNFMWKWEIKPWTHKPMITMWEFNLVQETLGRKWIQIRPKTHDFAFTGIIKCWECNGTIVATEKTKKVITTGEFKTYTYYHCSKRKKWCVCSQKRITLESLESQIEEILWHIEIIPEFKELAIKILKSSYKDEIHTQENIKISLINSIQSSEKKLEKLLDLLIDSKIDDSAYNSKKEVITREIISYQENLKKYENGSLEIFEKTEDVFHFITLAKERFQNGSLGEKKDILSKLGRNFVLFDENLALDMHSWFIPLQKHLPKGWSLSTLTHLCYPRKLLPAEYIDL

SEQ ID NO: 15365 - protein, 504 aa, synthetic construct
MTQKIKKFFLYARKSTEWDERQVQSLEDQVDVMKKKAKDYGIQIVEVFQESMSAKAPWRYKFNEMIWRIHNWEAEWIIAWKLDRLSRNPIDSGSIQYMLQTWALSQVITNDREYNPEDSGLLMSVENGMSNQFIIDLKKNVIRGMNSKTEKWIFCWQVPEWYLNNRLEKTIEVDEINFPLIRKAWDLMLAWTYTVPIIVDILNSDYGYKSNKKWRDKITESWLHGIFKNLFYTGNFMWKWEIKPWTHKPMITMWEFNLVQETLGRKWIQIRPKTHDFAFTGIIKCWECNGTIVATEKTKKVITTGEFKTYTYYHCSKRKKWCVCSQKRITLESLESQIEEILWHIEIIPEFKELAIKILKSSYKDEIHTQENIKISLINSIQSSEKKLEKLLDLLIDSKIDDSAYNSKKEVITREIISYQENLKKYENGSLEIFEKTEDVFHFITLAKERFQNGSLGEKKDILSKLGRNFVLFDENLALDMHSWFIPLQKHLPGSNWHTQGLKP

SEQ ID NO: 15366 - protein, 505 aa, synthetic construct
MNIEGVKNVGIWLRVSTDMQADTDALKHHEIRARAYAESKGWKVVEVYNLSGVSGKTVMDHPETKRMIRDVQSGSISALIFSKLARLARNTRELLDIADIFQANEAGLVSLQESIDTTTAGGRLFFTMLAATTQFERDEIASRVAASVPVRASLGKPLGGQSSFGYMWEDKKLVINPQEAPIRKLIYELFDQHKRKKKVATILNDKGYRTRKGAKFSTTTVDRLLRDTTAKGLHRQNYTKSTGTNSKWIVKDQKEWVYNEVEAIVSEELWNSCNRYLDNQRAKLSAARGRTPKHLFSGLLECECGKKMYPYNSASTYRCKGCNNKIPMAVIEEVFESELTTFLTSQDDVKEFLSKSHQYVEEKTQQQNTLLSEKNTTENQMDKIYKLYLEDGVSVDGFRAKNQPLEDRLKQINQTLEELKTDIDFMKFEKISADKINENGKSIADAYSKLSKDEKRNLIESITNKIIIGKNTIDISFTYAPFLNLGKKYTQPQTFMLANNWKSQR

SEQ ID NO: 15367 - protein, 572 aa, synthetic construct
MKKVYGYTRVSTVKQGEGVSLAEQKDSIERYALKNNLVVSKWFEEKQTAAKKGRPVFTQMLKLLKRKKAGGVVIHKIDRSARNLRDWADLGDLIDLGIDVHFSFESIDFNTRGGRLSADIQAVIAADYIRNLREETKKGLYGRLKQGVYPYAAPIGYLNNGGGKAKTIDPKKGPLVKELFELYSTGLYSAIDLEKLMYKKGLRNSKNGYVKRQRISTILRNPFYTGVIKIFRTGETYQGIHQPLVSKQLFLKVQDVISGKRNYRTKTHDFVYRRCIQCGLCKRTLISERQKGHVYYRCRTEQCPTKTVREEIIDQAIIKFLNSVSFTRSQYTELYTMCRAGIGQQEQLHKEQERNCKLELTQTQKRIESLTDKFVDDLVDEQTYKDTHSKLLITKSGLEQRLNKLEHEKKSNNAKALYFLSHINSLGEVYKNASGERKRVMLKTISANLFYSAGKLSIDSYFACLGLSKTLDATFSAHSRTRRRKPVDNVWKPKKLLEYFSKNNTVEYGYTKNKKGEFKVFQINKEKIKVEPESYGQYLIFVIRQNWDQCHKVMEVIQEAKNTSFFDHDVAT

SEQ ID NO: 15368 - protein, 524 aa, synthetic construct
MKNEKKNETQVTKRRCAVYTRKSTTENLDSNFSSLDAQRESCESYIESQKHEGWTLVPDHYDDGGFSGGNMQRPAFQQLMADIADGKIDCVLVYKVDRLSRSIPDFVKIIQLFEQYDVSFVSVTQAFDTGTSLGRLILNILFSFAQFERELVSERTRDKIAAARKKGKWAGGYPILGYDINRETHTIEVNEHEATQVREIYDLYLQHKSMGKTAKELQERRWMTKSWITKNDDVVEGKIFDKPSLHRLLTNIAYTGKVKHHDEIYEGEHQAIISEDTWNRVKETLADNRSTGGRSARKKHGALLSDILVCGVCGAPMIHSFTKRKNKSYRYYICQTAHKNGRHACPTKNIAAEEIEQFVFERIKEVSRKPEVIEQTISKMREVNQKQQKMLEVESRRLQKEIDVMESEAKRLREKLPDAEDEKKNEMKKRVAEIGGVVAEKRKRLEEKIAELVMTKKSAFDEDDAKRVLEAFDPVWDVLYPQEQARVASMLIEKVEYDVPNGQVSISFHPMGIKDLSQELKAEL

SEQ ID NO: 15369 - protein, 537 aa, synthetic construct
MTRRAAGYSRYSTDLQNERSIEDQEALIRRYAGLNDLRVDRLYSDAALSGASIIGRDGLLQLLEDARAGRFDVVVVEELDRLSRDMEDLAGIHKRLSFAGVEIIAIHEGVASTVTVGLRGLVGQLYREDNARKVRRGLSGKIAQGLSAGGRAYGYRPDPTEKGQLVVIEDEAEVIRRIFRAFADGRSPTMIAHDLNAARVPAPRGSGAWTASTIYGWAERRSGILRNDLYSGRLIWNKTRMIKDPDTGKRVPRSNPESEWRRQDVPELRIVDESLWQQVQAMIAPRPRDHAERGAMRRPTRPLSGLLRCGCCGGGMSVKGKDKSGRTRIECARHAQSRSCPDPRTYYLDRIETMVLDALREEIASPETLDLYVKEYNRARRELATETHRRRAGLEKRVSQIDAELGRLVTFIARGIGDVDRLAQDYEARSAELSAARAELSAAPPALTDVALHPQALAGYRRMLDDLAPIMGAGSGAAENAANILRRIIKSVTISPGTGPGQIAIEIEGYLRELVEAPPLRVGGGVVARGGLEPPTP

SEQ ID NO: 15370 - protein, 533 aa, synthetic construct
MKKAVVYCRVSSPEQVKNGHGLSSQETRCREFAKYRSLQVVEVFQEEGVSGSLIKRPAMMRMLDFLNQHKQQQIVVIIDDISRLARGLKAHIELRMEIQAAGGILQSPSIEFGEDSDSQLVENLLASVSQHHRQKNAEQVKNRMRARMMGGYWIMKAPMGYKMEKRPDHGKMMVRDEPIATIIQNGLEGYAGDRFSSVVELQSYFEYQPEFPKDRKGKVHCQRVMDMLNRMLYTGYFEYPAWDIALMKGKHEPIISFETYRRIQDKLHGRAKAPARKDINQDFALRGFVLCDCCGAALRSCWSAGRNGKYPYYFCQTKGCEHYGKSIKRDKVENDFEHLLKGIAPTSEMMGLVNTIVLQAKDIKLGNYEEILDNMKKEKQLIERKVEQFLERIVNADSPILINTYERQVKQLEEQRIITEEKIRNCGTIDDNFEKINRTAVEFLENPYAHWVSADMSGKRLVLKATFSRPIAYHRNEGYRTAALSMPFSVLRGFSDTNSVLVDISGESSNSFLDILRNWSDALNPYKSTLLAA

SEQ ID NO: 15371 - protein, 527 aa, synthetic construct
MKATAVYCRVSTDNQEAEGTSLQTQMEACLKYCHDKGYDSVHRFCEAYSGLTLERPKLNELREMVRNEQFDIVLVYCLDRLSRDPTHGVILTQELEKHGVKLEAVIEDVDNTELGKLISYIRGFASKLEAEKIRERTMRGRRARMAKGKIPGNRAKLFGFYYVPGKGEGQGIRYVNEDEAQWIRKWKDWLLYEEVGLEEITRRMRSLTVSTCKGKGIWRESTIRGILTNPAIAGKTYAFVYAYESNKSAKNGRGKLVRKPKEEWVEIPGATPAIISEVEFGAIQEKLAQNGSNRRRPSIGFYWLQSHVVCGLCGRRYRTKSQLVKSKSNPHYVYYYECPCGNRMISPNMCLNRRWNRDNLQNIVWEQLRAFLLKPEAVLAGVEVVRDNASQESYYRQELREVERALRKLDEEQLSLLQQAKKGFPEELVEADNKRINGSRTSLMQRKADLEDKMAQAAQTVDNMASIEKFCELTSRNIDILTDEDRKLLAKALDLKVRIEPQKVSIDGIIPISDNMSCDYLTPRCSE

SEQ ID NO: 15372 - protein, 524 aa, synthetic construct
MSLAKSITVIPVAKKFSEISSNIWTAKRRVAAYARVSTDNEEQLSSFEAQRNYYSQFIKSKSEWEFVEVYADEGISATTTKKRDGFNRMVNDAIDGKIDLIITKSVSRFARNTVDTLTTVRKLKEQGVEVYFEKENIYTLDSKGELLITIMSSLAQEESRSISENVTWGQRKRFAEGKVNLPYGQFLGYEKGEDNLPKIVEEEAQVVRRIYRLFLEGKTPSGIAKKLTDEKIPSPGGKEKWHVSTVRSILTNEKYKGDAILQKAFTVDFLSKKKKKNEGEFPMYYIDNSHPSIVSHEVFEQVQYELNLRKKHNGYKTGISCFSGRIKCGQCGSYYGSKVWHSNSKYRRVIWQCNHKYKDEEKCSTPHIYEENLKKAFIEELNKMLLNKNKVISDLRLISQELFDSSKFIEKELLLQNEISIVESLIEQFVKENALVAYDQDDYNLKYNELLKRYKSTKAELNTTGQLRDDASTKKRSIEELIRRIEEQESIITSFDEELWVSLVDSVVIQPTGEFEFNFQGKVI

SEQ ID NO: 15373 - protein, 406 aa, synthetic construct
MTRIIRVIKASAPPKFYKKKVAAYARVSSDKDSMHQSLSTQISYFSDLIQKNPEWEFVRIYADEAKTGTKDTREEFQNMLSDCRDGKINLIITKSVSRFARNTLTMLEVVRELKALNIDVYFEKENIHSISGDGELMLTILASFAQAESLSVSENCKWRVRKSYAEGESINLRFMYGYDISGRSISINEFEAQIVRQIFNDYIGRIGATRIANGLRARDVKRPRGGAWTSAKVMKIIKNEKYVGDSLLQKRYVSNHLEKKLVNNNGALPQYYVRNSHPAIVSREIFDEANRILQNRTEGGSSKKTMENPLKGLLKCTECGKYYRRKHNNGRVYLVCGSLIDYGKDACSSKYVRESRFLELLNRTLGNGCLDKVMIRKQVQTVLVSPNGALTFNLVSGKSKYFEEGC

SEQ ID NO: 15374 - protein, 520 aa, synthetic construct
MVRKVTKISAESIAAKPKLRVAAYCRVSTDSDEQLVSLEAQKIHYESFIKANPEWELAGIYYDEGITGTKKEKRTELLRMLKDCEQRKIDFIVTKSISRFARNTTDCLELVRKLTDLGVFIYFEKENINTQSMDSELMLTILSSLAESESISISENSKWSIQKRFQNGTYKLSYPPYGYDYLDGEMVVNEELAAIVKRIFAEALSGKGTHKIADGLKNDGIPSRRKANWTATTVRGILCNERYTGDVILQKTYTDDHFNRHYNYGEKDQYLIKKHHEAIISHEEFEAVGKLLNQRGKEKGIEKGNSKYQNRYTLSGKIKCSECGSTFKRRIQGNGNKKYVAWCCSKHIYDISGCSMRSIRDDVIQQAFITMINKLIFGHKFILKPLLQSLKAVNYSDNLIEIQALESRMEENAERSQVLVGLMTKGYLEPALFNAQNNELRKEAALLKEQKEAVSRSVNGEMTVATEVEQLLRHVSKAEPIDSFEENLFDRYVERIVAYSHVEIGFKMKCGITLKERLVR

SEQ ID NO: 15375 - protein, 527 aa, synthetic construct
MAKVTVIPSTINPLTQMPLDSILSRKVAAYARVSTNSDEQYTSYEAQVNYYKKLIQERFDWEYTNVYADEGISGTNTKRRAGFNKMITDALNGKINLIITKSISRFARNTLDTISYVRKLKENGIEVFFEKENLWTLDPKSELILTIMASIAQEESRSISQNVTWGKRVGFQQGKVSFAYKTFLGYKKEDDKIVIDEDQAVIIRMIYKMFLVEGKTATGIANYLKSKHIKTPTGKATNWTKNTVNSILTNEKYKGDALLQKTYTENYLDHKIVKNNGQIPQYYVENNHPAIIDRDMWEQVQIELERRELIGAQYSSSDVFASKLICEDCGGFYGKKKWHSNSKYSRFVYQCNNKFHKHKEKCLTPNLKEEDIKLKFIKAYNIMMEDKKRIIQDSEEIIELLTDTTKIDDEIRDLDDELLITSELVSKLVNENSKTSDSIDNYNKKYEELSYRYDKLQTKREELIKQRNDRQGQALRMKAFIASLFESEDELSDWNERIWMLLVDGASVHRDSSITFKFHNGLESKIR

SEQ ID NO: 15376 - protein, 465 aa, synthetic construct
MAKKVTLIPARSNQSTAENLKANKLRMAAYCRVSTDQEDQLSSFEAQCTYYNSYIEKNPDYEMAGIYADEGLSGTNTKKREQFNRMIEDCKAGRVDIIITKSISRFARNTLDCLNFVRLLKDLGIGVIFEKENIFTLDGKGEVLMSILASLAQDESRSISENSQWGIRRRFEQGKMHINTTKFLGYDKDESGNLIINEEQAKVVRRIYRDYLSGKGPNRIAKDLEREGILNWNGKSKWYESTVRKILSNEKYKGDALLQKTYTIDFLSKKRAENNGEVPMYYVEDSHPAIIEKDVWEAVQLEIGRRSAFAERHGITRQDYSSDSNPFAGKVICGECGGLFGRKVWNSTNKKLRRVIWQCNHKYEEKGKVLCQNRHVDEELLNEAVIKAFEYIRDNSESYISKWEKDQQNGNPLIRHNARRLINAIEEQRKYNDKPRYEIVDCVKVYSNNIESTLIDGTRKTINCE

SEQ ID NO: 15377 - protein, 572 aa, synthetic construct
MTQNRNSSAMNPRVRVIPANMNMQRRGEGEEEPKVKVAAYARVSTLEEEQQSSYQLQVSYFEEYIERKPDWELYKVYSDEGVTGTNTKYRTGFNQMIKDAKEGKFDYIITKSISRFARNTLDCLTYVRMLKNLDKPVGIIFDKEGINTLDSQSETILVVIASVMEEESRTISANVSWGVQKRFSRGIAHIPTTYFLGYDEDEEGNLIINEEEAKIVRRIFREFLSGKGTPLIAKGLTKDKVKTARGNTKWTSDAIYKLIKNEKFCGHALCQKSVTLDPLTHKRVRNKNHKPQYFIRNNHPPIISEEDWNAAQKELERRSKMRHDPDGKYRRCYSNTAPFSNMLFCGECGVPVHRRRLTSKKNGQSYKFTVWQCRVSAMKMEADYECHTKYIWEEVIERAYNEMLLKMTKEIDQIRMEGEAAIKEVSLSEEENARLEEVEEIIDRISDQITEMSMRESITNDPIYDATLRNLIYESQIYQQEHENLLKNKEESIFMKKNLDILIEYLQGLKDFETFDAKMLRETVERGLIFDDYQMEFIFKCGVKRKAHGWRRGKDPVEPLALDTLEKVDSKL

SEQ ID NO: 15378 - protein, 436 aa, synthetic construct
MPRIITTVPHIPKLERPMNVAAYARVSSGKDAMLHSLSAQVSYYSKLIQQHTGWRYAGVYADEAMTGTKEARGEFQRMLTDCRSGKIDMIITKSISRFARNTVTLLETVRELKLLGIDVHFEEQNLHSMSADGELMLSILASYAQEESLSASENQKWRVRKGFQNGELMNLRFLFGYTILKGAITINPEEAAIVRDIYKRAIGGESMSAISRDLNKRGVSCVLGGKWDFPRVHNILSNEKYTGNALLQKHFRNNHLEKRKCQNTGELPKYYAEKTHPAIIDEETYQAAQAVLIKWQVLTSHRAKQHTNEFTGLIRCPYCGKNYKRVKSNTTIAWNCNTYLAQGKRYCHGKKIPEVALKAACALVLEHGAYRPERVKEEIAQIEVPEDNKLRFVLKDGHTKECTWADRSRAESWTPEMKELARERTIKREEINSCQQ

SEQ ID NO: 15379 - protein, 529 aa, synthetic construct
MPAVTMIPASKNIFTAMPMTSIEKRKTVAYARVSTDSTEQYTSYEAQVDYYTKFIKEHDDWLFAGIYTDEGITGTSTKHRDGFKQMVADALAGEIDLIVTKSVSRFARNTVDSLTTVRQMKENGIEIYFEKENIWTFDSKGELLITIMSSLAQEESRSISENVTWGQRKRFADGKVSLPYKHFLGYDKGEEGIPVINEQEAAIVRLIYRLFLDGKTPSGLCRYLEETGISTPAGKQKWSQTTVNSMLRNEKYKGDALLQKKFTVDFLTKKTKTNEGEVPQYYVEGSHEAIITPMEFDIVQAEIARRKCIGRNYSGNSPFSSKLVCADCGGFFGQKVWHSTDAYRKVIWRCNAKFKGETKCSSPSLDAETIQRMFLKAYNQLMGNREQVIADCEAMRAMLTDCSALDKEIAQVNEEIEVVAGLVKACILEHASKTQEQDAFDAKYNGLTKRYEKATARLEKLNAMQTQHQEGDRGLHIFIESIREQPLVLDTWDEQLWTMLVERGVVYTDGRIEFELKNGKKIMVVVDKD

SEQ ID NO: 15380 - protein, 434 aa, synthetic construct
MKTVKLIQKPKQPATKNRKKRVAAYARVSTVHERQEHSLESQVDHYKRLIQANPEWEYQGIYIDDGVSGTQIFGRTQFQELITKCEQGMIDIVLTKSISRFARNTVDLLETVRRLKELNIDVRFEKENIETISSTGEFLLTVLASFAQEESRSTSENLRWGVRKRYEKGISLHHRVYGYRWTGKKLVIEPTTAKVVRKIFRDYLKGKSMKRIADELNNRSILHFGKPFNDVAIHTILHNERYIGDTLLQKTYCVDFMSQPRKKNRGEHPMYYVEDTHPPIIKREIFEAVSREIDRRRELGVYNMPKVSRRCFTGKIICEKCGNNYIRTYKTPTNANWRCKSNRRDGIKGCRSIGINEEQLKILSNFMLGIDEFDEQAFYKEVDHISGDGEGSYTFHFRDGRQINRFWPSREKAYKAAIDRRRKTNDNGAHAWQR

SEQ ID NO: 15381 - protein, 674 aa, synthetic construct
MAKVRIIPAKKIITNNRNNPHSTKRRVAGYARVSTDSDEQFTSYEAQIEYYTEFIKSRPDWEFIKVYTDEGVSGTSTNRREGFKQMINDALLGEIDLIVTKSVSRFARNTVDSLTTIRMLKEKNVECYFEKENIWTFDGKGELLITIMSSIAQEESRSISENTTWGKRKQAKDGKVSVPYSNFLGYDKGPDGNMVVNEEQAELVRLIYALFLQGKSPNGIAEILTEKNIPSPGRGKQWVSSCIKSILQNEKYIGDALLQKSFTVDFLTHKQKVNEGEVPQYYVEDHHEPIVSKEMFALVQTEMKRRDGMPGRRNRRRMLSGRILCAQCGSWFGEKKWHPNSKYQKVVWQCNGKYDKAHAQCTSGNLIEQDVQRMFVIAVNRLLKDSSRILETQKLVYDTVFDTAGLERERTALIADMSVTAELMERMSSGQSSSRSNGYAHTQEYQALQIRYEQAEKRKEDLDNTIQDKVAKKALATSFFDNLKKQNSQVVRFDEDLWSGLVDHLKVYSPNDVRFIFRDGSEIKVDLSEEEKKRPPLTEKQMTEISSLRRDGMSYAKIGEKLDLPRGQVRSFCLSRTSKNEAAVQEDGEHVLCKTCGKELEHTPGFRKKIFCSDGCRQDWWNRYAKFKAGEGRATNKVTCQNCGETFVTYGTNRKYCSRKCYSEHRGQEGDSRD

SEQ ID NO: 15382 - protein, 524 aa, synthetic construct
MISLASNVTVIPAKKMVGTQKATDQKQKTRVAAYCRVSTDSEEQETSYDAQILHYTSYIESHPDWVLAGIYADDGISGMNAKKRDEFQRMINDCHEGMIDMVITKSISRFARNTVDCLNYTRALKNKNIGVYFEKENINTLDAKGEVLMTIMASLAQQESESLSANVRLGLQFRYQQGKVQVNHNWFLGYTKDEYGHLIIDQEQAEVVKRIYREYLSGNSLLKIKRSLEADGILNGAGRAKWHETNIKQILTNEKYIGDALLQKTYTVDILEKKREANKGQVPKYYVENSHEGIIPKDIFLKAQEEITRRANLTKGATHHKRVYSGRYALSGMVFCAHCGDIYRRIKWNNRGCKSTVWRCVSRVDKDGPDCTARTVREEHLHEVAVEAINGAFREKETILPLLIENIESSLEEKTDDRIKEVDEQIKALQKELLATASNKNAGDELGMEIRRLRQEKQAIQVEDASRQERKKRVDELIAFLEDLPCELTEYDEQFVRTLIDKITVFDNKFIVGFKSGIEIEINE

SEQ ID NO: 15383 - protein, 446 aa, synthetic construct
MKIGYTRVSTREQAQDSSALDQQTHRIKSAGATIIFCDVESGKSFARKEFKKMMALCGQGRVSELIITRIDRLGRSVIGIHQTIEALQKLNIKINVLDSPVNPSSAYGWYSINQMAGLAELESRMLSERINNGMEYFRLMKKASPRPPFGYTRVNEKYEPDLEKWAIAQQAIKFFLNGGTLRSLGQYLLETHGIKLSVSGLRYWLLNPCLRGHTVYGSRGNIDNPEKWTIHQNTHEPLISNLEYHKILRILETNKSKHCYGNGKKDTESYPLSGQIICADCGYKCFIKKRGSKTRVRCKQHDMSGDLFCKNKFTTYLDNIIYNVDSVLHQRYLDIISFTESEITSSDDNPLIVDQERQLRSLRQLPKSPIIDGAIASTLLEIQRLKSLETVKQEISQELEKILVNSFSDLDFWRSIPWRDKSEIYKELIKSVSVSNGEVIEIELFI

SEQ ID NO: 15384 - protein, 567 aa, synthetic construct
MNISCQIHPTNVSLQKHLNKHSMKAIAYIRVSTTNQDIKRQSVKINEYCSSNNYELVEEIVDFGVSGATFERAGFKRLNEINLENADIVVISELSRLSRKEDILDTLNAVNTIIVKGLKLLFLDNPSKIYAGSLDIMEVVMLSVGAYGAAQERLAIKRRNVEGKTVLFNSNPYAVVDGRTPYGFKKITNPSGTHPKYLLQVDEKESLIVQKIFNLVMEGNSVAFVMHYLHNTGIRHNTDVIFTKQNLSKLYSNEIYKGVRLRNKLVANIEAIIEPQIWNEVQLKIKENHNFGSTGTTMFNPLRGIIKCRCGRAMMVKSKGDGVFVFRCSDVKPKYMPNCCEYIDSIRFDLTNEIIFSLLKNIDFVQVKGKFDDKILDLTTQYEGINHQIEVHSRQIKLLNIEIEQQQEKYLNTTVKSLLSKIQERIISLETDVTDINKLISKKSKQVISMKNNIKNIIDVSKDENFDNLDIKERAIIFRKYIKEINYLPVTTMQGFYRVIYTSGIESIVAIKKTGNSPIFAVLPDTFELNTNLTIKTTDLEEITLSDFFKKHSSKYILPVDLSYRNN

SEQ ID NO: 15385 - protein, 519 aa, synthetic construct
MKKITKIDELPQGQLPNTNLRVAAYARVSTDSDEQLESLKAQREHYERYIKSNPEWEFAGLYYDEGISGTKMEKRTELLRMIRDCKQGRIDFIITKSISRFARNTTDCLELVRHLLNIGVFIYFEKENLNTGDMESELMLSILSGFAAEESASISQNMTWSISKKFQNGSFIIGSPPYGYANVNSEMVIVPEEAEVVKRIFSECLSGKGGSVIAKGLNRDKIPARRGNHWSTGTVIDMLRNEKYKGDALFQKTYTDNNYNRRPNKGEKDQFYCKNHHEPIVSKEVFSKVQKLITQRAKSKAVNKKAYQNRYVLSGRIICGECGSTFRRKTNYSAGRSYIAWSCKGHIEDKNSCSMLFLRDGEIKATFATMMNKLAYSRKIILGPLYDAISKNQEECDLERIDAIDKRMEQLTEERNTLIGLMTKGFLEPALFSKERNVLDSEIKKLTTEKTNLVMSFTSGTSQADEVKTILEHVSKDKFDGNYTDEVFEKFVENIIVNSRDELTFKLKCGPSLKERVVR

SEQ ID NO: 15386 - protein, 507 aa, synthetic construct
MTEIETKQTAYSYIRLSSKKQIDGDGERRQLEAAQEYCIANNLQLSPKSFKDLGISAFKEKNRPSLSDLHECIQNGTIRSGDVIILEKLDRLSRRGIDETISMLRSILQHGVELISLVDGLRLSRNSLNDLISIIRIAVASDLARQESETKSQRVRANKASMKKLAGQGVATKKRLPMWLTYSEGEYVLNDNADVVLRMFELRESGTPLGEIARRLNAEGVPTPNNRKWVASTVSMILGSASLYGAYQTLDRQQDGTYVKGTVIKDYYPALIEYSRWKGVQSSAVRIAGGHSKINHLSGLCFCVCGGAISFKKNNAQRKTKATYFYCRRHAYGTCDNRHCVRDLEKLVIAHSRRLDVENTKIGSSDSSSLIQQQIDEFEIRIAELGSSLSNVNGAVVTIVLNAITELEGKKKELIKELSQIVDIPMHAGSTLFQYADDPVRFNIELKKIVKRIEVTPSGKNHFIKMVRHDGHTISFHTADVLQPSDTKKLLNEVKTLTTGVEEWDGS

SEQ ID NO: 15387 - protein, 510 aa, synthetic construct
MKVVLYARVSSEKQDVDLSLSAQLKAMRLFAQGREYQVLREYIDEAETGRTTARPAFREMIVAARRPGKPFEAILVWKYSRFARSREDSIVYKTMLRKNGVQVISINEPTENTPVGRLMEGMIEGLDEFYSDNLGEEVTRGMRESASRGFYLSYRAPYGYSKVKVADGGKIRTKLELDPVRAPITHSIFKSVISGKGVVEVARELNSKGIASAKGKSWTKGTIYSMLNNELYTGTVVWGRNSKRGLEPIKVTGACPAIVDIETFDAVQQMMASRAPKLIHPRVVSSRFLLSGLARCGYCGRSLTGQDAKSGKFAYYVCGSLTKKGAGSCDFKYLNAPKFEKAIIDEIKKSVLTKENLLDLAKAVTEEWNESLTGFRQEIDSIDDSIKDTQFRLSNIYDAIESGKIELSDLALRIKELRMRQEKLIARKSEIEAQYSEHRYEIMDPAQMAVYVEDLKALLDEGEVCERKAFIKGFVKGIRVKGDEVTVEYTPPLPDGTGESVLSIEGHGGR

SEQ ID NO: 15388 - protein, 481 aa, synthetic construct
MITTNKVAIYVRVSTTSQAEEGYSIEEQKDKLETYCKIKDWSVYDVYTDGGFSGSNTNRPAIERLIKDAKNKKFDTVLVYKLDRLSRSQKDTLYLIEDIFIKNNIAFLSLQENFDTSTPFGKAMIGLLSVFAQLEREQIKERMQLGKIGRAKAGKSMMWAITSYGYDYHRGTGEVTINPAQALAVKFIFESYLSGRSITKLRDDLNEKFPKEINWSYRAVRAILDNPVYCGYNKYSGKIYKGNHEPIISKEDYDKTQAELKIRQRTAAENVNPRPFQAKYILSGIAQCGYCGAPLKIILGVKRKDGSRFKKYECHQRHPRTLRGVTTYNDNKKCNSGFYYKDELEAYVLKEISKLQDDADYLDKIFSGDNAETIDRESYKRQIEELSKKLSRLNDLYIDDRITLEELQSKSAEFISMRATLETELENDPALKKDKRKTDMRKLLNAEKVFSMDYESQKVLVRGLVNKVRVTAEDIVIKWKI

SEQ ID NO: 15389 - protein, 565 aa, synthetic construct
MSKEKIKVYLYTRVSTSIQIDGYSLEAQKSRMKAFALYNDYEIVGEYEDAGKSGKSIEGRVQFTRMMEDIKSGKDGVSFVLVFKLSRFARNAADVLSTLQTMQDFGVNLICVEDGIDSSKDAGKLMISVLSAVAEIERENIRVQTMEGRIQKAREGKWNGGFAPYGYQLVDGKLFINEEEAVAIRTIFDQYVNTTIGANGLSKYLENHGIRKIPRQNGKNPLFDAVLIRKILKNPVYNGKIAFGRRTLEKVHGTRNEYKQVEQDEYLIAEGIHEAIISDELWQAAQVKLKSQAKKYEHVNKGKDVRTHLLSGIVKCPICGVGMFGNKCIKKKKDGTKYKDFYYYGCKHRQMIRGHKCTFSKQIREELLDDAVAEVIIKIVSNPKFASMMQEKINMKVDTSEIEKEIDNYQKELRKSHSTKFKLIEEIDNLDVDDRHYKRRKQDLDDRLYRMYDKIEELESLLIDAKAKKQTIEAEKLTGDNIYKVLIYFDKLYNVMNDVERRQLITSLISEIQIYEEKQPNGQWLKSITFKLPIIVEDLNIGLDNNEQVETSFFIRGMLIQSRTH

SEQ ID NO: 15390 - protein, 412 aa, synthetic construct
MKTVTQIKTINPSLTIKLKVAAYARISHSSLKHSLSNQVSYYNQLIQSNPCWSFAGIYIDDGISGKSQETRSDFQALIKACHEGKVDLILTKSISRFGRNTVELLTTVRELKELGVNIRFEKEGIETLTSDGELLLTLLASVAQEESRSISENVKWYVKKSFEQGLPYIPQDIYGYRWQGDTYVIEPHEAKIVKQVFRWYMEGLGVPTIAQKLNDLGERTRLRNPFTKSILYEFFKQEAYYGRLVLQKTYRTDFSRNPKRNKGQRDKYIVDNAHEPIVSKEYFESVLAEKRRRSKGRYYRDESIPTLFRDKIYCAHCGVDMLLTVDKPHTDKATVRYNCRTRQHKGLDACPSKTLAEKRLIMTLTNYYNCSIDEEWVAKVKSVTFNSIDYSITVTFKDGEFHTLPIKRGQFK

SEQ ID NO: 15391 - protein, 519 aa, synthetic construct
MKKIITIEAATVHSNKVEQPKFTKRRVAGYARVSTDHEEQATSYDAQMRYYTDYISSRLDWEFVKMYSDEGITGTNTKQRVGFNSMVNDALAGKIDLIITKSVSRFARNTVDSLSTVRKLKDAGVEIYFEKENIWTFDAKGELLITIMSSLAQEESRSISENVTWGKRKQYERGKVSIPFKNVLGFERGPNGELVVNEEEAKIVRYIFHEFLLGKNANSIAKALTEQGIPSPTGKEKWYYGTVRRMLQNEKYKGDALLQKSFTTNFLTKKTKVNEGELPQYYVENNHEAIIDKDTFDLVQYELKIRERRGSASQFSGMLVCATCGAVYGSKVWHSNSKYRRVIYRCNQKYEGEVKCDTPHVTDEEVKEWFVIATNKLIENKDEVIENMKVLLVMCSDTEDIQQEISASETRMVELTDLVDSLIYENSRVVQDQKTYQEKYDRYSQEYKELEQKLETLTNSLQKKKSQAKSIKEFIQHLSNRDLVSEFDGKLWYTMVEKVIIASKEEVDFHFKNGAVISI

SEQ ID NO: 15392 - protein, 428 aa, synthetic construct
MSTDQDEQLSSYENQVNYYREYILKHEDYELVDIYADEGISATNTKKRDAFNRLIQDCRDGKVDRILVKSISRFARNTLDCIKYVRELKELGIGVTFEKENIDSLDSKGEVLLTILSSLAQDESRSISENSTWGIRKKFERGVVQVNTTNFMGYDKDEKGNLIINHEQANVVRYIFDRFLEGYSPEFISKELRELEIPGCTGKAKWCPSAIWKMLQNEKYKGDALLQKTYTVDFLTKKRIDNDGQVNQYYIENNHEPILDREKWEIVQLEIARRKKFREQHKLQFYIIQKENNPFTTKVFCAECGSAFGRKNWTTSRGKRKVWQCNNRYRIKGQIGCLNNHIDEEMLEKAFMKAVGLLQEHRSDMVAKWQKLEQGANLLHKHYAKQMYQILDLDKFDGVIMNQVLDHISISEARQIVVTFLEGTEVDL

SEQ ID NO: 15393 - protein, 413 aa, synthetic construct
MNIRKIEAKNNKRKKRICAYVRVSTTNGSQLDSLENQKVYFEKLYAERDDVEFLGVFCDKGISGSKYDRPDFQTMLDACRKGQIDVIHTKSISRFARDLINVLEISRELKTLGIDIFFEEQNIHTLSNEGEVILTVLASLAEEELQSMSGNQRWSFCRKFQKGELLINAKRFLGYDLNEKGELVINKAEAQIVRTIFYSYLEGMGTHRIAKKLNEGKVPTVAGKKWYDSTIRNILKNEKYKGSLLLQKYFHDGVNGPKKLNQGQVEQYYIEDNHEGIVSKEIWEKVQVKMKSRSRIQGTNKTYKFSRMLKCQYCGSTLKRQVSYKKKIVWCCSKYIKEGKNSCKGMRVPERDIEDWKLSSPVIVLERIEDGEKHYGYTGQETSANGHISNSEKDQSSRLLSSVYRPRRTAIKL

SEQ ID NO: 15394 - protein, 485 aa, synthetic construct
MRGVIYARYSPGPHQTEQSIEGQVADCQQYAEEHGIDIIEIYADRHVSGKSVVGRDEFQRMLRDAEKGRFDCVLVWKIDRFGRDRQDIAMGKMALKRAGVKLMYARESVPEGPEGIILESVLEGLAEYYSADLRQKVIRGMKETAKKGQYCGQPLPIGYKVDSQRHVVIDEREAAAVREAFKMHIAGAQLRDIVQLFADRGVMGRRGKPVSNAVVYRMLRNEKYLGEFYIQDVKLNVEPIIDQATFLEAAQHFKTSRNNAAGRAKVNYLLSCKMFCGYCGSMISAEAGTGKLGKVYRYYKCGDKKRGKKCELKPFPKDHLEDAIILATVNDMLTDEMIEKLTVRILEVQEQENADDPVVGLRRRLDSNKKRQRNLLDAIEEGGARGLVSRLAALEEEEEQLVLEIQRAEIKRPRLTHEVVEAWLRSFRVGDVTDDDFRARLVDTFIARVELRNDEALIFYNIREKGPHSRVRVRPEWWTRRDSNP

SEQ ID NO: 15395 - protein, 559 aa, synthetic construct
MNRYERMNQERKIVDMRKRVAAYCRVSTDHEDQANSFESQQRYFRQYIERNPDWELYEIFADEGISGTNTKKRSEFKRMIACAKEGDFDLIITKEISRFARNTLDSIYYTRDLKKHGVGVIFMNDNINTLDGDAELRLAIMSSIAQEESRKTSERVKWGQKRRMEQGVVFGRSMLGYDVKDGKMTVNEDGAKIVRLIFHKFANENKGTHVIARELREAGITPMRVKEWSNTVILRVIRNEKYCGDLVQKKTFTPDFLSHEKKYNRGEEEFVIIKDHHEPIVSRELFEKANRILDEKSLTQEGKAKHSNRYPFSGKIKCGCCGSSYVARYKNRNNGTRYKAWRCYKSATQGSPHTDKAGNPLGCSNPSIRNEDAVHIMYLVTRSLQLEEKKITANLLSVIQSVLSVNTNYSHIDKLKEQIQTVEDKRTQLIDLCISGAITKQEFITKREACDKEISELQDTISGIDQQHLLADQQESVMKEITAAIHEIVSGVEYEDAFYSQILDKMVVQSKDTVDVYLNLLPIKWSYAVAKASKGVLDPKSGISETEIPISVNIARSSG

SEQ ID NO: 15396 - protein, 528 aa, synthetic construct
MARVPKAVTVIPATINPLTRLATTSVAKRRTAAYARVSTDSDEQFTSYEAQIDYYTQYIKNRPEWQFVKVYTDEGISGTNTKHRDGFNEMVADALAGKIDLIVTKSVSRFARNTVDSLTTVRKLKEHGCEVFFEKENIYTFDSKGELLITIMSSLAQEESRSISENVTWGQRKRFADGKVSLPYKHFLGYRKGENGLPEIVPEQAVIVKQIYAMFISGKTPFAIAKTLTEEEIPSPSGKPKWISTTVDSILTNEKYKGDALLQKGFTVDFLTKKKKKNEGEVPQYYVENSHPYIIDPREWDMVQTEFARRKALGRKYSGNSVLSSRVICGDCGDFYGPKVWHSNDPYRRVVWRCNHKYEVGKRCNTPTLDEETIKARFLDAFNALVSNKERILADCRTIQSCLTDCTSIDAEIDTLVAEVAVVRELTERYIEENSRNAQDQASYLARYNSLVERYETAKARIEALQGKKAQRQQKADLIGGFMFELHERDEMVTEFSNRLWYSTIDTVTVHSDGHLGYKFLNGMEIET

SEQ ID NO: 15397 - protein, 480 aa, synthetic construct
MATHKVAIYVRVSTTSQVDEGYSIDEQKAKLTSYCDIKDWNIYDIYTDGGFSGSNTERPALERLIRDAKRKLFDTVLVYKLDRLSRSQKDTLYLIEDVFLENDIEFVSLLENFDTSTPFGKAMIGLLSVFAQLEREQIKERMQLGKLGRAKSGKSMQWAKTSYGYDYIKETGTLSVNPYQALIVRKMFEWYLSGMSITKLRDALNEQYGQDKEWNYRTVRVILSNPVYCGYNQFKGQIFLGTHEPIISEEDFNKTQEEIKTRQRTAAQRFNPRPFQAKYMLSGIAQCGYCSAPLAIKLGTIRKDGTRLVKYECKQRHPRKTKGVTVYNNNEKCDSGFYFKDDIEHFVLTEISKLQTDSDYIDKLFSNTDKETIDRDSYQKQIDNLTAKISRLNDLYIDDRISLEELQKRSSDFMAERTALEKELDADTSLKAVERKKDIRRVLDTKDIFTLDYDQQKAIARALISKVRVTSESIVILWKL

SEQ ID NO: 15398 - protein, 478 aa, synthetic construct
MNKVALYVRVSTTSQLEEGYSIEEQKAKLESYCDIKDWHVYKVYTDGGFSGSTTERPALEQLIKDAQSKLFDTVLVYKLDRLSRSQKDTLFLIEDVFIKNGIEFLSLQENFDTSTPFGKAMIGLLSVFAQLEREQIKERMQLGKLGRAKSGKSMMWGRTSYGYNYNKETGSMTVNEYEALAVKEIFTSYLAGMSITKLRDKMNADYPKKPAWSYRTIRGILANPVYCGLNQYKGQTFQGTHKAIISLEDFEQTQRELDRRQQTAKDLLNPRPFQAKYMLSGMAQCGYCHAPLKVVLGQKRKDGTRTKRYECYQRHPRSTKGVTVYNDNKKCDSGYYNMDILEHYVLTRIAMLQNDPKKIQEIFFDSASPVIDKQAIQKQIDSLSLKLSKLNDLYLDDRITLDELRSKSEYFIKQRATLEEEIKKASTDKQEGKRQKIEKLLDASSVLDMSYEDQKIIVKELIDKVQVTSDKIVIRWRI

SEQ ID NO: 15399 - protein, 514 aa, synthetic construct
MAIITKIEENKAVIGKKKVAAYCRVSTDQDDQLLSLETQKAHYESWIQGHSDWEYAGLYYDEGLSGTKMDTRPSLLRMMEDCKHGLIDYVVTKSVSRLARNTADFLTIVRTLLDLGIPIYFEKENIDTGSMENELMLSIMSSIAESESVSISENNKWSIQRKFKNGTYKCSYPPYGYDWDKKNGEMVVNPEQAEIVRYIFAQTLAGVGTHDIAKDLMAKGVPTKKGGKWTGHTVNGIIRNEKYTGDCLFQKTYTDSSFVRRRNLGELDQYYVEDHHEAIISREDYEAANDVIDRRRQEKGIELDNGKYQNRYPLSGKVICGECGGTFKRKTYTHKVVLACTQHIDDKEKCSMKYVDLEAVEVAFATMMNRLVYGRNKVLRPFYEALQQSNQTEALLKIHDIQEQLDALVEKKQTIKGLFAKGVIEPAVYTQSLNGVTAEVERLTTEKDALSYIASSEISHIEETRKLLSFADKGEFLDGFDGEIFETYVDRIVVKSQTELEFQMKCGLNLIERI

SEQ ID NO: 15400 - protein, 617 aa, synthetic construct
MDNYITSLDRNRPRNIAFYGRVSTEHEAQLSALQNQMQWYDDQLKFHPNWNLVEKYIDEGITGTQAKKRPGFLRMIEDSKKGKFDLIVTREVCRFARNTVDTLVYTRELKSKYNIEVYFVDDNIWTMDGDGELRLTLMATLAQEESRKTSDRVKAGQKISRENGSLYGNGNILGYDRVGNTYVINEEQAETVRMIYDMYLDGLGSMKIAKSLSVQQRKNASGDIKWSAERVMRILKKSTYTGVLAYGQSHSNNYLEQKRINNLDRDSYMYQKVNIPVIIPQNKWDDVQKIIARRTKSVGDKLSGKKDVKEFWSKKLLCNCGSSFRRNKWRTNKTGEAVYGYQCQRQLNYGSKQFREKNGLDTDGYCGIRMVADWKLDMMAKMVIEHIWKNKGESVILALKMISENYEEDVKPNKKNIKETELKIEKLQKRLQNLIEMRADGEISKEEFAESKNTINEQISILNSELTIDEVESDEPESIEKKIEVIKQAMNEVIDFSQPKLPKYIIDKFISKVLVLDNNKFRWYINLGNDYDKNSDIYLDTQVEGRKNNYSAQILSNDDSLSSVHSSTGSYRRNKGEIINLNFVITYKMAQDYRKSIGKYLRKNQWSDAIIDVAVEL

SEQ ID NO: 15401 - protein, 407 aa, synthetic construct
MKPGKIRVCAYARVSTMTEKQQESLTNQQAYYSHLYQNKKDVDFIGVYYDQGISGKLAKRPGFQQMLEDCRAGKIDVIHTKSISRFARNTELLLTVSRELKTIQVDIFFEEQNLHTLSNEGEVMLTVLASYAEEELRNMSENQRWAFQKKFQRGELVINTKRFLGYDKDENGELIINPEEAKIVKRIYNLYLSGMGVHVIAKLFNEEEVPTVDGGRWYSSTITNILKNEKYKGDAILQKYYFAEIKAKQRLNKGQVQQYLITDNHEAIVSREDWEAVQKRLKQNRKANLSIDYNRRYPLSGLLKCEHCGSTLKRQKYYKGKVVWVCSKYILEGKVACIGMRVPDSAVQDWSIHEPIVVKEENIGGKKYYSYSSKENDTSRAEATHSENPNGGLLPSIHRPRRTAIKL

SEQ ID NO: 15402 - protein, 499 aa, synthetic construct
MKIRRVQPSPILQKKLRVAAYARVSVDTLHHSLAAQVSYYSTLIQKNPAWEYAGVYADEGITGTSTTHRTEFKRLIADCNAGKIDLVLVKSISRFARDTVDCLHTVRRLKEQGIAVRFERENIDSTSEDGELLLTLLASFAQEESRSIGDNIRWGVRRRFAEGIPNGHKAPYGYTWDGEMFRIVPSEGEIVKEIYRRYLAGESAYAIAKILAGRGITGRQGRPIEQTTVKDILSNISYTGTMALQKNYISEGHIRKRNKGELPLYLVEGMFEPLVSKADFDKAQEIRKLRAERAVNRNPVLLPFSGMVKCGCCGGGFSRRTAGKYRRWGCNTRERKGSTACDSRPIKEEELVAAVRDVMEKDDFDTAELKRKVSKIVIHGDRIDFHLVNGRIKKTARIYNGQRGSNPFTNKVYCASCGSKCERDTWTKGTKVWACSQPRTKCRLKRLPESELKEAAESLFGDCYEGKIVQNVKRIVISDDEVIFQLKEGGAYRWQRQCG

SEQ ID NO: 15403 - protein, 513 aa, synthetic construct
MAKTVRVIPATPRVFRSEVAAEPRRRRTAGYARVSTDHEEQASSYEMQMAHYKNYIESRADWDFVGMYSDEGISGTNTKKRDGFNQMIEDALAGKIDLIITKSVSRFARNTVDSLQNVRKLKEHGVEIYFEKENIWTFDTRGELLITIMSSLAQEESRSISENTTWGKRKQFAEGKTSVGYSAFLGYDKDFKINEEQAKIVRLIYKLFLGGRSFYAITKELEKRGIKSPSGKDKWYISTVRSILTNEKYRGDALIQKEYTADFLDKTRRKNTGEIPQYYVEEHHEAIIPPDLFDFVQLEIKRREQNGKHSGVSIFANKIKCGCCGGWYGAKVWHSTDKYRRVIYRCNKKYTHKGKPCNTRHLTEDEIKQIFVKALNSLVDVKENVIAELRSLIDDVCQTVELTEERNRAEQELGVLAERLETLIRENARVAQDQNAYLKQENEIRALYVEKQGHLARLDEQIAEREGKRKTLETMIQVVCGIDGEQLAFDEELWSGLLDHIVVKEDGAVVVVF

SEQ ID NO: 15404 - protein, 533 aa, synthetic construct
MKRAAIYARYSTDLQNDRSVEDQIELCKSHAARIGVKVIEEYSDRAKSGASMFGRPGLAQLMQAAERGALEVVISEAPDRISRDIADLATVHKTLKFRGVEINCVNGGAIDTVQVGMFGVIGQMQREESAKKTHRGMVGLVRAGRNAGGKSYGYEPVPGEKGELRIVDEEAAVIRRIFELYVARVSPRAIAATLNAEGIPAPRGRQWNASTINGNDKRGHGILRNPLYVGKRVWNRVRMVKDPTTGRRVSRENDPSAYEYSDAPQLRIVEEALYEAARARKEAVGGPRAKYTPRSKRMLTGLLRCASCGGALTTTSADRSGPRVMCSRYRESKSCDNAGRYYVEKIERDVIDRLRQIFADTAYIDAFLREYEAEAKRVASERRSGRAAKEAALTEVQQRIARVIDQISRGQIEDDDVAAIMPALRKERDALKADLAAEEPESNVIVWKPKAIEQFRVVVEQLADILQNKDGTLPPEAGTMLREIVTGIVVHPRKPGADYRYEIRGKLSSIAGPELSAVEVVAGGRIELPTLGL

SEQ ID NO: 15405 - protein, 589 aa, synthetic construct
MPPGVISTGRLCRRLHHFKDTIFLPLCYHERRENERGFVVKKSVKADAAQTPNAVIYARFSSHNQTEQSIEGQLRVCHEYAQREGYNIVGEYIDRAISGKTDDRPDFQKMISDSKKKAFQYVIVYKLDRFARNRYDSAIYRHKLKANGVKVLSAMENIGDNPEGIILEAVLEASAEYYSVDLSQKIKRGSRDSALKGQFLGGSVPYGYKVLDHHLVIDPEKAPVIQYVFEQYAKGVPKKEIVDELNARGYRNSVGKPFGNTAFQTALHCEKYIGVMRWNEVENECPALIDKETFDKVQERIARNKREGGRNGAKMEYLLTGKCFCGPCGSPMVGVSGTSKTGEVYYYYQCQGRRIQRNGCKKAHEKKDFIEWYVVEQTVEYVLTPERMKQIAIAVVAEYDKEFNDGKVRDLESRIAKLDRDIDKLVDMLMDTPKSAHARINAKIELADQQKGDLEIDLAKMKIANGIRYTEADIIAWLKQFCKGDLFDESFRRRIIDTFINCVYLYDDRVVIFYNIRGGKQISYMEMQEAVDGVEFEGDEPTDCKGSASSYTKRHAPPKKFCSFITTELFVLPDYYNSILILNIFFCSL

SEQ ID NO: 15406 - protein, 510 aa, synthetic construct
MAYEDIQTCCLYLRYSDRSQSEQSIEGQFHVCQEFCKRNNIRIVQQYVDRATSARSTEKREKFMEMIQASDKHPWDAVIVYKLDRFSRNRYDSAKYKHRLKRNDVKLISATENLSDNPESIILESVLEGMAEFYSAELSQKITRGLRESASKCHSIGGHVPLGYKIVDHKLEVDPATAHIVQEAFQLYANGETVADICRKFNAQGYRTAKGAEFNRNSFKSMFKNERYIGVYTYRDMRIEDGVPAIVDKELFEEVSHRLSVNGQAPARGKAKVDYLLAGKLFCGHCGASMNGESGTGKYGGIYNYYTCYSRKRTRNCDKKPLKKEYIETIVAQDAMALLTDDIIEEMADMAISQSDKDLKENTRIPELTEQKKSIEKSIANITKAIEKGVASDTLMQRLMELEDEKKDVEFQLVDEEKYIFRIDRDQVVFWLSQFKQGDIQDEKFKSHIIDLMINSVTVWDEPDGFRITTAYNLTSCKTKTFRVNKDSEISFNGEFGFEESKSTTKAAKS

SEQ ID NO: 15407 - protein, 562 aa, synthetic construct
MMVKKRVVAIYARVSTEHEAQISALGNQIQYYDDLFEKHPEWELYDRYIDEGITGTSVKKRKNFMRMMQDASKNKFDLIVTREVSRFARNTVDTLQQTRILRREGVEVYFTEDNIWTMNDEDGELRLTIMATLAQNESKKTSVRVKAGQMISFKNGVLYGNGNILGYDRIGKEYVVNELQARTVRRIFDLYLDGNGVRKIQFVLEKEGHLTATGLTKWQPGNISRILRNPFYCGTIVYRKQFVPDFLEQKKINNFGEVDKVIVEGRHTPIVTKEQFEKVQQILSSKSESVHNKGCRGKKISKDIWCRKMKCECGSSYNRVTWHKSSEGPQYAYQCYSQIRTGTFKTRERKGLSTEGICVTKMVPRWKLEVMADIIFQKFWNDREGVLAIANEMLDNCYENEHDNEVLDRKRDLEDKMELWNRKYNNLLDMRMAGEIEKDRYDEKREQILKEQQHLKKQLEIICGETGLSDDIYMDKVEILKYGLEQNFNFSTRHIPEEVIDAFIKEIIVCQDGFIWKLNLTPDDELKMQVDGRANNYTVTQTELSSDMTQQHRQLSLRESNI

SEQ ID NO: 15408 - protein, 505 aa, synthetic construct
MNTTDLQTGVIYARYSSDKQRDESIEGQIRECTEYAQREGILITKIYTDRALSARTDNRPEFLQMIRDSSNQTFNYVIVYQLDRFSRSREDSAKYKGILRRNGVRVLSAKEQITNEPAGIILESMLEGMAEYYSVELSQKVKRGMTENALKGKMNGSAVPLGYDLTESHHLAVNAHEAKAVRLIYNLYLKQYSLAKIADILHSKGYTTKRGGKISYSVIRNILSNEKYIGVYQWGDIRIEDSIPPIIARDVFDEVQQVLPTRIKNKGRRSEMYNLCGRLICGQCGGHYMGSTATSRNGEKHHYYVCTNRRKHHTCNAPNIRRDELEDLVINRTLEILKQPKIIARIVDLVMNGYNHTTQEAKTAIQGIQGKIKAIDIELNNCMTAIKQGFINDRLKAEIESLEKERQDLLEQKANHESVISPIKFTAEHIEYFLERMANENPTTKAGRSRILDTFIKNVTIHSDRVEIVFNYKNEMPEFGVQSASGSHFSVLVGPPGIEPGTDRL

SEQ ID NO: 15409 - protein, 479 aa, synthetic construct
MNKVAIYVRVSTKGQAEEGYSIDEQIALLTSYCSIHKWKIYDTYVDAGISGATIERPELSRLSRDAQKKKFNTMIVYDLKRLGRSQRNNISFIEDVLEKNGIGFISLTENFDTSTPLGKAMVGILSAFGQLDRDTIRERMMMGKIGRAKSGKPMMTSTIAFGYTYDKITSSLNINPAEAIVVKTIYNEYLSGRSLTKLRDYLNENDLLRNGKPWNYQGVSRVLRNPVYMGMVRFRGEVYQGNHDPIIDSETFEAVQKELKKRQLETYEFNKNTRPFRAKYMLSGIIKCGYCGSPMGVTLGTKRKDGTRNIRYQCVNRFPRNTKGITVYNNGQKCNSGFYEKDDIEIYVLGQVRLLQLNKAKLNKMFETPEIINVEEIENQINSLNNKMKRLNDLYLNDMISLDELKTQTYTFLKQKDLLENELNNNPAIHQEENRKQFQKLLGTKDITQLSYEEQSFAIKNLIDKVFVKPGIIDINWRI

SEQ ID NO: 15410 - protein, 501 aa, synthetic construct
MNTVIYARYSAGPRQTDQSIEGQLRVCTDFCKQRGLTVIDTYCDRHISGRTDERPEFQRLIADAKHKKFEAVVVYKTDRFARNKYDSAVYKRELKRNGIQIFYAAEAIPDGPEGIILESLMEGLAEYYSAELAQKIKRGMHESALKCQSTGSGRPLGYRVDEQKHFQIDPESAQTVQTIFEQYIKGESNAAICELLNSRGLRTAQGKSFNKNSINRIIKNRKYIGEYRYHDIVVEGGMPAIISKDTFNLAQAEMERRRTRKAPKSSKAEYLLAGRLFCGHCKGPMQGVSGTGKSGNKWYYYYCGNTRGKNKTCDKKQVSRDRLERAVVDFTVRYILQEEVLEELARKVHAAQERQNDTASEIAFYEKKLADNKKSIANVLRAIESGAATQTLPARLQELENEQAVILGELSFLKGKRLAFTEDQILFALMKHLEPYPGEPEQDYRRRIISDFVSEVYLYDDRLLIYFNISSEDGKLKSVDLSNIEGGEFDEGLTSSTKKGG

SEQ ID NO: 15411 - protein, 505 aa, synthetic construct
MNNTDLQTGVIYARYSSDKQRDESIEGQIRECTEYAQREGILITKIYTDRALSARTDNRPEFLQMIRDSSNQTFNYVIVYQLDRFSRSREDSAKYKGILRRNGVRVLSAKEHITNEPAGIILESMLEGMAEYYSVELSQKVKRGMTENALKGKMNGSAVPLGYDLTESHHLAVNAHEAKAVRLIYSLYLKQYSLAKIADILHSKGYTTKRGGKISYSVIRNILSNEKYIGVYQWGDIRIENSIPPIIARDVFDEVQRILPTRIKNKGRRSEMYNLCGRLVCGQCGGHYMGSTATSRNGEKHHYYVCTNRRKYHTCSAPNIRRDELEDLVINRTLEILKQPQIIARIVDLVMSGYNHTTQEAKTAIQGIHGKIKAIDTELNNCMTAIKQGFINERLKAEIETLEKERQDLLEQKANHESVISPIKFTAEHIEYFLERMANENPTTKAGRSRILDTFIKNVTIHSDRVEIVFNYKSELPEFSEQSASGSHFSILVGPPGIEPGTDRL

SEQ ID NO: 15412 - protein, 479 aa, synthetic construct
MNKVAIYVRVSTKGQAEEGYSIDEQIALLTSYCSIHKWKIHDTYVDAGISGATIERPELSRLSRDAQKKKFNTMIVYDLKRLGRSQRNNISFIEDVLEKNGIGFISLTENFDTSTPLGKAMVGILSAFGQLDRDTIRERMMMGKIGRAKSGKPMMTSTIAFGYTYDKVTSSLNINPAEAIVVKTIYNEYLSGRSLTKLRDYLNENDLLRNGKSWNYQGVSRVLRNPVYMGMVRFRGEVYQGNHDPIIDSETFEAVQKELKKRQLEAYEFNKNTRPFRAKYMLSGIIKCGYCGSPMGVTLGTKRKDGTRNIRYQCVNRFPRTTKGITVYNNGQKCNSGFYEKDDIEIYVLGQVRLLQLNKAKLNKMFETPEIINVEEIENQINSLNNKMKRLNDLYLNDMISLDELKTQTYTFLKQKDLLENELNNNPAINQEENRKQFQKLLGTKDITQLSYEEQSFAIKNLIDKVFVKPGIIDINWRI

SEQ ID NO: 15413 - protein, 516 aa, synthetic construct
MARKKKVSPGNRLVAYYRYSGGSQQTEQSIEGQRRDCEAYARQHGLTIVHEYIDRHISGRGVESRLAFQQMIADSSKHLFDLVICWKTDRFARNRYDSAVYKKKLRDNGVRILYAAESSVEGPEGIILEGLMESLAEYYSAELAQKMRRGMRESALKGRAINPSRPLGLTTDEHKRFIIDEKNAPTIRFIFEHYAAGESSAFIVEQLNAAGLRTSKGNAFNKCSIPRIIQNEAYHGVYICKAYDVRIDGAIPAIIDDDLWKRAQKMLTLNKQHRAPHSSHADYLLSGKLFCGCCHSLMRGISGHNCRNDVYYYYACGNKADGGTCKKKNIPKDVAENLVVNAICENILRPDTLEDLADAIAAAQQADVNQPDPERAMLEQNLADVHRKINNIIESIENGTASSRLSARLADLEQQESTLNYQLESMKEIHPPVLDRERILFLLEQFLISPNERTEDYNRRIIDTFVNRIEITDTEMLIYFNLSEASASEKQKNSQPNSCSTGNHLVRVARIELTAS

SEQ ID NO: 15414 - protein, 463 aa, synthetic construct
MKRQTAKLNDKLLLRVAIYIRVSTDQQAQDGDSVRDQLATGQKYIENHENMILADTYVDDGISGQKVKRDDFQRLMNDVRAGSIDLIIFTRLDRWFRNLRHYLNTQDVLDKNGVSWTATEQPYFDTSTPHGRAFVNNSMIWAELEAQNDSDRILSVFDDKVDNSEVLSGSTPLGYRIENKHLVPDDDAPTAAAIFEYYRSNGNLAMTLRYMETEFGLIRSSASLKNMLTNTKYIGEFRTNKNYCPAIIDRDLFDDVQRLLKINIKSGKKHDYIFSGLVVCDECEHTMSGCQQRNSARILADGTRVVYKYNSYRCRQGITLHRCPNHKVMLESTLEKILLARIRPELENYITEYEVANRPAMRTDSKRRNLEHKMQKLKELYLNDLITMDEFKVDREKLMQQLDKIKSDDSQPMKDLSYLKNFLKTDFENIYVSLSIPEKRELWRSIIREIRVDHERNVRIIFL

SEQ ID NO: 15415 - protein, 474 aa, synthetic construct
MTKDLQTGVIYARYSSDKQRDESIEGQIRECTEYAQREGILITKIYTDRALSARTDNRPEFLQMIRDSAHQSFNYVIVYQLDRFSRSREDSAKYKGILRRNGVRVLSAKEHITAEPAGIILESMLEGMAEYYSVELSQKVKRGMTENALKGKMNGSAVPLGYDLTESHHLDVNAHEAKAVRLIYDLYLKQHSIAKISDILHSKGYLTKRGRKISPSVIKTILSNEKYIGVYSWGDIRIENSIPPIISRKVFDEVQQVMPTRIKNKGRRSEMYNLCGKLICGECGGHYMGSTATSRNKEKHYYYVCTNRRKYHTCTAPNIRRDELEDLVINRTLEILNQPSNIARIVDLVMSGYNNTTQEAKVAIQGINNKIKAIDTELNNCMNAIKQGFITERLKGEIENLESERNNLLEQKANHESTLIPIKFTADHIEYFLERMAKENPTTKAGRSRILDTFIKSVTIYSDRVEIISSTISI

SEQ ID NO: 15416 - protein, 496 aa, synthetic construct
MKTAVIYARYSSDKQTEQSIEGQLYDCYNYAKANNITVIGEYIDRAMTGRNDDRPDFQRMIADSAKHTFELVLVWKLDRFARSTEDAAYNRGKLKRNGVRLLSIKEDFGDSSAGDLMMHVMESFNEFYSADLREKTVRGMHQSALKCQSTGGQIPIGYKIEDKKYAIDEATRFIPETVFRMYAEGKRLAEIARYLNEKGYRTRMGRKFTTGSFYTMLSNEKYIGVYKYGDVRIEGGYEAMIDPVLFDAVQKKLVENKKRAPKISERENFYLTGKLFCGHCGEPMNGMSGNSAKGKHLYYRCNGVRKHTGCDKRTERKEELENEIIGAIQRAFANADPEELTRKVIENYEKNSRPADQVKVMKAELQKITNKVDNVVNAIAEMGGNETLYTQLRQLTEQKEQKETEIRIAEHKADDMPTVELVKKILDLIQNADTMTDEGRQLLIDGAVSRIYVYDDSLDIYFKGGKNTEIPLNPANKDDVSDNSFACCKEWGANHA

SEQ ID NO: 15417 - protein, 479 aa, synthetic construct
MDYYTKFIRENPDWDFVEVYTDEGISAVNTKHRDGFNRMIRDALAGKIDLIVTKSVSRFARNTVDSLTTIRKLKEAGCECFFQKENIMTFDSKGELLITIMSSLAQEESRSISENVTWGQRKRFADGKVSIPYGQFLGYRKGADGLPEIIPEEAEIVKRIYREFLQGKSTNAIATTLTKEGIPTPGKKAVWQRATVESILQNEKCKGSALLQKSFTVDFLTKKTKVNEGEVPQYYVEDSHPAIIEPWEWEQVQAELERRKNSRTRHRQTSPFSGKILCADCGGIFGAKTWHSTDRYRRVIWQCNDKFKGVHKCETPHLTEKRLKELFLSALGAYLSDRETVIVRLRDTQRVLTDTDFIDEDIRTLEEELTAVTEMLRLCIEENAANATTEETYRATHAELCRRFEETEARLTSLQKQRDRMKADAIAIGGMMFELGELTALPLTFDEKLWNGTIDHVIVYADERVVFCFKDGKEIVTGL

SEQ ID NO: 15418 - protein, 524 aa, synthetic construct
MAKVTFIPSTLNPMTRIPMDSIQKRRVAAYARVSTDSEEQLTSYEAQVDYYTKYIRSKPEWEFVKVYTDEGITAVNTKKRDGFNAMVADALAGKIDLIVTKSISRFARNTVDSLVTVRTLKEHGTEVYFEKENIFTFDSKGELLITIMSSLAQEESRSISENVTWGQRKRFADGKVSLPYKQFLGYRRGEDDLPEIVPEEAEVVRKIYSLFIQGKTTHGIAKQLTEENIPTPAGKEKWQASTVESILTNEKYKGDALLQKGFTVDFLTKKTKKNEGEVPQYYVENSHPAIIRPHEWQLVQREFSRRKGLRRKYSGNSIFSTRLVCGDCGNYYGPKTWHPKKPYQKIVWQCTLKYKGENSCETVTLEETEIQQKFIQAINSLFSIKGPVLENCRIMQKALTDCTGIDTELATLTRELEVLGQMIKDAIKTNALEGQNQEEYTARYNALAERYDTTHRQIVALQEKRQARENEAEAIGGFMFALREMGTEAQEFDPKLWLSTIDRGTVNRDGSITFRFVSGAEITT

SEQ ID NO: 15419 - protein, 426 aa, synthetic construct
MERIIRQVSFPGAEMPRLKRVAAYARVSSGKDAMLHSLSAQVSSYSNLIQNHEGWQYCGVYADEALTGTKEGRGSFQSLLADCRAGKLDMVITKSISRFARNTVTLLQTVRELKGLGVDVYFEEQNIHTMSADGELMMTILASYAQEESLSASENQKWRVRRNFEEGIPWRFFMLGYRAGDGKLAVVPEEAEIVRSIFSDYMAGDGVTIIANRLNKSGYATQSGCVFHKSAVDRILRNYAYTGNLLLQTKFRENHLTKVTRRNHGELPQYHAQETHEAIISFEMFQAVQEEIQRRKAKYGPTKERQFSPFTGLITCECCGKHYRRKTTATGFIWICSTYNSKGKAYCASKAIPEQKLLATAAQVGDPDTFKGILAKNGNELVFTLQDGSTVVKHWQDRSRAESWTPEMRRAVGQKTRERNQAAWQR

SEQ ID NO: 15420 - protein, 503 aa, synthetic construct
MNNRIDAIYARQSVDKKDSISIESQIEFCKYELKGGSCKEYTDKGYSGKNTDRPKFQELVRDIKRGLIAKVVVYKLDRISRSILDFANMMELFQQYNVEFVSSTEKFDTSTPMGRAMLNICIVFAQLERETIQKRVTDAYYSRSQRGFKMGGKAPYGFHTEPIKMDGINTKKLVVKPDEAANIRLMFEMYAQPTTSYGDITRYFAEQGILFNGKELIRPTLAQMLRNPVYVRADLDVYEFFKSQGTIIVNDAADFTGMNGCYLYQGRDVKPSKKNDLKDQMLVLAPHEGIVPSDIWLTCRKKLMNNMKIQSARKATHTWLAGKIKCGNCGYALMSINNPVGKQYLRCTKRLDNKSCAGCGKIITSELEAVVYQQMVKKLASYKTLTGRKKAAKANPKIAALQVELAHVDGEIEKLVDNLTGANNVLLSYVNVKIAELDGRKQELLARIAELTVEAISPEQVSQISGYLDTWEDVSFDDKRRVVDLMITTIAATSDSLNITWKI

SEQ ID NO: 15421 - protein, 553 aa, synthetic construct
MEKSKRVVGYARVSTEAQDITRQIELITAYCSDRNYHLIKIIQEKISGARKDRKSLNELLDVDDAVADMIIVSELSRLSREDDILSVLSTINELLKQGVDILFLDKQDRIYKAGTILSLYDIITLSVEAKASADERYKIAGRMQTGLRSKLAEFSNMFAGGTVPFGYKVIHNPDYKLNQTPKNLLVVDAKEAEAVKYLFQQLIDGNTIRQTVRVYNKLYPYKLSYSGICRIIRNPKYKGEIYRRGKLYGQIPELQIITPEDFDKANKQMRENSLFQSNAPKYYNPLKGLLFCPCGCGLYMKPNHNSYLIYRCSSAYNDKQKCENYGVKCAYILSSVWTCVKETLHTEEYKRFNTQRANELQGINKQIRETITRKVNSVDELKTQSASLIAKIKKLNNDDLINELETDYNVLCKQIKQTEQEISELNGQIAENDAEIKRNVEQKDFSKMEQSALYKEKLQKAVYHSQSAMRGILEIVFKNGMTRYVLIKKHRNGGTYLLPDTFKGDMERKQIIVPSLRTDKDNPYSAQPMNLRYTFDEFFKAMPVEEYEIPITE

SEQ ID NO: 15422 - protein, 525 aa, synthetic construct
MQTAENRSKYHQLRVAAYCRVSTEQEEQQNSYQVQIAYYTDLINRKKEWTLAGIFADEGISGTQTKKRTEFNRMIRMCRNKKIDLVITKSISRFARNTVDCLEYVRQLKDLGIGVIFEKENINTLTMTSEFMIALYGSFAQAESESISKNVSWGKEKAFREGKVQFQYKYLLGYKKGADGKPEIVPDEAETVRLIFKMYLDGYTLLNIADTLMAQGRRTATGKNIWSKGEVQRILKNEKYVGDALLQKSFTVDCITHKVVKNNGERPMYLVTDHHTPIVDRDTFNRVQQELARRTSKRKISDKTKTEQGKYSGKYALSELLICGHCGTPYRRRVWSRNGKKQVVWRCISRLEHGKKYCPDSPTIKEEQLHKAIIRAINNYYSCRNDIARILKANIGSVLECQGQEEILAAEKRLREIDQARNDLVDLIASGGCDEDKLDSEFARLYAEEQGLSERLAMLKSQNQTSAETQEKLDKIMDMIEHEKFELETFDNVLVRKLIECIKVLSKTEILVIFKGGYEVRTEIE

SEQ ID NO: 15423 - protein, 573 aa, synthetic construct
MAKVKLPDKPRVAIYTRVSTLHQIDKDSLPMQRQDLINYARLILNTEDYVVYEDAGYSGKNTDRPKFQEMMQQVRLGMFTHILVWKIDRISRNLLDFATMYSELKQLGVVFVSKNEQFDTSSAMGEAMLKIILIFAELERNMTSERVTAAMLSRAANGQWNGGRVPLGYDYDPETKTFTVNESEAAVVKIIHDKYEQERSLVSLARYLNGHGYRTRTGCTYSPSTLLIILRNVFYCGDYRYNVLKDGDRQKRKKESEWITVKDHHPAIISREQKDEIARILKENRRLECERRGIYSKKKNVHVFGGLVICGNCGHAMTSTIRPADQDGIRWSVYVCPTKRRSEYLCKGRATSEVVLGEFVFNYILNMLNVQKNFDSISSLEDMEKMLLSGSTFRDVDGIERAGLDDLYNILASGLTEKAPFDSSVEVRKKPVVSDIELENLNTEKTKIERAAERLQNLYLYSDDSISQKDYIIQREKLMSQLAEVNEQIGMVMSNADEKDVSDEEFVHAASKFILTQKLEGRTYIYYKRLATTVSREVLRSFVMSIIENITIYDGRVQTIVFKNGLSHTFILK

SEQ ID NO: 15424 - protein, 541 aa, synthetic construct
MDAVIYARYSSNNQREESIEGQIRECREFAEKNNLQIVDEYIDRAISGKTDNRPAFQRLIKDSSKGKFDVVIMYTLDRFARNRYDSAIYKAKLKKNGVRLLYAKQPMPDTPEGIILESVLEGYAEYYVENLRRGVKRGMRENALKGYVNGKTPLGYRRGKDKKYEIDPYEAKAVREIFERYARNEPIIDIARWLNDNGYKTTTGGQFNKNSLRRILTNDKYIGVYRYDDIVIEDIVPPIIDRELFERVQNTFEYNKHFRAKQKAIDPYLLTGKLFCGHCGAMMIGESGTSRHGTTYRYYKCATRKREHTCDKKIERKEWIERIVVEYTKNYVLTDENIEKIAEKVVELITQEYSDKSMLAELTARLDDVTTRFSNLLKALEQGVISESVANRVSELEKEKKSLEKKIASEKMSKPTITKDMVVYWLLSFKNGNIDDESYQRRIIDTLVSSVFIYDNDDGTARLVLNFNTSSNNNVTIKVSDTTSLAIPVKKSPEFQRSGLFILFIFGNYLHFYIKRHQLKPFKVCHLVCHFSTSHCKDVRN

SEQ ID NO: 15425 - protein, 434 aa, synthetic construct
MKKIIGYVRESTQWQVTNGYNLGEQKRKIEEFCKYKYETGSYELEIKEERGVSARNLKRPQIQSIIELIKSKELDTLIIHNLDRLTRSVKDLAYLIELLEEYSIELVSITESIDTNTPSGRTFILMIGVISQWEEDSISWRTKRGMAEALERGYYCKPRVPLGYVRDPQDKRYLIIDEEKAEYIRYIFETVARGTKTANEIYLEFKKEKVLGKKWGKDDIYRIIKNQTYTGDVELFGKVYEDVIPAIVTKELQKEALERVKLRSRIKKYKYPFRGILLCSECGSTLKCDSTHKKIRGKVYKVYQYYFCECCKNRISQNCIQEQVEHQLSRLLDKEHTKEIRKSFLKHLKQVEKDINAVIELILNQGRNEILIKKYASLVNEREELFKKAEKQNEGNIPLIDSENLKDLIYKYISHIKVDLIRKSIVVEYKKKYK

SEQ ID NO: 15426 - protein, 491 aa, synthetic construct
MYLRKSRAEEGQSTEEVLAKHWAALEELADRLGLPVDGVYEEVASGEKLYARPEMLKLLERIRAGEVEAVLCMDIDRLGRGGMADQGTILDAFRESGTLIITPEKTYDLTNDADIEMTEFKAFFARAEWRAIRKRMRRGLMQTIEAGGYTANAPYGYRPTRLGKPPSPAGTLAPARFVRYIYERYLAGIGAQTIAQELNAMGSCPRRGAEWNRNTVRHVLRNPTFAGKVAWNRVKHYRPGAHGKDKHHVVYTPEGEWLMVDGVHEAIIPWDTWLEAQERRKQRYIPPSNTGQRANPFAGIIRCSKCGNNMQRMGTNKGEPYLLCTTKGCTAGAKFEYVEERMVELLYDELARLRLLIDSGASPNVDALEAALAAAQREQERVQARIPRLYEFLEDGTYDRSTFRSRLDAAEKELAELASKRAGLERQIDERRRSDPRKAAAALENLVQLYPTMSPADKNSALKALGVEVTYTKEKKTKPRDFTLELQLRDF

SEQ ID NO: 15427 - protein, 477 aa, synthetic construct
MRIALYPRVSTQEQALNGHSIDEQIERMNKYCEAMGWKVYKTYTDAGYSGANTNRPALQRMIKDIEAGKIDKVLVYKLDRLSRSQLDTLYLIEKVFLANNVDFVSMNENFDTSTPFGRAMIGILAVFAQLEREQIKERMMMGKEARAKKGLYHGSNCYPIGYDYINGHLVPLEFEAIQIKMIFEMYAEGKAPLTIAEYLNNNGYTTRYGRWNDITVRKILRRKTYLGYIKYHDDWYKGEHEALISEDLFNTVQKIFDQRTEDYSYYKRREGRVNSYLGGMLFCDCCGGKYSKIISNSTKNGKKYRNTYYKCNSRTFKKRTLVRDPNCKNKTWRMDVLDNLVFDEIKKLALDPDYLNKIKTPQENYNRQSVIENQVENIKNQINKLMDLYTIGGMPVDLLQEKIHDLNDQQKKLEAEIEKIEDEKKKKMTHADAMKMITSFKDVLERGDYAEIRTSLSALIEKIVIKGEDIEIYWRFV

SEQ ID NO: 15428 - protein, 492 aa, synthetic construct
MNIQEIPTTRKEKPRVCAYVRVSTDSEAQEDSFAFQSNYWQRRFESDESVEYIGLFSDEGIGGAFMKKRDGLKRMFQKVRNGEIDRIYTKSVSRFARNKVELMEVVREFRDIGVEIIFESENIHTLDPKCGLILTVMASLAEEELLSMSQNQKWAARKRFANGSVELARILGYDMVDGKLVINEKEAVIVRRIFELYLQGNSFRTICHILENEGYTPMHGGRWSKSTITGMLRNEKYCGDSIMQKSYSVMKVQKYNYGELPKYYIQDDHEPIVSREDYQKAQEIMMARGNKYRPRGSPTALYPLSGKLICGECGTSFKRKTSAHGTPYMCIKWTCRKKDVYGVKECASHDIKDEVVTRLLIEAYNESLDANNDVNGITEQEEVLRKLIANEQELRQLRAKGYISESKCREETDKILIKIKEQETLIKNLRMRDMVKGKYKKSDELTEQMAEFLVKATVKDWTITFEFQNGYKATKEYTNGRAGNVNGKLCKH

SEQ ID NO: 15429 - protein, 526 aa, synthetic construct
MPKVTKIPATLARYTAMPISAPRKRRVAAYARVSTDHEEQLTSYEAQVDYYTNFIKGHADWEFCGVYTDEGITGTSIKHREGFKQMVQDALDGKIDLIVTKSVSRFARNTVDSLTTIRNLKEKGVECFFEKENIWTFDGKGELLITIMSSLAQEESRSISENCTWGQRKRMADGKVSVPFDHFLGYDRGEHGEMVINEEQAKTVRLIYDLFLQGLTPHAIAKRLTGMGILTPRKKEVWNQGTVRSILTNEKYKGDALMQKCYTVDFLTKKQVVNRGVLPQYYVEDDHEAIIDPETFELVQQEMIRRRKTGSRYSGIDIFASRLVCGECGSYYGAKVWHSNSKYRRVIYQCNHKYHEGNSCNTPHLTEDEIKQGFVVALNRLLEGKATVISNLESLSLVLFDTSEMETTAVKLKAEMELVQEMIQKAIAENARVALDQKEYKARFDELSQRFDTLEKQHNELERQIADRVSRRVAMYQFIGVLKKQKDLITEFDPSLWGALLDHATIYGKDDIRFTFKDGTEINAIG

SEQ ID NO: 15430 - protein, 532 aa, synthetic construct
MAKTVRVIPASPKIFRSEVTAEPRRCRTAGYARVSTDHEEQASSYEMQMAHYKNYIESRADWDFVGMYSDEGISGTNTKKRDGFNQMIEDALAGKIDLIITKSVSRFARNTVDSLQNVRKLKENGVEIYFEKENIWTFDTRGELLITIMSSLAQEESRSISENTTWGKRKQFAEGKTSVGYSAFLGYDKDFQINEEQAKVVKLIYKLFLGGRSFYAITKELEKRNIKSPSGKDKWYISTVRSILTNEKYRGDALIQKEYTADFLDKTRRKNTGEIPQYYVEEHHEAIIPPDLFDFVQSEIKSREQNGKHSGVSIFANKIKCGCCGGWYGAKVWHSTDKYRRVVYRCNKKYAHKGKPCSTRHLTEEEIKQIFVKALNSLVEVKENVIAELRSLIDSVCKTGELMEERGRVEQKLSVLAERLEKLIRENARVAQDQTTYLNQENEIRTLYVEKQGHLARLDEQIGERERKRKTLETMIQVVCGINEEQLAFDEELWGGLLDHIEVKKDGQIVVVFKGGIESGVDGCRGLFYLRK

SEQ ID NO: 15431 - protein, 499 aa, synthetic construct
MKIRRVQPTQTLQKKLRVAAYARVSVDTLHHSLAAQVSHYSNLIQKNAAWEYAGVYADEGITGTSTTHRTEFKRLIADCNAGKIDLVLVKSISRFARDTVDCLHTVRRLKEKGIAIRFERENIDSTSEDGELLLTLLASFAQEESRSIGDNIRWGVRRRFAQGIPNGHKPPYGYTWDGEMFHVIQAEGEIVNEIFRRYLAGESAYAIAKSLAGRGITGRQGRPIEQTTVKDILSNISYTGTMALQKNYINEGRVRKRNKGELPMYVVDGVFEPLVSKTDFDKAQEIRQRRAAQSCNRNPVLLPFSGMVKCGCCGGGFSRRTAGKYRRWACNTRERKGSTACDSRPIKEEELVAAVRAVMEKDDFDAAELRHKVSKIVIYGDCVELHLTNGRIKKTTRIYNGQRGSNPFTNKVYCASCGSKCERDTWTKGIKVWACSQPRTKCRLRRLSESELKEAAESLFGDGYEGKIVQNVKRIVISDDEVIFQLKEGGAYRWQRQCG

SEQ ID NO: 15432 - protein, 531 aa, synthetic construct
MKEIIKIDSTMRKTGFEKKTRVAAYARVSSDSDEQLLSLEVQKEHYENYIKSNPCWEYAGLYFDEGISGTKIDKRESLKQLLKDCQSGQIDRIVTKSISRLARNTVDCLEIVRKLTGLGIYLYFEKENIDTEHMSSELMLSILSSIAQSESKSISENNTWAIQKRFENGTFVISCPAYGYKNENKKMIIVPEQARVVKEIFNMALSGMGGEAIARVLTDKKIPTKKGGSWTSSTVNAILNNKTYTGDVIFQKTYTDDSFNRHKNCGEKQQYVIENHHEAIISHETFNLVKEIIAWRRSENNIVCGSGKYNKLYAFSGKIRCGECGSKCKRRIIYQHNKAYGIWVCITHLEDIHACSQKSVMESYLKISFLQMLNKLKAGYVQMLTPLVESLRGVNNKDGLNKVIELEEKKLKLQEQEQVLSKLLAGGYIEMDSYYLESNQLKTEIDTCLKEKLKLSNSLNGNLTHLNEVQKLQRFVSVTEVFSEFKDEDFLDFVDDVVVKSRTRFLFILKCGLELEEEVKETWHASHMVTE

SEQ ID NO: 15433 - protein, 485 aa, synthetic construct
MIGAIYARYSAGPNQTDQSIEGQVADCRVYAEQKGIRIVEIYADRHVSGKSIIGRNEFQRMLRDAEQHRFECVIVWKIDRFGRDRQDIALGKLTLKRAGVKLLYAKESVPEGPEGIILESVLEGLAEYYSADLRQKIVRGMRETAKKGLYCGQPLPIGYTVDENRHVVIDEEKAAVVREVFRLHNAGARTRDLIDLFRKHGINGSRGKPISQSVIYRMLRNEKYLGRFEVQGVELPVEPIIDPVTFEEAAKHFKTSRNNAAGRAKVDYLLSCKCFCSYCGAMLTGESGTGHAGKIYHYYKCGAKKRGAKCELKPIKRDHLENRVIESTVQDMLTDEMIDTITARIMEIQKQDDAQNPAEQLRKQLDSNRKRQRNILDAIEETGAKGLAARLAALEDEEYELLAEISRAEIKKPRLTEAVIGAWLRSFRNGDMNDAAFRQRLVDTFIAKIEVRNGEALIFYNIRENGPHSKVRVRSECWRRRDSNP

SEQ ID NO: 15434 - protein, 537 aa, synthetic construct
MKRILKIEAGKTADPFRKIRVAAYARVSSDSEEQFLSLEVQKEHYENYIKSNPYMEYAGLYVDDGISGTKTDKRKGLQQLLKDCEQGKIDRIITKSISRFARNTVDCLEMVRKLMHWGVQLYFEKENIDTAHMKSELMLSILSSIAESESRSISENNTWSIQKRFENGNYIISVPAYGYKNENGKMIIVPTEAAVVQDIFAMALQGKGVYTIANVLNARKIPSKKGGKWHASVINAVLHNEKYTGDAIFQKTYTDNNFNRHRNHGEKSLYKMENHHEAIVSHETFARVKELMALRRKENNIVRGDEKYHKRYAFSGKIRCGECSGKWRRRIIYKQHKAYSIWACTTHLTDTQACSLKCVQESLLKITFLQMLNKLKVGHLQVLTPFIESLRGGNNEERLRKVIDSEERRIKLQEQNYVLTQLWGRGYIEMVPYYQESNRLKAEIEACTKEKQRFSNRLNSNLIHVNEAQKLQRFVGKAEPFTVFKDEDFLEFVDGIVIKSRTNFIFILKCGLELEEEVIENGTYPLWISNSCRGSCY

SEQ ID NO: 15435 - protein, 617 aa, synthetic construct
MDNYITSLDRNRPRNIAFYGRVSTEHEAQLSALQNQMQWYDDQLKFHPNWNLVEKYIDEGITGTQAKKRPGFLRMIEDSKKGKFDLIVTREVCRFARNTVDTLVYTRELKSKYNIEVYFVDDNIWTMDGDGELRLTLMATLAQEESRKTSDRVKAGQKISRENGSLYGNGNILGYDRVGNTYVINEEQAETVRMIYDMYLDGLGSMKIAKSLSVQQRKNASGDIKWSAERVMRILKKSTYTGVLAYGQSHSNNYLEQKRINNLDRDSYMYQKVNIPVIIPQNKWDDVQKIIARRTKSVGDKLSGKKDVKEFWSKKLLCNCGSSFRRNKWRTNKTGEAVYGYQCQRQLNYGSKQFREKNGLDTDGYCGIRMVADWKLDMMAKMVIEHIWKNKGESVILALKMISENYEEDVKPNKKNIKETELKIEKLQKRLQNLIEMRADGEISKEEFAESKNTITEQISILNSELTIDEVESDEPESIEKKIEVIKQAMNEVIDFSQPKLPKYIIDKFISKVLVLDNNKFRWYINLGNDYDKNSDIYLDTQVEGRKNNYSAQILSNDDSLSSVHSSTGSYRRNKGEIINLNFVITYKMAQDYRKSIGKYLRKNQWSDAIIDVAVEL

SEQ ID NO: 15436 - protein, 562 aa, synthetic construct
MAGQENQQYTVLYGRLSQEDERAGESNSIQHQRTLLEKYAKEKGFENTIFLADDGYSGTNFERPSWKKIVEMIEAGQVANLIVKDASRLGREYLQVGYYMEIYFPQKNVRFIAVNDGVDSTVESSNDFNPIRNWANELHAKDTSRKVRAVMKMKAEQGERLGGRPPYGYRKSDGDANTLVPDEDTAPVVKRIFSLCAAGNGPKRIATILTKEQVVNPSNAYYRKTGKSHRGLDTTRPCLWSSNSVTSILNNEVYLGHSVGLRTTTISYKNKQRVERPESERFVVKNTHEALVTQEQWDIAQEVRQHKKRVPKHMDEPNIFSGLVFCADCGKPLVLHRASTMKRTEYNFKCYTYGKKGKTVCTPHHIREFELKVVVLEDLRRVTHFARMKEKQFATYISSKNTLELRREMNTIQKDLDTMRRRREELSKLFKRLYEDNVLGRVTDEQYRMLAGDYTGEQKALEEQIPEKEARLEKLKATSANVNTFVEKAKQYTAIDELTPELLRLFIQRIEVGERTEKYSRSSHQSIRIVYRDIGTVDSAMEQGEAQPRIAPPLSEVFQLPA

SEQ ID NO: 15437 - protein, 514 aa, synthetic construct
MPTVTVIQPTITEEQNTKIRCAAYCRVSSDSEDQLNSFMAQTRYYSQFFENSETEELIDLYADEGITGTREDKRDEFQRMIKDCRKGRIDRIYTKSISRFARNTKDCLKNVRELKSLGITVFFEKENIDTANMTDEMMITIMGGLAQEESTSISQNMRWSIKKRMENGTMKMCNSVFGYELVNGELILNQDEARIVRKIFDWYLNGYGSEKIAQMLNEMGIGKRGRSCHWTGPTVRVMLKNEKYIGDQLFQKRFTTTVLPRKNLPNRGELPQYYYTGCHEAVISKDVFDRVQELIRLRGENKRNESRGNILSKKIKCGECGTTFRMKNCRGKIYWVCRLHTDEIEKCSVKPINQDNIHSAFIRLCNKLWYNYKQILVPFQTALHDLKLRKLSSKTQVMDIHKQTAKLREQTHVLARLKTKGFLDEVKYIEQTTELTAKINKLQAELKKLTRSDDEDETIDQIEMLIDFFEKKSNPITEFDESTFEGIVEKIVVINQHELEFHLIGGLKFNEKIK

SEQ ID NO: 15438 - protein, 538 aa, synthetic construct
MSTAPNVTVIPAKVQTTENRDKYHQLRVAAYCRVSTEQEEQQNSYQVQIAYYTDLINRKKEWTLAGVFADEGISGTQTKKRTEFNRMIRMCKNKKIDLVITKSISRFARNTVDCLEYVRQLKDLGIGVIFEKENINTLTMTSEFMIALYGSFAQAESESISKNVSWGKEKAYREGKVSFQYKYLLGYKKGADGKPEIVPNEAETVRLIFSLYLDGYTLHNIAQTLMNQKRITATGKSEWSKGEIQRILKNEKYVGDALLQKTFTVDCITHKVVKNNGERPMYLITDHHTPIIDRDTFNRVQQEIARRSSKRKISDHTKTEQGKYSGKYALSELLICGNCGTPYRRRIWTKNGKKQVVWRCISRLEHGKKYCPDSPTIKEENLHRGIIRSINNYYSCRDDIVRILKANIGSVLECQGQEEILSIEKRLKEIDQARTDLVGLIVSGGCDEDKLDSEFAKLYAEEQELSERLEMLKSQNKTSAETQQKLDKITDMIEHEKFELETFDNVLIRKLIECVKVLSKTEILVIFKGGYEVRTEIE

SEQ ID NO: 15439 - protein, 474 aa, synthetic construct
MKNTNKVAIYARVSTAIQAEEGYSIDEQKDKLEAYCKIKDWKIYDFYIDGGFSGSNTKRPELERLIDDAKRKRFDIVLVYKLDRLSRSQKDTLYLIEDVFLKNDVAFISLQENFDTSTPFGKASIGMLSVFAQLEREQIKERMILGKEGRAKKGKTMAWTTIPYGYDYSKETGILSVNPTQALIVKRIFEEYLNGKSVVKIIRDLNKEGHIGRKRPWGETITKYLLKNETYLGIVKYRGQKYDGQHEPIISQELFDLVQLELKKRQIDALERYNNPRPFQAKYMLSGLMKCGYCGASLRIHVTPKDKNGRSYHKYQCANRFKKDKSKCKSGWYSRKELENNVLKQLSRIKLEPQYRKETLAKNDETMKVEEIKEQLKKLNNRLEKLTELYLDEIITRKELDAKNEKLKIEKVFLEEQLESKKKNTINLRQRKLARLLKDFNPEKLSYEDASKIVKSAIKEIVVTKEEMTITLDF

SEQ ID NO: 15440 - protein, 412 aa, synthetic construct
MRTVRRIQPMMTPQKPKLRVAAYARVSDSRLHHSLSTQVSYYSRLIQSHPDWELVGVYYDEGISGKEQSNRQGLQDLLKACDEGKVDRILTKSIARFGRNTVDLLSTVRVLRQKNIGITFEKEGIDSLSSEGELMLTLLASVAQEESHNISENLRWQIKKKFEQGQPHTPQDIYGYRWNGENYVIEPDEAKVVQQVFQWFLDGDNVPMITKKLNEQGVLTRLGNPFTVSSIREFFKQEAYFGRLVLQKTYREPFSRNPKRNNGQKNKYIVEDAHEAIVSKSYFDVVLQEKERRYKVMHQESHMHKGTFRELIECSHCGKIMITRVDSKKVHRTIRYCCRTRDRFGTSSCPSKTLSEKRILATFEDKIGFKPDKNWVTENIKKVIYDSSVGLITVFPIKGRKYELKVRKEHFL

SEQ ID NO: 15441 - protein, 531 aa, synthetic construct
MANVRVIPATAPVLSAQERNSMVKRRVAFYARVSTDSSEQKTSYDAQVDYYTKFIQSHPDWEFICGYTDEGISAVNTKRREGFKQMVADGLAGKFDLLVTKSVSRFARNTVDSLTTVRKLKEVGCEIWFEEQNIYTLDSKGELLITIMSSLAQEESRSISENVTWGQRKRMADGKVSLPYAQFLGYEKGEDGFPKIVPAEAEIVRLIFRLYMEGKTFSAIAKYLERHGIPSPAGKKTWQTGVVQSILTNEKYKGHALLQKSFCTDFLTKKMVKNTGQVQQYYVEDSHPAIIEPDEFDAVQLEIERRKSLGRPTSCTSIFAARLVCADCGGHFGKKVWGSYKGDKTYRKEVWQCNDKYKRLGKPGKGCRTPHITEEEIKARFLAAFNKLMSNRDGLIEDCRLAQSVLCDTTAIDAELAELRSEIEVVTELSRKAIYENARTAVNQTEWAERNNAYLDRHRKASERVDELETVKRERLGKAKIIEGFIKDIESRQLAITEFDEKLWLAVIDTATVGRDGTIAFRFRNGSEVTA

SEQ ID NO: 15442 - protein, 437 aa, synthetic construct
MGRKITKLPQTVQLPSRQRVAAYARVSCGKDEMLHSLAAQVSFYSNLIQGKPEWEYVGVYADEAETGTKDSRPEFQRLIADCRSGRIDLVLTKSISRFARNTVTLLETVRELKNLGVGVFFEEQNLHSLSGDGELMLTILASYAQEESRSVSENCKWRIRKDFKEGKPSNNIRIYGYEYKAGKLTVIPEEAKVVRMIFADYLSGLGKNAIMKKLVRLGVPTKCGGRWSESTVGSILTNEKFIGDMCLQKGFIADHITKHWKPNNGELAKYYVEDSHEAIIDKETFEAVQAEMARRAAKANHPRKLTFSEFSGVITCGRCGAKFRKKVNAIGTKYAKVTWACATYTYRGKHECAAKRIPEDILKEKCAEALGLAEYDPAVFTARVAGITVPDDGVLVFTFKDGSERTVTWENRSRRESWTDEMKQAARERTMGGADNG

SEQ ID NO: 15443 - protein, 529 aa, synthetic construct
MSRYCIYLRKSRADLEAEAHGEGETLSRHKTALLELARRMGITISATYEEIVSGETIAARPQMQRLLSEVGAGEWDGVLVMEIERLARGDTMDQGLVAQTFKYSGTKIITPLKTFDPQNEFDEEYFEFGLFMARREFTTTNRRLVRGREASAKEGKYVGSVPPYGYRKVKIPNDKGFTLEIVEEQAKVVRMIFEWYAEGAEVNDQKKRIGPYTIAVRLNELGIKSAGKKDYWTIYGVQNMLINPVYIGKIRWGYRKVKKTVTPEGMKKKSREFAQNGDYIVVDGLHEPILSEELWNKVQDLIAANPPTPIKYRHKNINPFAGLIFCAKCGHCMSFRRGYGRQPDYIGCYTAGCDNKASRFDLIEQRVLSILNSWVKDYSVDKAQIKHEADLNTELSNAISLAEKEIEALQEQLDNVYSFFERGTYTEKIFKQRSSAIEQQITEIGGRIDRLKAEHQQVLERQNVQAEFVPSIKHLLDIYDTLEPVEKNKWLKQIIDRMVYEKNADGKYHNVDPGDFTIGILPRLPKRGS

SEQ ID NO: 15444 - protein, 452 aa, synthetic construct
MIRMCKKKKIDLIITKSISRFSRNTVDCLQYIRQLKELGIGVIFEKENINTLTMTSEFMIALYGSFAQAESESISKNILWGKEKAYREGKVNFQYKHLLGYKKGADGKPEIVPDEAETVKLIYKLFLDGYSMKGIKNVLESKKLLTSMGNKIWNESFIRSILKNEKYVGDALLQKTYTLDCITHKVVKNYGERPMYLVTDHHEPIIDRDTYNRVQQELARRSSKRKISDKTTTEQGKYSSKYALTELLICGKCGTPYRRTTWTSRGKKQIVWRCISRLEHGRRYCPDSPTIKEEQLHKAIIRAINNYYSCRNDIARILKTNIGTVLECQGQEEIISIEKKLKEIDKARNDLISLIATGGCDEDKLDSKFAKLYEEEQSLSERLVLLKSKNQTSAETQAKLDKIIDMIEHEKFELETFDNVLIRKLIECVKVLNKAEILVIFKGGYEVRTEIE

SEQ ID NO: 15445 - protein, 563 aa, synthetic construct
MPEALNAVIYARYSSDRQTEQSIEGQLRECYAFAKANDIAVIDTYIDRAISGKTDNRPAFQKMIEDSAKRQFQAVIVYRLDRFTRNRYDSAIYKARLKKNGVKVLSAMENLNGSPESIIMESLLEGMAEYYSVELSQKITRGMRENALKGKALGGQRVLGYKVNSDCYFEIDETTAPVVVDIFKLYSSGKTVKEICDILNARGVKTARGGAFNKNSLHTILTNKKYIGIYKTKYGEIVGGIPAIIDKELFEMVALRMEQNKKAPARAKAEINYLLSTKLFCGKCRSAMVGESGTSKTGKKYYYYACVKKKREKACDKSNVKKDWIEDLVIQRTVTDILKDDVIDKIADRLVELQKTEAAESGTMLYLENSLAEIQVSIKNIMTAIEKGIITESTKTRLTELEDEKRNVEIEIAKESIARRIISREQIIYWISSFKDGDITSEKYRQQLIDTFVHAVFVYDDKIVITYNYSGENNTATISDLDLSSPPNIRNPSLRPQSVRGSDFLFLPMIAATVGRQGGQALVVPARLYGFGDFPYGFVRMALMSVIFSPRVKVTALVSWVRR

SEQ ID NO: 15446 - protein, 510 aa, synthetic construct
MIKTCIYLRKSRSDEECEKQGEFETLSRHRSTLLKLAKEQNLDIIEIKEELVSGESISYRPKMIELLDEVKNGLYDSVLVMDIDRLGRGNMQDQGLILETFKKSNTKIITPRKTYDLNNEWDEEYSEFEAFMARKELKLINRRMQRGRVKSVEEGKFIASKPPYGYKFIFDESGKKSMIIDNDKAEVIKMIFDLYVNKHYGGVKISSHLNSLGLKTSTGRTWYPKVVRDILKNKTYAGYVVWNKVDRGKNNSRTRPVNEHIEAKGIHEPIIDESIFIEAQNLFKNNSIPSTKKNTSITNPLAGLIICSECGHKMIAQQSTYKNNELVKFLKCLNCGKNRGSKLSIVEKEIINELENWIASYQVSIKNLESPKNNNLNLESYYSIIKSLDCEYKTLLRQKENLHNLLEQDIYDVDTYLDRSKVLADKIDLNRDNLTQAKKDLKKEKESNFSISDILPQVENVLELYYQSNNMQERNDLLKEVIDYIEYSREPKKRLSKFNIKIYPRLRYNK

SEQ ID NO: 15447 - protein, 523 aa, synthetic construct
MAKTVRVIPASPKIFRSEVTAEPRRRRTAGYARVSTDHEEQASSYEMQMAHYKNYIESRADWDFVGMYSDEGISGTNTKKRDGFNQMIEDALAGKIDLIITKSVSRFARNTVDSLQNVRKLKENGVEIYFEKENIWTFDTRGELLITIMSSLAQEESRSISENTTWGKRKQFAEGKTSVGYSAFLGYDKDFKINEEQAKVVKLIYKLFLGGRSFYAITKELEKRGIKSPSGKDKWYISTVRSILTNEKYRGDALIQKEYTADFLDKTRRKNTGEIPQYYVEEHHEAIIPPDLFDFVQAEIKRREQNGKHSGVSIFANKIKCGCCGGWYGAKVWHSTDKYRRVIYRCNKKYAHKGKPCSTRHLTEEEIKQTFVKALNCLVEVKENVIAELRSLIDSVCQTRELTEERDKVEQELSVLAERLETLIRENARVAQDQTMYLKQENEIRAHYLEKQGNLEKLDEQIAARESKRKTLEAMIQVVCGINGEQTVFDEELWSGLLDHIVVKEDGEVVVVFKGGIEIGVGE

SEQ ID NO: 15448 - protein, 498 aa, synthetic construct
MKIRRIEPQNTALKPKLRVAAYARVSVDTLHHSLAAQVSHYSNLIQNNPAWEYAGVYADEGITGTSTTHRTEFKRLIADCNAGKIDLVLVKSISRFARDTVDCLHTVRRLKEKGIAVRFERENIDSTSEDGELLLTLLASFAQEESRSIGDNIRWGVRRRFAEGIPNGHKAPYGYTWDGEMFRIIPAEGKIVKEIYRRYLAGESAYAIAKRLAGHGIMGRQGRPIEQTTVKDILSNISYTGTMALQKNYISEGHIRKRNKGELPLYLVEGMFEPLVSKADFDKAQEIRKLRAEGAANRNPVLLPFSGMVKCGCCGSGFSRRTAGKYRQWGCNTRERKGKESCDSRPIKEEELVAAVRTVMEKDDFDTAELRRKVSKIVIYGDCVEFHLTNGRIKKTARIYNGQRGSNPFTNKVYCASCGSKCERDTWTKGTKVWACSQPRTKCQLRRLPESELKEAVASFFGNGYEGKIVQNVERIVISDDEVIFQLKEGGAYRWQRQ

SEQ ID NO: 15449 - protein, 500 aa, synthetic construct
MYEEVKNACIYARYSSSNQTEQSIEGQLRVCREFCNRHNIRVVEVYTDRATSASKDIEKRVSFLKMIKDSERGNFDAVIVYKLDRFARSRYDSATYKYRLRKNGVQLISATENISNDPEGIILESVLEGMAEFYSAELSQKIHRGLRESAYKHNSIGGQIPLGYKTEGKKLVIDEETAPIVREAFEMYAEGHGVADICRTFNAKGYKTSKGTRFGKSSFSKIFRNEKYIGVYQFHDYRAEDAIPALIDRKTFNLVQARLKTVGKAPGQFKAKHIYLLSGKLYCGHCGSKMNGNCNTNEYSYYECYGKKNLHKDCHKRNLRKDFIEDIVVRDALSLLTPERIEEIATVAIQTNTYEVETTTDIPAIRGRLHETKLSLENITKAIEGGLAPETLVKRMVELEKEKKVLEGELKKEEKGVAYLDREQVIYWLNQFKDGDIEDEDFRRQLIDLFVNSVTVWDEPDDFFKITIAYNLTSLQEKTYRLPKGGTLSDLALNPPACLC

SEQ ID NO: 15450 - protein, 471 aa, synthetic construct
MSDKIVKKVENLPQLTAVKRTDKLIQRVAAYARVSTDKEEQQTSIVAQKEYYTDYIKNHAGWQFVGVYADEGISGCSTKRREQFKQLMSDCMEGKIDMVLTKSISRFGRNTVDTLTAIRELKSKGIGVYFEKEQVWTMDSKGEFIITLMSSLAQEESRSMSENILWAVRKRYAQGKGSFAYSRVLGLDKGKEKFEIVVNREEAVIVCKIFRMFLQGLTPHTIAIALTAAGIPSPSGCEVWSAATVRRMLSNEKYKGDMLLQKEFTVDFLTKKVKKNEGELPQYYVSNNHEPIIDPWLFDFVQENFTSRKRENKHRYSGVSFFSSKIICAKCGATFGPRPWHSTSYNNSVWQCRNRYSAVKCKTTNIYNKLLFYVLHDVARKKIVAKDIRMAIVEFAAEVVGADKLAAIECYMDDFESMSAWEMLSDADDLSFVIDRVLVKLDRSIEVLWLDGSVDRYEIPRYTPKGGISMI

SEQ ID NO: 15451 - protein, 594 aa, synthetic construct
MPKISRIEPTVPAIKQLKKVAAYARVSMQSERMMHSLSAQVSYYSKLIQKNPDWEYAGVYADDFISGTNTVKRDEFKRMLADCEEGKIDIILTKSISRFARNTVDLLETVRHLKAKGIEVRFEKENINSMSGDGELMLSILASFAQEESRSISENIRWATKKRFEKGIPNGKFKIFGYRWEDDKLVPVPEEAEIVKRIYQNFLDGKSRLETEKEFAAEGITTANGCRWVDSNIKVVLTNITYTGNLLLQKEFIEDPITKRRKKNRGEMPQYFVENTHEPIIDMETFQYVQDEIARRKELGALANKSLNTTCFTGKIKCPHCGVSYMHNKRTDRGNFLEFWCCGSRKKKGGRCEVGGSINHKNMVKACTEVLGLEEFDEEIFLREIDHIDVPKRYVLEFHMTDGRVITKDCPNTGHKDCWTAEYRAKTSAKRRKNGTKCKGSSCFTGKIKCKNCGCNFRRATQPSATAESGKVNYWRCAEHSNGCQTAGLREDVLIPLLADTLGMAEFDEAVFRKTVNYISVLTDKDLEIHKKDGTVTAVIYTPPAPKRLPRTEEQKAHMRSLMKEKWTPERKAEMSERMRQMRKERGENWRKEK

SEQ ID NO: 15452 - protein, 527 aa, synthetic construct
MAQRKVTAIPATINKFTATSVNSRKKRRVAGYARVSTDHEDQVTSYAAQVDYYTNYIKGREDWEFVGIYTDEGISATNTKKRDGFKRMVADALAGKIDLIITKSVSRFARNTVDSLTTIRKLKEHNVECYFEKENIWTFDSKGELLLTIMSSLAQEESRSISENVTWGHRKRFADGKVSFAYSRVLGLEKGPDGNIVVNQEQAKIVKLIFRRFLEGMTPHSIAVELTEMGIKSPGGKDKWNGATVRRMLSNEKYKGDALLQKEFTVDYLQKKTKKNEGEVPQYYVEGNHEAIIEPSVYDLVQVELAKRSKKSEARYSGVSIFSNKIKCAECGSWYGSKVWHSNDKYRRVIYRCNHKFDGNRKCETPHVTEEEIVTAFIKAMNTLITEKDEIIENIQLIRQTVCDVTALEQEQDKLRSEMEIVVELTQSCVAENARTAQNQEDYQKRYDGLVERYEKVKSRYDAIVEAIEEKQANYEKLGIFINTLEKHGEPITEFDAGMWGSMVEYITVDKDKKMTVTFKDGSEVQV

SEQ ID NO: 15453 - protein, 493 aa, synthetic construct
MNTCIYLRKSRADIEAEKEGEFETLHRHKTTLLKIAKERNLNIVEIKEELVSGEHIEHRPRMIELLDEVKNKKYDAVLVMDLDRLGRGNMQDQGLILDTFKQSKTKIITPRKVYNLDDEFDEEYSEFEAFMARKELKLINRRLQRGRAKSIEEGKYISPDAPYGYKFKYDDRGKKSLVIHPEQAKAVKLIFDMYIQGNGATKIANKLNALGYRTNNDIKFKDKAVRDILSNITYTGYLKWKTVDRKNHSRIRPENEQIVSKGNHEAIIDEFTFNKAQSIRKNKFISPNKKGLSNPLAGILVCKRCGHNLVQKLSRDRYYLTCRHCDNRSSYTDYVEKALVDALDNYLNEYKVKIQLQVNTQEIDRLKFELKRLEKELKDAETQKNKLFDFLERGVYDEDTFLERSNVLKVRIDDLKKQISESNLSIISYNNTILANKQIIPNIENVLENYYTCPNAKDRNILLKSVLDKVLYEKGPKAKADGFILEIYPKLPK

SEQ ID NO: 15454 - protein, 530 aa, synthetic construct
MIAAIYSRKSKFTGKGESIENQIQLCMDYAKNLGINEFLVYEDEGFSGKSMDRPKFKEMLKDAKDKKFDYLICYRLDRISRNVSDFSTLIEDLNKLNISFVSIKEQFDTSTPMGRAMMYISSVFAQLERETIAERVRDNMYELARTGRWLGGMPPYGFISTQINYYDENMNQRKMYKLKVDEDTIDIVKLIFDKYLDLRSLSKLYKYMYENGIKGTRGGNLDPSALSLILKNPAYVKADKSVVDYLRKSNIDVIGDIDNIHGILTYAKNTDSPIAAVAKHKGVIDSDKWIEAQRLLNANKSKAPRAGTGSKALLSGLLKCSKCGSNMRITYKNSKSGTIYYYICGTKKSLGVSACDCRNIRSDKAESKVIDELKNKSIKSIMSSYKDSKLENSKNIKNIKTEINSINNQIKEKETYIDNLVMQLAKVTESSASTFIINKLESLNNDLSNLKSQLESLNTMSMENKQVDININMLIDNLNKFNKEIDTSDINKKRLLLSTVVDYMTWDSDTDTIKVNLIGINPSNTIASGK

SEQ ID NO: 15455 - protein, 505 aa, synthetic construct
MKTCIYLRKSRADLELEKNGEFETLTKHRSILLKTAKELNLNIIEIKEELVSGESIDSRPKMLELLNEVENKKYDAVLVMDIDRLGRGDMQDQGLILDTFKTSNTKIITPRKTYDLQDEFDEEYSEFEAFMARKELKLINRRLQRGRIRSVEDGNYIGSAPPFGYDILKKGKERTLVPNSDANAVKLIFDLYVNNSIGARKIAIRLNYLGYKTNTGKEFYPSAVLNILKNKVYCGYVQWRKKEEKKSKDPNKKTDVRTRPIEEWIEAKGKHTPIISEELFNQAQLILKGKYHTPYHLDGITNPLAGIIKCGKCGGSMVYRTYTTQSPHIICYNACGNKSSNFKYVEEKLLYSIKNWLFNYKLEFASNDLDNNKSTKDIHLKLIKSLQSELKTLESQRDKLHDLLERDIYDLDTYMKRNSILSKKIEDLNKSLLKANEDLFLDRQREIAKKNIIPSFEEVLELYPYLEDVTLKNQMLKSILKCAVYIKEKNQSKDNFSLVIHPKID

SEQ ID NO: 15456 - protein, 481 aa, synthetic construct
MNEINKVALYVRVSTTSQMEEGYSIEEQKAKLESYCDIKDWHVYKIYTDGGFSGSTTERPALEQLIKDAQSKLFDTVLVYKLDRLSRSQKDTLYLIEDIFLKNNIEFVSLLENFDTSTPFGRAVIGLLSVFAQLEREQIKERMQLGKLGRAKSGKSMMWAKTSYGYDYDKETGSMTVNEYEALVVKEIYSSYLAGMSITKLRDKINDEYPKKPAWSYRTIRGILANPVYCGLNQFKGQTFQGTHKAIISLEDFEQTQRELAKRQQTAKELLNPRPFQAKYMLSGMAQCGYCHAPLKVILGQKRKDGTRTKRYECYQRHPRSTRGVTVYNDNQKCDSGYYYMDILEHYVLTRIAMLQNDPDKIQELFSDDTSPVIDKQAIQKQIDSLTLKLSKLNDLYLDDRITLDELRTKSADFIKQRNALEEEIKKASNDKQAGQREKIEKLLDASSVLDMSYDNQKVIVRELIDKVQVTSDKIVINWKI

SEQ ID NO: 15457 - protein, 505 aa, synthetic construct
MNTTDLQTGVIYARYSSDKQRDESIEGQIRECTEYAQREGILITKIYTDRALSARTDNRPEFLQMIRDSSNQTFNYVIVYQLDRFSRSREDSAKYKGILRRNGVRVLSAKEHITNEPAGIILESMLEGMAEYYSVELSQKVKRGMTENALKGKMNGSAVPLGYDLTESHHLAVNAHEAKAVRLIYSLYLKQYSLAKIADILHSKGYTTKRGGKISYSVIRNILSNEKYIGVYQWGDIRIENSIPPIIARDVFDEVQRILPTRIKNKGRRSEMYNLCGRLVCGQCGGHYMGSTATSRNGEKHHYYVCTNRRKYHTCSAPNIRRDELEDLVINRTLEILKQPQIIARIVDLVMSGYNHTTQEAKTAIQGIHGKIKAIDTELNNCMTAIKQGFINERLKAEIETLEKERQDLLEQKANHESVISPIKFTSEHIEYFLERMANENPTTKAGRSRILDTFIKNVTIHSDRVEIVFNYKSELPEFSEQSASGSHFSILVGPPGIEPGTDRL

SEQ ID NO: 15458 - protein, 430 aa, synthetic construct
MSTDQDEQLSSYENQVNYYREYILKHEDYELVDIYADEGISATNTKKRDAFNRLIQDCRDGKVDRILVKSISRFARNTLDCIKYVRELKELGIGVTFEKENIDSLDSKGEVLLTILSSLAQDESRSISENSTWGIRKKFERGVVQVNTTNFMGYDKDEKGNLIINHEQAKVVRYIFDRFIEGYSPEFISKELRELEIPGCTGKAKWCPSAIWKMLQNEKYKGDALLQKTYTVDFLTKKRIDNDGQVNQYYIENNHEPILDREKWEIVQLEIARRKKFREQHKLQFYIMQKENNPFTTKVFCAECGSAFGRKNWTTSQGKRKVWQCNNRYRIKGQIGCLNNHIDEEMLEKAVMMAVSILKENRVLLQSKWNKLMETDSSLKQYYSDRLREIVSRNKWDFNGVEMCRILHSITISEKGEISVKFLEGTEVNL

SEQ ID NO: 15459 - protein, 519 aa, synthetic construct
MQTAVIYARYSSDKQTEQSIEGQLYDCYNYAKQHGITVVQEYIDRAMTGKNDDRPAFQQMLHDSAQHKWDSVLVWKLDRFARNTIDSAVNRQILAKNGVKLLSVMESFGDDASGQMMTHIIEAINEYYSADLREKTIRGMRQSAMKAQTTGHIPLGYKVVDKKLVIDDETRIIPETVFRMYAEGERLTDIAEYLNAHGYRNRRGRPFTTNSFYNMLANEKYIGIYKYDDIVIEGGIPQMIPNEVFEAVREKLITNRKRAAKNTAKADYYLSGKLYCGHCGEPMSGLSGTGRNGVKHYYYRCNGVQKKSGCHKKLENKYLIEDEVCRAARSAFEQMDKAETAETIYQMYLQTVRNEYAPAELEKELTECTKQAENVVNAIAQTGGNQLLYDKVRELEERKEQLSSALRLSQAMTDNVPSVEQITVFIDDILATDINTTEGKKAIADIMISKVYVYDDKLTVIFKDKDGKSVDIPLSAVSDSSSADCAPSALGSQVSFKANQSRGQRVMFVKLFILGDRSP

SEQ ID NO: 15460 - protein, 540 aa, synthetic construct
MRNKEIAPALVRVALYIRVSGEEQKIKGLSLEAQQERLEAYARERGWVIVGIYIDAAKTARKNIHKRTEFQRMMDSVKRDEVDILLFARLDRWFRSVADYYKVMEILQAHNCDWKTTDEEYDTTTANGRLYINVKLSIAQNEADIDGERIDVVFDSKIAHGTVVSGSAPFGFRVNEEKRLEVVPEDAVIVQDAFNYFENTVSQRATVRYVRETYGVNWCDATFRRMLKEKLYTGVYDRGGRYNDQFCPAIISRQQFDRVQALLTRNVRSAPSGKVYIFTSILTCAECGHKLVGYKSSDYYYYRCNQHFQRGRCSHNHSAREDVVEQWLFEHLGEELERCQLEWDVEAAKKKASVARTDKAALKRKLTKLKELYVNDLIDIEDYKKDYQIYVSALNQIPEPAQEAPPDFAAVRRLLDNSFRTIYDTLTREEKRTLWRSVIIVCANSLPVSFNSAMTSMLVLLSRLPVGSSANMIEGFAASALAIATLCCWPPDSWLGMENFFSDNPSTSIILSTYAVSIFVPSSSIGSTIFSYTFNIGTRL

SEQ ID NO: 15461 - protein, 573 aa, synthetic construct
MAYNAQNKTGARVAIYVRVSTLHQIDRDSLPMQKQDLLAYAKLMLNTDDCVIFEDAGYSGKNTDRPKFQEMMSQMRAGAFTHLLVWKIDRISRNLLDFATMYNELKTLGVTFVSKNEQFDTSTAMGEAMLKIILVFAELERNMTSERVTATMISRANNGLWNGGRIPYGYDYDYETHEFSVNEEESKVVILMHDMYEQERSLVRVVRELNERGYRSRAGNLWSPVSLLIILRNVFYCGDYRYNMLKEGDRQKVKDESEWVTVENHHVAIIPKDQKERIMATLDSNSKLCKQRNIYKSSKHTHVFGGLIYCGSCGKPLGSTPGNLTRDGWHYSKYTCPTRRKSVTLCTGKSTSDPIIGEFVFNYILNMLNAQNDFDKISSPEELEKLLLIGDTFAYIDHIESNGLNDLFNVLSSGTVNGAVFGKGASLPTKKATVEPEVARLRNEKQKTERALDRLRSLYLYADEAMSEAEYMIQKNKLEETLEDINDQIGMMNTDSWQQSVSDEEFIQRASEFIIAQKLSGRKYVNYKRLAMSVDSEVLKNFVVSIIDSITIQDGLVSNIVFKNGLCHTFIFR

SEQ ID NO: 15462 - protein, 481 aa, synthetic construct
MITTNKVAIYVRVSTTSQAEEGYSIDEQKAKLSSYCDIKDWSVYKIYTDGGFSGSNTDRPALEGLIKDAKKRKFDTVLVYKLDRLSRSQKDTLYLIEDIFIKNNIAFLSLQENFDTSTPFGKAMIGLLSVFAQLEREQIKERMQLGKIGRAKAGKSMMWAITSYGYDYHRETGEVTINPAQALAVKFIFESYLSGRSITKLRDDLNEKYPKHVPWSYRAVRTILDNPVYCGFNQYKGEIYPGNHEPIISKEEYDKTQSELKIRQRTAAENVNPRPFQAKYILSGIAQCGYCGAPLKIMLGVKRKDGSRLKKYECHQRHPRTLRGVTTYNDNKKCDSGFYYKDNLEAYVLEEISKLQDDADYLDKIFSGDNAEAIDRESYKKQIEELSKKLSRLNDLYIDDRITLEELQSKSAEFISMRATLETELENDPALRKNKRKADMRQLLNAEKVFSMDYEKQKVLVRGLINKVQVTAEDIVIKWKI

SEQ ID NO: 15463 - protein, 475 aa, synthetic construct
MKTTNKVAIYVRVSTASQAEEGYSIDEQKSKLEAYCEIKDWKIYDTYIDGGFSGANTQRPELERLISDAKRKKIDIVLVYKLDRLSRSQKDTLFLIEDVFAKNDVAFISLQENFDTSTPFGKASIGMLSVFAQLEREQIKERMMLGKEGRAKNGKSMSWTTIPFGYDYSKETGILTVNPTQALIVKRIFTEYLNGKPVVKIIRDLNAEGHVGRKKPWGETITKYLLKNETYLGKSKYKGKVFEGQHDAIISQELFDLVQLEVERRQITTLEKNNNPRPFRAKYMLSGLMKCGYCGASLGLYVAPKNKNGVSKYKYQCRHRYHKDKAVRCNSGWYSKVELEKRIIKELERLKFDPKYKEETLAKKDETIKVEDIKKQLERINKQVSKLTELYLDEIITRKELDEKNAKIKTERQYLEEQLENQKSNVMSIRKRKLSRLLKDFDIEKLSYEEASKIVKSVIKEIVVTKDDMTITLDF

SEQ ID NO: 15464 - protein, 465 aa, synthetic construct
MKGNAGDTIVKKIDLSPELVRVALYIRVSGEEQKIKGLSLEAQQERLEAYARERGWVIVGIYIDAAKTARKNIHKRTDFQRMMDSVKRDEVDILLFCRLDRWFRSVADYYKIMEVLEAHNCDWKTTDEEYDTTTANGRLYINVKLSIAQNEADIDGERIDVVFDSKISHGTVVSGSAPFGFRVNEEKRLEVVPEDAAIVQDAFNYFETSISQRATVRYIRETYGVNWCDATFRRMLKEKLYTGVYDRGGRFNDHFCPAIISKQQFDRVQALLERNARSVPSGKVYIFTSILTCAECGHKLVGYKSSDYYYYRCNQHFQRGRCSHNHSAREDVVEKWLFEHLAEELERCQLEWEVAAAKKKASVARTDKAALKRKLTKLKELYVNDLIDIEDYKRDYQIYTAALKQIPEPSIEPPPDFAAVRRLLDNDFKTIYENLTREEKRTLWRSVIKEIRIDNYQNITGVVFG

SEQ ID NO: 15465 - protein, 514 aa, synthetic construct
MNITEITSTKKQTAERLRLAPYCRVSSDSTDQLHSFAAQIRYYSDYAKKHPEYQLVDIYADEGITGTEMKKRDELNRLIADCRKGKVDRIIVKSVSRLARNTEELLVLLRMCKEIGVSVYFEEQGIDTEKLNMEMIVTFPGMAAQQESVNISGNLRWSYQKRMQSGDFNCTCPAYGFDLKDGELVINETEAAVIRRIFDLYLQGYGTLAIAKMLNEDGIPRKHGYEKWLPSSINYVLNNERYMGDALLQKSYTTETLPFRKMKNDGRLPQYYVENSNPAIVSRETFQAAQNLLRSRKTERCKRKSYPLTGKLRCPECGRVFRHQVVNGKAHWICSCRSSGATDCQHRHVREDIVYDIFTDMVIKLKTYRGELLGTLIHQMETMQDRTSRNQERIRQIDKEIADLGAKNHIIARLHTSGAMNAADYAMQTSEIGNRLTELRIERRQKLTEDEDDQLLATLKDLNGILDEYEPTVEFDNGLFDEIVESITVDSSEQLTFKLIGGIALTEQIPKKGR

SEQ ID NO: 15466 - protein, 521 aa, synthetic construct
MKTHYRVLRVAAYCRVSTKQEEQLNSYENQVQHYTERIHSENGWTLEGIYADKGISGTSVKNRDEFNRMIRRCKQGKIDMIITKSIARFARNTVDCLKYVRLLNDLGVDVYFEEQGIHSNQPGAEFYITIYGSIAQSESENISANIKWGKAQAAREGKVVFRYKNFLGYRKGDDGQPEIVPEEAETIRFIYDRFLAGDSLKGIAKLLEEKGIKSPTGKAEWQFSTIQSILSNERYKGDAIINKTYITDCISKKVRVNNGERPKYYVENSHPAIIDSSTFGRVQEELARRSGKRKISRKAKTEQGKYSSKYALTELLVCGECKSAYRRCTWTASGKKKIVWRCINRIEYAKKYCHNSPSVEESVLQRAVMAAIMETANQNAEVLRTLKLHIGIGLAGEKSEDNSIDLQIRIAEIDAEFKKMLDRVSTDTIEAFDEETATRLMNEKSRLQQQLDSIADAAQRRENAKSRLDDIYAILDGIKNRPMEYDDRIVRQLLECVVVDSKEQITVIFKGGLKSVQPLNE

SEQ ID NO: 15467 - protein, 455 aa, synthetic construct
MKTVACYCRVSTEEQVKYGFSIQAQKDALTNYCKENDYKYDVYIDEGISASSMKKRKALQEMLEKSVAYDMILFTKLDRLSRNVLDANNINKILQDNHCTMKAIDEDDVDTSTADGMFMFNLKVSLAQREIGKTSERIRFVFKNKREKGEVTSGTPKYGYKIKDKKFVIDSEEAENIRNLYKYFISVNGDHKKTYSYFVKHFPGKGKDALFNYLRETAYIGKYKLYRKNVYLDNYIPPIMDKELFNEVQNLLPRVEKVLKKENIPSIFAGMLYCYYCKSRLVRKVDYRSKNKIINYFCDKQYKYKVGINEKQCQNSKVISDKSVEEYLINNLKYLCKPYISKSIIKTKPKPQKNNIKINSLKNKLSKLKDLYLDDLISKEDYKQDYIKINKEILKLEEEQKEKPQKDFTYLNELINKDIPDIYNTFNIDEKRKFWLKIIDKIYIKEGKIKEVTFL

SEQ ID NO: 15468 - protein, 570 aa, synthetic construct
MENCVIYARFSSHGQNEQSIEAQVRICKEYAENKGFDVVNLYTDKARTGTNDARPAFQKMIADAKTGAFQYILVYMFDRFARNRRDSIIYKEMLKDKYGVKVISALEPIAEDEGGEFYEMFLEWNAEKYSKRLSKRVRDGLDTSIANGTFCGGFIIYGYKLELEPVPGKQGKFIKRVVINEEEAKVIRYVFEQYDKGVSKKQIATDLNAQGIRVKGKPISHKTFDNYMKNTKYTGEFYFGERLCTNMYPPIIDKEMFERVQQRLASNRYFLGGKETAKEPYLLTGKLFCGHCGAEMVAGGGKSKTGKKYYYYECKQKKKKLCTKRIEHKDKLEKFVVRKVIDFLSDEVNLNIVTQDVLKHFNSRTDEREIKSIRKRIADIQEEADAAANAFIEAKSPLLKQRIEKRMQECEVLLADLEKVKARLVIERGQKLTEQDIKAFVNMILQGDVEDLEFRRRLIDNLVYKVYVSDDDTYIYFNIKGGNHIEEITLEDTKAALKETNRVQTQRDPARQTTALAQSRNRKEKPNCFSFSFSSILPRRNAGTDRVTLRFATLFRRALRSLQIPLPPPN

SEQ ID NO: 15469 - protein, 521 aa, synthetic construct
MDLICSLLESFFKRGVMVMKKAFAYARFSTDMQREESIDAQFRAIKEYCSRNKIFLVNTFSDEGISGTTDNRPEFQKMIKLAYEVDFIIVHKLDRFSRNKYDSAIYKRELSQKNVRVISVLENLDDSPESVILESVLEGMSEYFSKNLSREVKKGLYENAYKGKFNGGVPLFGYSIDENKNYIINEYQAIAVRLIFDRFAKGSSYTEIINELDSLGYKTVKGNSFKSTTLYEMLSNERYIGTYIFSKEDYNLRNKKRNSHRYKNREDMIIIENGNPAIIDKKTWNLVKERQKLNSKTSNKSKWNYVLSPFLYCDECGERLNGTTRKNNQGRYYHYYRCVNKNCSQQSIRTDFLEEDFYIAFNEAVFSEENKKTLAKRMKAFLDNKKINIDKEKIENEIKEVEKQINNCVDFIITGSNSISVKNKIEELELKKFNLQNELLKSKVSENKIDINSIIEFINKYDKLEKFSIHEQQIILKFFIEKLKYKKGKLTIRLKLTEQCTTSGRGLVNGTEFPAPCYYGQ

SEQ ID NO: 15470 - protein, 525 aa, synthetic construct
MNANVTIIPPRKIAGNTVDKHKDKPKLRVVAYCRVSTDSEEQATSYDTQVQHYTDYISRNPLWEFAGIYADDGISGTSTKKRVGFNDMIHDCMSGKVDMVITKSISRFARNTIDCLKFVRQLKDKNIPIIFEKENINTMEASGELLLTIMASLAQQESASLSQNVKLGLKFRYQEGKVQINHNWFLGYTKDDEGNLVILEQEAKVVRRIYREYLEGASLRDIAEGLEKDGIKNGAGHLKWHLSNIKTILQNEKYIGDALLQKTITTDFINHVRIKNDGTEPQYYVKDSHASIIPRDIFFKVQEEMLRRANMFSGEENKKRRVYSSKYALSSLCVCAKCGDVYRRIAWNNRGVRSVVWRCCTRWENGPSACDAPTVKEEELQSATVKAINKVFSVPDEVLDTLNNNIREIIAGNNLSELETVDKKIADKQAILLTLLKAKKDYAKIADEIDELKGKKQQLLIEKAGQEDAKRRIREMEDFLKSERHDISEYDEKLVRKYIKKIKVYEDKFSVTFKSEISVDIERAS

SEQ ID NO: 15471 - protein, 499 aa, synthetic construct
MPRITRIDGKKTIEKSKKKVAAYARVSMETDMLHHSLSVQINYYSTLIQNNPDWEYVGVYADEGITGRNTKHRDEFNRLIEDSKNGKIDMILVKSISRFARNTVDLLNTVRELKAVGINVYFERENINSISNEGELLLTLLASFAQEESRSTSENVKWGIRKNFEKGIANSTKAPYGYRWDGEKFRIIKDQAEIVKEIFRRYLDGESAYSIAKNLAEHGVRGQTGNPIEQTSVKLILANPSYTGTRLLQKYYISENQTRKRNKGELPMYLVDDMYEPIISEEVHEKALEIMKKRAESMPNKNPKLTPISGLVKCGVCGGGISRRKSSGRWICNTRERKGKTSCTSRPILEKELKKAAMKIMGEENFSRHEFRNKVEKVIVYGDRIDFILCDGGVSSIKREYSGERGSNPYFCKIYCSNCGDILHRAKWSSEGKVWICSKTCGECSVRHIKENEIFEASKHFLGEDYNGKVVEYIDKIYISNEEAKFIFKDGTVKIWQRK

SEQ ID NO: 15472 - protein, 521 aa, synthetic construct
MAKKVRTIPATINRFNLEPIISIKKRKVAGYARVSTDSEEQATSYESQMAYYKNYIESRSDWEFVGMYSDEGISATNTKRRDGFKKMIVDALDGKVDLIVTKSVSRFARNTVDSLQTVRKLKENGIEVYFEKENIWTLDAKGELLITIMSSLAQEESRSISENTTWGKRKQFADGKGSLGFKHFLGYDKGFVINEEEAKTVKLIYKLYASGLSFYAVAKELTNRGIKTPSGKEKWHVSTVKSILTNEKYKGDALWQKGYISDFLQKTRKENKGEIPQYYVEEHHDPIIQPEQFDFIQAEITRREKYGRGSGLTIFSNKIKCGKCGAWYGLKTWHSNDEYRREIYRCNDKYKVKGRPCKSPHFREEEIKDIFVKALNSMSKVKKTVINEVYDFIDTICATAELEIEITKIEQELNNVISEMESIIRKNARMAQDQEEYLKKENQVRLRYSKLNSKLEELENEIKIKQNRKTMLENFIKTLDGVEGTITEFDENLWSGLLNHILVKDSKHCTVVFKNGMEVDV

SEQ ID NO: 15473 - protein, 523 aa, synthetic construct
MRFFSYGRKSVFSDKSDSIDNQFRMNREYCESKFSGQVDSWQQFSDEDFTGANTSRPDLQRMLSFIKGGFCDVLVVYQLDRLSRDVRDFANIYALLEEHGVMFISIKENIDTTTPIGRAMMYVTVVFAQMERETIAARVTDNMLGLAKKGYWTGGNPPVGYVRKHIVVNGKKHCSIEVDPDGARYVTQIFDTFLAYNCSLQGMETRFKNQGIRTQSGKFFSTTQLHKMLTMPYCVEATPEVYDFYAAKGCIMDPGSPREMWDGSVGVIIYGRSTEKNKKHQAQPPEKWTVCLGKHKPFMPAEKWLAVQSRFTQNKCIKDAKWPVPLLKGVLRCKCGNLMQVSRKKKVDGTCSSWYYCRKRMRQGVDACDMGQIKCDLLDEKVLELFRGITADPALIQKFVKAEAPTDVPDLKAAQARVSACERKIGRLAASLALAEDSAASKYIIAEMERLDVELGALKREASLAEMESHRAAASAKDAKATAAEIAKLIHGLDGFDDKEKNAIARAVIQECTWDGERLFIKL

SEQ ID NO: 15474 - protein, 538 aa, synthetic construct
MKETKLNKTAIYCRLSQDDGMVGDSSSIQTQKMMLEQFVKDNNFVLYDIYVDDGYTGLNYNRPGFQRLLEDIENGKIDIVVTKDLSRLGRDYIMTGYYTEIYFPEHNVRYISVNDNIDTLYDNNDIAPFKNILNDMYAKDISRKVKTAKRQRMYKGYYISCQCPYGYKVNPNNKTQLIVDEEVRENVKLIFELSLMNLGSKRICNELNKRGIPTPGAYKAASGEQRFINLLESTKSSRRNYDVRLWNTDTVNKILKDRVYVGDMVNHKYEVKNYKTKKRTKVPEHERIIVKDTHEPIISRDDFEKVQLMISNRKYENNYTNPNLFKSIVKCKKCGRTLTFCYNKRNKSGIRVYKYACMGRYLGDKDIHESVSIMYKDLEEIVTTRLKSLMESIKNKGDAFIEDIISSIDIDSESKQLDVQKTKIESRLNVITKSIKKLYEDNVCGRITDDNYQILLTDFQKEQKELISKLEDLTTKSNKYKTQFDRIKEFRQVADKYLNFTELTNELVHSLIDHIEIDVNTIDNKKIKEINIIYRFIC

SEQ ID NO: 15475 - protein, 428 aa, synthetic construct
MSTDQDEQLSSYENQVNYYREYILKHEDYELVDIYADEGISATNTKKRDAFNRLIQDCRDGKVDRILVKSISRFARNTLDCIKYVRELKDLGIGVTFEKENIDSLDSKGEVLLTILSSLAQDESRSISENSTWGIRKKFERGVVQVNTTNFMGYDKDEKGNLIINHEQANVVKYIFDRFLEGYSPEFISKELREQEIPGCTGKAKWCPSAIWKMLQNEKYKGDALLQKTYTVDFLTKKRIDNDGQVNQYYIENNHEPILDREKWEIVQLEIARRKKFREQHNLQFYIMQKENNPFTTKVFCAECGSAFGRKNWTTSRGKRKVWQCNNRYKVKGHIGCQNNHIDEEMLEKAFMKAVGLLQKHRSDVVDKWQKLEQGANLLHKHYAKQMYQILDLDKFDEVIMNQVLDHISISETGQIVVTFLEGTEVDL

SEQ ID NO: 15476 - protein, 513 aa, synthetic construct
MLYAIYLRKSRADLEAEAMGQGETLARHRAALLDYAAHHGLEIGAVYEEIISGESIDARPKMKQLLREVEQGRWAGVLCMDIDRLARGNSADQARVSNTFRISGTLIITPSKVYDQSRESDEEYVDFELFMARREYKAISRRIMRGRIASVKEGHFIGSTPPYGYDKVKVEKRRGFTLSPNYESDIVKQIYSMCISGMGCNAIARRLDMMGVTPRKGSSWSSASIQDILKNPVYCGKIRWQYRKEEKSLTDGIVTTRRRENPDCIIAQGLHPALISEEEFEKAQQFLNSRRIPHKKESTELRNPLSGLVYCGMCGSMMTRLGTGSRNHSDTLRCPNRNCGNVSAKLGLVESALVEGVARWLNDCRVNVSRKPAADTAKAERTAAEKVRAELAKLDSQREKIYSFLEQGVYSAGEFRERMESLEKRRTQLSENLRQAEQAVSEAEGNRQLYAQIIPSVERVMDIYAQSTPEEKNRLLKTIISRAEYIKMERNTRGNADRCNFTLNVTPLFPETD

SEQ ID NO: 15477 - protein, 524 aa, synthetic construct
MALLPRKPAKHPAKPKRGKKLEIEEPGVLYGRYSSHNQKDISVEQQFEKGYELAAEYGIRIIDTYADRAVSGRTDKRRDFQRMMTDAAKGKFRYVIAWKSNRMGRNMLEALINEARLQDLGVRVLYVEEDFDDTAAGRFAARSMMNVNQFYSENMAEDIKRGLYDNAANCMVANGHLPYGYKADETLHYAIDEPKAAVIREIFTRVSCGEAFVDIMASLNARGINTSYGRPWGRSSFQKILSNERYRGIYIYGDVRKEGGIPRIISDELYFKVQEVITTKKNPQGRHRVNGDYLLTGKLFCGHCKSPMTGVSGTGRSGNLHYYYVCQKRRTEKTCDKKNVRRDEIELQVAQAIKDYALKDDVIEWIADSTVAYNERKEAESKVGILEDQLAGTEHGIKNIMSAIEQGIITETTKSRLVELESERAAIKANIAAARADIVTVSRDDIISGLEMFRDGDVHDKKYQARLFDTFLVAVYAYDDDLRLVFSFSGNKNTIQIPIESAVNAVENNEAECSFKLCSAPPKK

SEQ ID NO: 15478 - protein, 521 aa, synthetic construct
MNRKITTIQANKQLSHQSKLPSINKKKVAGYARVSTDNEDQTSSYETQMKYYEEYISSRKDWEFVKMYSDEGISGTNTKKRLGFQEMVNDALAGKIDLILTKSVSRFARNTVDSLSTVRKLKDVGVEIYFEKENIWTFDSKGELLITIMSSLAQEESRSISENITWSKRKQAAEGRVTFAYNNVLGFRPKEDGGFEVDKEQAQIVRYIFGQFLSGKNPNQIAKHLTENKIPTPRGKEKWSYSSVRSILTNEKYKGDALLQKYYVADFLNKTQKRNNGELPQYYVENSHEAIIDKEVFDAVQVQLSENKKWYTEKNYFGKIRCGCCGSSYVRHLWHSTDKYKETIYRCKDKYKNEEKCDTPHIRDDEIQRWIVSALNKVIDNRKEIIGNIKLLMKIIKEDRVLDDEIIQLEGKLEDIRTDVEKLIITNSKIAQDQEEYTRKYNKLIEEYKLLEKELEQKNLDLLSKNKRVRELKIFIDSLEKQDELITEYDTKLFNYLIEKIIIYKGKRIEIHLKNGEVISD

SEQ ID NO: 15479 - protein, 476 aa, synthetic construct
MSETTQIGVIYARYSSDKQRDESIDGQIRECMAYAEREGITITNTYIDRALSAKTDDRPEFRQMILDSNKQAFNYVLVYQLDRFSRNRYDSAIYKAKLRKNGIRVISVKENIKDDPSGIILESVLEGMAEYYSAELSQKVMRGMTDNVLQGKWVGTVVPYGYKLSNNRQLEINEHEANVVRKLFDMYLQRHTLSEMASYMNANGHLTHKGKPFNTNSIKAIISNEKYIGVYSWGSERIENAIPPIIDKSIFEKAQHKRNLRAKKKGNRSELYQLCGKLECGRCGGNYVGSTGTSKTGALHHYYVCSNRRRKNACQAQNIRRDDLDDIVISQTLAILNKANVVNKIAKYAASSGKNLQSETVAQIDIINAHIRDLKKSLDNYMTAIANGFISDVLKHRIEATEQELKDQIEIKTNLENTIIPVELTEDHIRFFLLKMAKENPSTLRGRARIIEAFVHHVTIYEDHIEIVFNYKNEKF

SEQ ID NO: 15480 - protein, 559 aa, synthetic construct
MSKTVAIYVRVSTGKQADRDSIPFQIQECSNYVKHFLKTENFEVFKDAGRSGKNTHRPEYQRMIEKVKSGMISHVVVYKIDRISRNLVDFSIMYNDFKEHKVAFISLNEQFDTSSAIGEAVLKIILVFAELERKLTGERVRDIMMNRALEGKWNGARVPYGWDWDSKKQCPVHSDTEAEYARMMYRLYDESHSTCVVRDYCNAHDIPTKRGGEWTSKTVADFLRNPMNVGDYRYNYRKSARGKRNDPSEVIYVKDVFPPLIDRELYERVTHQMDLNTFGLGKDGRKVVSKKTHVFGGLVVCGLCGAFYHSDADVVRADGFRPSNYRCGAHNKKIHCKAKGSSDVKLGPFIFNYISNLVKASKSKKLLHSVSDLEQILLTGPEFEQVAGIADIGLDVTFDTIMHGFKPKRYTAAPYTVIRSGDSDALTAKRDKTIRALERLKKLFLFEDDAMSEKEYLMSKRELECTLSDIENELSALETDTADTKYDDMSFISTASGFLIAHQISSGEHINYRELACAVDAKVLKDFVNSVIERIVLLDGRVASIEFKNGLVHEFLYRE

SEQ ID NO: 15481 - protein, 591 aa, synthetic construct
MPKITRITPTVAVLKAKKRVAAYARVSMETDRLNHSLSAQISYYSALIQKNPEWVYAGVFTDNGISGTGIKKREGFKRMIEAADNGEIDIILTKSIQRFARNTVDLLETVRHLKNLGVEVRFEKENINSMNGDGELLLSILGSFAQEESVSISNNVKWGTRKRFEKGIPNGRFRIYGYRWEGERLVVIPDEAAVVKRIFQNFLDGKSRLETEREFAAEGITTRAGCRWVDSNIKVVLTNIHYTGCLLLQKYHAENELTHRQIKNCGELPQYLVENSHEAIIDKETFDYVQSEIARRKEMGPRANKSLNLTCFSGKLKCPFCGISYAHNKRTDRGFTEYWACGSRKKKGGRCPVGGSINHKNLKKACAAVLGLDEFDEDAFIDKVDFINVPERYVLEFHLKDGSIVTKECPNTGHRDCWTPGYRAKTSETRRKKPNCKGSSVMTGKIKCAGCGCNFRRATQPSSASESGKVYYWRCAERNECGTVGLREDLLKPFIAQVLGIATFDDGEFDRQIDHIDVLSATEIVFHFKDGSAVSSTWELPKRAGRRWTDAQREKFKKSIKSSYTPEVRQRMSEHMKQLRKERGKSWRKEK

SEQ ID NO: 15482 - protein, 526 aa, synthetic construct
MAQRKVTAIPATISRYTATPINSTKKRRVAGYARVSTDHEDQSTSYEAQVDYYTSYIKSRDDWEFVAIYTDEGISATSTKKREGFKAMIADALAGKIDLIVTKSVSRFARNTVDSLTTVRKLKDEGIEIYFEKENIWTLDSKGELLITIMSSLAQEESRSISENVTWGQRKRMADGKVSFAYSRFLGLDKDKETGKIVVNPEQAETVRLIFHLFLEGMTPHSIAADLTSRGIKTPAGKDVWNQQTVRRMLSNEKYKGDALLQKEFTVDFLQKKMKKNEGEIPQYYVEGNHEAIISPAVFDMVQAEIAKRTKSGSRYSGVSIFSNKIKCADCGGWYGSKVWHSTDRYRRVIYRCNRKYNGKKCETPHVTEEEVKAAFISAYNQLVTEKKEIIANAEIIRKTLCVTDALQEEKGKLEEEMALLVEMTQNIVAENARVAQDQEEYRKRYDGIVRRYDDAKTRYDAVVAAIFAKEAQSERLTDFIKVLKTQDGTISEFDGSLWGGMVEFITVGRNKEVAVTFRDGTEIKA

SEQ ID NO: 15483 - protein, 663 aa, synthetic construct
MSTTPPANPLAAMAADLTPKRAISYIRVSTKGQAARGDAAEGFSIPAQREANKNKAAALGAFIVKEFIDRGESARNAKRPELQKMLAYITEHNDIDYVIVHKLDRLARNRADDVDINRVLEQHNVRLVSTSENIDQTPGGMLLHGIMSSIAEFYSRNLAAEVSKGMSEKAKHGGTIGKAPLGYVNKQGKNEHGKRHSWVEVDPVRGPLIAEAFREYATDTWTAKHLTEHLTARGLTQPATSRYPERPMTQSRLIDVLHNPYYRGVVSYQGVEYPGRHKALVDDETWYKVQTVLSAHYNGERRRVHHHHLKTTVRCGQCGSRLIIQNTKNKRGVVYPYFVCSYRQRQRDGCRFKAVLIDEVEAKVAELYRTVCITPDQRKRIAALAQRELERIYASRAEHVRQLEQQSRSLLHKRQKLLDAHYADAIPLDLLKQEQDQIVAQLASIEQQRAALSLESHVVQTHLDYVLDLLEDCFSLYMQATPSMKKLLNGVFFTAVAINPQDDASGVSRTATAHLQPVISVLRQFDGEGATSEHGGVPHMRLDDEISVATTNNVTQAGSEGMAHTDGDDWGKENTTWVSTASGVHDNACLSKGIVVRLGRLELPRPKALEPKSSASANSATGASGGYLTVACGFVKVPARAQLTPTTSQARYADTQDADLPSE

SEQ ID NO: 15484 - protein, 524 aa, synthetic construct
MSDIAVIYARVSSKEQETGGYSLPAQLDFLKEYAKSKGLEVVKVFTESMTAKEAGRIEFNNMLKFAKKQRYGCHVIVEKNDRLLRNEDDEALIINLTVRQGLIDLHLVKDHLILNRYSTPHEIFMFHMMCGMSSMYPRNLSGEIKKGLDKKADLGDYPAKAPIGYKNVRSSKKRSTIEIDPTNAGYVSKIFELYATGMYSYKTLAERISLDGFYPKNKPCSPKLVEKIIINPFYMGEFEFNGKRYHEANHTPIITKELFYTCKKIRERHDNPRKITHDFLYSGLITCSHCGCQLTAEIKKGKYIYYHCTGNKGGTCKRNKYLKEEYIDEHIRTLLEKIQPSKEDAKAIVEKFKEIVNANFDYDKKSIEEIGKKISLLKNRLNKLYIDRLDGMITDEFYREKKNEFQGELDELELKHDNFLAETDTLVDMATQIIELCKNAYNHYLRSDNENKRLLLKILCSNFLYDGSNLVIKLKSTVEPMLLGANFNNGGLFASLFELSGKRKIYLDTKNCVFFATFGLKNIA

SEQ ID NO: 15485 - protein, 492 aa, synthetic construct
MNIQEIPTTRKEKPRVCAYVRVSTDSEAQEDSFAFQSNYWQKRFASDESVEYVGLFSDEGIGGAFMKKRDGLKRMFQKVRNGEIDRIYTKSVSRFARNKVELMEIVREFRDIGVEIIFESENIHTLDPKCGLILTVMASLAEEELISMSQNQKWAARKRFANGSVELTQILGYDMIDGRLVINEKEAVIVRRIFELYLQGNSFISICHILENEGYTPMHCGRWSKSTIMGMLRNEKYCGDSLMQKTYSTMKVQKYNYGELPKYYVQDNHEPIVSREDYQKAQEMMVARSNKYRPMGSPTALYPLSGKLICGECGTSFKRKTSAHGTPYMCIKWSCRKKDVYGVKECASHDIKDEVVTRLLIEAYNESLDANNDVNGITEQEEVLRKLIANEQELRQLRAKGYISESKCREETDKILIKIKEQETLIKNLRMRDMVKGKYKKSDELTEQMAEFLVKATVKDWTITFEFQNGYKTTKEYTNGRAGNVNGKLCKH

SEQ ID NO: 15486 - protein, 544 aa, synthetic construct
MSMENCANTKPKITIIPAKTRVERLDPLSIAMGQKPKIRVAAYARVSTDHEEQESSYEAQVDHFTKLIASHDDWTMVDIYADPGLSGKNTKRVQFKRMIKDCEDGKIDLIITKSVSRFARNTLDCVQTARKLKADGIGIIFEKENLDTLQERSEFVLTIMASLAEEESRSISNNIRWSVKKKFQEGKVILNTKHFLGYTRDKRGTVLKIVPEEAITVRRIYAEFLDGKSLKEIAEGLERDGIASPSGRETWHPSTVKSILQNEKYKGDCHLQKTYLPDFLSPRRIKNEGFAQSWYVEDSHAAIISKETFDMVQQEFQNRQSLRSTGETGCGKFSGKYPFSGMIVCGECGETYRRHQQYNKYKKYYIWVCKRHENTGAEYCKSRPIKEEALEKAFVRALNELIGDKERILEKLQSATVSEITDSCATAINEVNAEIEKLQEQMMELLMKRNNGEITDKEYEQQSQQVGMKIDQQLMRKEEILSEQGKVQLASYRIEEVTKLLQTGKILEEFDRVMFKSLVRKITVLSNKEIEIEFECGITVRETL

SEQ ID NO: 15487 - protein, 478 aa, synthetic construct
MNKVALYVRVSTTSQLEEGYSIEEQKAKLESYCDIKDWHVYKVYTDGGFSGSTTERPALEQLVQDAQNKLFDTVLVYKLDRLSRSQKDTLYLIEDVFLKNNIEFVSLLENFDTSTPFGRAVIGLLSVFAQLEREQIKERMQLGKLGRAKSGKSMMWGRTSYGYDYNKDTGSMTINEYEALAIKEIFTSYLAGMSITKLRDKMNEEYPKQPDWSYRTIRGILANPVYCGLNQYKGQTFQGTHKAIISLDDFEQTQRELAKRQQTAKELLNPRPFKAKYMLSGLAQCGYCHAPLKVILGQKRKDGTRFKRYECYQRHPRKTKGVTVYNDNKKCDSGYYDMELLEHYVLTRIAMLQNDPEKIKEIFSESTNPVIDKLAIQKQIDSLSLKLSKLNDLYLDDRITLDELRSKSDDFIKRRTAMEEEMKKASTDKQAGKIKKIEKLLGASNVFEMSYDNQKVIVKELIDKVQVTSDKIVINWRI

SEQ ID NO: 15488 - protein, 530 aa, synthetic construct
MLLPRKRGELMKKITKIGTDTNTGTKTKIRVAAYCRVSTDSDEQLISLDAQKAHYESYIRLNDEWEYAGLYYDEGISGTKKELRNGLQSMLSDCEDGLIDLIVTKSISRFARNTTDCLEMVRRFTELGITIIFEKENINTSAMESELMLSILASLAESESVSISENSKWSVRKRYEKGTFKIGYPPYGYKNVDGEMVIVPEQAEIVKEIFAACLAGQGANTIAKMLNERSVETKKGGRWTGTTINGILKNEKYTGDVIFQKTYTDSSFHRHVNYGERDRFYCENHHEPIISHEDFENTRIVLGRRGKEKGNGSNTSRYQNRYTLSGKIKCGCCGDKFKRRKHYKPSGNYIAWSCSTHLENRNACSMLYIEDEALKTAFLTMVNKLVFGHKDILKPLMRSLRGIDDKERLLQIDAIERQIEENADRTQTAANLVAQGLLDAPIYNTEINKLMAEEEELKANKDQLLNDIGGDKNKVRELQNLMEFTGKGKMFTEFDDNLFLTIVDEIIVYSREEVNFKLKCGLNLKERLVM

SEQ ID NO: 15489 - protein, 521 aa, synthetic construct
MGKTITMIPAKRRVGNTVKEEDRPKLRVAAYCRVSTDSDEQATSYDAQVEHYTDYIQKNPEWEFAGIFSDDGISGTYTKKRDGFNHMIDECMDGKIDMIITKSISRFARNTLDCLKFIRQLKEKNIPVYFEKENINTMDAKGEVLLTIMASLAQQESQSLSQNVKLGIQYRYQQGLVQVNHNRFIGYTKDNDGQLIIEPEGAKVVKRIYREYLEGSSLLEIGRGLEEDGILTGAGKGKWRPETIYKILHNEKYMGDALLQKTYTINFLNKTRIKNKGLVPQYYVENNHEAIIPRDIFMRVQEEMVRRANLHSGKNRKKRVYSSKYALSSIVYCSKCGEIYRRIQWQAHGKKYIVWRCCNRVENGPGACDAGAIREVDLQSIVIKAINKAFGKRESMKAALVANIESVITDVGGISIDEIDLRLEELQKELLKVANSKVNYDEMADEIFKLRELKQSAMVDSAEREGLKLRIDEMNKFLDEQTEVITEYDEQLTRRLIEKITVYESYFTVEFKSGASVDIYK

SEQ ID NO: 15490 - protein, 456 aa, synthetic construct
MDNIKRAALYIRVSHEEQVKDGFSLDAQKDNLIKYAKENNYKIIHIYADEGISARKSYTKRKEFMRLIEDVKSNKIDIILFIKLDRWFRNVAEYHKIQEILEKYNVGWKATTENYDTTTANGRLYLNIRLAVAQDEADRTSERIKFVFEKKIQDGEYISGNSAPGYKVENKRLVIDEEEAKVVRFVFETYLKLKSKRATVFATSNEFQRNFTQKVIYRMLKNEKYIGKYRNNSNYCEPIVSKELFDNVQKTLKERRMRYSYSNEKNSDYIFSGIVHCPLCGACLTGNKSSKVNKKGEKKYSKYYRCPHYLHEKSCKNSRVVSEKKLEFFLIENILQKLKDYKVEYQLKQKSKKNPNLDNKKNIENKIKRLQTLYVNELIELEEYKKQYSKLKGDLAKFDIVEEKEKDFTEIDNILNSDFESIYNKLTPLNKRIFWQSIIEKITPTEDRNIFNIFLK

SEQ ID NO: 15491 - protein, 565 aa, synthetic construct
MHNSSDKNINRVAIYIRVSTNHQIDRDSLPMQRQDLISYAKLLLNTEQYVIFEDAGYSGKNTDRPKFQEMMKQLRNGLFTHLLVWKIDRISRNLLDFATMYQELKELGVTFISKNEQFDTSTAIGEAMLKIILIFAELERNMTSERVTATMISRASNGLWNGGRVPYGYNYDPDKKEFKINPAEAEVVKLIHDKYEELHSLIRESRMLNERGIITRSGNLWNPTTLQIILHNTFYCGDYQYNVCKEGNRQKQKNKSEWVKIHNHHEAIISHEQKERIIALLDCNRRLNKKVVKSEKYVHIFSGLLYCGNCNKPMGASPSSKINGYQYSRYTCPTKRQLQCDSKSVSDQTVGEFVFNYILNLINSQRDFKSISSKNELQKHLLKGSSFNDIKSIDSDGLNDLYNVLLSGNINQDIYSNDVSFKKEDSSNLSRTKLLSEKQKLERALDRLTNLYLYSEQTLSEQNFLSHKMQIDDKLNEINDQLSFMESDDWQQSISDAEFIVKTSSFIISKKLDGRNYINYKRLATSIDKEVLKSFVNSVIDSIIISNGSIETITFKNGLSHTFIR

SEQ ID NO: 15492 - protein, 416 aa, synthetic construct
MAKIKQITRLPVSRPKLVKVAAYARVSTSTCRQLSSISAQVSYYSRLIQSTPGWDYAGVFIDEGTTGTKMRGRQGLADLMALAHDGGVDIVLCKSISRLARNTVDLLQIVRKLKNLNVSIRFERENIDTSTNDGELLLTLLASFAQEESASLSANVKWAIRNRYKDGGTNSFFIYGYVWTQGKFVINHDEAQIVQRLFSNYLEGISPEKTANQLNSEGLRSRGGGLFHGSVLRRMLENERYKGCQLLQKTFNKTIRSTSRTPNDGVLTKYWVEQALPVIIEPTLFDKVQQEIARRRQIGPAATPSLNTGVFTGRIRCGTCGRNYQRKTRRYASGNYYHYWRCWSACKGQGNPCGGHNLRETMLQSICATTLNLEEFDEHAVENHIVIIEAFPDHLMIHLRDARSIKIALDKQGRLT

SEQ ID NO: 15493 - protein, 428 aa, synthetic construct
MSTDQDEQLSSYENQVNYYREYILKHEDYELVDIYADEGISATNTKKRDAFNRLIQDCRDGKVDRILVKSISRFARNTLDCIKYVRELKELGIGVTFEKENIDSLDSKGEVLLTILSSLAQDESRSISENSTWGIRKKFERGVVQVNTTNFMGYDKDEKGNLIINHEQANIVRYIFDRFLEGYSPEFISKELREQEIPGCTGKAKWCPSAIWKMLQNEKYKGDALLQKTYTVDFLTKKRIDNDGQVNQYYIENNHEPILDREKWEIVQLEIARRKKFREQHKLQFYIMQKENNPFTTKVFCAECGSAFGRKNWTTSRGKRKVWQCNNRYRIKGQIGCLNNHIDEEMLEKAFMKAVGLLKEHRSDVVAKWQKLEHGANLLHKHYAKQMYQILDLDKFDGVIMNQVLDHISISEAGQIVVTFLEGTEVDL

SEQ ID NO: 15494 - protein, 413 aa, synthetic construct
MNIRKIEAKNNKRKKRICAYVRVSTTNGSQLDSLENQKLYFEKLYAERDDVEFLGVFCDKGISGSKYDRPDFQTMLDACRKGQIDVIHTKSISRFARDLINVLEISRELKTLGIDIFFEEQNIHTLSNEGEVVLTVLASLAEEELQSMSGNQRWSFRRKFQKGELLINAKRFLGYDLNEKGELVINKAEAQIVRTIFYSYLEGMGTHRIAKKLNEGKVPTVAGKKWYDSTIRNILKNEKYKGSLLLQKYFHDGVNGPKKLNQGQVEQYYIEDNHEGIVSKEIWERVQVKMKSRSRIQGTNKTYKFSRMLKCQYCGSTLKRQVSYKKKIVWCCSKYIKEGKNSCKGMRVPERDIEDWKLSSPVIVLERIEDGEKHYGYTGQKATANGHISNSEKDQSSRLLSSVYRPRRTAIKL

SEQ ID NO: 15495 - protein, 539 aa, synthetic construct
MYQSNNHSTYAALYTRFSRDEPDGESNSIANQKKLLLNYAHSRGIVNTKFFVDDGFTGTNFNRPDFKAMIAECESKKISTIIVKDMSRLGRNYLMVGYYTEIYFPENNIHFIAINDDVDSVKGDNEFTPFRNIMNEWYVKDTSKKVKSVIHNKGMSGERICNNVIYGYKHNPDNPKEWIVDEEAAQNVRTIFQLFLNGKGTSQIAKYLHSEKILVPSVYAREHGKISARATPADPCLWDSKTIREMLKRQEYVGDTVNFKTKKVSYKSKKKIYLDKSEYVIFPDTQEPIIDRDTYERVQKIMESRKKVPIVREPDPLGGYIFCADCGSRMYITRSTVFPKKNCYHCGRYKRSSELCSSHYIRECVINQLILNELQKVFSIVKNDRERFLNVAIQSYANRTSYDVKKLRKDKQLCEQRIQELDVLIKKIFEQSVLGTLSKERLATLAAGYESEQAEIKNKLSAISKEIEITDSKQLNADRFIAIVDKYTNIDSLTPEIMSEFIDKVLVHKPIYDGNNKRHQTIEIYFNGIGAFDYDSCNS

SEQ ID NO: 15496 - protein, 500 aa, synthetic construct
MELSKGVIYARYSSDKQRDESIEGQIRECKAYAEREGIVITHIYTDKALSARTDHRPEFRQMIDDAKKHNFEYVIVYQLDRFSRSREDSAVYKSILKRNGVKVVSAKENISSDPAGIILESVLEGMAEYYSAELAQKVKRGMTDNALKGKMNGTPTPLGYDKTDDNSLIINKHEAKIVERIFDMYLKGHSIPSICSFLNSKGYLSKKGGKFSYAVIRRILSNEKYIGIMKWNDIIVEDAIPSIISKEIFDKVQSANSRRIKLKASRSEFYNLCGKLYCGKCNAHYVGSTATSRSGEKHYYYVCNNRRKHHTCDAQNLKREIVEDIVINKTLEILNQPNTIEQLAELAVKANKDMMSTSKLELQAVNDRIKQLQSELDNYMKAIAKGYISDTLQAQIEKAEAELQDQMTRRANHEIANNQIHLTAEHIEFFLTKMAKENPTTKQGRASIIDTFIKQATIFDDRVEIVFNYSNDLPQFKEQVIECSHSCDMVDHQGFEPWTP

SEQ ID NO: 15497 - protein, 500 aa, synthetic construct
MNSLKAVIYARYSSDKQRDESIEGQIRECRAFAEREGIIITNIYTDKALSARTDNRPEFLQMIEDSKKHLFDYVLVYQLDRFSRSREDSAVYKAILKKNGVKVVSAKENITNDPAGIILESVLEGMAEYYSAELSQKVRRGMTDNALQGKVNGTPTPLGYDKTEDKHLIINEREARIVRTIFDLYIKGHSIPSICSHLNSKGYLSKHGSKFSYAVVRRILSNEKYIGTMRWNDIVIEDAIPSIISKEIFDKVQQQKGRRIKKKGARSEFYNLCGKLYCGKCGGHYTGNTATSHTGAKHHYYSCTNRRKHKTCTGKNIKRDILEDIIINQTIHILNEPNTIAQLAKMATEASSTMLGDAELELKRIDVRIKELQSELENYMKAIAKGFISDTLQAQIENAEAELQDHMTRKANHEIKAHPIKLTAEHIEFFLYKMAKENPTTNTGRARILDTFIHSATIYDDRVEITFNYNNDLPQFKGQVIDGSFSVDVVDHQGFEPWTP

SEQ ID NO: 15498 - protein, 504 aa, synthetic construct
MTKDLQTGVIYARYSSDKQRDESIEGQIRECTEYAQREGILITKIYTDRALSARTDNRPEFLQMIRDSAHQSFNYVIVYQLDRFSRSREDSAKYKGILRCNGVRVLSAKEHITAEPAGIILESMLEGMAEYYSVELSQKVKRGMTENALKGKMNGSAVPLGYDLTESHHLAVNAHEAKAVRLIYDLYIKQHSIAKISDILHSKGYLTKRGRKISPSVIKTILSNEKYIGVYSWGDIRIEDSIPPIISRKVFDEVQTIMPTRIKNKGRRSEMYNLCGKLICGECGGHYAGSTATSRNKEKHHYYVCTNRRKYHTCTAPNIRRDELEDLVINRTLEILNQPSNIARIVDLVMSGYNNTTQEAKVAIQGINNKIKAIDTELNNCMNAIKQGFITERLKDEIENLESERNNLLEQKANHESALIPIKFTADHIEYFLERMAKENPTTKAGRSRILDTFIKSVTIYSDRVEIVFNYKNELPAFNTQCATGSHFKVLVGPPGFEPGTDRL

SEQ ID NO: 15499 - protein, 521 aa, synthetic construct
MNRKITTIQANKQLSHQSKLPSIKKKKVAGYARVSTDNEDQTSSYETQMKYYEEYISSRKDWEFVKMYSDEGISGTNTKKRLGFQEMVNDALVGKIDLILTKSVSRFARNTVDSLSTVRKLKDVGVEIYFEKENIWTFDSKGELLITIMSSLAQEESRSISENITWSKRKQAAEGKVTFPYNNVLGFKPKEDGGFEVDKEQAKIVRYIFGQFLSGKNPNQIAKHLTENKIPTPRGKEKWSYSSVRSILTNEKYKGDALLQKYYVADFLNKTQKRNNGELPQYYVENSHEAIIDKEVFDAVQVQLSENKKWYTEKNYFGKIRCGCCGSSYVRHLWHSTDKYKEIIYRCKDKYKNEEKCDTPHIRDDEIQRWIVSALNKVIDNRKEIIGNIKLLMKMIKEDRGLDDAIIQLEENLENIRADVEKLIITNSKIAQDQEEYTRKYNKLIEDYKLLEKELEQKNLELLNKNKRVRELKIFIDSLEKQDELLTEYDTKLFNYLVEKIIIHKEKRVEIHFKNGEVISI

SEQ ID NO: 15500 - protein, 426 aa, synthetic construct
MRVKVINKQSASVIQKKRVCAYARVSTDSRRQEDSLENQMETYKRLITRNPEYEFIGVYADQGISGYCENRPQFQRMMEKARAGEIDLIITKSISRFARNTVTVLKFARELKELGVGIFFEEQNINTLSGDGEMMLAVLASFAQEESRSMSENNKWSIRKKFERGEVMITTSRFLGYDKNEYGHLIVNRKEAEIVSLTFDLYLMNVGSSRIGELLDYLGVKTVTGTTWESGTINGMLCNEKYKGDFHLQKYYTPENKRNRTRKNNGEVQSYYISENHKPIVSPEVWEKVQEVREQRKRDRNIGQDNTMKYQNRYPLSGMLICPYCGKTLRRRQVYKKKIQWLCSTYIEKGVKECKGIRIDDTELQGLNITEQKVVEEVIQNGKKHYCYTSKADFDCGIRNRANSTETENGSVLPSVNRPRRTVIKL

SEQ ID NO: 15501 - protein, 438 aa, synthetic construct
MSTDQEEQLLSYENQVNYYTNYISENPLYEYAGTYADEGISGTNTKKRDEFNRMIADCRAGKIDMIITKSISRFARNTLDCLNYVREMKDLGIGIIFEKENINTLDAKGEVLLTILSSLAQDESRSISENCTWGIRRRFETGKHKMSTKRFLGYDADENGKLVINRLQKPIVVRLYQEFLDGKTTDYIKRIFEKEGIKNWDGGTKWQATTLMSMLENEKYKGDALLQKSYTVDFLTKKRAPNKGEIQMFYVEDDHDAIISKRIWECVQLEIKRRKKYLEEHGTNSYSHRTESNPFASKIVCGECNKIFARKGWRSSTGVDRKVWQCSERYKVKGVIGCANRHVEEETLIKAYLVAWNALVENQADFMEQWTEQLQSENLLEGYRAEKFIEYTDGAEPLNEMDTDFMLKTLDHIKVFEDGTLLVVFLDGTEIECKNEEK

SEQ ID NO: 15502 - protein, 522 aa, synthetic construct
MGNVMLIPARRQVGNNARKQEEEKPKLRVAAYCRVSTDSDEQATSYEAQVEHYTEYIQKNPDWEFAGIYADDGISGTNTKKREEFNHMIDDCKAGTIDMIITKSISRFARNTLDCLKYIRQLKDMNIPVLFEKESINTMDAKGEVLITIMASLAQQESQSLSQNVKLGLQYRYQQGKVQINHNRFLGYTKDAEGNLIIDPEQAEIVKRIYREYLEGLSMDKIAAGLDRDGILTGAGGKRWHASTINKILRNEKYIGDALLQKTYTTDFLNKTRVKNNGLVPQYYVEGNHEAIIPKDIYLQVQEELVRRRVVKTSANGKKRSYSCNHCFSQIVICGECGEMFRRLHWNNRGVKSIVWRCISRLESTGLECHARTINELVLQDAVVKAINQMLGDKSSYQAQLQLNIASVIRASQATPVEHIDEKLIALQQELIQKAQSKEAYDEIADEIFRLRELRQQTTVDTAARDEQIKRINDLQDYIAQQTTHLTEFDESLVRRWIKQITIWNDHITVELKSGVSIDVDA

SEQ ID NO: 15503 - protein, 581 aa, synthetic construct
MPEKIINCAIYTRKSTEEGLEQDFNSLDNQYEFCTNYLKSLNDPALQLLPARYDDGGYSGGSLNRPALQRLLADIQCGLVNRVIIYKIDRLTREIRDFFKLLDVFEKYNVEFVSVKENQYYNTTTAIGRLMVNMFLVFAQFERENAGDRIRDKIATSKAKGMWMGGCPPYGYDIGDRCLVINEAEAQNVRFIYQTFCNTHSLADTTDALNSGGIRTKRYTTRQGRTFGGRKFSVKTVQRILQNPLYKGMVAHRGKQYPGQHAAIIDAVQFDMVQAVFAAHKEKRETRRPKMPSSGGERETATLTGLIFCGCCGSAMTPSYCCKGDIRYHYYRCYRRASKLEDKCPINQIRTSEIDRVVMEQVLAILKSRDFFVQYISHHHEFDVSTAFALFNSLDDVWNSLFETEKRRILRELLAKVTIYKDKIVLDVKKAGLAGVFAELSQNNRLAEVEYKENETFQISVAYRATRLANGAKIIVPATAKEESRFNGSLRLARQIAKGFAWRKMMESGLSLQELTASAKTNERDIRFAIRLSMIDPAIVESVLSGKSPEFLTYAFMKKHPIPLLWSDQRKLYGFEERKQQ

SEQ ID NO: 15504 - protein, 509 aa, synthetic construct
MNVVIYARFSSHSQTEQSIEGQLKVCYEYAESNHYTVVGEYIDRAISGTTDNRAEFQRMISDSDKHTFEGVLVYQLDSFARNRYDSAINKAKLKKNGVRVLSAKENIADDASGILVEGVLESMAEYYSVELSQKIHRGMAINAEKCLSNGSNPGMGFKVDAERRFHVDEEEAAIVREIYERYASGETKAEIIRDLKRRRVKTSLGKEFSPNSLSHLLSNKRYIGVYLYKGKETPGGMPRILDDDLFYRVQSMMNKNKNAPARTHGEGEYLLTTKLFCGHCKEMMVGYGGTSKTGRQYHYYMCKNARRKKCGKKIVSKSYIEDRVVNECLKMLTEEKIRFIAKKVAEECAKSPDNLTAKALKKAIREADTAIENLWKAIEQGQAVEMLTERLNKRMAEKAELEAQLAIEENKKITLTEAQILAFLDYVCEMPADDVNKCRAIINIFVHSIYLYDDHFTLIINASKKPLSIDNIPLDDIETAFEGETGALEGCSSLSTPAPPTRSRLHMQS

SEQ ID NO: 15505 - protein, 481 aa, synthetic construct
MITTNKVAIYVRVSTTSQVEEGYSIDEQKAKLSSYCDIKDWNVYKIYTDGGFSGANTDRPALESLIKDAKKRKFDTVLVYKLDRLSRSQKDTLYLIEDIFIKNNIAFLSLQENFDTSTPFGKAMIGLLSVFAQLEREQIKERMQLGKIGRAKAGKSMMWAKTSYGYDYHRETGTITINPAQALAVKFIFESYLRGRSITKLRDDLNEKYPKHVPWSYRSVRAILDNPVYCGFNQFKGEVYPGNHEPIITEEVYNKTKEELKIRQRNALENNNPRPFQAKYILSGIGQCGYCGAPLKIILGVKRKDGSRFKKYECHQRHPRTLRGITTYNDNKKCDSGFYYKDDLEAYVLKEISKLQDDAGYLDKIFSDDNSEALDRESYKKQIEELSKKLSRLNDLYIDDRITLEELQNKSAEFISMRATLETELENDPALGKDKRKADMRELLNAEKVFSMDYESQKVLVRGLINKVRVTAEDIVIKWKI

SEQ ID NO: 15506 - protein, 481 aa, synthetic construct
MITTNKVAIYVRVSTTSQVEEGYSIDEQKAKLSSYCDIKDWSVYKIYTDGGFSGSNTDRPALEGLIKDAKKRKFDTVLVYKLDRLSRSQKDTLYLIEDIFIKNNIAFLSLQENFDTSTPFGKAMIGLLSVFAQLEREQIKERMQLGKIGRAKAGKSMMWAKTSYGYDYHRESGTITVNPAQAVAVKFIFESYLRGRSITKLRDDLNEKYPKHVPWSYRAVRTILDNPVYCGFNQYKGEIYPGNHEPIISKEEYYKTQSELKIRQRTAAENVNPRPFQAKYILSGIAQCGYCGAPLKIILGVKRKDGSRLKKYECHQRHPRTLRGVTTYNDNKKCDSGFYYKDKLEAYVLEEISKLQDDADYLDKIFSGDNAETIDRKSYKKQIEELSKKLSRLNELYIDDRITLEELQSKSAEFISMRATLETELENDPALRKNKRKADMRKLLNAEKVFSMDYEGQKVLVRGLINKVQVTAEDIVIKWKI

SEQ ID NO: 15507 - protein, 480 aa, synthetic construct
MQTINKVAIYVRVSTTNQAEEGYSIDEQKDKLKSYCQIKDWNVYKVYTDGGFSGSNTERPALEKLIKDAKNKKFDTVLVYKLDRLSRSQKDTLYLIEEIFIKNGIEFLSLQENFDTSTPFGKAMIGLLAVFAQLEREQIKERMQLGKLGRAKAGKSMMWARTSYGYDYHRDTGAMTINELEAIAIRDIFESYLNGMSVTKIRDMLNDKYPKTPNWHYRIVRGILANPVYCGYNQYKGHVFPGNHEPIITEEAFNKTQEELKIRQQTALERFNPRPFRAKYMLSGIAQCGYCGAPLSITLGTIRKDGTRNIRYQCKNRFPRATKGVTVYNDNKKCDSGFYEKSDVEKYVIEQICKLQHDKKYVEELFADNRPSVDRVACQKQIDLLTNKISRLNDLYIDDRITLEELQTKSSEFSRQRSILEEELENDPALKRKKREAEMKKILKTDDILGMDYGRQKTIVRSLINKVRVTVDKIVIKWKI

SEQ ID NO: 15508 - protein, 501 aa, synthetic construct
MEIQIREGSREQKRKLKVCAYCRVSTDADEQENSLENQVRHYEMVIKANPDYEYAGVYSDFAISGFKEKRPGLQKMLADAEKGKIDLILTKSVSRFARNTSIVLEATRKLKELNVGVFFELQNINTLSGEGELMLTILAAFAQAESESGSAGAKMVYQRKYEAGIPVQYLERSFGYTKDERGVFVADEAEAVWVRKIYKMAAEGYTPASIKRYLNENGIKTVGGVQWVDSTVFRLLENEIYKGDYIMHKHFVNEERKLVRNRGEVDAWYIEDDHEAIVSPELWQKAQDALAAKRDYLAEGSVIEEFTEENYPYMNKIYCAKCGYPLYKRIYSKGNRLNWGCSGTKRYGKSFCDGINIPDGVLRSAWHFEENTYIDEKASDKGVKEFTYLKERSWKRRHKKKQPSAIPENTETEYPYREKIFCALCGSRLVRYVNPQNYKVTWVCNRRKRKGKEACDGTRVPDTVIKGWGEIKKDIYIQRKDDKNGKKRYSYTSKKPSGIRV

SEQ ID NO: 15509 - protein, 463 aa, synthetic construct
MARSVTVIPARNRQVSGYRAAPQKKIRVAAYCRVSTDQEDQLHSFEAQVDYYTKHINDHENYEMAGIYADEGISGTNTKKREQFKRMIADCGKGKIDLVITKSISRFARNTQDCLMYSRKLKNLGIGIIFEKENINTLDSTGELLFTILSSLAQDESRNISENCKWGIRTKFKNGEMHLNTFKFLGYDKDENGKLVINKEQAKTVRRIYRDFLIGINPAQIAKELTEEKVPGCLGQTKWYPSTVIGILKQEKHMGDALLQKTYTADFLTKRQVKNNGEVAQVYVRDSHKGIVDKETWNAVQEEFERREKFMQKHGTDRYSYGSECYPFCEKIFCGECGSLFTRHSWKSRGIIQWQCKNHRKDGKVACTNAYVDNADLEKGFIKAFNRLVGEREKHIERWNSMKLDGTPLEKIRAGQMMEATESGQLQQYVPEAAQLVLEEITIFGAKKYEFAFLEGSRVKVSV

SEQ ID NO: 15510 - protein, 407 aa, synthetic construct
MKPGKIRVCAYARVSTMTEKQQESLTNQQAYYSHLYQNKKDVDFIGVYYDQGISGKLAKRPGFQQMLEDCRAGKIDVIHTKSISRFARNTELLLAVSRELKTIQVDIFFEEQNLHTLSNEGEVMLTVLASYAEEELRNMSENQRWAFQKKFQRGELVINTKRFLGYDKDENGELIINPEEAKIVKRIYNLYLSGMGVHVIAKLFNGEEVPTVDGGRWYSSTITNILKNEKYKGDAILQKYYFAEIKAKQRLNKGQVQQYLITDNHEAIVSREDWEAVQKRLKQNRKANLSIDYNRRYPLSGLLKCEHCGSTLKRQKYYKGKVVWVCSKYILEGKVACIGMRVPDSAVQDWSIHEPTVVKEENIGGKKYYSYSSKENDTSRAEATHSENPNGGLLPSIHRPRRTAIKL

SEQ ID NO: 15511 - protein, 590 aa, synthetic construct
MKTVEKIERKLPVLKARKRVAAYARVSMESERMQHSLSAQVSYYSALIQKNPEWEYAGVFADYGISGTGTKKRDEFNRMLAECEAGNIDIILTKSIQRFARNTVDLLNTVRHLKELGIEVRFEKEKINSLSGDGELMLSILASFAQEESRSISENVKWGTIKRFKQGIPNGKFSIFGYEWQDDKLVIIPEEAEIIRWMYAEYMKGASRIEIGRALMDRDIYTRQGKPWVDSNVKVILTNITYTGNMLFQKEYCEDPITKHRRKNYGEMPQYFVEDTHEAIIPMDEWQAVQAEFKRRRDLGPFGNKSLKLSAFSTKITCGCCGKHYRHSGKRNTAGEVYYIWTCQTKNQKGASACPSKNVPEKMLQNAAAEVLGLDEFDEDVFSQQIEEVIVIGDDTLTFRFYDGHEVTTKWQSTAKTDWWTDERRKLWGERRKRKDTNPNRNTFYEFTGFIKCGCCGANYRCQSGKRKDGTPTRSWYCTGPRSECRNPAIRDETMKRLVTEILGLDEFDEAAMDAQIESATILDHTVTFHFRDGHIESRDFLDKRHGTPWTEERREKAKKSMKAAWTDERREAMSERIKKIRSEKKWPNP

SEQ ID NO: 15512 - protein, 523 aa, synthetic construct
MAKSVTTIPATLSRFTAAPINSTKKRRVAAYARVSTDNEEQLTSYEAQIDYYTNYINGRDDWEFVGVYPDEGITGTNTKKREQFRQMVADALDGKIDLIITKSVSRFARNTVDSLTTIRKLKEHNVEVYFEKENIWTFDSKGELLLTIMSSLAQEESRSISENCTWGQRKRFADGKVTVPFKRFLGYDMGPDHNLVVNPEQAKLVKRIYGMFLQGQSPFQIARTLTEEGIPSPGGKDHWNPSNIKSILTNEKYKGDALLQKSFTVDFLTKKKKANEGEIPQYYVKDNHEAIIDPETFEMVQTLMATRTKGRNRKSSVSIFSSKVKCGDCGSWYGPKVWHSNDAYRKVIWQCNHKFDGQKCATPTLTEDEIKELFLRAANQVIDQKEQFIAIYEQVLSRSLDTTALEGELSELEAEINIAAELIEECIKENAHVALDQAEYQKRYDALVARFDKAKARHTEVTDLIAERMARKHQIETYLKNLRSREPLTEFRETDWLAMVDYITVHSKDDIRVAFKDGTEIKA

SEQ ID NO: 15513 - protein, 521 aa, synthetic construct
MNRKITTIQANKKLSHQSKLPSIKKKKVAGYARVSTDNEDQTSSYETQMKYYEEYISSRKDWEFVKMYSDEGISGTNTKKRLGFQEMVNDALAGKIDLILTKSVSRFARNTVDSLSTVRKLKDVGVEIYFEKENIWTFDSKGELLITIMSSLAQEESRSISENITWSKRKQAAEGRVTFAYNNVLGFKPKEDGGFEVDKEQAQIVRYIFGQFLSGKNPNQIAKHLTENKIPTPRGKEKWSYSSVRSILTNEKYKGDALLQKYYIADFLNKTQKRNNGELPQYYVENSHEAIIDKEVFDAVQVQLSENKKWYTEKNYFGKIRCGCCGSSYVRHLWHSNDKYKETIYRCKDKYKNEEKCDTPHIRDDEIQRWIVSALNKVIDNRKEIIGNIKLLMKMIKEDRGSDDEIIQLEENLENIRTDVEKLIITNSKIAQDQEEYTRKYNKLIEEYKLLEKQLEQRNLDLLNKNKRVRELKIFIDSLEKQGELLTEYDTKLFNYLVEKLIIHKEKRIEIHLKNGEVISI

SEQ ID NO: 15514 - protein, 539 aa, synthetic construct
MKNKIKNRGRVKHIPYKGIIQPQQIIFVLYHKEGGMTMKKAVAYGRYSTDMQREESIDAQFRAIREYCQRNKIELISTYADEGISGTTDNRPQFQKMIKDAELGVFDYVIVHKLDRFSRSKYDSAIYKRKLKLLDVQLLSVLENLDGSPESLILESVLEGMSEYYSRNLSREVKKGMRENALKCKFNGGTPPLGYDIDDDKKYIINAHEAEAIKLIFDMFTKNYSYSDMMRRLNSLGYKTKRGREFTRNSFYEILNNERYIGIYFYSKEDYDGFKGKRNYHKKRDKSKMIRIENGVPAIIDKNTWARAQEKLKNNRNLNRTNKNGRFYLLKGLLFCGECGSPMSGNAQSNGQGNRYYYYKCNKKLRTRKCKTLVVRAEKIEKEVLDCFDDVIFTKTNKDAVIDSMLKYLDKETDTKDQSKSLEKELAEVKKQIDNILDAIISGISSPSVNDKLKELETKKETLKASISKCNIISYKSTSIVDEIKEFLNKNNSIYDFTPQEQSVILKNFIDKIIYKDKKITVQLKMLDRADFNGAGKGT

SEQ ID NO: 15515 - protein, 492 aa, synthetic construct
MAAYCRVSTDSDKQATSYETQIEHYTTYIHNHPDWKLAGIYADDGISGTNTKKRDEFNRMIEDCMAGTIDMIITKSISRFARNTLDCLKYIRQLKNKHIPVFFEKENINTMDSKGEVLLTIMASLAQQESQSLSQNVKLGLQYRYQRGEVQINCNHFLGYAKNENKHMVIVPEEAEIVKRIYREYLEGASMLKIARNLTADGLKNGAGHTKWRDSNIRQILQNEKYMGDALLQKTYTVDFLTKKRVKNTGIMPQYYVKDNHEAIIPRDIFLQVQEEMVRRSSIHLKNGRKLTYSSNHCFSQRIRCGKCGEIFRRIHWNNRGKKSIVWRCVNRVDHTGKCDARTISEFALEQVCLTAINQVLCGKKDFLAMLQHNIETVLSHNNDETLATIDTRLEELQTQLVKLASSKAGYDDVAEEIYHLREQKQQTLAKSANQDEIRSRIEDMAAFLKTQSTAITQFDEHLVRQLIETITVFEDSCTVEFKSGVTVDVEK

SEQ ID NO: 15516 - protein, 519 aa, synthetic construct
MKTVTKIGGQLVFPTPKHKLRVAAYCRVSTDSEEQLVSLATQRKHYESYITANPDWEFAGIYYDEGITGTKKEKRPALLRLIDDCEHKKIDLIVTKSISRFARNTTDCLELVRKLLGLTVYIYFEKENLNTGSMESELMLSILSGLAENESVSIAENSTWSIQSRFQNGTFKLAYAPYGYDVIEGKLVLQPEQATIVKAMFDQTLAGIGTDAIAKELNAKEIPAKRGTHWTATTIRGILKNENYTGDAIFQKTYTDSHFNRHHNHGEKDKYRVEHHHEAIITKDIFEAAQQVIRQRGKEKGALPQNKKYQNRYPFSGVIRCHQCGATFKRRIQGGRNSYIAWCCATHVADATKCSLKYIKETALEYAFVTMMNKLIFGHAFVLKPLLASLRTLHSDDSITVIQDLDTKLAENAEHQKTLAYLLAKKYLEPAMYQKGNNELLQEAEQWQHQKDSLVDFLNDDNKTVHETRKLLQYTCKAKMLTGFDGAVFQQFVEQILVYSRTEISFKLKCGITLRERLV

SEQ ID NO: 15517 - protein, 531 aa, synthetic construct
MKEIIKIDSTIRKTGLEKKTRVAAYARVSSDSDEQLLSLEVQKEHYENYIKSNPCWEYAGLYFDEGISGTKIGKRESLKQLLKDCQSGQIDRIITKSISRLARNTVDCLEIVRKLTGLGIYLYFEKENIDTEHMSSELMLSILSSIAQSESKSISENNTWAIQKRFENGTFVISCPAYGYKNENKKMIIVPEQARVVKEIFNMALSGMGGEAIARVLTDKKIPTKKGGSWTSSTVNAILTNKTYTGDVIFQKTYTDDSFNRHKNCGEKQQYVIENHHEAIISHETFNLVKEIIAWRRSENNIVCGSGKYNKLYAFSGKIRCGECGSKCKRRIIYQHNKAYGIWVCITHLEDIHACSQKSVMESYLKISFLQMLNKLKAGYVQMLTPLVESLRGVNNKDGLNKVIELEEKIAKLQEQEQVLSKLLAGGYIEMDSYYLESNQLKTEIDTCLKEKLKLSNSLNGNLTHLNEAQKLQRFVSVTEVFSEFKDEDFLDFVDDVVVKSRTRFLFILKCGLELEEEVKETWHASHMVTE

SEQ ID NO: 15518 - protein, 481 aa, synthetic construct
MKSTNKVAIYVRVSTTNQAEEGYSIDEQIDKLEAYCKIKDWTVYKVYTDGGFSGSNTERPALESLIKDANKKKFDTVLVYKLDRLSRSQKDTLFLIEDVFIKNGIEFLSLQENFDTSTPFGKAMIGLLSVFAQLEREQIKERMQLGKLGRAKSGKSMMWTKTSYGYDYHKETGTVTINPAQSLVIKFIFESYLSGRSITKLRDDLNEQYPKPIPWNYRAVRTILDNPVYCGYNQYLGEIYKGNHEPIITKEVYDKTQKELKIRQRTAAENVNPRPFQSKYMLSGIVQCGYCLAPLKILMGVIRKDGTRFIKYECHQRHPRKIKGVTTYNDNKKCDSGFYYKDDLEAFVLQEVNKLQHDTDYLDEIFSDNQKEAIDRESYHRQIQELTKKISRLNDLYIDDRITLEELQAKSAEFLNMRALLEKELEDDPALKQEETKNTIKQSLNKGDILKMDYEAQRDIVRALIKKVQVTADSIVIKWRI

SEQ ID NO: 15519 - protein, 519 aa, synthetic construct
MADFEHVIIYLRKSRSDDPATTVEEVLSRHENILQEYAVREWGARIPEDRIYREVVSGETIKDRPVMQHVMKILETGLVSGVLVVEPQRLSRGDLQDCGHIINSLRYTNTAVITPPKTYDLSDEYDRKFFEMELTRGNDYLEYTKKILNRGRIASVKAGNFIGNSAPYGYRKICVGTGKEKYYTLEIVPEEAEAIRLMFDLYVNKDYGFRNIAHALDMAGYKPRRSAEWSPAAISCMIANETYIGRVVWNRRKTIKKWENDTIVRTRPRQSEYISVPGKHPAIISDELFYAAKAKRNRTPRIKRYVQLLNPLAGLLYCGTCGHAMSRKRTVDKKYGSVSVSFLCNNQSNCHTKSVMYDAVIDRVKETLRQSIEDFEVKVNNKDETDIAYHRAMITNLKGELKKLKEKDMRQKDAYEDGIYTKEEFVVRNAKLAEQISIAQLKLDEAESSTTQLVDYQERLVRFRECLEALDDDTISAADKNTLLKSCIDKIMYYNDSPSLPGIGRYVDNPFRLEIFLKL

SEQ ID NO: 15520 - protein, 523 aa, synthetic construct
MRFFSYGRKSVFSDKSDSIDNQFRMNREYCESKFSGQVDSWQQFSDEDFTGANTSRPDLQRMLSFIKGGFCDVLVVYQLDRLSRDVRDFANIYALLEEHSVMFISIKENIDTTTPIGRAMMYVTVVFAQMERETIAARVTDNMLGLAKKGYWTGGNPPVGYVRKHIVVNGKKHCSIEVDPDGARYVTQIFDTFLAYNCSLQGMETRFKNQGIRTQSGKFFSTTQLHKMLTMPYCVEATPEVYDFYAAKGCIMDPGSPREMWDGSVGVIIYGRSTEKNKKHQLQPPEKWTVCLGKHKPFMPAEKWLAVQSRFTQNKCIKDAKWPVPLLKGVLRCKCGNLMQVSRKKKVDGTCSSWYYCRKRMRQGVDACDMGQIKCDLLDEEVLELFRGITADPALIQKFVKAEAPADVPDLKAAQARVSACERKIGRLAASLALAEDSAASKYIIAEMERLDVELGALKREASLAEMESHRAAASAKDAKATAAEIAKLIHGLEGFDDKEKNAIARAVIQECTWDGERLFITL

SEQ ID NO: 15521 - protein, 479 aa, synthetic construct
MNKVAIYVRVSTKGQAEEGYSIDEQIALLTSYCSIHKWKIHDTYVDAGISGATIERPELSRLSRDAQKKKFNTMIVYDLKRLGRSQRNNISFIEDVLEKNGIGFISLTENFDTSTPLGKAMVGILSAFGQLDRDTIRERMMMGKIGRAKSGKPMMTSTIAFGYTYDKVTSSLNINPAEAIVVKTIYNEYLSGRSLTKLRDYLNENDLLRNGKPWNYQGVSRVLRNPVYMGMVRFRGEVYQGNHDPIIDSETFEAVQKELKKRQLETYEFNKNTRPFRAKYMLSGIIKCGYCGSPMGVTLGTKRKDGTRNIRYQCVNRFPRTTKGITVYNNGQKCNSGFYEKDDIEIYVLGQVRLLQLNKAKLNKMFETPEIINVEEIENQINSLNNKMKRLNDLYLNDMISLDELKTQTYTFLKQKDLLENELNNNPAINQEENRKQFQKLLGTKDITQLSYEEQSFAIKNLIDKVFVKPGIIDINWRI

SEQ ID NO: 15522 - protein, 521 aa, synthetic construct
MNRKITTIQANKHLSHQSKLPSIKKKKVAGYARVSTDNEDQTSSYETQMKYYEEYISSRKDWEFVKMYSDEGISGTNTKKRLGFQEMVNDALAGKIDLILTKSVSRFARNTVDSLSTVRKLKDVGVEIYFEKENIWTFDSKGELLITIMSSLAQEESRSISENITWSKRKQAAEGRVTFAYNNVLGFKPKEDGGFEVDKEQAKIVRYIFGQFLSGKNPNQIAKHLTENKIPTPRGKEKWSYSSVRSILTNEKYKGDALLQKYYVADFLNKTQKRNNGELPQYYVENSHEAIIDKEVFDTVQVQLSENKKWYTEKNYFGKIRCGCCGSSYVRHLWHSTDKYKETIYRCKDKYKNEEKCDTPHIRDDEIQRWIVSALNKVIDNRKEIIGNIKLLMKMIKEDRRLDDEIIQLEEKLENIRADVEKLIITNSKIAQDQEEYTRKYNKLIEEYKLLEKQLEQKNLDLLNKNKRIRELKIFIDSLEKQDELLTGYDTKLFNYLVDKLIIHKGKRIEIHLKNGEVISI

SEQ ID NO: 15523 - protein, 512 aa, synthetic construct
MDAVIYARYSSNNQREESIEGQIRECREFAEKNNLQIVDEYIDRAISGKTDNRPAFQRLIKDSSKGKFDVVIMYTLDRFARNRYDSAIYKAKLKKNGVRLLYAKQPMPDTPEGIILESVLEGYAEYYVENLRRGVKRGMRENALKGYVNGKTPLGYRRGKDKKYEIDPYEAKAVREIFERYARNEPIIDIARWLNDNGYKTTTGGQFNKNSLRRILTNDKYIGVYRYDDIVIEDIVPPIIDRELFERVQNTFEYNKHFRAKQKAIDPYLLTGKLFCGHCGAMMIGESGTSRHGTTYRYYKCATRKREHTCDKKIERKEWIERIVVEYTKNYVLTDENIEKIAEKVVELITQEYSDKSMLAELTARLDDVTTRFSNLLKALEQGVISESVANRVSELEKEKKSLEKKIASEKMSKPTITKDMVVYWLLSFKNGNIDDESYQRRIIDTLVSSVFIYDNDDGTARLVLNFNTSSNNNVTIKVSDTTSLAIPVKKSPEFQRSGLFILFIFGNYLHF

SEQ ID NO: 15524 - protein, 563 aa, synthetic construct
MQRAVIYARYSPGPNQTEQSIEGQVRECTKYAELHDLRIVGTYIDRKISGKTDNRREFQRMIDDSEKHIFDVIILYHTDRFARNRYDSAIYKHKLKENGVELRYATTDIPKGPEGIILESIMEGWAEYYSAELSRKIKRGMRESALKCHSTGAGRCLGYRTAEDKSLVIEPEGAKAVQTVFDMYIKGKSHADICRYLNDCGFRTAQGKLFNKNSVTHIIRNKRYIGVYTYDDITIEDGIPAIISKDTFHLAQLEAAQRKTAKRPKEPKAEYLLSGKAFCGHCQKPLVGVSGTGKSGNKWYYYYCQESRAKRGCTKKPVKRDWLEREVVERTVAEVLQPEVIQHIAKKCYDLQMEYRQDNSDVLFYELKLKDVRKAIKNTMHAIESGVKTKTLPARLQELENEEEALEAELAIAKASDFVITTDQIEFLLTQFAEPWECESEEEYHRRIIKCFVHKVFLFDDKLLIYYNVSRDGKTREQSEAELLEEALGEGFDKRSSGSTKKMESRKPVSLRDSFCFQAFCGFFTMHKYVRYAHICAFGVRFKTTFCRRICRRGQSLPLTMPQ

SEQ ID NO: 15525 - protein, 461 aa, synthetic construct
MPKRAALYIRVSSEEQARHGLSLGEQRADLLNYAKEHGYSVVGIYADEGVSARKAMSRRKELQRMLADVEAGRIDIIIIKCLDRWFRNVADFYKVKERLDACGVDWVCSREDYNTTTPNGILMLNLKLSIAQHESDQTGERIRYVFEGKRARRQFVTGLIPLGLKVADGYFARDDKTAPIVECAFNHILNGGSTRSLVQVLYDKFGHKITKTGLFDLLRNRSYIGEVYGIPDYMFSLIPHDVFFRVQEILSRNTKYTHSGRIYLFSGLLRCPDCGRNLAAYRGRRLNSDGERRFQYQCGYRVNRSMPGCHFARGMYEDKIEQYLLDNIQSLIREHIITMESFCGQQGRERPESKIDALKAKLSRLEDIYIAGLMDKGKYTKTYKEITQEISELSTLVARSLSIPSALREVADDRDFRSTYESLSRENKQRFWKSIIASITFDDTPDTRGKGAYIPYRVTFL

SEQ ID NO: 15526 - protein, 413 aa, synthetic construct
MNIRKIEAKNNNRKKRICAYVRVSTTNGSQLDSLENQKVYFEKLYAERDDVEFLGVFCDKGISGSKYDRPDFQTMLDACRKGQIDVIHTKSISRFARDLINVLEISRELKTLGIDIFFEEQNIHTLSNEGEVVLTVLASLAEEELQSMSGNQRWSFRRKFQKGELLINAKRFLGYDLNEKGELVINKAEAQIVRTIFYSYLEGMGTHRIAKKLNEGKVPTVTGKKWYDSTIRNILKNEKYKGSLLLQKYFHDGVNGPKKLNQGQIEQYYIEDNHEGIVSKEIWEKVQVKMKSRSRIQGTNKTYKFSRMLKCQYCGSTLKRQVSYKKKIVWCCSKYIKEGKNSCKGMRVPERDIEDWKLSLPVIVLERIEDGEKHYGYTGQKTSANSQISNSEKGQGSRLLSSVYRPRRAAIKL

SEQ ID NO: 15527 - protein, 428 aa, synthetic construct
MSTDQDEQLSSYENQVNYYREYILKHEDYELVDIYADEGISATNTKKRDAFNRLIQDCRDGKVDRILVKSISRFARNTLDCIKYVRELKELGIGVTFEKENIDSLDSKGEVLLTILSSLAQDESRSISENSTWGIRKKFERGVVQVNTTNFMGYDKDEKGNLIINHEQANVVRYIFDRFLEGYSPEFISKELREQEIPGCTGKAKWCPSAIWKMLQNEKYKGDALLQKTYTVDFLTKKRIDNDGQVNQYYIENNHEPILDREKWEIVQLEIERRKRFREQHKLQFYIMQKENNPFTTKVFCAECGSAFGRKNWTTSRGKRKVWQCNNRYRIKGQIGCLNNHIDEKMLEKAFMKAVGLLQEHKSDMVAKWQKLEQGTNLLHKHYARQMYQILDLDKFDGVIMNQLLDHISISEAGQIVVTFLEGTEVDL

SEQ ID NO: 15528 - protein, 565 aa, synthetic construct
MQNSSDKNINRVAIYIRVSTNHQIDRDSLPMQRQDLISYTKLLLNTEQYVIFEDAGYSGKNTDRPKFQEMMKQLRHGLFTHLLVWKIDRISRNLLDFATMYQELKELGVTFISKNEQFDTSTAIGEAMLKIILIFAELERNMTSERVTATMISRASNGLWNGGRVPYGYNYDPNKKEFKINNDEAEVVKLIHDKYEELHSLIRESRVLNERGIITRAGNLWNPTTLQIILHNTFYCGDYQYNVCKEGNRQKQKNKSDWITIHNHHEAIISREQKERIIALLDCNRRLNKKVVKSEKYVHIFSGLLYCGNCNKPMGASPSSKIKGYQYSRYTCPTKRQLQCDSKSVSDQTVGEFVFNYILNLINSQRNFKSISSKNDLQKHLLKGSSFNDIKSIDSDGLNDLYNVLSSGNIKQDIYSNDVSFKKEDNTNLSRTKLLSEKQKLERALDRLTNLYLYSEQTLSEQNFLSHKMQIDDKLNEINDQLSFMESDDWQQSISDAEFIVKTSSFIISKKLDGRNYINYKRLATSIDKEVLKSFVNSVIDSIIISNGSIETITFKNGLSHTFIR

SEQ ID NO: 15529 - protein, 481 aa, synthetic construct
MKSTNKVAIYVRVSTTSQAEEGYSIEEQIDKLESYCKIKDWGVYKVYTDGGFSGSNTERPALEGLIKDANKKKFDTVLVYKLDRLSRSQKDTLFLIEDVFIKNGIEFLSLQENFDTSTPFGKAMIGLLSVFAQLEREQIKERMQLGKLGRAKSGKSMMWAKTSYGYDYHKETGTMTINPVQSLVIKFIFESYLSGRSITKLRDDLNEKYPKEKPWHYRAVRVILDNPVYCGYNQFMGEIYKGNHEPIISKEVYDKTQKELKIRQRTALENFNPRPFQAKYMLSGIAQCGYCLAPLKIIMGVIRKDGTRFIKYECHQRHPRKLRGVTTYNDNKKCDSGFYYKDDLEAYVLQEVNKLQHDSEYLEKILSDNHKESIDRESYQKQIQELTKKISRLNDLYIDDRITLEELQSKSSEFLSMRALLEKELENDPSLKQEETKNTIKQSLSKGDIYKMDYEAQKDIVRTLIKKVQVTADSIVIKWKI

SEQ ID NO: 15530 - protein, 503 aa, synthetic construct
MNNRIDAIYARQSVDKKDSISIESQIEFCKYELKGGNCKEYKDKGYSGKNTERPQFQQLMRDIESGLVRKVVVYKLDRISRSILDFAKMMDFFQKYEVEFVSSTEKFDTSTPMGRAMLNICIVFAQLERETIQKRVQDAWYSRCQRGFKMGGKTPYGFRTEPYVMDGVRTKKLVIEPTEAAFVRQMYEMYADPQVSLHDITKKLTADGMRTYHGRPLSRATLSVILRNPIYVMADLDIYEFYKSQGTDIYNDATDFAGTNGCYYYQGKGNTEDKHKHLQGQTLVLAPHEGFIPSELWLKCRKKLLASHTYQPARKARNTWMAGKIKCGKCGYALMSAHSNGILYLRCTVHADSKACPGCGCVKLHELEAVVYGAMVKKLKDFKTLTGRKKAAKISPKLEAKRLELAQVESEIEKLLDTLTGASPVLLSYANSKIEELDARRQSIANEIAKLSADAVPMEKMESISGYLDDWENVSFEDKRQVVDALITVIRATNEKVEIEWKI

SEQ ID NO: 15531 - protein, 463 aa, synthetic construct
MSFFTPNPQLFGLRVVKYIRCSHDDQVLHGDTLEAQDLILEDFIKVNRMILVDTFIDEALTARKKFNKRKEFVRLLSGVKAHAFDLIIFTKLDRWFRNIGDYHKIQEILEANGVQWKAVTENYDTTTTNGRLHINIRLSVAQDECDRDSDRIKDVFAYKLKNKTYVSGSLPRGLKLDAEKHVIIDPEWNCFALDMFDRFEATCSKRDTQLFLQEKYNIRVCYDTVARYLKNPLFKGQYRDDPDFCPATISPERFERIQKLAIRNVRIRHTQQFYIFSGLLICSSCNHYMCGTVTYRRMADGSEKMYKNYRCNFKAQSKLCDRGKTYREADLEEYMLAHIRPALSDYIVKYEVTAASTVQKNPVTEIAKIERKMKKLYDLFMDDLIDKEAYRSEYDKFKAQIEELQKCSTAAPMRSLDSVKKLLSEDWEAVYHTFSDQEKNTFWKSFIESVLVYEDGSMDIRFL

SEQ ID NO: 15532 - protein, 521 aa, synthetic construct
MNRKITTIQANKKLSHQSKLPSIKKKKVAGYARVSTDNEDQTSSYETQMKYYEEYISSRKDWEFVKMYSDEGISGTNTKKRLGFQEMVNDALAGKIDLILTKSVSRFARNTVDSLSTVRKLKDVGVEIYFEKENIWTFDSKGELLITIMSSLAQEESRSISENITWSKRKQAAEGKVTFPYNNVLGFKPKEDGGFEVDKEQARIVRYIFGQFLSGKNPNQIAKHLTENIIPTPRGKEKWSYSSVRSILTNEKYKGDALLQKYYVADFLNKTQKRNNGELPQYYVENSHEAIIDKEVFDAVQVQLSENKKWYTEKNYFGKIRCGCCGSSYVRHLWHSNDKYKEIIYRCKDKYKNEEKCDTPHIRNDEIQRWIVSALNKVIDNRKEIIGNIKLLIKMIKDDRGLDDEIIQLEEKLENIRTDVEKLIITNSKIAQDQEEYTRKYNKLIEEYKFLEKQLEQKNLELLNKNKRVRELKIFIDSLEKQGELLTEYDTKLFNYLVEKIIIYKGKRVEIHFKNGEVISI

SEQ ID NO: 15533 - protein, 480 aa, synthetic construct
MKSTNKVAIYVRVSTTAQLEEGYSIDEQKAKLTSYCDIKDWNIYEIYTDGGFSGSNTERPALEQLIRDAERKKFDTVLVYKLDRLSRSQKDTLFLIEDVFIKNGIEFLSLQENFDTSTPFGKAMIGLLSVFAQLEREQIKERMQLGKLGRAKAGKSMMWGRTSYGYDYQKETGSLTINPAQSLVVKYIFERYLAGRSITKLRDDLNEKYPKEISWNYRAVRGILSNPVYCGYNQYKGQLFPGKHEAIITEDVYKRTQEELKLRQRNAAEKTNPRPFQAKYMLSGLAQCGYCHAPLKLIMGGIRKDGTRFIRYECYQRHPRKTAGVTVYNNNQKCHSGAYDKDELEKYIITEISKLQHDQSYIEKLFNTQSSTIDRDNYQKQIEELTRKISRLNDLYIDDRITLDELQKRSSEFMTMRTALEEELKNDPEIQGQERRKNIKQVLDCEDIASIDYDGQKVIARALIDKVQVTSERIVINWRI

SEQ ID NO: 15534 - protein, 565 aa, synthetic construct
MQNSSDKNINRVAIYIRVSTNHQIDRDSLPMQRQDLISYAKLLLNTEQYVIFEDAGYSGKNTDRPKFQEMMKQLRNGLFTHLLVWKIDRISRNLLDFATMYQELKELGVTFISKNEQFDTSTAIGEAMLKIILIFAELERNMTSERVTATMISRASNGLWNGGRVPYGYNYDPDKKEFKINPAEAEVVKLIHDKYEELHSLIRESRMLNERGIITRSGNLWNPTTLQIILHNTFYCGDYQYNVCKEGNRQKQKNKSEWVKIHNHHEAIISHEQKERIIALLDCNRRLNKKVVKSEKYVHIFSGLLYCGNCNKPMGASPSSKINGYQYSRYTCPTKRQLQCDSKSVSDQTVGEFVFNYILNLINSQRDFKSISSKNELQKHLLKGSSFNDIKSIDSDGLNDLYNVLLSGNINQDIYSNDVSFKKEDSSNLSRTKLLSEKQKLERALDRLTNLYLYSEQTLSEQNFLSHKMQIDDKLNEINDQLSFMESDDWQQSISDAEFIVKTSSFIISKKLDGRNYINYKRLATSIDKEVLKSFVNSVIDSIIISNGSIETITFKNGLSHTFIR

SEQ ID NO: 15535 - protein, 521 aa, synthetic construct
MGKTITMIPAKRRVGNTVKEEDRPKLRVAAYCRVSTDSDEQATSYDAQVEHYTDYIQKNPEWEFAGIFSDDGISGTYTKKRDGFNHMIDECMDGKIDMIITKSISRFARNTLDCLKFIRQLKEKNIPVYFEKENINTMDAKGEVLLTIMASLAQQESQSLSQNVKLGIQYRYQQGLVQVNHNRFIGYTKDNDGQLIIEPEGAKVVKRIYREYLEGSSLLEIGRGLEEDGILTGAGKGKWRPETIYKILHNEKYMGDALLQKTYTINFLNKTRVKNKGLVPQYYVENNHEAIIPRDIFMRVQEEMVRRANLHSGKNRKKRVYSSKYALSSIVYCSKCGEIYRRIQWQAHGKKYIVWRCCNRVENGPGACDAGAIREVDLQSIVIKAINKAFGKRESMKAALVANIESVITDVGGISIDEIDLRLEELQKELLKVANSKVNYDEMADEIFKLRELKQSAMVDSAEREGLKLRIDEMNKFLDEQTEVITEYDEQLTRRLIEKITVYESYFTVEFKSGASVDIYK

SEQ ID NO: 15536 - protein, 520 aa, synthetic construct
MKKITKIGTDTNTGTKTKIRVAAYCRVSTDSDEQLISLDAQKAHYESYIRLNDEWEYAGLYYDEGISGTKKELRNGLQSMLSDCEDGLIDLIVTKSISRFARNTTDCLEMVRRFTELGITIIFEKENINTSAMESELMLSILASLAESESVSISENSKWSVRKRYEKGTFKIGYPPYGYKNVDGEMVIVPEQAEIVKEIFAACLAGQGANTIAKMLNERSVETKKGGRWTGTTINGILKNEKYTGDVLFQKTYTDSSFHRHVNYGERDRFYCENHHEPIISHEDFENTRIVLGRRGKEKGNGSNTSRYQNRYTLSGKIKCGCCGDKFKRRKHYKPSGNYIAWSCSTHLENRNACSMLYIEDEALKTAFLTMVNKLVFGHKDILKPLMRSLRGIDDKERLLQIDAIERQIEENADRTQTAANLVAQGLLDAPIYNTEINKLMAEEEELKANKDQLLNDIGGDKNKVRELQNLMEFTGKGKMFTEFDDNLFLTIVDEIIVYSREEVNFKLKCGLNLKERLVM

SEQ ID NO: 15537 - protein, 507 aa, synthetic construct
MKNEAKRTFRCAIYTRKSIAEGLEKDFNTLDAQREAAENYIASQKHEGWVAIPKHYDDGGFTGGNMERPALRELFEDIKKGEIDIVIVYKVDRLSRSITDFAKIVELFEAHNVSFVSVTQHFNTKDSMGRLTLNILLSFAQFERELISERTKDKMSAARKKGKWLGGRPILGYDIVKGGGAIEINRAEAETVNFIFDTYFETRSALKTLEILNARGIRNKEWRTRSGSISGGSQFTKTTLYGLLKNYAYIGKLKYDGKIYDAEFDGIVSEEKFLAVRSMMKNNFTDRMTARVRTKSEGLLSGKLYCSHCGRLMGHTYSRKTKNKIYRYYVCMNAQKSGWKNCPHPSLPADVVEKFVVGEISAVSSDATLAKQVMDCFVSETEKELSEMLKRREKVSNALDNKRALIGDAAQDSAEYADLIKAEMSHSEALQSCDTSIKTLRERLKFSREELARIFGNFDEIWVKLNFKEKYELVDLLVERVTFYGESGELGITYRECGIKTKDNNGN

SEQ ID NO: 15538 - protein, 481 aa, synthetic construct
MNEINKVALYVRVSTTSQLEEGYSIEEQKAKLESYCDIKDWHIYKVYTDGGFSGSTTERPALEQLIKDAQGKLFDTVLVYKLDRLSRSQKDTLYLIEDIFLKNNIEFVSLLENFDTSTPFGRAVIGLLSVFAQLEREQIKERMQLGKLGRAKSGKSMMWAKTSYGYNYNKDTGTMTVNEYEALAVKEIYSSYLAGMSITKLRDKINDEYPKQPAWSYRTIRGILANPVYCGLNQYKGQTFQGTHKAIISLDDFEQTQRELAKRQQTAKELSNPRPFQAKYMLSGLAQCGYCHAPLKVILGQKRKDGTRFKRYECYQRHPRKTKGVTVYNDNQKCDSGYYDMDLLEHYVLTRIAQLQNDPDKIKELFSDDTSPAVDKQAIQKQIDSLTLKLSKLNDLYLDDRITLDELRAKSSDFIKQRTALEGEIKKASNDKQAGKRKKIEKLLDASSVLDMAYDNQKVIVRELIDKVQVTSDKIVIRWKI

SEQ ID NO: 15539 - protein, 544 aa, synthetic construct
MRVSVNLNAQKPDTTTNAVIYARYSSHGQTEQSIEGQLAKGHEYAAAQGYTVVHEYIDRAMTGRNDNREAFQKMLSDTGKHQFQVVIVWKVDRFGRNREEIAFNKHTCKKNGVRVEYVAESLPNSPEAVILESVLEGMAEYYSIQLSQNIRRGQLESAKKCQCVGGSVPLGYTLDSDKHFVIDPQTAPVVKKIFDLYAEGATISEITGQLNEQGIRTARKQLFTKNSLTKLLKNEKYIGVYTYKDIVRVEGGVPAIVDESTFDRVQELLKINRRAPSHTWTKVEYLLTDKLFCGHCGSPMVGESGFSHTGAKYSYYGCIKRRREKACDKKPVRQDWIEALVLDETVKLLHDDELMEYIIDRTWEYYQVTDKVQEEKAVLEAQLAEVDKAINNLVRAIEAGIFNAATKSRMDELDAQKAALTASLADLELTSGIRITRDHIEYFLLRLRDLDVKDRECQKRLVQTFVNAVFIYDDGRVKITYNYSGQSSTITLNQIASAEKGKGFVCCLPCSTSSPRFPRGVAALFLFWGKIGCESTTNFSCIVL

SEQ ID NO: 15540 - protein, 536 aa, synthetic construct
MKGAVIYARYSCERQTEQSIEGQLHECYKYAEKNGLSILDEYIDRATTGTNDNRPAFQKMLADSERTTAWDIVLVYAIDRFGRNSIEIAINKQKLIKNGKNLISATQRTSTNIDGSKNLDGILLENVYIGLAEYYSAELSQKIRRGLMESREKGLFCGGGLTYGYNVVNKHIVINDEQAEIIRYIFQEYNNGKIIPDIINELNAKGYTYKGGDFVKNSLYRILRNEKYIGITKYMGVEYKNIYPPIISENLFYSIQKRLALYKTGRICKDTELWLKAKVFCGNCGRPMHCDSSTSQSGKRFHYYKCSGRKEHICDMKVIRQDKLDKFIFETTLKVFATDENIKLLVDKIIDVHSKRQKDESLLTGLKARLCDTKKSIDNLLIALQEGIITTSTKDRLKQLESEKEKLEKEIANEEKKLALSLSRDDVEKYLRKSLKASPKILLNNLIDKIIVYDDKIEIYFKYSHHVPDDPNDQQGLFYSKCEIPVNRGSRTKQVLDITIDNHNIHFFIRYSTKRNKDLCLPINYKCQKMKNHPLM

SEQ ID NO: 15541 - protein, 468 aa, synthetic construct
MKKVTKIDGVQKNTAINSKLRVAAYCRVSTGSDAQLESLEAQKSHYEQYINSREDWQFAGLYFDEGITGTKAEKRPELLRLITDCEAKKIDFVITKSISRFSRNTTDCLALVRKLQNLDIPLYFEKENINTGSMESELFLAILSSMAEGESASISENAKWSVKRRFQNGTYKLGYTPYGYDWDGEQMVINAEQAAVVKEIFAALLSGKGTHAIADDLNQRGIPTKRNGHWTATTIRGMLSNEKYVGDCFFQKTYSDSRFVRHNNHGEQTQYLVKDHHEAIISREDFEAAQTFIHQRATEKGVVKGSDKYQNRYTFSGKIICGECGNTFKRRIHHCTGYKYAAWCCNTHIKDKDKCHMLFVKDDDLKQAFITMMNKLVYAHRIILKPYVDALKNTSSDDSLRRIQEIQTLLAHNTEKRETLTKLMTQGIIDPILFNKETNELLSQADSFRDEINALKNAVSGDVTKIDE

SEQ ID NO: 15542 - protein, 551 aa, synthetic construct
MKTMKFPIDLSMLTEEEIDQFRQDPSTLFEGDTDVSLYLRFSSERQREQSIEGQLRDCRTFCKLNSYRITAIYVDRATTARKDVEKRVHFQEMVRDSEKKPWEYVVVWKLDRFARNRTDSALFKFRLRKNGVKVISATENISEKPEGIILEAVLEGMAEFYSADLSQKITRGMRESALKCHSIGGHVPLGYKIEDHKLVINPATAHIVREAFELYANGETVADICRMFNTKGYRTAKGVEFNRNSFKSMFRNKRYIGVYTYKDIEMEGGVPAIIDKELFETVSRRLSKNAEAPARGKAKVDYLLAGKLFCGHCGGSMNGESGTSKTGAVHNYYTCYTRKRKHACEKKPLKKEWIEYIVAQDAMELLTDDTIQELADMAISQTEQDLRENTRIPELTERMKEAESGIANITNAIEKGIASDTLMNRLVELEKEKKNLLRLLAEEEKYVCKIERSQIVYWLTEFKGGRIEDERYRRIIIDLMVNSVTVWDEPDGFRITTAYNLTSCKSKTFRIDPSSEKGFGFEGSKSTIERISEPYIVWGKIFVQTKRHPLP

SEQ ID NO: 15543 - protein, 535 aa, synthetic construct
MAKTVRVIPASPKIFRSEVTAEPRRRRTAGYARVSTDHEEQASSYEMQMAHYKNYIESRADWDFVGMYSDEGISGTNTKKRDGFNQMIEDALAGKIDLIITKSVSRFARNTVDSLQNVRKLKENGVEIYFEKENIWTFDTRGELLITIMSSLAQEESRSISENTTWGKRKQFAEGKTSVGYSAFLGYDKDFQINEEQAKIVRLIYKLFVGGRSFYAITKELEKRGIKSPSGKDKWYISTVRSILTNEKYRGDALIQKEYTADFLDKTRRKNTGEIPQYYVEEHHEAIIPPDLFDFVQAEIKRREQNGKHSGVSIFANKIKCGCCGGWYGAKVWHSTDKYRRVIYRCNKKYAHKGKPCSTRHLTGEEIKQIFVKALNSLVEVKENVIAELRSLIDDVCQTGEMTEERGRTEQELGVLAERLETLIRENARVAQDQTAYLKQENEIRALYVEKQGHLETLNRQIAEREGKRNTLEGMIQVVCGINGEQVEFDEELWGGLLDYIVVKEDGQVVVVFKGGIESGVDGCRGLFYLRKQSG

SEQ ID NO: 15544 - protein, 443 aa, synthetic construct
MKIRRVQPSPILQKKLRVAAYARVSVDTLHHSLAAQVSYYSSLIQKNPTWEYAGVYADEGITGTSTAHRTEFKRLIADCNAGKIDLVLVKSISRFARDTVDCLHTVRQLKEKGIAVHFERENIDSTSEDGELLLTLLASFAQEESRSIGDNIRWGVRRRFAEGIPNGHKAPYGYTWDGEMFRIIQAEGEIVKEIFRRYLAGESAYAIAKTLAGRGITGRQGRPIEQTTVKDILSNCSYTGTMALQKNYISEGHIRKRNKGELPMYLVEGTFEPLVSKTDFDNAQEIRQRRAAQSGNRNSVRMPFSGIVKCGCCGGGFSRRTAGKYRRWGCNTRERKGSTACDSRPIKEEELVAAVRTVMEKDDFDVAELRRKVLKIVIHGDRIDFHLVNRRIKKTARIYNGQRGSIPSPTKCTAPPAAASVSAILGQREQKCGLAVSRARNVD

SEQ ID NO: 15545 - protein, 542 aa, synthetic construct
MKITAPARSARAVSLEAFVDNLNLANVVIYARYSSAGQNDQSIDGQLAKCREYAQQRGYCVVGEYCDRALSGRYAETRPEFQRMISDSAKHAFDFVLVWKLDRFSRDRYDSAIYKKKLRANGVRVLSVTEGVGDSSESVLLEAILEAMAEEYSRQLAQNVRRGMRQNAEKGLSLGGLAPLGYRVVNKQYEINEDEARIVRFIHEQYADGAGQKQIVADCARLGYRNQRGNPLTLAAVKRILANERYIGRYDYLGEIVIEDAFPAIVSKDLKKRVRDRLNANAKAPGHAKAKVEYLLHGKLFCGECGAPMIGECGRGRHGATYYYYTCAARKKQHTCKKRNERKDELEASVVDYIGSCVLTDSWIDGAAERVVAEYQKSYDASGIKPLEKQIRDADKEIDQLVDALISATAEAARRRINERIETAEARKQALEADLASLRIASRVQIKKEDIVVWLNQFRTGDRSDLEYRKKVIDLFVNSIYLYDDTFKLFLNVTDSTQITYSDSLALAPPSVSDFGASGVPDMHLSEHIIFVNGVIGMIVQR

SEQ ID NO: 15546 - protein, 523 aa, synthetic construct
MRFFSYGRKSVFSDKSDSIDNQFRMNREYCESKFSSQVDSWQQFSDEDFTGANTSRPDLQRMLSFIKGGFCDVLVVYQLDRLSRDVRDFANIYALLEEHGVMFISIKENIDTTTPIGRAMMYVTVVFAQMERETIAARVTDNMLGLAKKGYWTGGNPPVGYVRKHIVVNGKKHCSIEVDPDGARYVTQIFDTFLAYNCSLQGMETRFKNQGIRTQSGKFFSTTQLHKMLTMPYCVEATPEVYDFYAAKGCIMDPGSPREMWDGSVGVIIYGRSTEKNKKHQAQPPEKWTVCLGKHKPFMPAEKWLAVQSRFTQNKCIKDAKWPVPLLKGVLRCKCGNLMQVSRKKKVDGTCSSWYYCRKRMRQGVDACDIQQIKCDLLDEKVLELFRGITADPALIQKFVKAEAPTDVPDLKAAQARVSACERKIGRLAASLALAEDSAASKYIIAEMERLDVELGALKREASLAEMESHRAAASAKDAKATAAEIAKLIHGLDGFDDKEKNAIARAVIQECTWDGERLFIKL

SEQ ID NO: 15547 - protein, 566 aa, synthetic construct
MAKVKLPDKPRVAIYTRVSTLHQIDKDSLPMQRQDLINYARLILNTEDYVVYEDAGYSGKNTDRPKFQEMMQQVRLGMFTHILVWKIDRISRNLLDFATMYSELKQLGVVFVSKNEQFDTSSAMGEAMLKIILIFAELERNMTSERVTAAMLSRAANGQWNGGRVPLGYDYDPETKTFTINESEAAVVKIIHDKYEQERSLVSLARYLNGHGYRTRTGCTYSPSTLLIILRNVFYCGDYRYNVLKDGDRQKRKKESEWITVKDHHPAIISREQKDEIARILKENRRLECERRGIYSKKKNVHVFGGLVICGNCGHAMTSTIRPADQDGIRWSVYVCPTKRRSEYLCKGRATSEVVLGEFVFNYILNMLNVQKNFDSINSVEDMEKMLLSGSTFRDVDGIERAGLDDLYNMLASGLTEKAPFDSSVEVRKKPVVSDIELENLNTEKTRIERAAERLQNLYLYSDDSISQKDYIIQREKLMSQLAEVNEQIGMVMSNADEKDVSDEEFVHAASKFILTQKLEGRTYIYYKRLATTVSREVLRSFVMSIIENITIYDGRVQTIVFKNGL

SEQ ID NO: 15548 - protein, 413 aa, synthetic construct
MNIRKIEAKNNKRKKRICAYVRVSTTNGSQLDSLENQKVYFEKLYAERDDVDFLGVFCDKGISGSKYDRPDFQTMLDACRKGQIDVIHTKSISRFARDLINVLEISRELKTLGIDIFFEEQNIHTLSNEGEVVLTVLASLAEEELQSMSGNQRWSFRRKFQKGELLINAKRFLGYDLNEKGELVINKAEAQIVRTIFYSYLEGMGTHRIAKKLNEGKVSTVTGKKWYDSTIRNILKNEKYKGSLLLQKYFHDGVNGPKKLNQGQVEQYYIEDNHEGIVSKEIWEKVQVKMKSRSRIQGTNKTYKFSRMLKCQYCGSTLKRQVSYKKKIVWCCSKYIKEGKNSCKGMRVPERDIEDWKLSSPVIVLERIEDGEKHYSYTGQKGTSNSHISNSEKNQSSRLLSSVYRPRRAAIKL

SEQ ID NO: 15549 - protein, 523 aa, synthetic construct
MRFFSYGRKSVFSDKSDSIDNQFRMNREYCESKFSGQVDSWQQFSDEDFTGANTSRPDLQRMLSFIKGGFCDVLVVYQLDRLSRDVRDFANIYALLEEHGVMFISIKENIDTTTPIGRAMMYVTVVFAQMERETIAARVTDNMLGLAKKGYWTGGNPPVGYVRKHIVVNGKKHCSIEVDPDGARYVTQIFDTFLAYNCSLQGMETRFKNQGIRTQSGKFFSTTQLHKMLTMPYCVEATPEVYDFYAAKGCIMDPGSPREMWDGSVGVIIYGRSTEKNKKHQAQPPEKWTVCLGKHKPFMPAEKWLAVQSRFTQNKCIKDAKWPVPLLKGVLRCKCGNLMQVSRKKKVDGTCSSWYYCRKRMRQGVDACDMGQIKCDLLDEEVLELFRGITADPALIQKFVKAEAPADVPDLKAAQARVSACERKIGRLAASLALAEDSAASKYIIAEMERLDVELGALKREASLAEMESHQAAASAKDAKATAAKIAKLIHGLDGFDDKEKNAIARAVIQECTWDGERLFITL

SEQ ID NO: 15550 - protein, 490 aa, synthetic construct
MKAALYTRVSTDEQAEHGFSLEAQKKRLIEYCNKNNIEIYKLYSDEGISGHSIIKRKALQEMLQDAKEHKFNYVIAYKTDRISRNLLDLLTIKNQLDEADVELLLSDEAIDTKDDAGMTMFSIMGAFAELERKKITERMMSGKRQKLMNEHIKLKNGRVPYGYLYDDENKKYIIDESRRSIVELIYKLASQGWSYNKITRHIAEETAANSSDSKKKWYISDIRAILTNPMYKGYSGISYYYNFNDRAKKPKNSAILYKATNVEPYFTEEYWDTLYSQLEKKTQYFKRKHPIDSYIFSDVLFCATCGLKIGTRQHHANYLYYVCNSKHKMYDNDHICDYAININKFNNWFIDFIKGIDENNIKLSVSRPKDLDKELQAVRSQISLKEKNREVLLDKLMNGVIDDTEYRLASNMVIASLNSLKSQEKELSDKMDSLKEKEQTKRYNRLKIKALKVLVNDWDNLTYQAKKTLINSSINKIMITKDGIQEIEFN

SEQ ID NO: 15551 - protein, 435 aa, synthetic construct
MISDCRKGKIDRIYTKSISRFARNTKDCLKNIRELKSLGITVFFEKENIDTAKLTDEMMITIMGGLAQEESTSISQNMRWSVQKRMENGTFNPPSLPYGYMRRKQDIVTIENEAKIVRDIFTQYINGIGMETIAKELNKKHIDKGSKGFIWCKNTIRYILMNEKYTGRSVFRKFYTTDNFPFKQKENKGEFDQYLVQETMPVIISEDIFEKAQHLISIRKSMGCRETAKYPLSGKIKCGNCGSSFRRKKINNTVCWTCSKHNINAADCELKAIPQDLIYSIFIGLCNKLFCNYKTILKPLQTSLQDLKLKEFTGKTQVMDIHKEIAKFREQTHILARLKTKGFLDEAKYIEQTTALTAKINKLQAELKKLTRFDDEDETLDQIDMLIDFFEKRENPMTEFEESAFESIVEKIVVIDQHELEFYLIGGFKFKEKIK

SEQ ID NO: 15552 - protein, 538 aa, synthetic construct
MPTAPNVTIIPAKVQTAESRSKYHQLRVAAYCRVSTAQEEQQNSYQVQIAYYTDLINRKKEWTLAGIFADEGISGTQTKKRTEFNRMIRMCKNKKIDLVITKSISRFARNTVDCLEYVRQLKDLGIGVIFEKENINTLTMTSEFMIALYGSFAQAESESISKNVSWGKEKAYREGKVQFQYKYLLGYKKGTDGKPEIVPEEAEIVRLIYTLFLDGYSMTRIKKILENKGYLTAQGKKVWNESLIRSILKNEKYVGDALLQKTFTSDCITHKVVKNHGERPMYLVTDHHVPIVDRDTYNRVQQELARRSSKRKVSDKTITEQGKYSSKYALTELLICGKCGTPYRRTTWTSRGKKQIVWRCISRLEHGRRYCPDSPTIKEEQLHKAIIRAINNYYSCGNDVEKILKANIGNVLECHGLEEIAAIGKRLKEIDKARNDLISLIATGGCDEDKLDIEFEKLYEEEQSLSERLAMLKSKNQTSAETQAKLDKIMELIDNEKFELETFDNVLVRKLIECVKVLSKNEILVIFKGGYEVRTEIE

SEQ ID NO: 15553 - protein, 575 aa, synthetic construct
MNKIIDTLNTQKAAIYIRVSTHHQIDKDSLPLQREDLINYAKYALNIDNYEIFEDAGYSAKNTERPSYQYMMSKLRTGEFSHLLVWKIDRISRNLLDFATMYEELKTLGVTFVSKNEQFDTSSAIGEAMLKIILVFAELERNMTSERVSAVMLSRATNGQWNGGRVPYGYNYDKSTKQFSIHPIEGNHIKKLYDLYLETQSMLAVAKYFNEHGINTKTGNNWSPTTIGKILASRFYLGEYQYNLHKDGIGGAGVASLKPEDEWITVKDHHPAIIEIEQWDKCAEIRACNHRNSNAPKRYRRKNTHIFAGLIICGECGSTYQATIDRARTGGYRPSIYLCSRRKQYSDCQNKYMSDITLGPFILNYISNIIKANANMGKTTTPDMFKKKLLRGDVFKDVKDIAPSGLNEMYNMIVSKKFNSDPFTSAVNRDESQPDFASERELLISEKRKYLRALDRLKTLYLYNDNAMAEKDYIIENKNILDNLKRVDERLEEIEKNSSQNFTITDSEFIEKASYFIISQELSNQRYINFNSLIQHIDTNVLKNFIQSVIKKIVVWDGRIISIQFKNGIEHDFLY

SEQ ID NO: 15554 - protein, 492 aa, synthetic construct
MNVAMYLRKSRADENNPLETLERHKEILLSYAKDNNLTVIDIFEEVISGGMLYNRTEMLKLLDAIPSHIYDAVLCIDLDRLGRGSAADSEKIFDVLKENDVKIITLKKIYDLNNEYDEDYSEFEMFMARKELKFITRRMNRGRIKSINDGCFVSGAPFGYRNAVINKKHTLEVYEPEAKYVRMIFDMYVNQSIGITSISRQLANLGVLSKKNTPLHPTTIARMLRNHTYIGKIVWNKSKSVKGKNTQEKTSKDDWLYVPGLHEPIIDEDTFSKAQDIINLKYKPPMRTGTLQNPFAGLLKCANCGRAIVINTSNETVEKYRLCCRTLGCNKASALSIVEDKVFEVLTKEFKDIELSLKNIRQSHNKDKLSCLDTIATLETELKKLDKQQLRLYDLLEQEVYTKELFLERNNAISDRRKKINATISQEREKFKLVDTSSVEERLPLLRELLTNYHSLSAAEKNSILKNFVKKIEYKREKSAPEGDIFLKIYYK

SEQ ID NO: 15555 - protein, 481 aa, synthetic construct
MITTNKVAIYVRVSTTNQVEEGYSIDEQKAKLSSYCDIKDWNVYKIYTDGGFSGANTDRPALEGLIKDAKRKKFDTVLVYKLDRLSRSQKDTLYLIEDIFIKNNIAFLSLQENFDTSTPFGKAMIGLLSVFAQLEREQIKERMQLGKLGRAKAGKSMMWAKTSYGYDYHRDTGTITINPAQAVAVKFIFESYIRGRSITKLRDDLNEKYPKHVPWSYRAVRAILDNPVYCGLNQFKGEIYPGNHEPIISKEDYDKTQAELKIRQKTAAENSNPRPFQAKYILSGIAQCGYCGAPLKIILGVKRKDGSRFKKYECHQRHPRTLRGVTTYNDNKKCDSGFYYKDKLEAYVLKEISKLQDDAGYLDKIFSEDNAETIDRESYKRQIEELSKKLSRLNDLYIDDRITLEELQSKSAEFISMRGTLEAELENDPALGKDKRKADIRELLNAEKVFSMDYEGQKVLVRGLINKVQVTAEDIVIKWKI

SEQ ID NO: 15556 - protein, 694 aa, synthetic construct
MEAGTMQAGAMGGSTGVGAMGTGTDPFAAMAAQLTPKRAVSYIRVSTREQAQRGGSEEGFSLPAQREANKRKAQSMGALVVKEFADRGESARSANRPELQKILAYLKEDGGIDYVIVHKLDRLARNRADDVEINRAFEEAGVRLVSTSENIDQTPGGMLLHGIMSSIAEFYSRNLANEVIKGMGEKARNGGTLGKAPLGYINVRARDENGREVRTVALDEERAPLVRLAFTEYATGNWTVRGLVEHLAELGLTTAPSPARPAKPITATRLQNILHLPYYKGVISFQGVDYVGAHEPLVDSQTWQTVQQVFASRRTGERQRAHNHFLKSTAMCGVCGARLLVQRAKNSKGVVYPYFVCARRHRVHDCTFKAVLIDEVEELVAALYQRIQLTIEDRAKVECYLQGELAQIEGEKDRKVRSLTTRRTNIEDKRRRLLHAHYEGAVPLDLLKEEQAQLTAELERIERQLAVYRADVMATRRVMEAVLDLMQDCSRLYSAAPAHLKKLLNQVFFERILVNPRVDDDGAVIMPGTSPSQSDSSNAADDVGQVSDQAERQHTDVASPCMSDELVAWSVVPEDGGEGDMTTERAAMVCSPPPLPRMTSGNNGITLTACLRFPFTYLANPALRRAAEQDAIRLNKQKTGAQPHQQNTSIPANKHSPRHNLPYEAVPLGCCSYTRVLVPPVGLEPTTFGLKVRK

SEQ ID NO: 15557 - protein, 586 aa, synthetic construct
MKDIVGYLRVSTEAQDFERQRTDIDNWCRVNDWKLNNTFTDKLSGFIEEREGLTELKEYLITNNIKNVIVWELSRLGRDKFNLMALFKWFVDNQINIFFYTQNFWLLDANGNLSSNVSLQIMILSNYAETEALMIKERMKSGKERAKKEGRWVHGQIAIGYKLSDDKRVYIDEENAKYVRQAFQLYANGDTSIKQLAVYCIKNNFPSSFGNYQSLRFILKNMIYTGELNYVNIPAIINIELYMKVQSIMEEKHTNKNKEYNNNKFLLEKLVTCPKCGAKYGGGGSHRYSCVNRVSSSAKVKCKSPSFDVRVLDAIVWYITKQIAAAQELYVQSNEEQIKDFEQQKELLNFKLETLEKKKKKQNTKFDLDAISIDEYKVIIKNLNSQINLLKNEIESLNIKIEQSNFEMQNNNRATRVANNMEALNNLRDIDTMRNLMKIIFKSIHVYKYHNNFNIIELETRMNYIYCFYNSHSSRNKTFTTNIALKQCWDDEKKLLNGKSIDAEFYRDGIPIEIISDYKYKVKSQETIDKKRAQARERERRYRENRREEYNRHARELRHKRNELKKEAEERRNNISITNPKSKPEN

SEQ ID NO: 15558 - protein, 531 aa, synthetic construct
MDEYFIYLRKSRADMEAEAHGEGETLARHERALLELAKRLHLNVTQIYREVVSGETIAARPVMQRILSEVEQGMWAGGLVMEIERLARGDTIDQGIIAQTFKFSDTKIITPMKIYDPNNEYDEEYFEFGLFMSRREYKVINRRLQRGKLAAAKEGKWVPCRAPYGYRRIKLKNEKGWSLEPIEEEADVVRLIFQLYTRGAQAEDGSFQRMPLGAIARHLDDLGIPSPQGGLWGRPALAAMVQNPAYIGKVRWGQHPSKKKVVDGKVVRQRVQADADEVHVFEGRHPAIIEQEVFDIANEMVKRRVNSSTHIDLSVKNPLTRVVFCACCGHAMGRATSAARPDAGSLVCRTHGCPTVSTRLDIVEERILAGLAEWLSGYELEWAEANSPEHRVASNAEVKQKALQRAEGDLARLQKQLERTHDLLEQGVYDVDTFLDRSRSLAEKINAAKELATSLRQEVVVEEEREANRKNIIPKVKNLIEVYHSLPSAEEKNEMLKDVVEKVVYKKIAVPGKRLKPDDFEIEIYPRIPRK

SEQ ID NO: 15559 - protein, 532 aa, synthetic construct
MSGKEKTKGSLALAAPRVITIPANDPEISRKLRVAAYARVSSNSEDQAHSFAAQNAYFSKLIAGNPNWELADIYADKGVTGTSIDKREDFLRMMEDCRKGRVDRILVKSISRFGRNTKESLEAVRELAGLGVSVLFEEQKIDTAESTGEMLTAIFATLAQKESESISEKMRWSYRMRMRSGTFLPSSMPYGYNIKDKQIRICPEEAETIKGIFSSYLAGQSMQAIANRLNLESIPRRVSSKTQCWRISTIEYILSNERYVGDSLWQKTYQTRELPHRAKKNKGELEQYFLPDTHLPIIDRETFLKAKQLRLSRKQCPARICEGDILRKRLRCGICGGPFRSIYGRNTHSYECQAKNRGSKKCTSLRTSETQLQQAFLRLYFKLKRHGESVLTQLITDLRTARNGSLLWSEGVVELNKQITDIAGQERLLLLLKQQGAVDPDLFLSRSDQLAEQRRTAKLKKERLLRSEEDHTIQRTQDLLDHLRSGPDTLESFDEALFSELAEKIIVTDNETLRFRLINGLELTESIERTKR

SEQ ID NO: 15560 - protein, 551 aa, synthetic construct
MVETRPERKVIVIPAREKTPEEQERKKNLRVAAYCRVSTNSEEQLSSYENQLAYYTEKIMKNPEWTMMEVFADEGITGTSTSKRKNFLRMIRQCRQGKIDLILTKSISRFARNTVDTLNYTRELRSLGIPVIFEEHGLNSIYPESEFLITIFGAQAQAESESTSSRVRWGVQQSMRDGRASIQYKYLLGYRKGADGQMEIVPEEAETVRQIYRMYLAGQPLRNIRTSLVSEGRRNALGTTEWTTSNLQTILTDEKYCGDVLRQKTFIQDCISKKAIRNTGQLPKYLIQNHHDAIIDRAQFDAVQMELARRRAQRGSTRKSAPSGLGRYSGKYALSGLLFCGECGTAYRRVVWTQHGEKRTVWRCCSRLDYGKKYCEHSPTLGEAPLQQAILNAVNASMSDHGTLSARLMSAMEQELAPIPGESMSLGDIDRAMEELGKQFDKLLGEAANADDAETYVERFQSLSEGMEDLKRRKASILQIRQEQDAVSRRLQASAAALDAVSAQITEWDEKTVYQLLEKVTVMEGFKIRVTFRNGQEIEQSIDQPKRRKRI

SEQ ID NO: 15561 - protein, 463 aa, synthetic construct
MRRKTTAPVEKILLRVAIYIRVSTDKQVKDGDSMRDQLATGQKYIDRHENMILVDTYIDDGISGQKLKRDDFQRLIDDVRAGRIDLIIFTRLDRWFRNLRHYLNTQDILDKHGVSWTAIEQPYFDTSTPHGRAFVNNSMIWAELEAQNDSDRILGVFDDKVDNGEVLSGSTPLGYKIVNKHLVPDDDAPTAVAIFQYYRKTGNLSMTLRYMESEFGLVRSAASLKNMLTNTKYIGEFRDNKNYCPAIIDRDLFFDVQRLLKINIKSGKKHDYIFSGLVVCDDCDHIMSGCQQRAGGRVRADGTRIVYKYSVYRCRQGVNLHRCPNRKLVFETTLEKMLLERIRPELENYIAEYEVANLPALRTDAKRRSVEGKMQKLKDLYLNDLITMDEFKLDREKLLMQLEKINAEDSRPVKDLSYLKNFLKMDFESVYDSLSIPERRELWRSIVKEIRVDHDKNIHIIFL

SEQ ID NO: 15562 - protein, 542 aa, synthetic construct
MNRAAIYARFSTDLQNERSIDDQLALCRSYAVREGLNVVATFEDRARSGGSVLGRDGLLNLMDKAREHEFDVLVVEALDRLSRDMEDLAGIHKRLCFLGIEIRAVHEGVVNTVLVGLRGLVGQLYREDIAHKVRRGQAGRIKNGLHAGGLTYGYAHVLGAPGKRVIVEDEARVVRRIFGEYADGRTPRDIAHRLNKDGVPPPRGRTWNASTINGNAQRGTGLLQNELYAGRLIWNRVRMIKDPDSGRRVSRPNLKEEWQTVEVPELAVISPELFEAARERRQARAITHPSNQRRPRHLLSGLLRCGACGAGLSSNGKDKSRRIRIRCSAATESGTCPDPKTFYLDTVEAAVLSGLTSELRHPEVMAQYVQTYHEERRRLAADTDARRTRLERRLGELTREIDRLVIAIAKGHGDPAVLGPQSTALNEERKSAVAELELVPELAGAIALHPAVLARYEQQLTQLRAGLAKGVVAGDPEAAEAMRDLIDTVTVFRDPARLGGIEIEIAGRLTALLGEEAFPNGVKGVWGKMVAGEGLEPPTPGL

SEQ ID NO: 15563 - protein, 511 aa, synthetic construct
MAKRQLEGPKSVGIWIRVSTEMQAQSDSPEHHERRAKLYCEAKGWDVCDVYRLEAVSGKSVIDHPEAKRMLADIKKGRITGLVFSKLARLARNTKELLDFADYFKTHDADLISLDESLDTSSPAGRFLFVMIGALAEFERGEIAARVQASVPIRAKMGKPLGGSSPFGYVWREGKLVPDEQEAPVRKLLYELYKEHGRKRTVARILNERGYRTRGGGTFSMTTVTRLLRDPTAKGVRIANWSKNVGKNKPIAIKPESEWVHHSVEAIIPEELWNDCQALLDASKRNHKRPAKKTVHLFAGFAFCGCGGKMYVTSSNKNRYVCSKCKTSKIPIVDLEGIYHEQLRRLAISTDELKRHVADANETLIEKQRLVDVLVAERAKVHAERERVYELYMAGGLRKEDFGSRYKPLSDRLEQIDEELPALQASLDVMKISQISEAEVRSAATSLYDRWLDLPFEDKRQVVEAITNKIVIAQEDIDISFLYAPSTEAAANRLRTDRGSWPRPAGSAPGK

SEQ ID NO: 15564 - protein, 542 aa, synthetic construct
MKKECFAYIRVSTAKQGQHGSSLQEQRDAINTFAQRHSLTIVEWFEDRETAAKKGRTQFMRMMAALEKRSAEGVILHKIDRGARNLWDWARIQDLIDSGVEVHFAHDNLDLRSRGGRLAADIQAVVAADYVRNLRDEVRKGFRGRLKQGFYPLPAPLGYLNRGKAQAKVIDPVKGPLVKTAFELYASKRHSFHTLSRELLRRGLTARSGKPLTLNSIALILRNPFYIGLIRLKQTGETFQGLHEPLIDGLTFKTVQDIIDGKSNTKVQRHEFAYRRLLSCGQCGRRLTGERQRGHIYYRCHTRTCAQTSIREEEVTASLVEAVGPITFSTREIVETRPWFAKLDGEQKAHQSKLIEASRLRIAALQGREERLTDAYLDQTIGVEAYNGRKRSLLLELTEAKDELRRVEHDLGDPAVRAQKFFEHINTLVSGPTSENVAEFRDAVEILTSNRNLFGKKLDVAMPSPFREMSTDLALHFGGPYRGTLRTLKAQRLSPSRVAQIIARHLRTIKDWPGEGDEERRPNPSWFKPKSTRLGDDLPMAA

SEQ ID NO: 15565 - protein, 632 aa, synthetic construct
MAYSLPHQAGTIDRRRILTRTALYARYSSDMQSQTSIDDQFAICRDQATREGWRIIGSYQDAAISGASVILRPGIQSLLQDAQLGKFDTILAEALDRISRDQADVATLYKHFQFAGVKLVTIAEGEISELHVGLKGTMNALFLKDLAKKTHRGLRGRVEKGKSGGGLCYGYSVLKRVDASGELVRGERSINEAEALVVQRIFREFSNGKSPRAIAWDLNRDDVPGPFGKQWSDTTIRGHAARKTGILHNELYVGVLVWNRQRFIKNPSTGKRVSRPNPESEWIKKDVPELRILTDELWQAVRQRADEIGERYKAVADGIRVSKGKRLRDLHRPVFLFSGMIECGVCGGNCTIIVNDRYGCNNHFRKGTCGNNRTIRREVLEKRALHGISERLVSADAVKQAVASYIEQINSANREQRAQAELDRRSLDKVERAIAGILSAIEDGMYQPSMKTRLSDLEQQRDELRHRHVEHSVAVPDIHPNVAELYRRRVAYLIEALKDPALRDEVAQDIRSIVGKIIISPGPDRGQVYAELCGQLMGILNAVSKEGGGGGQLYQRGLRPPATNVGITPGYKVIPTGEASPRNHRQHISEDCYTDGASGPRNQRYHNSPISKEMGLLCVCSPDGETSLQIEG

SEQ ID NO: 15566 - protein, 551 aa, synthetic construct
MKTKAVIYCRVSSKEQEETGYSLDAQEKLLKEYADKKNLEVPKVFKITESASKWQIRKTLGDMLSFADKRDVNIILCEKIDRLTRSLKDAATVDDWVHTKSEKEVHFVKENFVLNQNTRAHENLVWDMKVAIARFYTNNLSEEVKKGQAEKIRQGWLPTKPALGYKTIGDKGHKIHVIDENTASYVKRIFELYATGNYSMKRVVDELYEQGFRNRAGKKPAKSKVEDILKDPFYYGAMRWNDLVYAGSHEPLITKELYDKVQQVRTRGDAPKYQRHQFTFRKMIKCGECDGTITFEIQKGTVYCHCTHYRGCSQKKYTPEEQVEQKLMGVFKFFENITYVEAEQIKEKIKNDHSAEIEYKESTLKSLNERYSGLQRRLDNLYDDRLDNKISREFWEKKQQEINEAQATLLEQINRVKSEETKYFEIWLNIMDLARRAREIYEKRTPEERRMLLKHVFSMLTLKDGETTYELKESVSVLAKRVQEKIDLEKNFELQQKTTKSIASSGSLRKINNHSSMELPEAQNNFRTSKKSSVKPRQEACTSLSRPLLRG

SEQ ID NO: 15567 - protein, 448 aa, synthetic construct
MNLLNTQLHSIPNHVIDRPKVATLKVQKVRYCLYARKSTESEERQILSIDSQIKEMLQLAERENLEVVEIKRESHSAKATGQREIFNELVQDIRQEKFNGILTWAPDRISRNAGDLGAIVDLMDQKLLKEIRTFSQSFTDNPNEKFLLMILGSQAKLENDNRGINVKRGMRARVEMGLWPGPAPIGYLNQKNIDKKCQIIPDPDRASIVKQIFEKVACDSWSGRKIYHWLRFELNFKNRGNKNLALSTIFRILNNPFYYGVHEYPKKSGNWYTGKHKPIISKELYEKVQANILRIQRSWGDKQFAFAKLMVCGLCGSGMIGEEKMKALSNGTEAHYIYYGCSRTRDRQCKNTYIREDELIKQLVGLIDYVDIDKLGIKKKLELEVARFNKFQGLIQSQTPQSLTAPKLDAKAYAKYLLQEGSMEEKRDLLLFFKSKLRVLNKQVTLVE

SEQ ID NO: 15568 - protein, 535 aa, synthetic construct
MAKTVRVIPATPRVFRSEVAAEPRRRRTAGYARVSTDHEEQASSYEMQMAHYKNYIESRADWDFVGMYSDEGISGTNTKKRDGFNQMIEDALAGKIDLIITKSVSRFARNTVDSLQNVRKLKEHGVEIYFEKENIWTFDTRGELLITIMSSLAQEESRSISENTTWGKRKQFAEGKTSVGYSAFLGYDKDFKINEEQAKIVRLIYKLFLGGRSFYAITKELEKRGIKSPSGKDKWYISTVRSILTNEKYRGDALIQKEYTADFLDKTRRKNTGEIPQYYVEEHHEAIIPPDLFDFVQLEIKRREQNGKHSGVSIFANKIKCGCCGGWYGAKVWHSTDKYRRVIYRCNKKYTHKGKPCNTRHLTEDEIKQIFVKALNSLVDVKENVIAELRSLIDDVCQTVELTEERNRAEQELGVLAERLETLIRENARVAQDQNAYLKQENEIRALYVEKQGHLARLDEQIAEREGKRKTLETMIQVVCGIDGEQLAFDEELWSGLLDHIVVKEDGAVVVVFKGGIESGVDGCRGLFYLRKQSG

SEQ ID NO: 15569 - protein, 517 aa, synthetic construct
MAKTHNNIIGGNGGPTRVAFYTRISTDEDHQKYSLGAQSERLEAYCKSQYGDDWRLHKLYRDTESGTHMNRPGLEEMLYDAGARAFDTLLVFRVDRLSRKVRELAMMVDELTKNGIALKSITEPFDTANAAGKMMLQMLGVFAEFEHATIVERTKVGMEKKAKGGKFVGGNVPYGYTLDPEKGLVINEEEALIVRKMFQMYAFGREGMQTICHKLNEAGHRKRSGQKWTKQVILHMVRNPIYAGKIRWREVIYEGTHQPIVSEALFDKAKGLLKDRVETLSGRRFDNGEERLLAGIIHCAKCKTHMVGVSTRNHGRKFPYYLCNKRWRIRECDQDYVRADLLEAAIIKDIRSMLRDEDFMARLWAKANELLVAEKPALEKELARIESQIAKARAKLDRYFEAFEAGTMKPDLCNQKVKDLTGTLEALEIERKELAARKGRLTIPPVDKEMLEGILSEFDETMAAGTNPQKKHLLRRVVKKVLIHDRRTIEVWYCLPKRASVRTADYLAPRAGLEPAT

SEQ ID NO: 15570 - protein, 665 aa, synthetic construct
MAYSKQKHLQLWTTKKAALYVRVSTRYQVDKDSLPFQRKKLKEYCSIIGIDDYTIFEDDGYSAKNTERPRFQEMMNRVRAGEFSHIIVWKVDRISRNLLDFAAMYQELKAHKVTFISMNEQFDTSSAIGEAMLKIILIFAELERNMTSERVTSIMLNRAEQGMWNGARMPVGYHWNEETKYPEPDPDEKEIVQFIFDEYERVNSCLQVSRYLNNNNIKSKRGGKWTSKLVHDIIRNPFYIGTYRYNLREAGRGPLKPEKEWIVLENNHPGIIEKDQFERCNKIMDENASKRDTSELRARKYVHTFSGHLVCGKCGAGMIATKDRPRANGYRPSIYRCTERSKYLNCDNSKTVSESYLGPFIFNYVSNLARIQKNFKNITNKEKLQHELLRGSEFQDIYAIDAECLETTFNALLYKMVGSGNYTPDILLSEASGGTYTSSEQASIIRNEIEKTKNAITRLTDAYLYDPESLTKEEFSAKKKELLKKISDLETQYNENQDYSNDSAITDLSFIKKASAFLVTQKITSEEHVDYMQMVLELDNEILKDFIDQVIDRIIITDGRIESIQFVNGLVHKFIYIRPAELPVCDKCGGRIGNTIGCRTRSFTYQSKAYKRIKVGDPRDKYEGQENAVCQECFSHYGRWHHWGCKLETCPICSAPLYSCKHGKL

SEQ ID NO: 15571 - protein, 562 aa, synthetic construct
MATIEIIKNNLKAESDNFLKQEKKRVCAYARVSTDSEEQQTSYESQIRYYTDIIKSNPNYEFVGMYADEGITGTLVKNRTEFKRMIEDAMNGKIDMIMAKSISRFARNTLDTLKYCRDLREKNVDVYFEKENIHTTEMKTEMFLTFYSAFAQAESESISENVKIGVKAKMVKGDYIGQARCYGYNWNKDKKMLEINEEEAKVVKMIFNWYVDGIGSYRIAKKLNKLNIPNYYGRKWNYGSIKKMITNEKYVGDLMSGKAYVVDPISHKKVWNYGEKAMYYTKDKHEPIISRDIWDECQAIYKKRGSILAPDGHKHSDKFSKRYTFSSRIKCGYCGANFTRQPTNKKNGATRWRCHTALVYRDDCIAKSVSETYLTQMFVELFNQLSSKIEKDDYNLLNTIRQSLNEEFDANKLNSLNKEKEKISKRLLNLVDLTLDGTLDREVYKEKQKELNKSLKEIQNRIDSYEDIKKGSKNLEERLNIIKEVLNKNQKIKEFDEVLFDKLIDRIIIGEEVNGEFNHNIIRFVLKIGADEKFLIEKNNDNKCVCFRQYGLSVEIRYKRFD

SEQ ID NO: 15572 - protein, 529 aa, synthetic construct
MPRKSVTVKQNTAAAIYARYSSHNQKDASIEQQVEACTKYAAAMKLNIVATYSDRAKTGKTDRRPNFQRMMKDAEQGGFRYVIAWKSNRMGRNMLQAMVNEEILRGCGIKCLYVEEDFDDTAAGRFALRNMMNVNQFYSENMAEDIQRGMMDNAKQCKANGSPPFGYKIAPDKKIIIDTEKAPIVKEIYQMAADGYRIVDICNNLNGRGIKTGTGKPFGRSSFNKILHNERYRGIYIYKDIRIDGGIPRIVSDALFFRAQEALRMKPNPRFNGRRRENSVYLLTGKLFCGRCLSPMIGDSGKSKTGAMHYYYKCQKRKRQHLCNKENVQRDYIENLIAKKLYDYCLRDDIIELIADNTIEHNIKKMKEANVGALEEQVTDVNKRIGNLMKAMEAGAMSQNTIARFHELEDEQMRLNFKLNEARANVVACSREQLIAGMRIFRKANVEDKETQAELFDMFLRAAFLYDDKLRIVFQLSKDHESLEIPLEKMAGTGGLEEIRGALPDVRISDNLLHQIVQFHIYNVRCGEK

SEQ ID NO: 15573 - protein, 488 aa, synthetic construct
MRKTRAVAYIRVSTEKDAQLHSYDFQEHYWRSAFEDDPEIELTGIYADKGISGHSVQKRPQFLLMMQDARDHKFDKIYTKSVSRFARNTTQLLEAVRELRDIGIEVVFEKENIHTFEPTSEVFLTIAATIAENDLDVDSERMRWSVRHRCENGWISIGNGLYGLILTPENELEIVPEEAAIIRYIYDAYVNEGIGCKRIADALNAAGVKTRSGYPWSAKHILGMIRNEKYKGDVIMGKSVSHLGVYHKNPNGEYAPRYYMEDTHEAIVDKETWDAAQRIMDERGRNHAREKPSYPFTGLIECGCCGKKYVHKVNNSCFKWRTDIWACRRYLTDGVKACGNSRIKDAVLKEKFVEAYNEFVSQRPQGDSMLAMQEVLADLRQQERDLAELHMSHLLPSDAYETERQSIKAQIAAINEKISEQRIRHVPEKEHVLITAFDENKVKQFLTKVIVERFTVTFVFYNGARISRSYNNGQAGNKPGWNKRKEEA

SEQ ID NO: 15574 - protein, 540 aa, synthetic construct
MATATRRVVRTMPQMIIDVVDDKQDRLQVAAYARVSTEKEEQEDSFERQVEHYKQLIASKPEWRYVDIYADPGISGTRAEKRPDFLRMIDDCRAGKIRKILVKSISRFARNTVDALNYIRELKDLGVSVYFESENIDTMTPGGEVLLTILAAMAEQESRTISSNIKWAYQRKFQNGDIVLNTGLMLGYRKVGKDADGHDIYEINEEEAEIVRRIYREYLAGTSITRICRNLEADGIKTKLGKDRWQYSVVHSILANEKYTGNALLGKTWKPDVLSKRRQKNDGRSAPIYYVEDSHPAIIEPDMFEMVKKELKRRQGIKDDAVGGSKYSSKYPFSGLLECGICGHKLRRHVRTMGSGEKVASWCCTNRQLNSRTACDSHHVREDVLEATYLAAMRAIMETAADVTDAIRSGADAIMAAENKEDLKQVEEGIIEIQEAVLALHKAKQRMEITGADYTAKIAEYSAVMKEKEARRDHLQDSTLKYTEVRSWLKAFDESIANGKILTAKDSAIMRTIVEKIIVKDDGIEILLKCGVTIGQEFIK

SEQ ID NO: 15575 - protein, 461 aa, synthetic construct
MPKRAALYIRVSSDEQARHGLSLGEQRADLVNYAKEHGYIVMGIYADEGVTARKALSRRKELQRLLADVEQGLVDIIVIKCLDRWFRNIADFYKVKEKLDAHGVDWECTREQYNTTTPNGILMLNLKLSIAQNESDQTSERIKYVFEGKKQRKEIITGNLPLGIKAENGHAVPDENAPVVEFIYNHYLGGGSMRSAMTVVHEKFGLVLNYYKVKKVLTNRTYIGELYGIPDYLPAIIPHDIFFRVQDLISRNNKPAISGRIYLFSGLIRCPECGKTLGGRKGRVSRTTGEYRSFEYVCTHRVPKGAVGCHFTRTVFETKLENYMLDNLQQMVREHIVTIENRRIQQEKDRPENKIESLKAKLSRLEDIYLEGAMSKEKYIAAYKDLSRQISELSLMLDRSFVIPAALQEVADDTNFRETYESLTRKSKQKFWKSIVKSITFDPTPETFGKGAYIPFKVVFL

SEQ ID NO: 15576 - protein, 547 aa, synthetic construct
MPKKKASGSQPAKPKRGQKLDEAGVIYARYSSHAQKDISIEQQLEKCLGLAGEFGIHVIETYSDRAVSGRTDKRTGFQRMMKDAQRGGFRYVIAWKSNRIGRNMMEALINEARLQDMGVRILYVEEDFDDTAAGRFAARSMMNVNQFYSENMAEDIIRGLYDNAANCMVTNGQLPYGYVADKTLHYAVDEAKAEVVREIFKRVADDEHLIDICNSLNARGLRTQRGKPWGRSSFNKILSNERYRGIYIYGDVRIENGIPRIVSDELFYKVQEAIKTKSNPRGRHRENGDYLLTGKLFCGKCGSPMTGISGTGKNGSLHFYYTCQKRRFEKACDKQNVRRDDIEYQVAKAIMDYALQDETIEWIADQTVAYNERKEAESHLSVLEEQLAGTKQSIKNMIKAIEQGIILESTKERLQELELEKGKIEGQIAAARADIVTVSREEIVQGLSMFKNGDVSDKKTQARLFDTFLISAHVYDNDLKIVFSFTGKNNTVRVPLDIPPEAVENNDYPESSSLLNFEPPKLTKTNTKVTLFMSGGVFVLVCPLDKT

SEQ ID NO: 15577 - protein, 503 aa, synthetic construct
MEVVLYLRYSSDRQNEQSIEGQRHVCEKYCADMGYTIVGEYADRAMSAMKDTDKRLNFQRMIKDSEKHLWQGVIVYKLDRFARNRYDSATYKTRLKKNGVKVISATEAISDNPEGIILESVLEGMAEFYSKELSQKITRGMHESALKGNSCGGHISLGYKIENKKIVIDPKTAPIVRQAFEMYANGHTVAEICQTLNAAGYRTKSGAAFNKNSFHSMFRNKKYIGQYKFMEVVIDGGVPAIIDEETFNKVQAILAKKAQAPARGKAIIDYMLSGKVFCGHCGMPMVGTASTSKTGRKYFYYSCQGRRGHNGCEKTPVRKEFLEKAVVEDTLEMLTPEFIDYLADLAVKASEQERKENTLIPSLKAEISEYEKSIERLLRLVENGAESPTLSKRLNELEKAKRSAERNLAKEDSSYFLLEKEQIVFFLNQFVSGDKSDPEFQSRIIDMLVNSIIVWDNKENDDGTQDITITYNLTPKKERKITIKDLSKIECVFHPDKSTNKNA

SEQ ID NO: 15578 - protein, 446 aa, synthetic construct
MHKRITTAQYTPDLEALARKQRVCAYARVSSDRDEAFHSLSTQISYYQKKIAEHPDWEFVEVFSDRGITGTKEDRPGFQAMLIACREHRVDIVLAKSITRFARNTVILLDTVRELRSLGIDIHFEEEHIETLSEKGEFMISILAARAQEESRQASENQKWRIQKSYEKGIPVTGNCLGYRMVDHQFLINEEEEQIVLRIFSMYLSGMGVTAIAKKLTEAGVKTRFGRNSWSISEIGRILENEKYKGDLQLQKTYTSDHIDKTIIKNRGERPSYYVKDAHDAIIDSETFERVQKERKRRVEEYGRDKTGKTYLFTGLIRCGQCGSHYVRKTTWRKTKYQNPVWICRKHNTFGKDYCNSRFIPEDILTQKTCEVLQVSELDMATLHRLLQKIIIPEKNVLIFVFKDGTEKRIEWQHPSRRESWTPEMKEAARQRAILYHKERRENKNA

SEQ ID NO: 15579 - protein, 540 aa, synthetic construct
MLKAPTKERQRQVTLVFDPEAIKNSDVPIVALKKKRVAAYARVSTEQEEQQSSYTAQIEYYKGFIQSNPDWEYVDVYADEGISGTSYKKRDGFNRMIDDALNGKIDLILTKSISRFARNTVDALTKTRELKAKGVEVRFEKENISSMDPQAELIFTIMSSVAQEESRSISENVRWGKQRSMEAGKVSVAWSHFLGYEKGPDGLPMIVEEEAELVRKIYAFYLEGKSFKQIAEDLTERGYKTPNGNDVWSRETVRSILTNEKYKGDARLQKTYTVDFLTKEVKVNRGERKQWYIKDSHDAIVSPETFELVQKEIERRCARKGKFYDSPFTGKIICGNCGALYGHRVWHAGSKNQKYIWLCNDKYSREENCSSPKIEDTEIERAFIVAAKRVFSVAGEYTEEYSRAFLSAIGDTSEQEKQLQRLSEEFSGLVDQIEQLVENNAKKAQDQDEYAKKFETLSMQIRQKKAEMETVEKEISDALTRKESVRIYLDGLKSLDSAINKFDIVTWHKLVDYATVMPDKTFIFHMRDDHDEIVSPEEAP

SEQ ID NO: 15580 - protein, 407 aa, synthetic construct
MPKVRRIEAREPSFVPKKRVAAYARVSKETDGLLHSLSAQVSHYSALIQKNPEWVFAGVYADTGITGTSTKKRDEFRRMIADCNEGKIDIVLVKSISRFARNTVDTLDTVRHLKDIGVEVRFERERINSFSGDGELMLSILASFAQEESRSLSENIKWTLRKGYAEGKHYIKKRMLGYRWEGDELVIIPEEAGTVRYIFEEYVKGTGIAEIRDMLKAQGRMGINGNPLRPESIRAVLKNENYTGALVMQKNYNTSPGRQRVNRGELPMYRIEEHHEAIIPRELFEESLKCREDRYRASLERVKRGETCFTGRIRCGKCGSGFSNHVHYKKDGSPYWTFSCNTRGCHGKAACDCPGFGLKKLEKATAEVLGTEEFEEEFREKVREIRMYDRHLEFVFKDGRVAKWQKG

SEQ ID NO: 15581 - protein, 537 aa, synthetic construct
MIEPTYDAGLYLRLSRDDELQGDSSSIITQRQMLRKYATDHNINIYDEYVDDGWSGTNFDRPDFQRMIQDIEDKKINCVIVKDLSRLGRNYILTGQYTELYFPSHNVRFIAINDSVDSINGDNEFAPFKNIINEWYARDISKKVHAALQTKFAMGERYSAYAPLGYKKNPDNPGKLIIDEETRWIIEKIYDYASRGMGAGRITKALIQEQVPTSSWINYQRNGTFAHIFEGQPEEKKYLWTVAQVKHILKDETYIGNSIHNQQTTLSFKSKKKVRKPESEWLRIEDTHEAIIDKELFKTVQEMIKSRRRPTKDNGTQLFSGLVKCPDCGWSLRFGTNKANKNPFSYYSCSKYGQMGKVFCSMHYIRYDTLYEYVLSRIKYWASLAQNDEEELISYLTKNGDKEFASSQQRAISDIKKSEKRLNELDVLFGKLYEDRLQNKINERNFNMLTMKYQQEQDELQSLIETLSAKLKEEREEAVGKEKWIELIKSFTDPQELTAPLLNALIEKILVHEATIADDGVKEQEVEIYYRFVGKID

SEQ ID NO: 15582 - protein, 509 aa, synthetic construct
MKIAIYSRKSKETDTGESIKNQINMCKDYFNRQYDDCIFETFEDEGFSGGNINRPSFQRMMQLAKHKQFDVVTCYKIDRISRNTLDFLTVFEELKSYGVKLVSVTEGFDPSTPAGKMMMSMISSMAEMERMNIAQRVKDNMLELGKMGRWSGGTPPTGYRSVSIINEFGKKETYLELIPEYVDKLNMIFKMIASGHTPGQVSKKIGLPNRTISNILTNPVHLAATEESKSYLESIGYKVYGELNGKGFMPYNRRPRVNGKALWNSKDMFVSTSKHEVAVEPTIWIKANQVFKSRGAEARPRISPNSFLSHMVKCKCGSGMFVFPGNPNKYGEIKYYFRCSDKKYKKTNCDIKWLPVELVEEYFLKTLQGISLDKSILYSYLTSNEDINYDNLIKDVKKDINKRNKDIESLTEKLIFIEGPAIEIVTNKINNISNEISVLNEELLALERKKIFQDQDKINIDTLYELIVITISEFDTLSVEKQQVKIKSFLKEIIYHGGDDIEIVFLGGV

SEQ ID NO: 15583 - protein, 493 aa, synthetic construct
MGVKALQTYAVYVRVSTDRDEQISSVENQTDICRNWLERNGFIWNEKRVFKDEGISGTLFVNRPAIQLLLQKAKAKEIDMVVFKSISRLARDLKDSLEIREVFLAHNVRIISVEEGYDSIKAGKNDMAFELWSLFSAQYSRTLSSSITAALAVKVRRGEHIGRVPYGYNRINQKLVINEEEATVVKRIYDWYNSGWGFKKITNELNQLGIKPKNKSVWQMTSVQRIVRSPIYKGTFILNQYTSVKVGGKKKQIRNPKEKWFVFPNHHPEIVDEEIWNQANQENINTNKTKITAWNEFRNLAKCAVCGSNMVIVQSHLKKKSGERTEWKYLKCSQYRRAGKHGCVNHVPIQYGDFRKFIISLLVEKGESLTLNFQNTIKKGKKEKIKKMQQLLKTNEQKKKSLLDLYLEGLIDKEEFEKKRNDLELEIAKTNQELFVIQQGDSVLTDIKTIKEAFQQLEQQDRDLLHVFQTLVQEIVIHQEGTIDITYTFENPR

SEQ ID NO: 15584 - protein, 525 aa, synthetic construct
MRTIREVLGEGKKGAFYARVSSDKQTIDMQRHHVYKFIENYECEIVQEYIDPGESAFKKKITQRPQMMKLIEGVEQGKYDFVIVYADDRLARSELEHMQIRLIMKQRNTDVILTSTSEIYTERDSITQLIRDGATRYEVERISHRTRDAYKQRTADGKRMGGPIPYGYKEDEKTKELSIVEDEKDVVLKIYEMYHKGDGFSAIANMLNEQKEQTHSQHWKKEAVKRILTNPFYAGYVTNKRIKHGAGNSVEAFSKWEMERCEEIPPIMSKAEWLTTIRLFEQKRNGEIDPKKLKTEYILRDLIHCKNCDLPLVPKNQETKGKNGKKYGHKKYICPNKSCKMSHIVGELHDSIFNSIVAEIKDKVISKSHAELIVEIEKSVEDQMRNTQKETKRLTKQIENYLALVKESEREIDALYNHKKRLSEDNPDIDPLLDVMLDYRIHLLHEIKASEEIIKQKQLEIEHIQEVSFNRKVLQQNVLKELALEFSSLKLDIKRIRHFLVHIVDKITIDKDMNTAYTLKINLGY

SEQ ID NO: 15585 - protein, 597 aa, synthetic construct
MNKTKLFSYVRFSSGKQSDGQSVERQTATANRIANQYGLELDTLSFRDLGVSAFKGKNAAQGNLREFINQIGKRVPVGSWLVVENLDRLSREDVLSALDILKEILRKGITVVTGMDSKVYTYESLSSSTMDLVMSVLLFSRAHEESATKKTRVESQARSLIQKNLNRESGTPAFVIESIGQNVWWSAQDNGNVIPHPEYFSVAQKIISMKWDGCSPGEIQRYLNEHHQPPTKDKKGKADVWGMNLIRSFLNPTVHGRKEFVLDKRDLNGALVRKRHVDESGDEYWINEKETFVIEDYYPALMTETDYLTLASLDKSRAATRNPAGGSGLREIGLLSGIGVLRCGKCGLPMTKNSAAKSRFRYVCASKNTDGKSCGNAGFTGQPLEHVILQLIADHVWNNNQEDRTEWFNHEIDKLDRQIKKLVRLATLTDDSGIDELATEINSYKKQKRELEFKFSEYKLEKSAQVSTGWDEFRKFDTEDVTNPDRKRIRLKIKQAIRSIDCTTFNNRFGLFMVKYIDNTEQRIVLKYNRRSSPGEAFVDIHTVNDKVMVEMSGITLHTHIEKLIDPDGYEQARQAWVKANQSTTEHPPTIIDKLTE

SEQ ID NO: 15586 - protein, 496 aa, synthetic construct
MKSAYLYVRVSTDEQKRKGYSLPEQEDRLLKYCKYNNIEVKGIYREDYSAKNFNRPEWKELFSEIKKKSSGEDKSILFIKWDRFSRNVEYAYEMIGKLRKYKTIAMAIDQPIDFSVPESTVMLAVYLAVPEAENTRRAQNTANGIRRAKLMGRYPNKAPIGFINLTLMDGKKTIAPKEPEADIIKWSFHQAAQNDYKISEIMIMANEKGLICSRSHFFRILRNPVYCGLISVKLNSSEEQMIKGLHEPLISESLFYQVQSIINTKRKTTSKKDDLKELFFLRGFLTCPVCDRKLSGSIAQGSSKKYPYYHCHDRCRTRINAVFLNDCYQNKLQQLILSNNTIDLFKCILQDQNIKTLKASYLYNQNLIERKIKEEGQVLSRGRKLFLAGVLKIDDYNELKKENQVNIRHLKKEARDIFLKLKAIDKKDQIEDKEIVEVFRKFSEFDTSDKKSLVSLIPPVDIDYKTGDLSLDLNQAFLKIFSKKSNRKTNKKNEFY

SEQ ID NO: 15587 - protein, 616 aa, synthetic construct
MKKVLFYARYSTDRQHEVSIETQIELGEAFVKDRGWKLVATYSDAAISGTSYQLRPGIQSLMAHVKRERIDVVLCVTVDRLSRDIEHSAKILKELRYRDADIWTVHAGTPVTDLEMALRAALSHELVEQIRYRTREGMKTAVKKGKASTCVAYGYKLSQQRDANGDRIKGLREVDTVKADIVRRIYQLYADGMSPRDIAQLLNKEGIPGPRSRKWRDTAIRGHVRRGSGILNNESYIGRIVWNRRQYRKNPETERRTARANDAAEWVSKDVPEMRIVSDELWQRVKDRQRVVGDLFDFGQSNRLNATHRPEYLLSGMLQCAECGGPYAISGKDRYSCTNRKKRLPIDDLGGDCCGNSKTITRHELEERVLNCLPVAFYSLDIFDRISEKMVAHETTKLKSTPSRRDGLAAELAAIKSKQASLMQQIQDRNAEGRPRLAILDDQLDELEVTREKLVKELAGTAEEPAEDFQEKIAKLKAQFNPANTELAIRELIFLARNNADEHAKRRLMPIVRDLIQTVVIGKSPGHQPAALQVHGDIANIMASMDVIDIMQQQFVAFAQNDMMARIASGEIDTEAKKEKLLEAYAEELLRRSPEWENLQVSVVAGAGFEPAAFRL

SEQ ID NO: 15588 - protein, 569 aa, synthetic construct
MTIKAYSYVRLSSRGQVEGGGERRQIEMAYKYAAEHGLDLDDSLRDLGKSGYHGEHIRTGALGRFLELVATGKIARGSLLLVENLDRLSRQTPIDAQENFIAILQTGIKIVTLADGQVYERGRDFTQLIIALTIMSRGHEESQIKHVRAKRAVDDRKQDALKGLPRFNNSLVHWIDQERVSGFDYKFSLNEHAKTVQRIFELADQGLGTVGIARILNETETPRFTQQGNDKTKWRDIQVNRILKNEIAIGTYRVTENVDGVDVLMGEPVKNYYPAAVSEELFWRVQRNRKAAPKKGRIGKTFTNLFQDLTECSVCGSRMKMHNGNPRGGTRMRYYTCMNRYMGGGCESPSKLFPYDAFETSVLNHVTEFHLDSRLGLSKTKANRDAIAAEHKEAVVALENLQRRQSNLLAMAEMADDDETRAELLVKMKTFRNQIEQQRAMVSELADQLGSIDDASKEISDVSERIHLARLSWTTASEGDVLASRASVARALKEFISRIVVDLKHQYALVYVAGYTRVYQFDRNGGLVSVMNGADRPFEIVEKVMLLDKVDEKKIAQAKAAYAKIKAAG

SEQ ID NO: 15589 - protein, 595 aa, synthetic construct
MKPRLFSYVRFSSGKQSTGQSVERQLETAQRIANQYDLELDTLSFKDLGVSAFKSKNAAQGNLREFIDQIGKRVPVGSWLVVENLDRLSRDDVLSALDILKEILRRGITVVTGMDSKVYTHESLSTSMMDLILSIMLFSRAHEESLTKKNRVESQARSLIYKNLNREPGTPAFAIESIGGNVWWSSQQNGLIVPHPDYYSVAQKMIEMKWDGCSPGEIQKYLNEHYTPPTKDKKGTKTKWGMNLVRGFLNPTTHGRKEFILDKRDQNGQLVKKKCIDSEGKEYFENQKETFIIEDYYPALLTETDYLTLANLDKARSATRNSSNNDSLNEIGLLSGIGVLRCGKCGLPMTKNSAAKARFRYVCTSKSTNGKSCGNAGFTGQPLEHVILQLIADHIWTTAKEDKTEWFVSEIAKLDQQIKKLVRLASLTDDSDIDELATEINSYRKQKRELEFKFNEYKVERSEQVSTGWDEFRKFDTEDVTNPERKRIRLRIKQAIRSINCTTFNKRFGLFMIKYIDNSEQRVVLKYNRRSSPGEAFVDIHTVNNKVLVELAGITLHTHIEKLIEPEQYEQARKKWTQDNQVDDTPKTIIDELTQ

SEQ ID NO: 15590 - protein, 630 aa, synthetic construct
MRKCFIYHRVSSDQQVEGSGLRRQADLIESYLERNNLCAEMDDPTPVIIAESGGTSAFKGHNMLLSSCLGSWMQEVRLGMWDGSHLVYENGDRFSRQNPFTVVGYINDLVKHKISIHDVTMNIVINHKNSAMLPMVLMNAQRAYDESKFKSDRIRKGWAKKRENAFNNGTIVTNKRPKWIDIIDNKYVLNDKSRIVEEIFRLYQTGIGCPTIAKVLQAKGEEWQFDRPWRGESVHKILRNRRVTGVIFISEIIRDYDSTDNPVDQKRYEMEVYPPVIDKEQFELVQKLLKERRPGSGRTNGGIITKRVKDEGGNFLTNENKKQIYINVDSGKDLIKSNIFSGLCRCALCGEPMYHNVIVSTRTPKKSTSSIKDEYRYIRCLGERDNLCTNKALRYETVEQYVIEHVKRLDFAKIVEPNIDNPEAELTRIKIEEEKNHIIEYQLGIERLRNAGKKIPFDALVELEESQTRLSDLEQLQLTYENTHVDTDELKNLDTAILYDIKNIELRSRIERELSKIVDSIILLRNERNYTITIKYRNTDLIKHVLMVEAKKEPALLAGISIEKVGDMMVYSTPSFMIGHEEGTMPRFQVVKEQPLSQADYLILMNYVESIEGNNIVANWMRDNHNFLFN

SEQ ID NO: 15591 - protein, 604 aa, synthetic construct
MKKVFVYHRVSSDQQLDGSGIARQAELLEGYLERTGICAEMDDPAPVVLSDQGVSAFKGLNISEGELGAWMEQVRNGMWDSSILVVESIDRFSRQNPFDVMGYINALMAHNVAIHDVMANIVISRSNSKDLPFVMMNAQRAYDESKYKSDRIRKGWAKKREQAFNKGTIVTNKRPQWIEVEKDKYVLNEKAAVIKEIFALYQTGIGCPTIAKQLQRKEGEQYKFNRPWTGELVHKILTNRRVTGKIFISEIIRNHDDIENPVTQKKYDMDVYPVVINEEEFELVQELLKSRRPNAGRVTMKKDGKEEILIKSNLFSGIAHCTECGGTMYHNVVRAKRTPKKGDPKIEEYRYIRCLNERDGLCENKAMTYETVERFVVEHLLGMDLSTVIKEQEFNPEIELLRIQIDQVKDQITNYESGIERRKSAGKPISFDMREELDDAKSELERLLARQASLATVQVDVPVLQDVNVTELYDVNNVDIRTRYENELNKIVSNIRLKRNGTSYIIDINYKQNELKRHVLFVENKKKEQTLISEVIIEDVDGAKFYYTPSFMIMLKDGEIRFQQTNEDLSLIDYSLLLNYIDAVDRNDAVGFWMRNQFIFLTSN

SEQ ID NO: 15592 - protein, 505 aa, synthetic construct
MTLAFSYARFSTKSQSTGTSLERQLNASRLFCSERGLTLSPKGYHDLGVSGFKQVKRPELEQMLQAIQSGDIPSGSYILIEAIDRLSRKGISHTQDVLKQILQYKVKVAFVGEDAKTLAGQVLDENSLNDLSSVILVALAADLAHKESVRKSKLVKVAKSIIRKKATEGHKVRGHTMFWIDWSDKKQDFVLNDRVKDVHKIIQLRREGQGPRKIAKTLNELNIPSPRGNPWNHMTVTVVLRSPVLYGAYQTHQIIDGQKVPDVLLENHYPAVITQEEFVTIQADSSKSNKGRPSKANPFSGVLRCECGQAMLFSKKTNLNKDGEPLEYEYHFCLGYAEGRCKNNKRIRDLVPLLVQLMDKLVINQAPKKNLNVELIKQKEQKIEQLNKMLIELDSPPLSVLKTIQTLEAELDILLNTHVEEPVQADVQTLSSITDAQEYNQHLKRLVKKIVVYQKNGPKNLRIKVHKTDGHYQNFLVKDGKVLFKSDTKALKELIDGFNKERREG

SEQ ID NO: 15593 - protein, 526 aa, synthetic construct
MEQYLIYLRKSRKDRDMELESGTFDTLQRHRDVLLALAAKRSYTISGIFEEVVSGDTIAERPEMQKLLSAVESGKYAGVLVVEVPRLARGNTRDQGTVAETFKYSNTKIITPDKIYDPSDEADEEYFEFGLFMSRREYMAINRRLQRGRMASLNEGKYIAGTPPYGYRKQKLEHQKGYTLEIDPEQARVVREIFRMYTDGDPRPDGTLVPVGSYAIANQLNAQAVASPGGTKWSASGVRDILKNPTYAGFVRWAYRPQTKQMVDGALQTSYPVSKQYKLQKGLHEAIISEHAWRRAMAAMGDRSHAPVPGRKQISNPLAGLIYCSVCGRSLVQLPGSHGATMLMCPTPKCKTMGSRRNAVEKALLESLANWLKSYQLKIARQESTGEDHAELERALASAEASLNKLNTQKGSLFDLLEQGVYTQEIFLDRSRLLAARISEAEKAVANLHQHLSSLNSAKLARRQLIPRIKSVIEVYDSLSAPADQNALLKSVLDHAVYSKTVGGQWRESNMQLFIYPKVTSFNSDL

SEQ ID NO: 15594 - protein, 542 aa, synthetic construct
MRAAIYARYSSDNQREESIDAQIRAIKEYAQRNNMEITKIYTDEARSATTDNRPKFLQMVKDSSLKIFDTIIVHKLDRFSRDRYDSAFYKKQLKKNGIKLISVLENIDDTPESIILESVLEGMAEYYSKNLAREVMKGMKENALKCKSNGGTPPLGYDVVDGRYVINEYEAAIVKYIFDSYTSGMGYKKIISDLKSKGYKTKKGNDFTQSSLHDILKNEKYIGTYVFNRQSEKINGKRNQHMSKPEDQIIKIENGIPAIISKSLFQSLKEKMNNRANGRYKAKVNYLLSGKIYCGKCGSAMIGHTSHNKGFTYTSYVCGTRYRTKNCDLKAVKKEYIEDNVMQHIQDNILNKDSIKELTVKLIHHYNKIRNEDTEDLKIFEKRLNEIDNKIENIVNAIADGLYSPSMKTAMSDLEEQKSQITNMINEIKIKFESKQLNMGMIESYLLRDVERLKNKNVDDLKEIINTYVDKVIVTDDKIDTNLKVVHMNGAGNGNRTRIAGLGSRNSTIELYLHLHYLLYTFLIIFQLHLQLVFHLQLQLVI

SEQ ID NO: 15595 - protein, 619 aa, synthetic construct
MQTVAIYSRKSKFTGKGDSIENQIEMCKEYINKKVGPDTKFLIYEDEGFSGSTTDRPQFKKLIKDIKSKKINALVCYRLDRISRNVADFSSTLSILQENNCSFISISEEFDTSSPMGRAMIYIASVFAQLERETIAERVRDNMLELAKSGRWTGGKVPMGFTSERIKLVDKSGSQREYSILKIDESEMTFVKFLYEKYLELGSLHKLEVYITQNQMKSRNGIMFEKSTLKIILQNPIYVKANDDVVSYLNSKGWTIYGQVNNCNSLLTYNKTEQGIKNGKHIKVKKADNEKFAAVSNIQGALDPELWLRVQDQFDKNRDTFPRLGKTHNALLVGKLICGNCNEYMLIQHGQLSKTTGEKLFYYTCSLKRKSHKMLCNNGNAKASYVENLVLQTLKLLAKSKKNYLEYLKNIYENKTKEDNNLIEKLSLKNSLNEKKKQIDNLVTALSKSNEIEDIILSKIKCLKDECLDIEKKLADIENHNIKQKANAINLAFIEDILNECELIDTLPRDKQKMIIDVLIDRIYWYGSGNGEGKIKIKFIGTDDENIEEVELNDEELQQSSLQFGSPCMTCIKKYYIFCKLFKGILLAHLHIQLIKVYIFRRDSKYNNSIFIKLFSYFL

SEQ ID NO: 15596 - protein, 488 aa, synthetic construct
MRGVTYNRYSSDMQREESIEAQIRENHNYSQRHDIEIIKDYIDEAVSGKTDDRAAFQQMINDAKLGLFDIVICHKVDRFARNRIESAINKYTLRKCNIRVVFSGQPIDGTPEGQLMEGILESFAEYYSLNLAQETMKGLKENAYKCRFNGGYAPFGYSVDPVTKLYMINDQEAQYVNFIFKRYADGTKYEDIINELDKLSVTSRFNKKFTKTSLHEILRNEKYAGIYTFNKRKSRSIDGKRNNRSRKPEDEIIRITGGIPQIVDTDLFIRVQEKMNLKKRTTRAKEVYLLSGLIYCGNCGKVYCGNRKHNGSGQLYVKYRCNGRCDNKEIDKSFIEEKVFEKLIENIFSKKALHSLSVKLNEYMKNKKHNENKKLEIIKARFNEITFEQNNIISAITKGYDQPIFKQKLTELDEESKRLKYDYEITKIKLESQTITPDQIDKKLQEQRKHVLDRNLSEVKQFIDNYVESVMIYEDDIEINLKFDSIPL

SEQ ID NO: 15597 - protein, 583 aa, synthetic construct
MSTIDPMAALSEGMTPKRAVIYLRVSTSEQATKGGQSEGFSIPAQREANKKKAQSLGAIVVKDFVERGVSGTSTNRPALKAMLRYLEEENGAVDYVVVHKIDRLARNRADDVAITAKLDEYGARLVSTSENIDQTPGGLLMHGIMSSIAEFYSKNLANEVVKGMSQKARSGGTIGKAPIGYLNVRKVINGVESRTVDIDPERAPLVRWAFEEYAKGETSMAQLAEELNDRGLTTVPTRKLPARPITKRYISQMLPRRYYIGMVNHRGVEYPGNHVPLISQELFEKVQRVMRARQQGERQRKHLHFLKSTVWCGDCGSRLMLQRPTNHQGIEYEYFVCLGRLNKKTNCHMPAVTLDWLENQIAELYRDIQLPDLVLDGLRDRLQAQLAEDYASREEERKQLLNQQRDIRAKQEKLLAAYYNEALSVTMMAKEQKGLESALRRIERQLASLHQGQAETEELIEIALDLARNCHATYLAADDPGKRQLNQTFFEKVYVCSGDDKDHHTHAHLNPWTLTFRSSTLVQNDGTRYHHETRDDDSLTFDDKAPDTTVARSSDLATRVTSSGARICKSTMVRPGRAELFDG

SEQ ID NO: 15598 - protein, 542 aa, synthetic construct
MIRVALYARYSSDRQNERSISDQLSLLIQHAGAKGWAVVGTYTDAAISGSAMANRPGLLAALAAAERGEFDLLLAEDEDRLARNLEHLAHVANRLADIGAGIATLSTDRVQDMHVAFKGLIAQDFIRNLSMKTKRGMASNAEKGLATGSRLYGYRSQPGGAVEIVPDQAEVVRRIFSMYVNDRMSSREIAERLNRDRIPSPAGREWNASSIQGSRQRANGILHSEIYAGVKVYNRVEMRKDRQTGRKITICKPPSEHKRIDVPHLAIIDQDLWNAARQRLDSRQTADPSQRASLRRRPGLLSGLTKCGCCGASYTSLSQGRLVCAAYREKGVSACNNNRHVKRAEIEQRVLDGLRTRLLAPEAIAAYVRAYHAAWAEQAAQVEDRRRPLTRRLAEVERAIERGAEALLSGATAAAVIGKKLEALEIEQAQLKATLEQLDAEGAPPVQLHPRAAENYARKIEQLQARLAEAAGSTDDADRDLIGSVRGLIQKVDIEPINKSRGSPVRVTLHGDLARFVLPQHPPASGCALVVGGGIEPPTCGL

SEQ ID NO: 15599 - protein, 596 aa, synthetic construct
MKTQLYSYVRWSSDKQTGNSSLERQTRKSKEYAARNGLEWAELRDEAVSAYRGANWDEKKSALGGFIGAVKKGLVPSDSWLYVESLDRLSRQNVLDATEWFISVLKLGITIVTGMDEHVYNKESIAANATGLMMSIMLFARANEESETKSKRVVSHAKQLIERHKEGKPATIKSAGSHVWWIDSTGDEREGVKPHPEMWEPAKLIVEMFKEGESIFRIVAALRERYPYGFKGRDWSGSTIKNMRVNPALYGCRTLKFGLEENKLENYYPALCTEAEFYRIQEVKSNNRFRANKSSSISLLAGMRLIRCGQCGGTMNTLTTTDGKLRYVCSSGLATKGGGCTRSWSLSGILIEHCLMIVLSHAYFDASIRNQNSATDLDSQIEKYEIRIAELNTEIKNIASGIAKHYSEALVELLAAAEKERKKLVQELDRTNQKKLLLTANTVFEKDMLNFFELIQWGIISDPTHETRVKLREIVRRLMQSVVIHKRDGIVSLHYSYKEGEYFVFEGAGKRHEWTYYIKRDKQADNTVSPEIIEQVKNHRLIKDIETSLYNLETDHEGMFNLVLDMLAIVNYPKLKGSQFWPKKSSTERTVFKKPA

SEQ ID NO: 15600 - protein, 551 aa, synthetic construct
MATKARVYSYLRFSDPKQAAGSSADRQLEYAKRWAAEHGMALDAALSMQDEGLSAYHQRHVTKGALGVFLAAIDEGRIPAGSVLIVEGLDRLSRAEPIQAQAQLAQIINAGITVVTASDGREYNRAGLKAQPMDLVYSLLVMIRAHEESDTKSKRVRAAIHRQCKGWQDGSWRGVIRNGKDPSWTTLDPESGKFRLVPERAEAVKLAMRLFRDGHGAVRIMRTLAEEGLQLTNGGNPAGQLYRILRNRALVGEKVLEIDGEAYRLAGYYPALLSAEAFADLQQATEQRAKQKGTGEIPGLITGLRLSYCGYCGSAMVAQNLMNRGRRDDGSPQHGHRRLICVGNSQGMGCAVAGSCSVVPVEHAIMSYCADQMNLARLLEGGDRSEALSGRLAVARARVADTTAKIERITDAMLADDAGEAPAAFKRRARELEATLAEQEADAELLERELAALASSPTPAVARAWADLQTGVRALDYDARTKARQLVADTFERIAIYHRGTEPEATRSWKGTIDLVLVAKRGSARILHVDRQTGEWRSGEDVTDLPDGFPA

SEQ ID NO: 15601 - protein, 597 aa, synthetic construct
MPTAYAYIRYSTRRQGDADKDSVSRQMASIQAIVKQHNLDLPEENIYSDTGVSAFSGKNRDKGQLKELIDRIESLHIKEGDYVFVESIDRLSRQRLLQAKELVNGILEKGIVLITTIDGQRYEKPNAKNRIDDLQQDILLSVIAKRAYEESNTKSFRRKSAWKRAKTAAEENNKIFNAKRPPYGIIYNETTEKFEIQEDEAKEIVAIFESLKLKGVTQTIKDINKTSKRRWTQNAVKSFFETKYPLGYYMSQRKEEGKMVFDKYIENYYPQIISFELWNEAKLAMGKRKVNKEAGRPAAGNMNIFKFAAKCGCCGEPMTFQNNFNKNSRSYYYLNCKANFELAGKCSNRFRFDYALGTFLDLIYQSTTNDYFEVHPWQLTEIEEDMIVPENEREWLVMDGTQDTFEYRIASEEEQKQMQRVESFKTLLIQLMSDKAKNTAEQKEVIDKENELIRSKTRLEGIERSIEESEEGYISKFVMKQLAQLEQEIETLTAELEILKASVNTARTDIKIYSVDDILKLFATEEGRLKINNFFTMHKIAFSFNYDKLLNTVYCKIYKNEQYLDKIAKTINTKDPLGDYGLGNLAEQFFINGTFSK

SEQ ID NO: 15602 - protein, 542 aa, synthetic construct
MYNKNSLIRVADLYIRVSTDEQAERGYSQRDQAERLREYCTRMGLTIGQTIFEDHSAKNFERPEWSKYFDGLKKRKKEAREARLLLFTKWDRFSRNTGDAYQMIKELGRLSVEPQAIEQPLDLRVPENRIVLGVYLSTPEVENLRRAINVFNGMRRARKEGRIMGLPPYGYINRCTEDGTKYIGVKYPEAENIIWAFNEIVKGKLPSEHVRLLMNKREGKNLTRNAFMVAVRNPVYVGKVFIPEHENEEAHFVKGKHLPLIDEELFYRVQDVLDGKSRRSNVEVSKNKVLNNESFPLRGVLVCPRCGSHLTASRSKGNTKYYSYYHCNSKCGFRHNSEAINNSFIDELKRFDIKVGMREQLGKMLLKNYKRYCGSIDDERKEIVEEIEKLNLKQAKARDLFLTDRLDEEDYAEVKVECRKKLEELEETLKSLTRASKDNDIPGKLKKALDAISGISERYKNSDIEDKRKIASSIYHGKLEFDGRNFRTPISNSFLQLISLTNSGLEDKKKGLQDLKNLKDQEVIPLGFEPRTHTLKVYCSTS

SEQ ID NO: 15603 - protein, 596 aa, synthetic construct
MKTQLYSYVRWSSDKQTGNSSLERQTRKSKEYAARNGLEWAELRDEAVSAYKGANWDEKKSALGGFIGAVKKGLVPSDSWLYVESLDRLSRQNVLDATEWFISVLKLGITIVTGMDEHVYNRESIAANATGLMMSIMLFARANEESETKSKRVVSHAKLLIERHKEGKPATIKSAGSHVWWVDSTGDKWEGVKPHPVMWEPAKLIVDMFKEGESVFRIVAALRERYPYGFKGRDWSGSTIKNMRVNPALYGCRTLKFGVEENKLENYYPALCTEAEFYRIQEVKSNNKFRANKSSSISLLAGMRLIRCGQCGGTMNTLTTADGKIRYVCSSGLASKGGGCTRSWSLSGILIEHCLMIVLTHAYFDDSIRNQNSATDLDGQIEKYEVRIAELNTEIKNIASGIAKHYSEALVELLAAAEKERKQLVQELDRTNQKKLLLTTQSVFETNMVNFFELIQWGIISDPTHETRVKLREIVRRLMRSVVIHKYDGIVSLHFSYKEGEYFVFEGAGKRHEWTHYIKRDKDTSTVVSAEVIEQVKNHRLIKDIETSLYNLETAHDGMFNMVLDMLAIVNYPKLKGSQFWPKKSSTERTVFKKPA

SEQ ID NO: 15604 - protein, 676 aa, synthetic construct
MKSVKSVKSFIYSRVSTMQQQHGFGIDRQISTVTDYLSFATLDQRLGYQLDPENYEILDSDIGKSAFKGANWGAKSSLGKFYKAVVERKITSGVLVCENIDRLVRLSNYEANNKLSTLIMNGIDILEVESGSCFSNRIPESSTVLNMSISRAYNESLRKSNFSKKSWKKRKATAEEQGTALNNNTPDWLSLSEDKQAYVINNVNVEKISNIFKMYVNGMGVTEIVKTLNANGDRYNDRGWNLVTVYNKLRDRRLNGYLVGKYKTVSQRDDETDEEAEKRLLKNRKARHEANLNAIRIYPIVIGDELFSKVESLMDKNIQARKPRSTTTKQRNLFNGISRCLVCGSPMNVQSMSNGSQYFRCYRQRTKDEHCDSKLVRYSDSERFLLNHIKGLDLNVIYGQDVEQSSVESLKSQLSDISSKIDALNVQMQSASDEEELFLLMGFKRKRIAERETIAEQIYKIENESHIVKLNYDYDIKAISDQNNTVLRRKTNMHLSNVISSIKCGRFDLSDGTIYIYDISYHRDVLKHVLITDNRCNLRSMITISNNCVLDIGYMKIDIMNHRVEMIRQPSVTEVEMTKVYLEYLNEGFEIAFELIDEEVIKVLDVLSKKVEVLQSTFAEGHNIDKVLKDVEAVISTLNPMIATCRNELIIHRFKLLCETVQVIEQGNKALLELDL

SEQ ID NO: 15605 - protein, 584 aa, synthetic construct
MKSYLYSRISTLQQTKGFGIDRQVQTVTDFLKYATIDSRLGYQLDVEDFEVLESDLGKSAYKGNNWKPNSSLGRFYKDVVSGRITSGVLICENVDRLVRMSNYEASNKLSTLITNGIDIIEVESGMCFSNKIPESATILNMSISRAYSESKRKSDMATKSWANRTNKLKDSGRAVSKVCPRWLTVKDGQYVLDEKQAETLLYIHQMYLEGHGNSALVRRLNAAKRLDNGKPWTTITLHRVLRDERLTGRMVMGKTRKPIPVLDDQGNKIIENGKVKTYVPVEIIDDAYPVVVPRELFNQVQAMISEKEGSKVKKTTKYMRNIFNGVSRCSSCGEALVADKNGHGKLFYVCLGKRHKKACNSVGIPYEAFERTMLENLSQMDWQRIYTGNTDMEAMNQCRVRLVAVEREIAELEGELESSDEDMVLALVRAIKKKKAVRDEVQGELNSYVKAGTDNVTFNPDLKRVLNQEEVELRQDVNVELRKIIKYMKVGRMDRTITVQLQYYTDVVSHLIFIDSKTGELLSRSHLTNDLIYESDSVTIDLTGGTWDIKGDKFTEWDQFALEVWKEIIEQAVDQAQEILKNRI

SEQ ID NO: 15606 - protein, 522 aa, synthetic construct
MEVSKNVTVIPARKHARKSSDEEKPKLRVAAYCRVSTDSDEQATSYEAQIEHYTAYINGHPDWELAGIYADDGISGTNTKKRDEFNRMIDECMAEHIDMVITKSISRFARNTLDCLKYIRQLKDKNIPVFFEKENINSMDSKGEVMLTIMASLAQQESQSLSQNVKLGLQYRYQQGEIQVNCKWFLGYAKDENKKLIIVPEEAEIVKRIYREYLEGASMLKIARGLEADGILNGAGREKWHTSNINQILRNEKYIGDALLQKTYTTDFLTKTRVKNHGIVPQYYVENSHEAIIPREIFMQVQEELIRRRIVHTSPNGKNRTFSSNHCFAQMIICGNCGEVFRRVHWNNRGKKSVVWRCVSRLENTGLFCDARTVAESQIEQVLVTAINQTLCDKDAFLATLQENIETVIAHENDQTLSGIDTQLQELQAELLKLASSKADYEDVADEIYRLREEKQKVQLQNVGRDELKKRIADMGAFLREQPTAIAEYDEPLVRRLIEKVTVYEDKFAVEFKSGVTMDVNE

SEQ ID NO: 15607 - protein, 520 aa, synthetic construct
MKKVTKIGQNTADVTEKSKLRVAAYCRVSTDSDKQLESLDTQIKHYETYIKANPEWVFAGLYYDEGITGTKKEKRPELLRMIADCENKKIDFIVTKSISRFARNTTDCLELVRKLLDLGVFIYFEKENINTGSMESELMLSILSGLAESESVSIAENSKWSVKRRFQNGTFKISYPPYGYDTADGKLVINEPQAEIVRFIFSEILSGKGTGKIADELNHRDVPSKKGGRWTATTIRGIVGNEKYTGDAIFQKTYTDMHFNRHYNYGEKDQYLIKNHHDAIISHEEFNAAQDIIEQRGKEKGVEKYQGKYQNRYPFSGIIICENCGGKFKRRIHSTGKHNIAWCCGNHITDTKKCSMKYIPESSFEHAFVTMMNKLIFGHQIVLKPLLMGLRSISSEDNISKLKDLDKKLEENAEQRKVLVGLMTKGYLEPAVYNKGNNELLQEAERIQRQKESISRLINSDNINLHEVSELLQYATKSEMMNGFDGELFTRFVDRIHVYSRSEIGFELKCGITLKERLVR

SEQ ID NO: 15608 - protein, 454 aa, synthetic construct
MKQIKDITVIPPDPKYDSYIRIEQKQLNVAAYCRVSTRFEQQENSYEAQVKYYTEKITANPKWNFIGVYADQGKTATDTKFRDSFNDMIADCYAGKIDMILTKSISRFARNTVDFLRVIRELKYRHIRIIFEKENIDTMDSTGELLITILSSQAQEESRNLSENTRWGIVRRFEQGIVHVNHTKFLGYTKNAEGKLVIVQQEAEIIRKIFDLYLQGLGLSRIAKTLAEQDIKTATGNSKWHSSTIHKMLKCEKYIGDAMLQKTYTIDFLSKKRIINDGVAKRYYIKNNHEPIISKDQYYQVQEELKRRNNKITKGTRYSSKYAFSGLITCLECGSKYTRVTWYNKQHNTIVWRCKRRLQSGTTQCNNASSLKETALLNALYEVLSTIVATEIQTASSLSLQSRAAIVNVFNGIEINIKAIEKVKLSSIINSIYVIDKEQIRIRLTSGLIVDQTL

SEQ ID NO: 15609 - protein, 551 aa, synthetic construct
MSSTEREIIVIPASKSLSFGGRRNRQMRVASYSRVSTDFEEQLTSFHAQKSYYTDLIMRTPEWTLAGTYADEGISGASAEKRPDFMRMIRHCKKGKIDLIITKSISRFARNTLDSIGYVRKLKAMGVGVLFEKENINTLEENSEVVLTILASLAQEELNSLSLNVKMGKRMAMQEGKVFFQYTKCYAYKKGADSQPEIIPEEAAVIRRIYTAYLAGKSVPAIARELAEDGVKSHSKNGEWTYSTLQSILTNERYCGDVLLQKTYITDPISKKVKRNHGELPKVLIKNNHPAIVSRELYDRVQQERTRRGSKRKVSKASVTEQSRYSSLHALSEILICGECGSPYRRAVWTKRSGEKQAVWRCISRLDYGTKYCRDSVTLDEDSLHAAVMQAINDTRGSRREFIPFVTAHLNRTLREDAQGEVDAEQLETHIAQLKAQTMELVAQSISNNTVGENEGRLKVMSDEIKALCDMLVQYRQSCNAQGGLNSRMGEIAEILENEPEQSDTYDDTLVRQLIDTIRVVGESKLEIMFRSGLTYEQSISPKVKKLVRVS

SEQ ID NO: 15610 - protein, 526 aa, synthetic construct
MNLLNIQGANALNPQREIIRIKSTADESTVKLRVAGYARVSSDSADQLNSFSAQVNYYQRLIEKNSSWELAEIYADEAVSGVSTEKRDDFGRMLSDCKKGKIDRIITKSTSRFARNTLDAIRVVRELKEMGVTVYFEKENLDTASLTSENLLTLYSLFAQEESMSISKNCKKGNRMRMERGTYVSSNPPYGYRLVNNQLEIYEPEAEVVRRIFAEYLAGNSTLRIAQGLMEDDVPFRDGRRNWRYQSISLILKNERYAGDMLLQKSFSEDELPYRKRKNKGELPKYYVKCTHEPIIERIQFELANILLKERGEHVPGKYGEYPLSRKIKCRECGTTYRRKITNQIPYWVCRRHDGSKEDCQSQRMSEEAVYRAFARLYNKLKKNYSTILLPMLNQLEKLQELQTRNNPEISTINKQIAELSEQNHVMNGLLSKGILDSALFISQTDELNRKLRALKVAKARILEEQESDGLLDATTDLVELLENGPDRIDGMEEALFGELVDSIIAHDTQTVDFTLRNGLVLTERL

SEQ ID NO: 15611 - protein, 509 aa, synthetic construct
MKVAIYSRKSKETDTGESIKNQINMCKDYFSRQYDDCIFETFEDEGFSGGNINRPSFQRMMQLAKHKQFDVITCYKIDRISRNTLDFLTVFEELKSYGVKLVSVTEGFDPSTPAGKMMMSMISSMAEMERMNIAQRVKDNMLELGKMGRWSGGTPPTGYRSVSVVNESGKKETYLELIPEHIDKLNMIFKMIASGHTPGQVSKKIGLPNRTISNILTNPVHLAATEESKSYLESIGYKVYGELNGKGFMPYNRRPRVNGKALWNSKNMFVSTSKHEVAVEPTIWIKANQVFKSRGAEARPRISPNSFLSHMVKCKCGSGMFVFPGNPNKYGEVKYYFRCSDKKYKKTNCDIKWLPVELVEEYFLKTLQDISLDKSILYSYLTSNEDINYDNLIKDVKKDINKRNKDIESLTEKLIFIEGPAIEIVTNKINNISNEISVLNEELLALERKKIFQDQDKINIDTLYELIVITISEFDTLSVEKQQVKIKSFLKEIIYHGGDDIEIVFLGGV

SEQ ID NO: 15612 - protein, 429 aa, synthetic construct
MPSAISYIRFSSVKQVSSNSKQRQAEMIAGWLSANPDYSLSDLKFEDLGRSGYHGEHAAKGGGWAKLLAAVEAGAIKAGDVVLVEALDRTGRLETVDALHFLNPILRAGVSVITLDDGNVYNRESLNGPQIYLLVAKIQAAHGYSKILSERVKRSYQIRKEQARNGGPVKRAVPLWLTTDGKLKEHVAEQVKLAFELYVSGMGKIAIARRLRASGIEELSTCCGPTIDAWLQNKTAIGYWDDIPEVYPPAVSRELFLQAQKRRKDVSTPRPSKSAKHLLVGLVKCGVCGANYIMQSKGGTPHSMRCLTRQRFKDDKCKNTKTIPKNVLEWVRLQTSHFALNEALQKQQLTLSDKRRLEVEAEIEDLSSQISKIVSLLADVPDLPELGARLKGLQAQRVALQDELLVLERTEETLPAWEPDTCSSMMRWG

SEQ ID NO: 15613 - protein, 489 aa, synthetic construct
MITTNKVAIYVRVSTTSQAEEGYSIDEQIAKLKSYCDIKDWTLYKVYKDAGFSGSNIKRPGLQSLIADAKNKHFDTVLVYKLDRLSRSQKDTLYLIEEVFIKQDISFFSLQENFDTSTAFGKAMIGLLAVFAQLEREQIKERMQLGKLGRAKAGKSMMWARTSYGYIYNKETSNVIINPAEAEIVKIIYAEYLAGRSITKLKDYLNEQGLNTKTRPWYYRAIHMILSNPVYAGYNQYMGQLFKGDHQPIISKEDYDRTQEELKRRQIKAAEMNNNPRPFRAKYMLSGLARCGYCGAPLRIEMTAKRKTDGGRTYRYSCMNRTAKRTIGPTVYNNGKKCESGLYYREDLEKYVLNEVAKLQHDPEAIVTLIEPSKTTVNEQELKSRLNALDTKISRLNDLYLNNLTSLEELKEKTAGILREKSILEKQLTESPTLRLKNEKEKINRIQDKADIRSLPYNDQATIVRSLIQKVDVTAEAIKIRWLINNFSD

SEQ ID NO: 15614 - protein, 623 aa, synthetic construct
MGRTGVTVDAAMFACYTAKIDELEADMDAIPYIRFSDPKQEKGHSKERQTQDILAFCLRQGWPIREVIEDLGQSAWKGAHLTQGNLGKFANRVRAGEVAMPAVLVVEKLDRLSRQGHHVMVPWMRELCGLGLRIAVVDGGRVYDATSLTGDLMPEIEAMLRGNLAFKESQQKSERVLDALTKKMAKAKEKGTVITAKAPGWLKVLPDRSGFEVDDYRADIVREVYEMAADGKGARWIAKTLNERGEVAWGLPRADGKPRTWEIASIRLMLAQPAVEGDYQPGFSNTSKSKRTKFTEKLVGYYPRIVDADLVARARAAVQARKTGPRLGGRHTGNVANLFAGLVRCGECDNRMHLRLTSGERRYLRCNHAARSGDCSQKASFAYGPLESAVLDEILHLALNDQHFAKVDETGALARSLASIEKVLADQGEKARRLAKVLALVEDDPAVVEELLGVRKEITALETQRDEVAEQLAAARGAVTPEEHLARVRDLRDALQDEDEPTRQAARLRVQRAMQGLGVRLVCEVKAGERETLLMLSTGFFCRIRHDGSVIGRVDMAVLASRGVAPHEGQAAQTARLLTDVIDAMTELSGGEPREGAFENDADQDLVAAVGTHLRRKTAHDAL

SEQ ID NO: 15615 - protein, 490 aa, synthetic construct
MKTAYLYVRVSTDEQKKKGYSLPEQEDRLLKYCHYNSIKVLGIYREDYSAKDFNRPEWKKLLAIVKQKPREDKKILFIKWDRFSRNIEYAYEMIGLLRKYNTTPIAIDQPIDLSVPESTVMLAVYLSVPEAENSRRAMNTANGIRRAKQMGRFPGKAPLGFLNNTGIDGRKIIVPKQPEADIIKWIFRQLAKNINKIDHIRKMADAKGLKCSRSHFFRIIRNPVYCGLISIKISSKEQQMVKGIHAPLISEVLFNEVQRIITRKRVVTSKTNELNETFYLKSFLLCPICYKRLCGSFSKGKTKRYPYYHCNAKCKARVNALTLNDAYCSELQSLQLSQNVTKLFSSILEDCNINIKKAEDIQERNMLVRRLRDQELLLSQARKLFVASVLGNDDYYAIKREYQINSQSIKGELSNVNTKLENYKKHRELMSVSFIDIFQVFKHLETADKMHLVSLIPPNRFDLQKRSVSLHLDSALSKILLPKISQIQQP

SEQ ID NO: 15616 - protein, 585 aa, synthetic construct
MAKKLYSYQRWSSAVQKEGTTKERQSFGAREYAKENGLELVEIVDDGISAFKSVNSRRGALSAFISAVEQKYIESNSILYVEALDRISRDKVLKAVGLFNDVLELGITIVTGADKKVYTAESVNENSMDLLQSILLFSRAHEESKTKQLRTNGNALALIRRFQDGNPTTIKSIGSHPWWIDASTNQHEAVKRHPEYWKVAKDAIDMFMEGKSVFSVCKYLNATYPLQWKGGKSWDHANVRKLRINPAVYGMRKITVDGHDYELENYFPPLITHGQYLRLQQIRETTKYVGRVSEEPNNINLLAGMKVFRCGHCGSTMMAMRHKDTIRYVCEKGRYGKNGCRVWSLPGELVEHCLMLVVTMAHIDMNHKGGIEKEDYTLKINDAEHQVQDLSNRISNLTTLVANGLGNVDEVIGTMRALDEQRNDLKLELEVLTRKQILAQDNTFEELMVQFFNYAHWNVIQTVDHEYRLKLRDIVKSSIGDVRAWKVDRRLYISFQIKGHEEYFNFSAGKKPYEWGYHMGDIPFTEQKKVSTESTIEIPEEMLKKMVSMYAHLNDASMSMLNEAKKMLQVAGYPELDGKMFWPRK

SEQ ID NO: 15617 - protein, 574 aa, synthetic construct
MRKINKIEPSAPVMPTRKKVAAYARVSEEKGRTLHSLSAQVSFYSKYIQTHREWEYAGVYADEGISGTTENRDEFKRLLEDCDAGKIDIVLTKSISRFARNTVDLLETVRHLRDIGVEVRFEKENINSMSGDGELMLSILASFAQEESRSTSENVKWAIRRNFQKGKPNSFNIYGYRWNGEQFVVEPEEAKIVKLIYDNFIKGMSAEQTEVQLEEMGVKSYTGGRFSNTSIRAILKNEKYTGNMLLQKGFIEDHITHKLKPNNGELPQYWVEDSHEAIIDLETYEKVQAEIARRRKLGVFANPSINTTCFTSKIKCGNCGVSYRRSGKRQSKHSSDVYYIWTCQTKDRKGVSECSAKNIPEKILQGVCAQVLGLEEFDEDVFLDQVEKVVVNGKDELIFHFQSGSIIHQHWKSTARKDWWTPEARAAKSAYSKKNPRSSGNITCFTGKINCSKCGQNLRRNTSPRVSGQKAHHWRCPPHTDCGHSGLEENLLKTISSDVLSIKEFDEGIFKEKVDSITVVSNTELLFQLKDGSKITKQWQFKRRQPAWSEERKKRQAEKMKEAWRKKHEQNKDS

SEQ ID NO: 15618 - protein, 528 aa, synthetic construct
MSRTKTAKNVKTIPATLRQFSSTPINEQRKRRTAGYARVSTDSEEQFTSYEAQVDYYTNFIKSRDDWEFVKVYTDEGISGTNTKKREGFRRMIQDALSGKIDLIVTKSVSRFARNTVDSLTTVRQLKEKGIEIYFEKENIWTLDSKGELLITIMSSLAQEESRSISENVTWGQRKRFADGKVTVPFGHFLGYDRGEDGNLVLNPKEAVIIQRIFSMFLQGMTPYGIAKQLTADGILSPAKKDKWNAGTIKRILTNEKYKGDALLQKSYTVDFLTKKKKANEGEIPQYYVENNHEAIIEPAVFDLVQNELEKRNPANNRHSGVHIFSGKIKCGSCGSWYGSKVWHSNSKYRRTVWQCNHKFKGQEKCATPHLDEDTIKELFVKAANKLLEDKDEIIANFESMKDVLYDTGLLETKQTELQNEMEIVTELIQQCITENANVALDQGEYQRRYDGLVQRFDTTKEDLEKVSGQIKEKVTRRQTLAAFLNELKKQDELLTDFDPLLWHSLVDCVTVLDKENVQITFKNGITI

SEQ ID NO: 15619 - protein, 596 aa, synthetic construct
MKTQLYSYVRWSSDKQTGNSSLERQTRKSKEYAARNGLEWAELRDEAVSAYKGANWDEKKSALGGFIGAVKKGLVPSDSWLYVESLDRLSRQNVLDATEWFISVLKLGITIVTGMDEHVYNKESIAANATGLMMSIMLFARANEESETKSKRVVSHAKQLIERHKEGKPATIKSAGSHVWWIDSTGDEREGVKPHPEMWEPAKFIVEMFKEGDSIFRIVAALRERYPYGFKGRDWSGSTIKNMRVNPALYGCRTLKFGLEENKLENYYPALCTEAEFYRIQDVKSNNKFRATKSSSISLLAGMRLIRCGQCGGTMNTLTTTDGKLRYVCSSGLATKGGGCTRSWSLSGILIEHCLMIVLSHAYFDASIRNQNSATDLDSQIEKFEIRIAELNTEIKNIAAGIAKHYSEALVELLAAAEKERKQLVQELDRTHQKKLLLTANTVFEKDMLNFFELIQWGIISDPTHETRVKLREIVRRLMKSVVIYKRDGIVSLHYSYKEGEYFVFEGAGKRHEWTHYIRRDKDTSTVVSAEVIEQVKNHRLIKDIETSLYNLETAHDGMFNMVLDMLAIVNYPKLKGSQFWPKKSSTERTVFKKPA

SEQ ID NO: 15620 - protein, 541 aa, synthetic construct
MMRQGKNGARVYSYLRFSDPRQAAGHSADRQLQYAQRWAAERGLVLDESLSLRDEGLSAYHQRHVKQGALGTFLKAVDEGRIPDGSVLIVEGLDRLSRAEPIQAQAQLAQIINAGITVVTASDGREYNRAQLKAQPMDLVYSLLVMIRAHEESDTKSKRVKAAIRKQCEGWVAGTYRGLVRNGKDPQWLHWDGRAWQLIPERVEAVRYALELYKQGVGATRAVRKLAERGYALSDWGLAGQQLYRLVKLPALRGAKRLSVDGEDYLLEDYYPRVLSDDEFHELQAAAETRHGRRGASDIVGIVTGIGITWCGYCGTAVVAQNLVSRMKADGTLADGHRRLHCTSYGSGQGCKASSCSVVPVERAVLAYCSDQFNLTRLLEPADDGRQLQQRLQACRRQQADVERQLARVTEALLADDGGAAPLAFVRKARELEAELQRVQAEAEQLEREQAVQGLGHTPAAAEQWQQLAADSADIYGPAREQLRQLVLDTFSRIVVYMRGIVPEPKSKTIAVMLVSRAGQRVMLEVDRRSGAWKASRDRHA

SEQ ID NO: 15621 - protein, 568 aa, synthetic construct
MNKPRLYSYVRFSSERQAKGQSLERQKSSIENLVKKIAVEHNLEIFEEYQDFGVSAYKGKNATEGALSEFIQHVESGKIPRGSYLLIESLDRFSRANPMNAVNMFTSLLLKGIVVITGIDNQIYKVSEVNNDTLQQLMFSVMLFSRANEESETKSKRTIASALSKIKRHQQRQPGDPVVAIKELGQDKWWIDSSSGYVKPHPVYYPIAQKLIELKQKGYSNRLILAYLQENHPAPTEGRSRGKWNMQHASRIIEPAIYGQKVINVNGESFTLEDYYPALVTKDEYERLKFQIGNKSFAPLKEANPEIPLLSGIGILYCKHCGCHMFKMKSSVKNQPFAYRYVCSSRDSHRNCSKWGFRARTLELALLQLLADRVFVESAPVMSGVENLIADIDEQIANYLVAIGSAKSPAMINKLTELIDGLENQKADYLKQKQIHDDQMVRMNTAGWDKFKQLDINDTQNVERLEIRASIKTVIKRIDCEQIDTAHNFFFVTYRDERTQKLVIKKDTAWKKGQVYIDSTTVTNQQLLESEGLVMHSHIDIMIDREKFLKEFEERSKHEPTIIDDLTQ

SEQ ID NO: 15622 - protein, 646 aa, synthetic construct
MYRPICYERVSSFDQVLSGAGLDDQRSIIEQYLKENAEKFTKDRIYITDEGVSAFKNANISPESNLGKFLQDVRDRRYGKGDALIVTSLDRLSRRSSWAENTIQFIVVSGIAVHDISTGLVLRDDDNFSKILMEIILQRSHNESLMKSVRSKVAWQNKVLRAASNGEVVSNRMPFWLENVGNKYSIIQEQAELIVKCFEWYKSGLSTGEIVKRINNPRWQMVRVSRLIRDRRLLGEHKRYNGEQIPNVYPKIIDEELFTIANRMMDTVMAEKKKPAEDLLLEPEVVKQIFTLSESGLGSGAIVKQLPDGWSTVNVLRVLRDKRVVEEKIIDNLTFERVNAKLTKNGVANRIRKDVTIGQDDYISNLFSRILKCGCCKGNIAIHYNHVRTKYVICRTREEKKRCDAKSIQYTRIEKNILNVVMGVDFNKLMNENSANNDSVLELLKVELSALRNEEETYLSKIAERKATGKKTSLPLMEGLTDVQDRIEEIQNRISSSMGQEDIPVFNYNLDSLLDPMNVELRAKVRKELKQVLSGIHYWVFDKRIFVHIKYFNDVLSHTLVIDNKRGGGSVLQEIAITERDKERTYIVKEKGSTVFKVQSDGSNWVLYVSRLKTVTDIYYYLELLRSREPETFDLIVNEDMIEWID

SEQ ID NO: 15623 - protein, 550 aa, synthetic construct
MKIAIYARKSKYSPTGESVENQIQLCKEYLQAKYKSETLQIDEYKDEGYSGGNTNRPDFKKLIAQIEDYDMLICYRLDRISRNVADFSSTLTLLQNNKCDFVSIKEQFDTTSPMGRAMIYISSVFAQLERETIAERIRDNMMELAKMGRWLGGTIPMGFDSEPITFIDENMKERSMTKLIPNVEELKVIELIYEKYLQLGSMGKVVTYLLQNNIKTKKGKDFTLGSIKLILTNPIYVKANKEVIKHLKTQGITVCGDVDGKKALLTYNKTTGISNDVGTKTIVKDKSEWIAAVANHKGIIPADKWLQAQNIKDKNKDSFPALGRSNTTIASRVLRCDKCESTMGVSHGHVNPSTGNKHYYYNCTLKKRSKGVRCDNKPAKAAEIDEAILITLENMFKAKSSIIDNLKAKNKARRIEMISSNRVDVINKIIEDKTKQIDNLVNKLSLDEDLTDILFKKIKGLKAEIKELEDELLTLTSDDIKLNEDEVVLDFTEKLLEKCSIIRTLDILEQQQIVDALIPLVTWNGDTEVLNIYPLGSPELELKEAESKKK

SEQ ID NO: 15624 - protein, 551 aa, synthetic construct
MGLDKLKEQFMKIAIYSRKSKYTGKGDSIENQVQMCKDYSSAKYQGVKLEYSVYEDEGFSGSNLNRPKFKELMDNIKKYDVLICYRLDRISRNVADFSSTLEILQTNNCDFVSIKEQFDTSTPMGRAMIYIASVFAQLERETIAERIKDNMLELAKSGKWSGGRVPLGYKSESTTYIDDEGKERKVVKLVHDPEELKLVKLIYETYLKEGSLHKTEVWFTKQGIKSSTGILLEKTTLKLILQNPVYVKSSPEVLAYLKDDGWNVYGEADGVHALLSYNKTESISLNGKSSKRVQNKENWIAAMSSVVGIIDADTWINVQEQFSKNKGTFPRLGKTHNALLTGKIRCKNCGSYMKIQHGHKSVKTGKTLYYYVCSMKAKSKGVLCSCKNAKANEIEPAVLQALENIGKNRLEFLDRLYKENEKKNNANNRNLKKITLQKQIDDKQKQISNLVDKLSLDDSITDILIDKIKVYKNEVEVLKSELLNIESETIDDNNYITDLEMAEEFLNKCTDINNMSREQQKQFINIYVDKILYDGETVDLEILGYRTSKKN

SEQ ID NO: 15625 - protein, 551 aa, synthetic construct
MATKARVYSYLRFSDPKQAAGSSADRQLEYAKRWAAEHGMALDAALSMQDEGLSAYHQRHVTKGALGVFLAAIDEGRIPAGSVLIVEGLDRLSRAEPIQAQAQLAQIINAGITVVTASDGREYNRAGLKAQPMDLVYSLLVMIRAHEESDTKSKRVRAAIHRQCKGWQDGTWRGVIRNGKDPSWTRLDPETKTFQLVPERAEAVKLAIRMFRDGHGAVRIMRTLAEEGLQLTNGGNPAGQLYRILRNRALIGEKVLEIDSEEYRLAGYYPPLLSAEQFADLQQATEQRAKQKGTGEIPGLITGLRISYCGYCGSAMVAQNLMNRSRREDGGPQHGHRRLICVGNSQGMGCAVAGSCSVVPIEHAIMSYCADQMNLTRLFEGGDRSEALGGRLAVARARVADTTAKIERITDAMLADDAGEAPAAFMRRAREMEAELADQQAEVEALEHEMAAVASSPTPAVAKAWAELQEGVKALDYDARTKARQLVADTFERISIYHRGTEPEQTRSWKGTIDLVLVAKRGSARILHVDRQTGEWRGGEEILALPDSPLP

SEQ ID NO: 15626 - protein, 428 aa, synthetic construct
MRVRIIEPILKVQKKKRVCAYARVSTIHDKQGESLENQVQYYENIMSSNPEYEYVGVFKDRGITGFTDNRPEFQRMLHLCREGKIEIIITKSISRFARNTAVVLYTVRELKKLGIEVRFEKENINTLSGDGELMIAVLSSFAQEESRNVSENLKWRARKQFQQGELMINTTRFLGYDKNEYGELVINIEEAELVNRIFNDYINGKSSSKIAKELNKENIPTVGNKTWHNSTIIGILKNEKYKGDAILQKYYTPEHLKKTSIRNNGVIDSYYIKENHSPIITKEMWEQVQEEIKRRGKTKGNVVGDVDKYTKRYPLTGMLYCSKCGATLRRRTWNSKNSSKKIVWQCSNYIKNGKDACIGTSIDDVVISRLNIKEATIVKEEIKDGKKCYSYTSEKGSGEFSSKAVTNKTENGCLLQSFNRPIRTVIKL

SEQ ID NO: 15627 - protein, 564 aa, synthetic construct
MREVNRKACVYVRVSTDHTEQDQSYQAQMTYFKEHYKDYEIVETYAERESGTSIKNRTEFQRMLKDAGLELEVKRGNINIYNTDKEPRFNYIITKSISRYARNTEIKTVIRKLKAQGVYIIFDDINKSTESEDDELLVGILLQMSEEESRNKSKIIKWGKKRSAEANVIPMNIEPYGYKAIIEENRLEIIESEANVVKYIFQLYLDGNGARKIREILTSEGYKNRKGKEFTENMILYIIQNAKYCGINVRNRYVKNDIFNQTSQIELSEDQWLKMKNERIDVIISEEDFHKAQEIIQGRRKNGRGYRGYTKSQYANKIQCTCGGNYIHNMYYNKDGTKRGIFVCNRRKKMGKAKSGCTSRNIFETELEEVIDEYVNGKYQKLFDLKVKWGLREIEEKTNKVNALDLKNVSVKLSELNNKLNENRSKIEKLIDMLLDSSSTKEDIINSKINKLEEENKKLESEKSELDVIINEKNLVLENLSKTSKMLNNIKEKNTKTTISKKDFIEDIAIIRLDKKDKIEIISEAMLIMNSVVLTTMKFKGENTFLENWINTVKPIVKKENNSY

SEQ ID NO: 15628 - protein, 567 aa, synthetic construct
MKQSNNKNHAINTAALYCRLSRDDNLDSESNSITNQKNLLKKVAKEKGYTDTLFFVDDGISGTTLDRPGFQQMIKAIEADYISAVFVKDLSRLGRDYLKVGYYTEEFFPQHDVRLIAVSDGVDSDEGDNEFTPFRNIMNEWYAKDISKKRRIVNKLKGNSGIPLSPPPYGYMKDPNDPKRWIVDKAAAVVVRRIFQMALDGYGIGETAVALEKDGILTPTAYWQSKGINRGGKKTAFSPTDWRHSTVAKILSLQEYCGDVINFKTYSKSYKMKRRIENPEENRVVFLGVHEAIIDRETWEKVQKKRGTRKKPAKASGERSIFSGLLKCPDCGGNLNYHFNQGNHDIKYFNCCNYNRGRDKCTATHYIRLDFLEQVVLQEIHRLTQFANEYEEDFVKAIIGHSMKTANLEQALKQKELDSLLARDKELDVLFERIYEDNVAGKISDERFSRMSQKYEQEQGEVAAKIKALRKGLRQEVGQHMTADLFLEIVRRYTNAQELTQCMVTELIDHIDVYHAERVNGEITQEIKIFYNCIGAFEVPEWENIPELDVLIETRKGVALSYSQKAG

SEQ ID NO: 15629 - protein, 519 aa, synthetic construct
MKKITKIDGNKGTSIIKPKLRVAAYCRVSTGSDEQLVSLQAQKAHYETYIKANPEWEYVGLYYDEGISGTKKENRTELLRMLSDCENKKIDLIITKSISRFARNTTDCLEMVRKLLDLGIYIYFEKENINTQSMESELMLSILSGLAESESISISENNKWAIQRRFQNGTFKISYPPYGYDNIDGQMVVNPEQAEIVKYIFAEVLSGKGTQKIADDLNQKGIPSKRGGLWTATTIRGILKNEKYIGDVILQKTYTDSRFNKRTNYGEKNKYLIENHHEAIISHEVFEAVEAALNQRAKEKGIEKRNDKYQNRYAFSGKIICAECNSAFKRRIHSSGTRKYVAWCCSKHLKQITECSMQFIRDEDIKTAFVTMINKLIFGRKLILQPLLDALRGMSNSDNLSRIQELEKQIEKNAEQRELLVKLMAKGYLEPALFNRENNELQMEADNYMEQKDALIHALNGELSKVQEVSHLIKFTNKAEMINAFSEQIFNDYIEKIIVFSRVEIGFVLKCGITLRERM

SEQ ID NO: 15630 - protein, 523 aa, synthetic construct
MAVNKNVMIIPAIKRVGNNRKEVETPKLRVAAYCRVSTDSDEQASSYEVQIEHYTEFIKKNSEWEFAGIFADDGISGTNTKNRDEFNRMIDECMAGKIDMVITKSISRFARNTLDCLQYIRKLKDKNVAVYFEKENINTLDAKGEIMLTIMASLAQQESQSLSQNVKLGIQYRYQQGEIQVNHNRFLGYTKDENKNLVIDPEGAEIVKRIYREYLEGASLLQIARGLEEDGILTAAGKAKWRPETLKKILQNEKYIGDALLQKTYTVDFLSKKRVKNNGIVPQYYVENSHEPIIPRELFMQVQEEMVRRANIRSGKSSKKRVYSSKYALSSIVYCGQCGDIYRRVHWNNRGYKSIVWRCVSRLEEKGSDCTSPTVNEEILQVAVVKAINELLANKEPFLQVLQKNIAIVLNEGDDNATDNIDSKLEELQKELLKQAKSKNDYDDVADKIYRLRELKQNALVENAEREGKRQRIAEMTDFLKEQSCELKEYDEQLIRRLIEKVTVFDDKLTVEFKSGVEIDIEI

SEQ ID NO: 15631 - protein, 642 aa, synthetic construct
MEQKRVGIWIRVSTDFQVKDESPEHHEQRARYYAKSRDWEVIEVYRLDAISGKTVMDHPETQRMLEDIRRGHITGLLFSKLARLARNTRELLDFAEIFRKENADLISLAEQIDTSTPAGRLFFTIISAMAQWEREEISSRVAASVPIRAEMGKPLGGQASFGYKWENKQLVIDSKEAPVRKLVYEIFRECKRKKTTANRLNDLGYRTRNGSRFSDTTIDRLIRDTTAKGIRIANYTKSLGEGKTWKFKPKEEWVQLPCEAIVSEEIWNECNGVLEQRKITRSNVGRTSEYLLAGLVRCHCGTPMYVKKWVTKYICSKCRNSIKETELYELYEKHLEAYLSGINPKVFISELEKGIKMQEELLISSIRRKTKLYKKMDDWVELRIGKEIDKEHFAKKYKPLEIQVNELEKSIPNIEALIDLKKVQLRNNDHILREAKLLYLKWAEMEFAQKRSIVEFVTENITVFAGRVDIALANLQSNFATSQQNYIHALPCLRFEQKISKPVPVSMPLNPTTLGEHIRKRRVELRLFQKDVAAIFNVSEDCITYWENNRSEPQIQYYPPIFGFLGYCPFELDASTFAGKIKAYRYLNGLTQKRFAKLMNLDPATVGRWVNGKGHGAKKELVEAFLANGNSAINQPNGNIGC

SEQ ID NO: 15632 - protein, 479 aa, synthetic construct
MKFAIYVRVSTLEQAEEGYSIEEQIDKLSKYCEVKNWDIFKIYKDGGFSGSSTDRPGLSSLITDSKRKKFQGVLVYKLDRLSRSQKDTLYLIEDVFTANDISFVSLNENFDTSSAFGKAMIGILAVFAQLEREQIKERMVMGKVGRAKSGKAMSWSKVPFGYIYKNDTYVAHPIQAPIVKQIFDDYMSGISITKLKDKLNDEGHIGKEINWSYRTIRQTLANPIYAGINRYNGELFEGNHEGIITKDFFEKVQNELKVRQVAAYEKNNNPRPFQSKYMLSGIIRCGLCGASLSVGMRAKRKDGSRHRYYRCYSKSKKKNLTMTKDPNGCTSPNYSMDELEKHILSQIEQIRLNTEIIDSLSANDSVIDFSSYNKRIDELDLSLEKIVNLFIDDAIPKDILEVRMEKIKQEKDSLEKKIDSLKIKRPALEPIDAKEILSKLTDNIWNLSYEDQKSIVMELISKILVYPDKLEIHWKFAIN

SEQ ID NO: 15633 - protein, 540 aa, synthetic construct
MAERVYCLYRVSTTKQVDHDDQNQADIPMQRKACHEFTKRMGWTIIREEQETGVSGFKVSAADRDKLQLIKEHAEKGKFDILLVFMFDRLGRKSDETPFVVEWFVKKGIKVWSVNEGEQRFESHTDRLTNYIRFWQADGESQKTSIRTKTALGQMVQEGRFRGGVAPYGYRLEKSGVVNKRKHEVNKLVIDDEEAKVIRMMYSLCASSGYGRWRIAMFLNDKGIKTRNGANWHESSVGAILKNVTYKGVLRSGTTFSEPFKELQIIDPYTFDLAQELIEERINEKKEERTTPLNTSGQSLLSGNVFCGHCGGRLVLTTNGKVVRLANGETKGVKRIRYICYNKTRRRLECDGQTGYTMHLLDDAVTQVLHQIFERMLIVPDNMVVSSAQDRHMTELRTEIKRVKAENTKANTEYESLKAEVVKAVQGKSKMPVDVLSELVNESRDRLLVTSERLTVLMAELERGNEKVMEMKNELSRIHTWSEIFDESNMEVKKMITSYIIKRVKVFKDYKLDIELNMDIQQFLNGIDSITEEKATTVAS

SEQ ID NO: 15634 - protein, 550 aa, synthetic construct
MATKARVYSYLRFSDPKQAAGSSADRQLEYARRWASEHGMTLDSALSMQDEGLSAYHQRHVKRGALGVFLAAIDEGRIPSGSVLIVEGLDRLSRAEPIQAQAQLAQIINAGITVVTASDGREYNRAGLKAQPMDLVYSLLVMIRAHEESDTKSKRVRAAIHRQCQGWIAGTWRGVIRNGRDPHWLELTKPGEFKLVPERAEAVRLAVRMFREGNGAVTIMRALEEQRLQITNGGNPAGQLYKIVRNRALVGEKVLEVEGQEYRLPGYYPPLLTAEEFADLQHVAGQRIRRKGTSEIPSLIAGMRVTYCGYCGSAMVAQNLMNRGRRADGQPQHGHRRMICVGNSQGSGCAVSGSCSVVPIEHALMTFCADQMNLTRLHEGGNREASISGQLAVARAAVADTTAKIEKVTDALLSAAAGQAPAAFMRRARELEETLAGQQAEVDALEHELASAAATPPPALAQAWAELVEGVRALDYDARIKARQMVADTFERIAIYHRGIEPVQTRSWKGTIDLVLVAKRGSTRVLHVDRQTGEWRAGEELTTEALPAPL

SEQ ID NO: 15635 - protein, 542 aa, synthetic construct
MTRVALYARYSSDRQNERSISDQLNLLIQHAAAKGWAVVATYTDAAISGSAMANRPGLLSALAAAERGEFDLLLAEDEDRLARNLEHLAHVANRLADVGAGIATLSTDRVQDMHVAFKGLIAQDFIRNLSLKTKRGMASNAEKGLATGSRLYGYRSQPGGLVEIVPEQAEVIRRIFAMYVHDRMSSREIAERLNQDRIPSPAGREWNASSIQGSRQRANGILHSEIYAGVKVYNRVEMRKDRQTGRKITICKPPSEHKRIDVPHLAIIDRDLWNAARQRLDSRQTADPSQRASLRRRPGLLSGLTKCGCCGASYTSLSQGRLVCAAYREKGASACDNNRHVSRAEIEQRVLDGLRTRLLAPEAVAAYVRAYHAAWAEQAAQVEDRRRPLTRRLAEVERAIERGAEALLSGATAAAVIGKKLETLEIEQAELKAALQQLDADGAPPVQLHPRAAENYARKVEQLQSRLAQAADSTEVADRELIGSVRDLIQRIDIEPVNKSRGAPVRVTLHGDLARFIRPQQPPIGGCALVVGGGIEPPTCGL

SEQ ID NO: 15636 - protein, 610 aa, synthetic construct
MKKKLYSYIRWSSAVQGRDGGTTQERQLESAEKYALEHGYELVTMIDAGVSAFRGKNVIREQKAEIEKKTNVKVGELGRFIDAVEEGLIPAGSILYCEGLDRLSRSNITTANSLFLQLLTLDIQIVTGMDGKSYTKESVNENPTDFLISTLMFVRANEESSTKQKRTYGNAEALIKRFKTGLPTTIKSVGSHPLWIDASTAYDEQVRKHPQYWQVAQYAMELFLEGASAFKVCKELNTRFPEGWKGKMWSVPNVRKLRTNPAVYGLRILNVKGIEYKLEGYYPPLITEAEFARLQDIQQNNKYITTGEKNQINLMAGLRLFRCGHCGSTMMAMRHKDTIRYLCEKGRAAGNLKSKDDKLKKLKGCRTWSLSGELVEHTLMYAVTYAFIYKNKDNKEKIDYETQINETKEKILSVTARITNLTELISAGLGNVVEVVESIKTLNEERQVLNLHLDKLQQNNLLQESSHFEELMMNYFETIQWPIIETVDHPERVKIREIVRSTIDKAVVWKIDKKITIYYVTKDGTDFTFEAGDEKDEWRFYFGMPDLVKRSDDFEQAKQALEMNNEIFDKLLALKNQEAEAAGNALKTVVKALQVVGYPAIDGKLFWPRK

SEQ ID NO: 15637 - protein, 483 aa, synthetic construct
MTPPTPKTSATTRAVGYVRLSRDHDDSTSVARQREIIARTCEARGWTLVETVEDVDVSASKRRLDRPGLDRVRALVRSGEADLVLVWRLDRLARSVVDFGTLLDEGVAVASATEPLDTTTPMGRAMAEVLQVFAALESRTTGERVRSAIAYRVAGQRWRGGPAPYGYRVVPHPSGDGKALEIEPEEARYVRMAADVVLNGGTLYRAARTLTEAGSTPRRSAAWSISSLRVVLTGDAVLGRTTRHGALLRDEEGLPVTPWEPVLPLEDVERLRALLARKAPTDRRRKAARLLSGLVVCSSCGKRLRVNRNQGGARYTCHGRSDGSGCTAPVSIGAEHLDDYAERSLLAVVGAWPVVEHRETVRDVAGLAEVVEAIAHTTDAMREPGADVAALVARLGALTERRDALMAAPAAPTVEAVETGETFAEAWAARDVDGRRALLSGALAGPIVLLPGARGRKGFDAARVEIPWRWLDEHAAEAALLTA

SEQ ID NO: 15638 - protein, 544 aa, synthetic construct
MHDQTTTIRRAAIYARYSTDMQRERSIDDQVALCREYARKNGLRIIQSYSDRAQTSASLVGREGIMSLIDDAKARKFDVVIVEALDRISRDQEDLAGVFKRLSFANVEIVAVHEGVADAVQVGIRGLLGSMFLSDLKHKVRRGMAGVVNDGRVAGGNAYGYDVVPGKPGERTINEEQAAVIRRIFREYVDGASPRDIAGRLNEEGVPPPRGSKWNASTINGSKNRSYGILVNALYNGQIVWNRVHMVRDPDTGKRVSRFNPESDWKIAEAPHLAIVDRETYDAAQARKADRTRLVEQGASTKKAKRLLSGLLRCSSCGSGMASVGFNGGRLRVQCSQNRESGSCDNNRKYNAERIEHAVVTGILSKLEDEEAAERYIRDYVAERRANIDSATRSASQIEAKLAKVAGEQERLITLFQTGVLDLDRVKPRLTELEDQRKALEEETASAREAVPVIELHPAAVERFIKLLSRAKAEYENYEMLKDPEKIEAMRELISHVIVSDSAANGYELDVFTYLSALTGDYAPGGLGGALVAEEGFEPPTQGL

SEQ ID NO: 15639 - protein, 505 aa, synthetic construct
MKKKKEVAAGSVPAVIYARYSSSGQREESIEGQLRDCREYAKKNGLLIVGEYMDRALTGRTDKRPDFQRMLRDSERGAFKVVICWKMDRFARNRYDSAMYKYKLKKNGVRLVYAMESIPEGPEGIILESVMEGYAEYYSENLSQNVKRGYYDSALELKTLGQTVLGYRKGGDGRFEIDPAAAPIVRRIFEEYAAGERGKDIIERLNQEGHRTARGGKFNKNSIRRILQNEKYVGVYEFKDIRVEDGIPAIVSRELFEECGRMLEVHHRAPAAKRDESFLLTTKIFCGECGEPMTGDAGTSKGGIVHYYYICNGRRRHVCKKERVRKKEIEEAVVSELVRLIHSDDFVEKVADMAMEYQNREKDDSVLKTLEARQKEIEKKIENVMRAIEDGIVTASTKTRLVQLEAERADIEKGIAKELIKTPELDRDQIVFFLERFRDGDIKDERYREFLVDTFLQAVFVYDDRLVITLNYSGQNNKVTKSLADKAASGKASECSCFAPSGALG

SEQ ID NO: 15640 - protein, 449 aa, synthetic construct
MTKANAEKPDLSNKPKIRCAIYTRKSSEDGLEQDFNSIDAQRLSGENFIASQVGKGWILVDDHYDDGGFSGGTLERPALKRLFQDIEENKIDCVVIYKIDRLSRSLFDFQKIIELFDQKKVSFASVTQNFTTDDSVGRLMLNVMLSFAQYERELTGERIRDKVDASKKKGIWMGGTLSLGYNVEDRKLVVNEEEAKVVRILFQIFIETESVAETARELDRHGFVTKSWISRTGKLQRSRKFNKENVRRILENPIYIGKIKHKDNLYDGLHKPIITDEIWQKTKDILARAKDQENKVFLPTSRVTAVPLLKGMMKCGSCGSAVIPTYTKKGSKRYRYYICHSKAVGNNDHCPVGRISATEAEGVIVNRILILLKKPEFVVHTISQSSGIIPESVVINSFKEVEKVWDELFPVEQARIISLLIKEVIVNHDGLKIRIFKEGLSTLSTELTG

SEQ ID NO: 15641 - protein, 631 aa, synthetic construct
MTDEPKKILYKYIRFSSIQQAKGSSFARQNSRLEQYAEQNGFTVNDSLDLRDFAKSGFHGINKEIDQGLGRFIAAIDKGLIPTDGTAYLAVEQFDRISREDIDKAQDLFKSILRKNVNIITLMDNRIYTKSSLSNFMEVLYSLFLMEQAHQESLKKSERIKGAYTNKIKRIKALAEERRLELEAWAISKDGPKPIHEPIINVIQFSSQVPCWLDEKIEVISGRKFRKFYINEEKAKIIRYALSLLNDGNGYMNVSSQLNREGISRLGFNDKQKSSRQNLWTNRAINEFVNSDSIFGELALHDNYFKDKEFEYDGVSATKKVNTRTHVENIENYYPALIDKKTIIGLRARANARKKGRVAGRHTTDNLFQNMMFCGRCGDSLHMIQSKRETAKGTYVRRYLQCYAARHKGCDAKMFPYQQFEEQVVANLLSPLNENELSEEGKQIEKKRQEKLIILKGEVADLEARIEEYRAVLKNDRSIKPAIAISIINEFENDKAFKNAKIQELELQTDKLHDALQVGDMKGFNLTEDRGRNGFKVALKQKYAGIILYTDEHICFALEKSGATAIFKLTKTSRWGTDIPSKAGDIFEKQVDVINFLREKSLDYKEGKLFEIMQTFKTTNIDLFEGQYIND

SEQ ID NO: 15642 - protein, 529 aa, synthetic construct
MSSRTARNVTTIPATLSRYTAAPINEQRKRRTAGYARVSTDSEEQLTSYEAQVDYYTNYIKSREDWEFVDVYTDEGITATNTKKREGFKQMIADALAGKIDLIVTKSVSRFARNTVDSLTTVRQLKEKGIEIYFEKENIWTLDSKGELLITIMSSLAQEESRSISENVTWGQRKRFADGKVCVPFKHFLGYDRGEDGNLVLNEKEAVTVRRIFGLFLQGYSPHKIAKTLTAEGILSPGKKPKWNAATVRRMLENEKYKGDALLQKSYTVDFLTKKKKLNEGEIPQYYVKNNHEAIIDPAVFDMVQIELENRTPGPNRRSGVSIFSSRIKCSECGSWYGSKVWHSTDKYRRTIYQCNHKYNDDNNCKTPHLDEESIKALFTSAVNKLLTDREEILGNFELIKATVFNTTDLEEEQIDLQSEIEVVAEMIQKAIGENAHFALDQEEYQARYNTLVDRFELAKARHAEVTEAINDKQTRLSTMNAFLDTLRIQDKLVTEFDEKLWCSLVDYATVYDKEDIRFTFKNGTEIQA

SEQ ID NO: 15643 - protein, 535 aa, synthetic construct
MEKKTVKKVVKIEPVSTISNMEKPLVKRVCAYCRVSTGSAEQISSFESQVEYYERLIQEKDSWVCVGIYADQARSGTKTSGRDQFRQMMQDCRLGKIDLILTKSVTRFARNTVDSIKAIRELKHLGIEIYFEKERISTLSEKSEQLLTILSSIAQGEAESISTNSRWSVQYRFQNGTFIIGSPAYGYINDENGELIVQPEEAKIVRRIFDQYLGGKGSYAIARELRKAGIPTIRGSKGWQDGVVKEILQNPVYAGDLLFQKTYTTEGVPFTKKHNRGEMPQVMITDNHEPIISREEEQAVRELYAYRRQKQCVENVEVYQNRYAFSSRIICGECGSIFRRQKIYIGKPYEKVQWCCHQHIEDISKCSQKSIREDCIKQTFITLWNKLACNYEDILYPLLAILKAVQDDPEQVQELLELENKIRELKQQSHMLQKVLTGGDIGSVVFIEKRGLIDTELEKAYRRQQLLKEQKLFDEQISQTEYLMAVFRNRPAILDDYDEELFRMMIETVTAYPGGRLVFKLKNGLELEETYGKEL

SEQ ID NO: 15644 - protein, 547 aa, synthetic construct
MQAVKKNISIIPATRGYDRTIRPQMKALRVAAYCRVSTLQEQQETSYEAQVNYYTEKIKNNPSWKLAGIYADDGKSATSTKNRSNFQAMIDACMAGKIDMVITKSISRFARNTVDSLMNIRKLKEKNIAVFFEKEGINTLEGSGELLVTILSSQAQEESRNISENCHWGIVRKFESGKVIVNHSKFLGYTKDKDGNLVIIPEEADLVRRIFRLFLEGNSSYKIKRILEADGILTVTGKTVWQATVIDKMLSNEKYMGDALMQKTYTVDFLTKKKVINKSIVPQYYIEDNHEAIIPKELYHRVQEEKARRGAIYRPASKKVDAPSIKGKYSAKYVLSDIMVCAECGQPYRRQVWSKYGMKKAVWRCDNRLKHGSKRCKHSPTLKEDSLHEAIMTAINNVVEDQGEFVQAFRENVIRIIGNYSAQAEPTEYDEQIEQLQQEMMKLIEDSAKAECADDTFDKEYRIIADEIKELRKKKAKVLQERHLAESYEQRLQEMSSYTKKINYLKREFDNDLVRRLLQTIRVISESKIEIQFQSGIVIRQDVLCDD

SEQ ID NO: 15645 - protein, 516 aa, synthetic construct
MTALSPQQLQEMWDDLKAMWEAHSAGLPTRAEWRRAAVYMRESRQQQAEGFSPAAQLKGTLEEATRRQLSVPWENVFLDLLSGRREDRVAFQDMLALARSGTIAAVIVLHTSRFSRNAVVSRKYKEELRRRGVEVIATNAPFDVGRPEGKFAERMIEAVDEFTSDTIGWWVSVGLREKHQQGEPLGRLPETFFRDASGIVPHPELSAIVLEGARQYSTGRVGFGDLSKWSEREGHRTPLGRRLTDEWWRNVLANPLNAGFVGYRRKRGGKELRKAAFSGFITLDLFERVQEVRHGRTRSPRQGADYRVYPLTAVAFCAACGARFTASGKQRMRCRSASQHAGCSQPSVAASEIERRFAVWLRSAVVLSPAERIRVAAIVRARLERTRGTASETKVRLAIKRLTDAFVYGGIGDADYREELQKHQAQLASAQTAPDERRTLSAIKVAQDFATAWDRSRPERKKQLLSTMFEAVKIRDGSPVAVRPKPELAPLFAARVHTGGPDRIRTGDLVLDRDVC

SEQ ID NO: 15646 - protein, 526 aa, synthetic construct
MKIIAYARYSSTAQEGTSIERQHEAAKEYADSRGWAITEYVKDEARSAFHAEHKRIGNLGRILKRVESREIGAGDVLIVESVDRLSRQDVMTALDTFIQVINAGITIITTMDGQELNRTNYQNQWTNIIMVMAKMATAHEESLKRSERRKAAWTKSRKEGRMTILVPAWLNMDRTVRADRVQIVKTIFQLCDEGKGSNLIAKHLNQSDIRSWGSEKTSGTWSSSYVSRVLRNRAVIGEFQAFQMVDGKETPIGEAVPDYFPRVIDQSLFDRVQDKVAARAFDGAGSGRKGGNTNIVKGLMQCGECGSNFHMLHSGKYPFLKCSGHRQGKCTNGVAFHYTLFEAHFLNSIRELQIETGTNDIESAINEQLAEARNTLVTLDKNISFIIDKMIEMDSPALTTRLAKSEDQKRETLALIDRLEAELRRATVPVDQTQTDIISLYQALISGNDDTYEETRQMIHEKIKELITGISVQKFGVPTLVVFLKDGTSYTMWNTKPEKWGKGRLPLEKMLWTTQRTVVGEPSEWV

SEQ ID NO: 15647 - protein, 473 aa, synthetic construct
MKRSKMIKIDQENNGDHIKLALYARVSTDAQAEEGYSIDFQKEKLTAYAKSMPTTPESIEYYIDDGYSGGSLERPQMQKMILDAEKHDITHVIVYKLDRLSRSQKDTLHLIEDIFIPNGIAFISISESFNTATPFGRAVIGILSVFAQLERENIYERTRNGMQKRVEDGYWMGGGIVPFGYDYDQNQGILVKNKDAETVEQIYNLYLKGYSMQRIANIFNLKYDRLVSQILKRKSNTGVIIYKGKEYQGRHEPIISKEIYDKAMLAMQERSGKSQIGSNYLLTGLLVCGKCGAKMRYMKWGNVIKLICYSRVSTGRDYLIKDKNCDNKAIEAKTIEDIVINDIFKITANIIHNEEQASGISSTASALESRLSECNKKLERLYVLFSESNGDDDDTLLAKIKSLKQEKDNLQKQIEDEKTLVLLSDERMRKRNELENLESMWPNMTMDERRITLKALIKAIMITDDSVKIEYNF

SEQ ID NO: 15648 - protein, 524 aa, synthetic construct
MPIVKVIEPTRNLHTHKLNVERSKRRVAAYARVSTDSDDQENSFDAQKSFYERYIKENPLWDFVGIYADEGISGTSTKGRKEFQRMIDDAKAGKIDLIVAKSMSRFARNTLDTLTYIRELKAKGVECYFQKENIYTFDSKGELLITIMSSLAQEESRSISENVKWGIRKSFADGKVYLPHRGFLGYKYDENKNIIIDKDTEWIVRLIYKEFLSGSTFRQICQMLEEKGLKTPMGKTKWRDTTVRGILRNEKYCGSAILQKTFVEDFLTHNTKVNNGEVPKYYVKDSHPPIIPKEEWDMAQIELQRREKLRYSYSSKNCFSSKLICADCGRLYGSKVWHSTDKYRKVIWQCNYKFDKKSKAQCQTPTLNEEEIKAMFVDAYNKMIMSKDEILNNLESVLNQVVSVESVEEKIKKVHEDIEDVVNEVEVLIHSSNETDEIKQKELELKYDKLIKKLKDLEHQKEEAMDKRNRINTFISTLKDKTDVISEFDEELFNIMVDKAVVHRDKSIEFIFNSGYKVKVEARK

SEQ ID NO: 15649 - protein, 437 aa, synthetic construct
MKEKSIEKVAVIPKLKQRKRVAAYVRVSVDKETMLHSFAAQASYYKELISKHNDWELVDVYADYGISGTKVNRAEFNRMIDDCRNGKIDMIITKSISRFARNTALLLATIRELKALHVDVYFEEQNMNSLSEQGELVLTLLASMAEAEAKSMSMNVKWRVDKTFMQGEVYSTTRFYGYDIVDKKFIVNKEQAKVVKRIFQMALDGLGYIKIVEVLNREGIKSPTGKKWTNNSLERILKEDTYTGRLTLQKTYRTEKKTKERNKGELRKYIIENDHEAIVDIDTFNKVQELIKSRRSKPIKENKGNDIFKGIIRCSVCGACFQRKKRYGYDLYDWMCWNYLYATKGERCKSVRIPESVLIEKAKEALGIDEINKEIVKEKLKSIVAHPDRVLEFVFNDGTKKAIPWELKSRRFSWSEEAREKARNNALKRYENMNSKK

SEQ ID NO: 15650 - protein, 496 aa, synthetic construct
MNERETYQDCVIYARYSSHNQRDASIEQQVSECEAFARYNGLRVVKVYADRHLSGTTDQRPQFQQMLKDAERGKWSVVLTWKVDRFARNRYDSATYKYRLKKHGVRVVYAKESIPDGPEGILLESILEGSAEYYSANLAQNVKRGLRFNAEAGIANGGHMPYGFRRGADGRHEIVESEAAVVREIFSRVAGGEKLSRIVEDLITQCVPTRAGGKWRTGTLRAMLSNEVYAGVYRFGETRTEDSVPRIVDDATWEEVKRHMDSVKGTRVRSENYLFTGKVRCGLCGEPMVGRTAHGRKGTAYSYYCCRGHRQKFCEKKDVRRELLEDSVVSRVLEALDDAAVVSWIADSVMEMQKREAEKSRTAPDALRSELAAVKKSIKGIMSAIEQGIVTPTTKGRLLELEGEQGRLENAIAEAEIPAPAVERDFIVYWLTRFRGGSVGDAEARRDVVESLIHSLRVWDDHAEAVLNYAGEEKAVNVPLAPVDGDGGGSPYEQSS

SEQ ID NO: 15651 - protein, 479 aa, synthetic construct
MKRAALYIRVSTLEQAQEGYSIGAQKERLMAYCKAHDWAVADFYIDGGYSGSNLDRPGIQKLIAEVDSFDLVLVLKLDRLSRSQRDTLHLIEEVFLPAGVDFVSMSESFDTSTPFGRAMIGILSVFAQLEREQIKERTFMGRLERAKEGLYHGGVNFPIGYDYDSSGRLCVNEYEAAQVRKIYAWYLEGTSPEKIAERLRSEGFTNRYGSWNEISGRASVLRILSSDVYLGTLRFAGVVVEHAHDAIIDPETFEKATALRMKRREVFGDSPYQSKYLLVGLCWCARCGARYAVKHNYGGYKYYVCYSRARTVKRMIKADHCDNKNWPLDELDSIVEREVSRLLFEPGYYESLRKRKAAEVKEQPRGDGDVFRDKIAGLEKQIDRMMDLYQDEKIPVDVLSARIDKLHREKVALEEQLAAVEPPKPKRDYNEDAFAGLLADFSTVWNSAGLEDRRQIISALIRKITLDGESVNIEWAFLD

SEQ ID NO: 15652 - protein, 641 aa, synthetic construct
MKKKKCYIYTRVSTAAQTEGYSLEAQQERLREYADYKNLEIAGEYCDAGKSGKSIVGRPSFLKMLEDISSEKDNISFVLVFKLSRFGRNAADILKSLQLLEDYEVDLICVEDAIDSSTPGGKLTLTILSAVAEIERENINVQFMAGKMQKLLNGGWPGGPAPYGYRSVNKELQVEPEEAEIVRLIFDKYIQDDGTLNGVAIWLNDNGYTRISKSEEKPFTYDFIVNVLDNPIYHGKLNYNRRTNLKGVKRKPKDAIEVDGIHEAIVSDELWQQVRDKREACSANNDKVDEPERVSLLSGLIKCPACGNGLIASKNKHVNKNRGGHYKTIHYYSCRYYRRSAGRACGFKHTYNQVKIDSAVYEIVSNLGNHPAFEEAMSKAYGGDESVEGYEKRMKEIRKDLYHQEHEKNRLGEELDNLDVLSDDYDSDYERIQGEIDDIYDRIESLELSLKRLKKKYKEAQKGIRSVDGIRTILQNFSKFFSKMTCEEQRELYRHFIERIEVYQEEQEDGRVLKSIYFRFPVRYGETDTVETWINAEGKPDEEIAFVLDCNEVRVTVAEAKATYAEIRAYVLEHTGMKVSSLYIAQIKRKYGIDIGIAYNKPEKNRNRVPVCPKDKELAIMDALKAFRMLTEDTEYMEVAV

SEQ ID NO: 15653 - protein, 444 aa, synthetic construct
MAAYCRVSTDQEEQLLSYENQVNYYTNYISENPLYEYAGTYADEGISGTNTKKRDEFNRMIADCRAGKIDMIITKSISRFARNTLDCLNYVRELKDLGIGIIFEKENINTLDAKGEVLLTILSSLAQDESRSISENCTWGIRRRFEAGNHKMSTKRFLGYDTDENGKLVINRKQEPIVVRLYQEFLDGKTADYIKRIFEREGIKNWNGGTKWQATTLTNMLQNEKYKGDALLQKSYTVDFLTKKRAQNKGEIQMFYVGDDHEAIIPKRVWECVQLEIERRRKYLEEHGTNSYSHRPESNPFASKIVCGTCNKVFARKGWRSSTGFDRKIWQCSERYKVKGVMGCSNRHVEEETLVKAYLMAWNALVENREVFMERWKEQMQSEDLLEGYRAEKFIEYTDGAQPLKEMDTDFMLKTLDHIKVFEDGTLLGVFLDGTEIECKGEVE

SEQ ID NO: 15654 - protein, 426 aa, synthetic construct
MRVEAINKCPVSVLQKKRVCAYARVSTDSRRQEDSLENQTATYERLIKGNPEYEFAGVYADQGISGYCENRPQFQKMLERARAGELDLIITKSISRFARNTVTVLKFARELKELGVGIFFEEQKINTLSGDGEMMLAVLASFAQEESRSMSENNKWSIKKKFERGEVMINTTRFCGYDKDEYGDLVVNRKEAVIVRLLFDLYLMNVGCSRLSDLLNYLGVKTMTGSQWESGTVGGMLSNEKYKGDFHLQKYYTPPTRRNVTRRNRGEVQSYYISENHEPIVPPEIWERVQQRKEQTKRERNIGQDGTKKFQNRYPLSGLLICPYCGRTLRRRQVYKKKIQWLCSTYIEKGKKACRGIRVDDEALTGLNITEQTVIEEVIQNGKKHYCYTRKANFDRGIRNRAGCTETQDGSVLPGINRPRRTVIKL

SEQ ID NO: 15655 - protein, 562 aa, synthetic construct
MNKMKAALYVRVSTKYQVDKDSLPFQRKKLKEYCKMLDIHKYEIFEDDGYSAKNTERPRFQEMMNHIRGGEFTHLIVWKVDRISRNLLDFSTMYKELKDHRVTFISMNEQFDTSTAIGEAMLKIILIFAELERNMTSERVTGIMLDRAENGLWNGSLPPLGYKTDPEKQILIPEPDEKEKVKMIFDLYEKLHSCRKVARFLQKSGIKPKYHTEWLPEYIRRTLRNEVYIGTYIYNRREFHGPERPKSEWIVKENNHPAIISPEQFSHCNEIMDKNTSSRDVSQIRQTRHIHVFGGKVSCNLCGGNMNAAKDKQRDNGLHPSIYRCGRRARQMDCENKRMISDLSLGPFVFNYAANLARLQKDFKGIDSPEKLESALLSGPEFSGVRIKLESLKMTFSMLAGKNIGKGAYVPDMGESDSTESISADSTELLKKEREKCKNAISRLTELYMFDPDALTKEEYSEKKRELTAKIRDIEKRISAASGSGGTGSDDLSFIKKASAFLVAQHISSKEHIDYNQIAVDLDAGILKDFVDQIIGEIFVQDGKIMRIRFASGLEHDFLYEE

SEQ ID NO: 15656 - protein, 542 aa, synthetic construct
MIRVALYARYSSDRQNERSISDQLSLLIQHAGAKGWAVVGTYTDAAISGSAMANRPGLLAALAAAERGEFDLLLAEDEDRLARNLEHLAHVANRLADIGAGIATLSTDRVQDMHVAFKGLIAQDFIRNLSMKTKRGMASNAEKGLATGSRLYGYRSQPGGAVEIVPDQAEVVRRIFSMYVNDRMSSREIAERLNRDRIPSPAGREWNASSIQGSHQRANGILHSEIYAGVKVYNRVEMRKDRQTGRKITICKPPSEHKRIDVPHLAIIDQDLWNAARQRLDSRQTADPSQRASLRRRPGLLSGLTKCGCCGASYTSLSQGRLVCAAYREKGVSACNNNRHVKRAEIEQRVLDGLRTRLLAPEAIAAYVRAYHAAWAEQAAQVEDRRRPLTRRLAEVERAIERGAEALLSGATAAAVIGKKLEALEIEQAQLKATLEQLDAEGAPPVQLHPRAAENYARKIEQLQARLAEAAGSTDDADRDLIGSVRGLIQKVDIEPINKSRGSPVRVTLHGDLARFVLPQHPPASGCALVVGGGIEPPTCGL

SEQ ID NO: 15657 - protein, 485 aa, synthetic construct
MTKKVAIYTRVSTTNQAEEGFSIDEQIDRLTKYAEAMGWQVSDTYTDAGFSGAKLERPAMQRLINDIENKAFDTVLVYKLDRLSRSVRDTLYLVKDVFTKNKIDFISLNESIDTSSAMGSLFLTILSAINEFERENIKERMTMGKLGRAKSGKSMMWAKTAFGYYHNKDTGILEIVPLQATIVEQIFTDYLSGVSLTKLRDKLNEAGHIGKDIPWSYRTLRQTLDNPVYCGYIKFKDSLFEGMHKPIIPYETYLKVQKELEKRQQQTYERNNNPRPFQAKYMLSGMARCGYCGAPLKIVLGHKRKDGSRTMKYHCANRFPRKTKGITVYNDNKKCDSGNYDLSNLENTVIDNLIGFQENNDSLLKIINGNNQPILDTSSFKKQISQIDKKIQKNSDLYLNDFITMDELKDRTDSLQAEKKLLKAKISENKFNDSTDVFELVKTQLGSIPINELSYDNKKKIVNNLVSKVDVTADNIDIIFKFQLA

SEQ ID NO: 15658 - protein, 530 aa, synthetic construct
MLDPTGIYYMYLRKSREDREAESHGEGETLARHENRLKELATQLKITISQVYREVVSGETIAARPEMMRMLADIESEQPEGVLVVELERLARGDTRDQGLIMETFKYGNTKIITPMKTYDPNDEFDEEYAEFGLFMSRREYKVINRRLQNGRRTSSKEGKWIGNVAPYGYERVKLSHEKGFTLSPIPEESKVVQFIFQLFTEGTPESDNLPIGATQIAHLLDDMNIPPRKSDHWETTVIKGILKNYAYIGKLEVGKRKQVKTIENGTVKRSRPVNTNAEFFDALHPPIIEENTFYSAKRKIDANFRPTNFSTIKSPLAGLIYCTECKKTLYRRPAGAKNPSETILCKTHGCPTVGSFYYLVEERLLQFLNDTLKEYKVKIKCENSGDWGEVLERRKAIMANYINESNVLNKQLESIYDYFEQKLYSLELFRKRSADLNKKIADNQRSIETLEKEISDIEERIIRKDEFVPHFENVLKSYSETEDPLRKNTLLKQVVDHVYYTKTKKGTRLGQGVDSFTLDVYLKLPFRDF

SEQ ID NO: 15659 - protein, 546 aa, synthetic construct
MSLKREYLIELGIENIINYLRRSRQDEERERRTGEDVLKEQKEIMDRILEPLGIPFTQEAEVGSGDKISTRPVFQNVIEELRAKKYQAIAVKEISRMGRGSYTDMGIIYDLIVDNRIFIITPYKTYDPRNTSDLRQIRFELFMSREEFETTRERLFGGRVNNAMAGRWVSGAAPFGFNYNKTTKKLEINEEQAAVVRMIFNHYVYGIPQENGTRRDVSFRALATYFSKKTPIKTPQGKREWTYMQLRQLITNERYIGTMKFRMHQTINGKRVARPEEEHIIVPNAIPAIIDMETWELAQQKVKDSSHKPRTKMDFSPCELAGLCICIQCGKRMVRQYSVQNYKTKEGTITTYHKEFLWCTTSGCTFVKYRAIEDDLLETLRYFEAMEDNLLKEEISTMITQDNKTNSNDLIEDIAGYIEQRTKELKNRLSFIYDKYENGIYTDEMFLERKAEIDMEMDKLKDIKENQPTENNEQNFDAQIIKKNIGSILEAYKTYTNKTDRNGVLRSVFDHVVIEVVEKGRGRKPAKHVIYPVLKHNLLQVDFLVP

SEQ ID NO: 15660 - protein, 521 aa, synthetic construct
MTATTIPTAIPVAIYARVSTDRQGDSIEHQVSFLREYVSRNLGEGYYTDDTLIYSDEGISGYSTTILDRPAMKQLLDDAKKGVFKVVLIKELTRFGRDDEDNSRAINILEASGVRVKSNDGYDTEQQHTKMLLKFKNILAESESERISTRVAIGFREKVRSGRFPLSDKHTPMGYRLNHDSGKLKIDEQEAEIVKMIFDLYVNKRIGTTTISAILNDKGYRTRKGTLFGKNYIRLILLNPTYVGSLVYGKNKVQIQRTYDENYNLSKSKKMVKSNDPIIVENCHEPIIDNDTFLRASEIMKKRNKQQTVSNRAKYPLTGISFCAKCGGAMVCQKKTSEWRGKRYTSRYYRCSSTQNYGDRKCTQNGINAEKLEKTIYDDLLEEFTKIKEGKYVIDNEIEVRSHKERLEKLNKEREQLKKKQVQVVMNMDLFDDEGSTEILLGLKQKIQTVDEQIFITKRQIIESENHDKNVSKVKDVIESMKAIDLEDLGALKVLFHDVIEEVRIFDKQTIESIQYKYSFV

SEQ ID NO: 15661 - protein, 547 aa, synthetic construct
MQALRKKNISIIPSNPAYDKTIKVQFKALRVAAYCRVSTLLEQQEGSYEAQVSYYTEKIQQNPNWKLAGIYADDGKSATNTKKRDDFNALIEDCMAGKIDLVLTKSVSRFARNTVDSLQAIRKLREKNIGIIFEKEGINTLEGSGELLITILSSQAQEESRNLSENTRWGFERKFEKGVVMVNHKKFLGYTKDEYGELVIVPEQAQLVRRIYRLYLEGLSTQQIADTFMAEGIKTVTGNDKWHDTVIAKILQNEKYMGDVLQQKTYTIDFLTKKRVKNDGIVPQYYIEDNHEAIVPKEIFFQVQEERARRTSLHKPAVTRRANKEKSKYSSKYVLSDILVCGECKHPYRRQTWSRNGVITPVWRCESRLASGTKNCKHSPTLKEKPLHEAIMTAVNNVVENHREVVGAFRQNIIRIVGSYSTKNMESEFDEQIDMLQGQLLELIEENAKQGAVDEDFDERYKKIADEMQELKMKKLKQARERKLAGEYGQRMDGMDSCLGVANYDIRMFDEDLIRRLVLRIRVISEEKIEIHFKAGFVMLQDVPLYE

SEQ ID NO: 15662 - protein, 521 aa, synthetic construct
MNRKITTIQANKDLSRQSKLPSIKKKKVAGYARVSTDNEDQTSSYETQMKYYEEYISSRKDWEFVKMYSDEGISGTNTKKRLGFQEMVNDALAGKIDLILTKSVSRFARNTVDSLSTVRKLKDVGVEIYFEKENIWTFDSKGELLITIMSSLAQEESRSISENITWSKRKQAAEGRVTFAYNNVLGFKPKEDGGFEVDKEQAQIVRYIFGQFLSGKNPNQIAKHLTENKIPTPRGKEKWSYSSVRSILTNEKYKGDALLQKYYVADFLNKTQKRNNGELPQYYVENSHEAIIDKEVFDAVQVQLSENKKWYTEKNYFGKIRCGCCGSSYVRHLWHSNDKYKETIYRCKDKYKNEEKCDTPHIRDDEIQRWVVSALNKVIDNRKEIIGNIKLLIKMIKEDRGLDDEIIQLEERLENIRTDVEKLIITNSKIAQDQEEYTRKYNKLIEEYKLLEKQLEQKNLDLLSKNKRVRELKIFIDSLEKQGELLTEYDTKLFNYLVDTIIIHKGKSVEIHFKNGEVISI

SEQ ID NO: 15663 - protein, 470 aa, synthetic construct
MRQEMTTPRSPDIDSLVQAGVYVRISRDELDDHKGVARQEEDGRKVATAEGMAVYTVYSDNDISAYSGKIRPAYERMMADVRAGVIQAIIAQHPDRLHRSPRELEAFITAVDEAKCQVITAQAGYIDLSNSNGRMMARMAGVVARHESEHKSERILRKFQEKREKGEWTGGARPYGYEADGVTIRQDEAAIIRELVARVLAGENLNALTADLNRRGITTAKRGPWRRSNLQHMLVGGRISGRYQRAASKGVAGEIVGPAVWSGIISVEDSERVRSLCSGPKPKGRNAKYLLTGGISKCGRCGRPLTVSHRSIATQTRLNCQKWDPSDQTACGGSSIVYGPVESFIADAVLHRVESGALDRLVRGLDTGTLDELIFIERELGEIGNGVRWQAQRAPLLARKRELERQAQPAQVDPGFDGLPDPLRPAWPELEMGRKRAIVQALIEVVVLHPATKFGRGNVDLGRVEIRWKS

SEQ ID NO: 15664 - protein, 542 aa, synthetic construct
MNNRAVTYARVSGDDRVKDGRNLAGQLDICRDHALKKGYLIVAELSEDDRGASGASFELPALNQALEMAKNGEFDILVVREIDRFARSLAKQLIIEQEFRRHRVQIEYVMGEYPDTPEGSLNKNIKAVIAEYERLKINERMVRGRRQKIKAGNVIVHGKAPYGYRLEEVDGKSKLLVNEDEAQIVRIIYQWYVFGEDKKGPMSARVIARRLTQMGVPIPPLSNRNSTKWSRTTVGRIVSSKTYIGVWHYGKNGSSNGHRLSNPEDYWLSVEVPAIVDMDLWDAAQERKSINVAAAKKNLKYQYLMNRRLICGVCGSKIAACGSNDGYKNRLYYRCNVARGYDEYERKCDNARYFKAEDVDFTIWEWLKSFIRNPDAIDDGIAEYHEHREREQAPFLERLQVVDDLLVDHRNQLQKLLDIYLDGNFPKELLVERRQRLQDTVDSLAAERVNLISHLENSAHSPEQLQAIKETAFKVAAGLDEAEEDFDSRKYIVEMLNVYARLVIEEEEKIAYVTCVFKEEAERLLIVSPNTYRRKRRENHSR

SEQ ID NO: 15665 - protein, 541 aa, synthetic construct
MPKAISYIRFSTKIQSVGDSTKRQSKYINDWLKRNPDYYLDESLRFQDLGISGFSGANAKSGAFGEFLAAVESGYIEAGSVLLVESLDRVSRQDIDTAGEQLRKILRSGVEVVTLVDNEWYTKESLKDSLSMIKAMLVMERAHEESAMKSTRLRSVWAAKRERAAKGEIMSKRCAAWLKVSEDRSHFEFIPENVKAVQRVFQLRLEGLSHIKIAKQMNDEGFYTLNQHKSVKGGWSQSSVTELLSNRSVIGFKVPSKSMAVKGISEIPNYYPSIITDEQFYAVQQLKQGSGRKPSSDLPLLTNLFKGVLRCSECGFIVVVAGVSAKRSGIYKCSMKSEGRCNSVGFSRLQTDKALVQGLLYNTNRLSLNRDSGSAIGTLQSELEQLHKQRERLIKLAMLADDTESMAKDLKALNSQIKDAEKAVSEVHQREQSSQLETISHLDLTVKKDRIEAQIIIKRIVKEIRLNTAGKKCDVFLHNGLKLLNFPLDRVVDGAQWLEVLPLIDGDEFDFEGFTTKPRHLVLEEAPEWVKEIEAQPNQPL

SEQ ID NO: 15666 - protein, 570 aa, synthetic construct
MARLISYLRMSTSEQLRGFSLERQRKLIAEFAAKNGLSVEEENTLEDIGRSSFSDDAQQKELAKFFENLNAGKYEPGDVFALENIDRLTRRGPIDALMKVNQIISKGLKLAIISDKEQRILEEIDVFSIITLSIDASRANKESQVKSDKGLFNWQEKRNLAASQKLAMTAQAPAWLDTEIFYIFDEEKKKNIKRRKYVLNEEKADAVRLIFDLYSSGNGALKIKNILNEREIKTFKGAPYWEPSIITKILKNPATFGLYQPKKQGTGKRDLIAAGEPINDYFPPVITRDLFEQCERIREGNSTRKGRKGKLFTNLFTGLLTCQKCGGPVHLINPGIDKRNKVQKSIYYLVCKRAKFTKECTTKRVRYDDFERALLKAIQEINLADILNENNPLETLIKKQRSKETEITKKKKLIENFQRQFLENDGDLPAFMISQAKEAEISIKELEDQQREIASEIAQLNVYNSNVDNAIEELKEKPDYETRSKINLLFHEIIKNISLDTENQFYTVRFKNGVMRVITAAGFVVTVEHQASAEMAEIMRIEGTQDIPAEIATDPEKLIEYLRQFDFVDQ

SEQ ID NO: 15667 - protein, 590 aa, synthetic construct
MTTKPRAYSYIRFSNATQAEGDSYRRQREDAERYCEQHGLELVDSKEYLFFDAGRSAYKARHLDDSGELARFLAYVEDGTVPAGSVLIVESLDRLSRENVQTKALPRFLDLLGKGIDVVTLTDNKRYSAGDDFTSLIISIVYMARAHEESATKGKRVSKAWQNKHKDAVDNAKPIGKLCPYWLKYDSDSKSYTPIPERVEVVQRIYQLAQEGYGHRAIAITLNQENIPSFSADRKNASGLWANSSIAHLLKNRSVLGEYHPHKFIDGVRTPIGEGVKNYFPQIVSEDVFYSAQQSIAARKNTQVTKTTANFNVWAGIAKCEYCRSAMHLTNAGKKRVLRCFSNIKGICPAKSVELIRSENVFKEILSKVDSLSLVQDNSAKLQRQITVLDGKIASIAGRLDDLQQQVLAFGGRIPKTLVASMTKLEDEQEAYTQQREQLKADLGRERIVSKEEFFSRLDMVSYEGRGKANGLLKTLGISVRVRRNEGRGEKAEISYMVDREGQTIFGLSDHPTHGVMFFAFESGSFKAGVVQGDISEQAEAEQKALIERIEESKATQLRLKELTKTMSYKQIAEQEGMSVREVKRALGII

SEQ ID NO: 15668 - protein, 532 aa, synthetic construct
MKRAAIYARYSTDLQNDKSVEDQIRLCEAHAQRIGAQIVKTFHDRAKSGASMFGRAGLSQLMQEAEKGTFEILISESPDRVSRDIADLAHIHKTLKFRGIEMNCVNGGVMDTMQIGMYGIVGQMQREEGAKKVKRGMVGVVRSGRNAGGKAYGYEPVPGKPGELAIVEEQAAIIRRIFKQFAAGVSARSIAGALNDENVPPPRGSKWNASTINGNGARGYGILRNPIYDGRIIWNRVRMVKDPSTGRRVSRVNDASEHETIEAPHLRIVEEKLFAAVQKRKEDATEFSMPLVRSRRILSGLLRCRSCGGGMSIVGSDRSGPRVMCSTHRESRTCDNDARYYIEKIEQKVLNTLRQQFADSDMIKAYVDTYEEERRRTSADLKRNRASIERQLDEAKKAIARVVEKVAKGIIEDDDAAAILPGLREERDRLASDLTKMEKPNNVIELFPLAVRRFKENLEKLTEILSAAGEIPDADAVLTFRELVASVIVDPRKAGEDYVVEIKGYLSSLIQPEMSAVVVVAGEGLEPPTRGL

SEQ ID NO: 15669 - protein, 610 aa, synthetic construct
MKKKLYSYIRWSSAVQGRDGGTTQERQLESAEKYALEHGYELVTMIDAGVSAFRGKNVIREQKAEIEKKTNVKVGELGRFIDAVEEGLIPAGSILYCEGLDRLSRSNITTANSLFLQLLTLDIQIVTGMDGKSYTKESVNENPTDFLISTLMFVRANEESSTKQKRTYGNAEALIKRFKTGLPTTIKSVGSHPLWIDASTAYDEQVRKHPQYWQVAQYAMELFLEGASAFKVCKELNTRFPEGWKGKMWSVPNVRKLRTNPAVYGLRILSVRGIEYKLEGYYPPLITEAEFARLQDIQQNNKYITTGEKNQINLMAGLRLFRCGHCGSTMMAMRHKDTIRYLCEKGRAAGNLKSKDDKLKKLKGCRTWSLSGDLVEHTLMYAVTYAFIYKNKDNKEKVDYETQINETKDKILSITSRITNLTELVSAGLSNVAEVVESIKKLNEERQVLNLHLDKLQQNNLLQESSHFEELMMNYFETIQWPIIETVDHPERVKIREIVRNTIDKAVVWKADKKITIYYVTKDGTDFTFEAGDEKDTWRFYFGVPDLVKRSDEFEQAKQALEMNNELFDKILALKNQEAEAAGNALKTVIKSLQVVGYPEIDGKLFWPRK

SEQ ID NO: 15670 - protein, 509 aa, synthetic construct
MLAIVYARVSTEDQIKGYSLGSQIEACRKRANELGATRIEEYIDEGISGGILERPGLTAARECVRTGGVSFFICYDPDRLARNLSHQLLITEEVEKAGTKLEFVNFDWQNTAEGKLFYSLRGAVAEYEKEKIRERTQRGKLAKAKQGKLTHNPRVFGYDYDKERDVLNVNERDAEIVKQIYRWFIDEEGTGLHTIARRLTELQIPSPRGKEFWAKMTVKRILSNETYTGTLYLHTTDASGVKNNRYRPKNERVSRKERPRGEWLPAKVPAIIDELTFRKAQQKLEVIRRQRPGNAKYNYLLSGLCLCGYCGSTMHGNLITEKSGKKIAYYTCSAKSPHVKGIFKCDSHHVPATDLEDLIWAKVLDWLSNPAKFSEETSRQYGIGDRSSLQKQLQLIKKSMEELKKDRDKCLALYYKDLLPQKEVEEKLREFIKGQEQLEKMKGEILNELEGAKRYEITPEEAQKLLASFTAHLDEVDAEAKKNLIKMLVSHVIVGEEEVVIKVKVPWAD

SEQ ID NO: 15671 - protein, 536 aa, synthetic construct
MRVAVYARVSSEDQAERGTIENQLEFARKYCDLHELDVVEWYRDDGVTGTIPLEMREDGRRLLEDAKAGRFELLLIYRLDRLGRSARIILNAVYDLEQHGVKIRSMTEPFDTSDPNGRFLLTILAGVADLERETILERMWYGANRAARAGKWLGGIVPYGYRVNEEGYLEINEDPLPGMEMSEADVVRLIYRLIGEQRYSTIRVADYLNALGVPPSYTKDGRQVKRGKRKVNTAGIWRPGRVRNMVVSTTYMGLHHYGKRTNKKRELIPREVPAIVSEDLWQKAQQVLRDNQLEAMKNAKRQYLLRGLIKCGVCGLTYHGTAYGGPGGKPKAYYVCGGKTAYRGPLEGRCTSKNVHQDWIEDFVWQACVDFIQNPGDAIKELAASMEERKSQKAALTAELEMVKKAAQEKEVEKQSILDLYRKRIIGSVDVEQQLQQIGREKAALDQRARDLERQIEAEEGLAQQFDTAEELLADLKAKLEANPPFEVRREIVRALVKEIIIDTKPGDNGRPRAIVTARYTFSKVVTRTARDSYWL

SEQ ID NO: 15672 - protein, 435 aa, synthetic construct
MAAYCRVSTDQDEQLSSYENQVRYYQDYIRQNPLYELVDIYADEGISGTNTKKRTEFNRLIGDCRKGKVDRIIVKSISRFSRNTLDCLKYVRELKELGIGVTFEKENIDSLDAKGEVLLTILSSLAQDESRSISENATWGIRKKFERGEVRVNTTKFVGYDKGENGNLIINEEQAKIVRRIFRDFLQGETPESIARTLKEEGVPGWNGKVNWYPTTIQRMLQNEKYMGDALLQKTYTVDFLTKKRSENQGQVNQYYIEGNHEAIINKEEWELVQLEVDRRNQFRQDNHINFYIIQCEQNPFTCKVFCKECGGLFGRKNWTTSRGKRPVWQCNNRYKVKGVQGCTNRHIDEETLQQAFLRAIEILHENKGQLLGKWAIFDEEQKLEKYHAAQLKELLDSEQEAFDGRKMCQVLEKITLGEDGSITIKFLEGTEVNL

SEQ ID NO: 15673 - protein, 523 aa, synthetic construct
MAKTVRVIPASPKIFRSEVTAEPRRRRTAGYARVSTDHEEQASSYEMQMAHYKNYIESRADWDFVGMYSDEGISGTNTKKRDGFNQMIEDALAGKIDLIITKSVSRFARNTVDSLQNVRKLKENGVEIYFEKENIWTFDTRGELLITIMSSLAQEESRSISENTTWGKRKQFAEGKTSVGYSAFLGYDKDFQINEEQAKVVKLIYKLFLAGRSFYAITKELEKRGIKSPSGKDKWYISTVRSILTNEKYRGDALIQKEYTADFLDKTRRKNTGEIPQYYVEEHHEAIIPPDLFDFVQAEIKRREQNGKHSGVSIFANKIKCGCCGAWYGAKVWHSTDKYRRVIYRCNKKYAHKGKPCGTRHLTEEEIKRIFVKALNSLVEVKENVIAELRSLIDSVCQMEELTEERNRIEQEPSVLAERLETLIRENARVAQDQTAYLKQENEIRALYVEKQGSVEKLDEQIAERESKRKTLEGMIQVVCGINGEQVGFDEELWGGLLDYICVEEDGQIVVVFKGGIEIAVEG

SEQ ID NO: 15674 - protein, 499 aa, synthetic construct
MKIRRVQQTQTLQKKLRVAAYARVSVDTLHHSLAAQVSYYSTLIQKNPAWEYAGVYADEGITGTSTTHRDEFKRLIADCNAGKIDLVLVKSISRFARDTVDCLHTVRQLKERGIAVRFERENIDSMSEDGELLLTLLASFAQEESRSIGDNIRWGVRRRFRQGIPNGHKAPYGYTWDGEMFRIVPSEGEIVKEIFRRYLAGESAYAIANTLAGRGITGRQGRPIEQTTVKDILSNISYTGTMALQKNYISEGHIRKRNKGELPMYLVEGMFEQLVSKVDFDKAQEIRKRRAAQSSNRNPVLLPFSGMVKCGCCGGGFSRRTAGKYRRWGCNTRERKGSTACDSRPIKEEELVAAVRIAMEKDDFDTAELRRKVSKIVIYGDCVEFHLTNGRIKKTARIYNGQRGSNPFTNKVYCTSCGSKCERDTWTKGTKVWSCSQPRTKCQLRRLPESELREAAASFFCNGYEGKIVQNVERIIISDDEVIFQLKEGGAYRWQRQCG

SEQ ID NO: 15675 - protein, 503 aa, synthetic construct
MLRAALYARFSSENQREESILAQFRDSTEYCKKHNYAIVAKYADEAKSGTTTIGREQYKLMLKDAQKGKFDIVVFHKIDRNARNELDYYITKHKLEEAGVKYAYSRQDIDSTSPEGQMMESMLVGMAAYYSRNLSNEIKKGLRENAIQGKCTGGRLPYGFSVDADKKLIINEKEAAAVRMIFDWYSAGVHYGVIRKRLFNAGYRNRAGKEFTIASIYEILRNRKYVGDLYLGKTLFRKGKRNTHQVSANVQYFENVIPAIVSREIFEEVQVKLDQNKRRSGAGNAKAIYALSGLIHCGQCGSAMVAHSTKNSRGIKSYYYRCPKGRLLGEEKCPQKFINRDDIESAVYRLIRKLFTAPDAHDQIKRIIAKNNMGVKVPDYTDRVKRLKKQESDASKRLDKLYDLYMTDREDEFTSSKMAQIKEEILRLRTQIKEAEDRQAIAQSTTFDIDKIIDTFQKQLKQKQSPEFIKTLFELAVKNVTVYPDKIKVVLLVTQERFELPTP

SEQ ID NO: 15676 - protein, 435 aa, synthetic construct
MAAYCRVSTDQDEQLSSYENQVCYYQDYIRQNPLYKLVDIYADEGISGTNTKKRTEFNRLIADCRKGKVDRIIVKSISRFSRNTLDCLKYVRELKELGIGVTFEKENIDSLDAKGEVLLTILSSLAQDESRSISENATWGIRKKFERGEIRVNTTKFVGYDKGENGNLVINEEQAKIVRRIFQDFLQGETPESIARSLKEEGVPGWNGKANWYPTTIQRMLQNEKYMGDALLQKTYTVDFLTKKRSENQGQVNQYYIEGNHEAIIDKEEWELVQLEIERRNQFRQDNHINFYIIQCEQNPFTCKVFCKECGGLFGRKNWTTSRGKRPVWQCNNRYKVKGVQGCTNRHIDEETLQQAFLRAIEILHENKGQLLEKWATFDEEQKLEKYHAAQLHEMLDSDQEQFNGRKMCQVLEKVTLGEDGSISIKFLEGTEVNL

SEQ ID NO: 15677 - protein, 407 aa, synthetic construct
MKSGKTRVCAYARVSTMTEKQQDSLTNQQAYFIHFYQNQKDVDFIGVYYDQGISGKLAKRPGFQQMLEDCRAGKIDVIHTKSISRFARNTELLLAVSRELKTIQVDIFFEEQNLHTLSNEGEVMLTVLASYAEEELRNMSENQRWAFQKKFQRGELVINTKRFLGYDKDENGELIINLEEAKIVQRIYNLYLSGMGVHAIAKLFNEEKVSTVDGGKWYSSTITNILKNEKYRGDAILQKYYFAEIKAKQRLNQGQVQQYLITDNHEAIVSREDWEAVQKRLQQNRKANLSIDYNRRYPLSGLLKCEHCGSTLKRQKYYKGKVVWVCSKYIREGKDACIGMRVPDSAVQDWSIHEPTVVKEENIDGKKYYSYSSKENDTSRAEATHSENPNGGLLPSVHRPRRTAIKL

SEQ ID NO: 15678 - protein, 437 aa, synthetic construct
MTHAALYLRVSSDRQAKEGDSIPAQREALREYATSHHMRIYREYVDDGISGTKYSQRDELQALLDDVRAGHIDIILFTKLDRWFRSVRHYTRTQEILDKHGVPWLAIWEPVYDVSTPQGKLIIHQMMSIAEFEAANTGERVRAIFEHKAQNGEVLSGCQPYGYKIVDKRLVPDEHAGYVGEIFERYSLTGNLCDVTRFASGFPGAPHVNSSIKRILKNTKYIGLYRGNPHYCEPLVSESLFYDVQRKLGMNIKKSQKNTYIFSGILCCAECGRKLGSYRTRGLTKYRCQKYYSRGVRTCTNKKAIREETLEAYLLARIRPEMEKKIEDYEIAEKDRDSAEKRKQNIEKKLSRLKDLYLDGLIEMDEYRADRERLEAELSDITDTPKKDFTEIRDLLDHTIGDIYETFSPEEKRFFWRAVVKEIKFGADKSIGIVFND

SEQ ID NO: 15679 - protein, 549 aa, synthetic construct
MKRVAIYTRVSTKEQALEGYSIEEQEKVLRADCKENGFEVFKVYSDKGISGKNLTNRPGIQALMADAEKGLFDILMVWKVNRLARKLYDTLEITDRLGAFNIELRSHTESMDILTAQGRLMMNIFSSFAEFEREQIAENVKMGMEARAEEGRWNGGIVLGYDLEGDEDKTTKRANKKLVINEKEAETVRYIFDLYYKGNGYKTIVNRINKEGFKSKKGNFFSVATVREILRNPLYCGKIRYNQRVNWKHKRRRGTNVDPIIVDGIHEPIISEELFNGVQKLIETKGGMPKRALDGSFPLTGLLRCPECGSGMVAGRVSRTNKDGTKVLTRYYNCGAWRNKGTQVCHANGIRADDVEKHVFRKIDKLIMSEPFLRLVLKKANEKRRDLILPAGNKVKSLEERITTLEENRTNYLKLMESKVMKAEDIIPKLKDIGEKITFLENEMKKQEGFQNQNSLEEIPYELIKKTLENFEKLLQKASGNEERKTLLNLMIDEITVGKNKRVEDIVIKFSSELIKYSLDEGGLPTEGNPLTMYKNRIDFMVYDVKVTI

SEQ ID NO: 15680 - protein, 553 aa, synthetic construct
MLREKITAAIYTRVSTREQAEAGYSIEEQEKLLKQECTELGYPVYMVYSDKGISGKSIKGRPGIQAMLADAELGKFNIVLVWKLNRLSRKLKDTLEIVEKLSYNNVELKSITEKTEMNTPEGRLHLHIMSSLGEFERGQISENVKMGMKARAKDGRWNGGIVLGYDLMDVPNSTKKRSDRMLVINTEEGTLVKKIFQMYYNGKGYKAIANQINKEGNRSKKGNPFSVNAIRDILMNPIYCGKIRYDVRSNWSAKRRKGTNPNPVLVPGIHEPIITEEMFDKVQELIKSKNGKPNKVFTGSYPLTGILRCPVCNSGMVAGRVSYTYKDGSKKLTRYYYCGAWRNQGTAVCRSNGIRADEVEKYVYFKLKRLLTSDPFLKATISKVNKKRQEVSVPAENNIRNIEKEIQTLSSNRDMYFKLMEKRAIDETLLLQKLQEIADKIALLEKNKLDQEKYLTIGDIPEVPFDLVKATLSEFGELLEATTSNEERKTLLHLLIEEIKVGNAKRPENVVVKFNKTLVDYITENGGLPAEGSPLLRYKNSMELQTYDFQVGI

SEQ ID NO: 15681 - protein, 596 aa, synthetic construct
MKTQLYSYVRWSSDKQTGNSSLERQTRKSKEYAARNGLEWAELRDEAVSAYRGANWDEKKSALGGFIGAVKSGLVPSDSWLYVESLDRLSRQNVLDATEWFISVLKLGITIVTGMDEHVYNRESIAANATGLMMSIMLFARANEESETKSKRVVSHAKLLIERHKEGKPATIKSAGSHVWWIDSTGDEKEAVKPHPVMWDAAKMIVEMCKEGHSVFRIVAALRERYPYGFKGRDWSGSTIKNMRVNPALYGCRIMQLGKDEHKLENYYPPLCTEAEFYRIQEVKSNNKFRANKSSSISLLGGMRLIRCGQCGGTMNTLTTTDGKIRYVCSSGLASKGGGCTRSWSLSGILIEHCLMIVLTHAYFDDSIRNQNSATDLDGQIEQHEVRIAELNTEIKNIASGIAKHYSEALVELLAAAEKERKQLVQELDRTNQKKLLLTTQSVFETNMVNFFELIQWGIISEPTHETRVKLREIVRRLMRSVVIHKYDGIVSLQYSYKEGEYFVFEGAGKRHEWTHYIKRDKDTSTVVSAEVIEQVKNHRLIKDIETSLYNLETAHDGMFNMVLDMLAIVNYPKLKGSQFWPKKSSTERTVFKKPA

SEQ ID NO: 15682 - protein, 481 aa, synthetic construct
MKSTNKVAIYVRVSTTNQAEEGYSIDEQIDKLESYCKIKDWTVYKVYTDGGFSGSNTERPALESLIKDANKKKFNTVLVYKLDRLSRSQKDTLFLIEDVFIKNGIEFLSLQENFDTSTPFGKAMIGLLSVFAQLEREQIKERMQLGKLGRAKAGKSMMWAKTSYGYDYHKETGTMTINPVQSLVIKFIFESYLSGRSITKLRDDLNEKYPKEKPWHYRAVRVILDNPVYCGYNQFMGEIYKGNHEPIISKETYDKTQEELKIRQRTALENFNPRPFQAKYMLSGIAQCGYCLAPLKIMMGMIRKDGTRLVKYECHQRHPRKLRGVTTYNDNKKCDSGFYLKDDLETFVLQEVNKLQHDSEYLEKILSDNHKESIDRESYQKQIRELTKKISRLNDLYIDDRITLEELQSKSSEFLSMRNLLEKELEDDPALKQEETKNTIKQSLDKGDILKMDYEAQRDIVRALIKKVQVTADSIVIKWRI

SEQ ID NO: 15683 - protein, 590 aa, synthetic construct
MKVIQKIEPTKPKIAKRKRVAAYARVSVDKGRTMHSLSAQVSYYSKLIQKNPDWEYVGVYSDGGISGRTTESRNEFKRLIKDCKDGKVDIILTKSISRFARNTVDLLETVRDLRAINVEVRFEKENIHSLSGDGELMLSILASFAQEESRSISNNIKWSIQKRFKEGKHNGRFNIYGYRWVGQELIVEPSEAENIKLMYANYMNGLSAEFTAKQLTKMGVTAMKGGPFKATSVRQILKNITYTGNLLLQKEYTPDPITGKSRYNNGEMPQYFVENHHEAIIPMEEWQAVQDERLKRRKLGARANKSINTTCFTSKIKCGNCGKNFRRSGKRQGKNKELYHIWTCRNKSEKGVKVCNARNIPEPALKKYATEVLGLEVFDEQIFIDSIEEIVASEGNMLQFKFYGGREVEVKWTSTAPKDYWTPEVRRAWSERNKRKESRTWNGRTTEFTGFVVCGRCGANYRRQAVTSKTDGTVRRKWHCSNSAVACNEGKSRNCIYEEDLKVMVAEILGIPTFNEPTMDEKLSRISIIDTEVTFHFKDGHDEVRTFEIPKKKARTFSEEERARRRLVMKKRWEEKKRDEESNNDTSDNH

SEQ ID NO: 15684 - protein, 555 aa, synthetic construct
MANAVKTVQVLQPIQRQDNPEDSLNMSKRKVCAYCRVSTDSDEQMESYNAQVSEYKKKITENPEWEFVDIYADAGISGTNVKHRLAFNRMIRDCENGKVDLVITKSISRFARNTVDCLKHVRELKNIGVEVFFEKENIYSFDSKMELVLTMLSSIAQEESRNISENTKWGLRKRFRDGVTVCNTERFLGYDKDESGNLIINEEQATIVRRIFREYLDGKGYAAIGRGLEVDGIITVAGKTKWWDSSIRGILENEKYYGELLLQKTVTVDYLTKKRVDNDNIEPMYRIDNNHEPIISKEMFDLVQQERKRRFEITRGRDEDRRKYSNKYGFSGKLYCEKCGKTLKRRHWNVGTKSEKIVWQCNSYIQGVKNCSAKAVDDATLKRAFIQLYNDMVVDKGSFFKVFLDNINKVMTKESKVSEINKVTESMGLLEQDLSELVQLKLRKQIDDKYFNKEYERITNELEKVSIKKDNLERQHLDDVKYKEKLAAISKIVDNGDEPLVEFDDDFFIALVDKVIIKSPNHFMFILESGQEYEADYSSQQQTTHVETITRINRA

SEQ ID NO: 15685 - protein, 440 aa, synthetic construct
MAAYCRVSTDQEEQLLSYENQLNYYTGYINNNPLYQFAGIYADEGISGTNTKKRDEFNKMITDCRSGKIDMIITKSISRFARNTLDCLNYVRELKELGIGIIFEKENINTLDAKGEVLLTILSSLAQDESRSISENSTWGIRRRFEKGQHKMSTKRFLGYDTDEDGKLVINRKQAAIVKRLDFEFLSGKTVDYIKRIFEREGVVNWDGSTKWQATTLQSMLENEKYKGDAVLQKSYTVDFLTKKRVMNQGEIQKFYIEDDHEAIIEPWIWECVQLEIERRKCYLDEHGTKSYSNNTEKNPFASKIICGECNKVFTRKGWRSSTGETRKIWQCSERYKVKGVMGCANRHVEESTLEKAFVMAWNGILENKQYFVHKWAEQEKSEDLLEVYRAKDFLKLNKEVILAENLELDFLLRVLDYIKVCENGQVLVVFLDGTEIECK

SEQ ID NO: 15686 - protein, 539 aa, synthetic construct
MRRKKVEGGNRLVAYYRYSGGSGQTEQSIEGQRRDCENYARLHGLTIVHEYIDRHISGKTDDRAAFQQMMNDGDKGAFDMVICWKTDRFARNRYDSAVYKKRLRDNGIEIFYAAESNVDGAEGIIIEGLMEALAEYYSAELAEKMRRGMRESALKGQAINRCRSLGLTTDENKKYVIDEKTAPTVRFIFEHYAAGESSASIVEQLNAKGLRTSQGNPFNKCSIPRIIQNEMYRGVYTSKAYNVRIEGAIPAIIDDDLWKRAQAMMKTNRQLKAKYEPKAEYLLSGKLFCAKCGCTMKGVSGHSGGNDEVYRYYACSNPQCRKRNIPKDDLEGKVIRSICDHLLQPETMELLAETMVEVQKADMEKPNAERDVLEQELRDVRRRSKNIMDAIETGSANPQLVARLDDLTQQENTLTYQLSTMEAEKPLLFTKEQYLFLLQQFYAQPTEQDDAYKRRLINTFVTNIEVSDSELLIYFNISEETENKNKNAPQLNFDKSSSTEKRLVQQTRGVLAQLGDGGGDEADDDERHTEGDELAHDIL

SEQ ID NO: 15687 - protein, 589 aa, synthetic construct
MKSVFKTLDRSRPRKMVFYGRVSTEHEAQLAALKNQMQWYDDQERYHPNWTVVDRYIDEGITGTQAKKRPAFMKMLEDARQGKFDLIVTREVCRFARNTVDALVSVRELKKLDIEVYFVEDNIWTLDGDGELRLTIMATLAQEESRKISERVLAGQAISRQNGVLYGTGNIIGYDRVGSTYVINEPQAEIIRLIYSMYLDGYGEKAIVNELTRRGCQNGRGEVKWDCSKVGRILKNATYKGYIGYNKSVTVDFLEHRRITNHDTSQHTLIKGDFPAIISEEDWNRCAEIRESRIQSMPQLGGGTRKFGRNPSKFLWSKKLRCSCGCSFQRFHWRTNKRDGKEVYGYQCYSHRNGASLQYMVDNGLTDEHTCQIRSICDWKLDLMAKTVLENVWIDRRAAVIEACKILAQCGKESHQEEHQEHKRLEARAQKLKTRLQNLIEMRADGELSKEEFMSQKSEIAEQLQAIESQRTTVPVQKQPVLNIEKIRDTLNCLIDFTQPKLDEMLLDKVVDRVIPITNDHFRWELNLLSGEHNAVECSIKGRKNKASVSIEETVRSDTLSNISSEKIAPTGGPPRRPPSRIPAKGEHL

SEQ ID NO: 15688 - protein, 521 aa, synthetic construct
MQYDKADQQNCPRRVVFYGRVSTELEAQISALKNQMNWYLELAEHHPNWTVVGQYADEGISGTGMKTRPSFMKMLRDARKKKFDLIVTREVSRFARNTVDTLVTTRELKQYGVEVYFVNDDIWTMRGDGEVRLTIMASLAQDESRKMSERTKAGIQTSQKKGTYVAGPTPFGYKRDKKAHTLVVQESQAETVRKIFAWYADGINGTEIAQTLTQEGAPNKSGMPQWSARQVLSITKNTIYKGYLTYNKSHIDDFLSHKSIKNSEQDYILVKGSFEPIISEELWDKCQRRRHAWQSYKDGNITQAYLYGKSEHADKWACRLFCGCGARMRAFRAEKGLVRYICYQRSLRNVAPKCSAPNVQAWKLELMAREIYKNVWQDHRQDILEEYQQEQENGAADSEKVEEALSWQESFPNDEISREFLDRFVPRIFSIDGQKFIWELNLFQESCTVQCNVRGTYNYHSISAEKIMPGKTKAKKGDGAVNRILEDANSTRFWVHTYDDDPISRLPLKIREHKTFVASYR

SEQ ID NO: 15689 - protein, 650 aa, synthetic construct
MTDYIGNYKNRPRRVVFYGRVSTEHEEQLSALGNQMEWYTDLALRNPNWTVVAQYIDEGITGTQMKKRPSFMRMIEHAKEHRFDLIVTRELSRFARNTVDALNATRELKQYGVEVYFVNDGIWTMDGDGEVRLTIMASIAQDESRKTSERVKAGQKMSREKGVLYGSGNIIGYDRVDGTYVINEEQAATVRRIFNLYAEGHGETTVAKMLIEENRKDGGGGLSWTASKVSRVLRKPTYKGYMTYNKSHIDDFLSHNRINHSEEDFVLVKGNFEPIVSEELWETCNQIRSKRAAFVKGKDGRAHKFGVSFPQNKWTKILFCDCGMRFQIEGYDKTANGGKNMRLICARSKMFKKKDAARTLNGIPCPAPYASEWKLELMAREVFRTVWKENAEDILGLLRTLDANLNTTGTPNDGNQMENKLSALNEELDNLVSQRASRSITMDDFLSKSTEINNEIINVEGLLQSSIQEQRPKARLDMHSIEAALSDDASFPDGKIEPGFLDRYTNRIVKSNNRYIWMLQLMNVQQIMPIQSERQPIAMVTYKSGVPYDIEQEQIGKQDKESAGPDCATICRPQDFFLNMSRTKRKRKLVEWLESCQENQVRVLDEKIPLLSFAVDFVTAYEYQKARGIKIHPGLWKDMRVDIFLVKKEN

SEQ ID NO: 15690 - protein, 484 aa, synthetic construct
MKKEKVIPIDSLDLVDLYIRVSTTEQALEGYSVAEQEHRLRQYCAAMGHRIHKVHIDAGFSGASLDRPGIKETIKDVQKHLVRRVIVWKLDRLSRSQKDTLIMLEDVFLENGCDFISMMESFDTSTSFGRAIVGILAAFAQLERENIKERTMMGRQARLAKGHYNGSRPPLGYSFIPGSNDLQVDPYQAAIVREIFKLFLSGISINAIARKMEEKYPTVRTWNNTMIRRTLKNPVYIGKVNDNGILRDGIHEPLISEIDFQMANAILVHNSKIKKQSGRSRSLLTGLLYCGDCGARMHPRRIARGYPLRRYVCYSVSRTSKSMIKSDHCTNRLHPYTQEELEQIIIDEIKKLAADEDYISEVIRNSSAEAPVDDTELFQERIEELNRQTDKLLNLYQIGAIELDQIQERLAGLKQERESLTAALKESQTKTDINMDHLKIMSYASAFQVALESGDPEYTNSIIRLLIDKIVVLNEDIEIHWTFC

SEQ ID NO: 15691 - protein, 573 aa, synthetic construct
MQKNQTKKAALYIRVSTHYQIDKDSLPFQRNELINYAKYALGIDDYAIFEDAGYSGKNTDRPAYQDMMRRIRAKEFSHLCVWKIDRISRNLLDFAAMYEELKKFNCTFVSKNEQFDTSSAIGEAMLRIILVFAELERKLTAERVTSIMYSRANKGLWNGAPIPLGYKWDAKGKYPVIDEDTAVVVRYIYDQYEKIHSTMKLSDKLNRENIKSARGGEWTGTTVKGILRNPFYKGTYRYNYKTQTGRIKPVEEQIIHEDNHPGIIDKEQWDRVNKILDENSTRSVAQLRSNVKYTHIFSKLLRCGQCGHTMGGGLDRARSDGYRPSRYYCTSHTSKSGCTNGVYSDVYLGPFVFNYIANLVRAQRALTDSQKPRDLERMLLRGKFFDNVAGIEQQGLLDTYNTILYGSGEDVMLQPSPEIAAQSASELELLDRDQKKYERALERIEQLYLYSEESMPEKDYVLKRNELKAMLDNIAERRAEVNSRLGLAPASSDFLEKATYFYLTNSLNQKRSLDFRKMVDTFEPKMLQDFLCSVIDHITVVDGHVASISFKNGLTNKFIYKATKPPKNASTKP

SEQ ID NO: 15692 - protein, 569 aa, synthetic construct
MKQSSNKKSREATAFLYERLSRDDNLEGESYSIGNQKKLLTKVAKEKGYTNLVHFLDDGISGVTMNRPGFVEMMQQLEQGKASAVFVKDLSRLGRNYIEVGRLTEEFFPDHDIRLVAVSDNIDTAEGENELAPIRNLFNEWYARDISKKRRISNKIKGNSGEPMGLPPYGYIKDPNNPKHWVIDEEAAQVVRRIFDMTLEGFGTEQIATQFEKEGILTPQAYWIQKGIGRPGKTKTRPATKWNGSTITHLLYQQEYCGDVLNFKTYSKSYKNKKRIHNDPENWVVFQNVHEPIIERAVFEQVQQKRGKMRKRRTSNGEHNMFSGLLVCADCGCNLHFHFNQGNPEIKYFNCSNYKGNRGTCQSTHYIRVDFLEEVVLGEIRRLTKFASLYEDDFLKAVIGHSQQADEADRKLKEKELKALLARDEELDGLFERIYEDNVSGKISDERFSRMSRRYEDEQKELTEKIKQLRSEIEKQSSRTMTTDMFISLVRKYTRAKKLTPRMLNELVEKIEVFNAEKVNGVWEQRLRIHYNCVGTIEIPSALPLPTPDVSVNTRKGVVVNYAPCDVAI

SEQ ID NO: 15693 - protein, 527 aa, synthetic construct
MIVAIYSRKSKFTGTGESVENQITVCKEYINNHFPNSEILVYEDEGFSGGDTDRPQFQKLIKDAENSKFNLLICYRLDRISRNISDFANTIEMLEEKNISFVSVREQFDTSTPMGRAMLYIASVFAQLERETIAERIKDNMYQLARTGRWLGGNSPTGFDSEPIVYIDENMKERKMYTLKAIPEELEIVKHVFEKYLELQSLAKVEAYSFQKDFMSKNGKYLGKTALKFLLTNPVYAKGDKYMYDYFESLEANIATSKDKWNGTKGIMAYNKRLIKKNRHIRNKEHSEWIVSLGKHKGIIDGKDWIKVQKLMEKNREKAPRNGTSRSAMLSGILKCGFCSSPMHIKYGRTNKDTGEKLYYYTCSLKQISKRSKCQCKNLNGEKTDEQIIDDLKNIIDNGLLQSIDKQKKQLSNRKSQSKTIEKQIEKNQRSIDNLVKQLSENESSTITKYIIAEMEKLEKENNKLKAELEKDTTAADTLNLEIFRDSLIHFRNTIDDVPYDLRKNMIKAIVNEIVWDEHSFAIDLLQ

SEQ ID NO: 15694 - protein, 513 aa, synthetic construct
MQENKQNIRFTALYCRLSSDDELKGDSNSIIHQKQILQDYALKNSLTPTEVYVDDGFTGTNFDRPDFKRLLSDVENDLVKTIIVKDLSRFGRNYLKVGYYTEILFPSKGVRFISVSDNLDTSAKDEINDFIPFKNIMNEWYAKDLSRKQRAVIKSKGNAGKRLSTRPIYGYKKAENGDWIIDEPAAIVVRKIFDLYLKGYGPASIANYLFANKVKIPSLTGLQISDKTRNPYRWSKDSVAHILTCQDYCGDMINFKRSDVDNLVIFPDKQEPIISREIFAEAQKLRLSKKPVRHSYSEPVLFSDFLRCADCKNRMYAQRRYKGSTSYTCSTARKVQGCSLHYINENRLSDCVKSEINKLIANKTKVVEFAKAKMHTDAKTAQCASVKNLKNAQTRISEIDAILKNLYEDKVRGNITLETFKKLENEFLREQANLNQTVINQSRIKVNIDSQSKKICEFLRKLEMYKVPIQELSRNVLIDLIDKIEICEAEKENNKRSQQVHIYYLGIGKIDLE

SEQ ID NO: 15695 - protein, 484 aa, synthetic construct
MAGVFADEGITDTSTCKRKEFLRMIRQYRQGKIDMILAKSVSRFARNTVDTLNFTRELRSLGIPVVFEEQNINSIYPESEFLITLHGAFAQAESESTSSRARWGKRQAMKSGHVAMQYKQLLGYEKGPDGKPRIVPEQAETVRFIYDRYLAGDSIREIKAALEGQGIPTVSGKAEWMASHIRSILTNEKYCGDVLLQKNFIQDCISKKVIPNTGQLPKYLIQNHHEGIVSRETFDAVQLEMARRNAKAGDTRKSTPTGRGKYSGKHVLSKLLFCGECGTAYRRCVWTQRGVKRPVWRCVSRLDYGKKFCTQSPTLDEEPLQQAILAAVNAVMLDRDTLARQLAAVMEWELAPMLGESMSLADIDRALEELSSQFNSLLAEASANPAEDYTERFRELSESTTRLKERKAQLEGACQEQGRLQNRLRAVSAAMEHMTAAMTEWDEEVIHQLLEKVTVLSREKIRVTFRDGREIEQYVAQPKRRKLA

SEQ ID NO: 15696 - protein, 498 aa, synthetic construct
MNTVIYARYSAGPRQTDQSIEGQLRVCTDFCKQRGLTVIDTYCDRHISGRTDERPEFQRLIADAKRKKFEAVVVYKTDRFARNKYDSAVYKRELKRNGIQIFYAAEAIPDGPEGIILESLMEGLAEYYSAELAQKIKRGMHESALKCQSTGSGRPLGYRVDEQKHFQIDPESAQTVQTIFEQYIKGESNAAICELLNSRGLRTAQGKPFNKNSINRIIKNRKYIGEYRYHDIVVEGGMPAIIPKDTFNLAQAEMERRRTRKAPKSPKAEYLLAGRLFCGHCKGPMQGVSGTGKSGNKWYYYYCGNTRGKNKTCDKKQVSRDRLERAVVDFTVRYILQEEVLEELARKVHAAQERQNDTASEIAFYEKKLADNKKSIANVLRAIESGAATQTLPARLQELENEQAVILGEISFLKGKRLAFTEDQILFALMKHLEPYPGESEQDYRRRIISDFVSEVYLYDDRLLIYFNISSEDGKLKSADLSNIEGGEFDEGLVSSTN

SEQ ID NO: 15697 - protein, 506 aa, synthetic construct
MKRAIAYLRFSSLQQVQGDSVRRQKKLIEEWLKNNSDYYLDPVTFEDLGLSAYKGQHAISGAFSEFMEAVQRGLIDEGSVLLIESLDRLSREKIGDATERLRAILKAGIDVVTLSDSTHYTRDSLDDPYSIIKAILIAQRANEESEIKSKRQRAVWAEKRKQAAETGKIMTRHCPYWLKVNALGDGFDIIEEKAEIVRFIFQMRLDGRSFQKISQTLNEQGKENLRGKVAKWNSASIERLVKAKTVIGYLVPSYRITVPGVDEIPNYYPAIINVDDFNRVQRISYEPESRRNLNFNPHLINVFKGLMHCKQCGHSIILTGINTKGYGYYVCTMRRQHRCSSVAVRRDLTDRYLITGVINEASNMNRNLSKDTALISMTAKHIELSGKLQNIIKAIELAPDVSEFTRRATELSSEISQLKKSMADLQFERDMKSTAALDVLNISDRKEYQAIARSLFKDIQIDGKSKTCDIYLHNGMRIINYPLTKSTGWASILDAMAYLEQDEVIL

SEQ ID NO: 15698 - protein, 568 aa, synthetic construct
MQKPRLYSYVRFSSERQAKGQSVERQKSNIDQLVKKIALEHNLEIFEEYQDFGVSAFKGKNATEGALSEFIQHVDSGKIPRGSYLLIESLDRFSRANAMRAVNMFTSLLLKGIVVITGIDNQIYKESDVNNDTLQQLMFSVMLFSRANEESATKSHRTVASALSKIKRHQQRQPGDPVVAIKELGQDKWWIDSSSGFVKPHPVYYPIAQKLIELKQKGYSNRLILAYLQENHPAPNEGRSRGKWNMQHPSRIIEPAIHGQKVINVNGETFTLDDYYPAIVTKDEYERLKFQIGNKSFAPLREKNPEIPLLSGIGILYCKHCGCHMFKQKSTLKNHPYAYRYVCSSRDSHRDCNKWGFRASTLEIALLQLLADRVFVESSPVQSGVEHLIAEIDEQIQNYMVAIGSAKSAQMINKLTETIDQLETQKADYLKQKQIHDDQMVRMNTAGWDRFKKLDINDTQNPDRLEIRASIKTVIKRIDCARIDPAHNYVFVTYRDERTQKLVIKKDTAWTKGRVYVDSTTVTNEQLLESEGLVMHSHIEIMIDREKFLKEHQERTKHEPTIIDKLTE

SEQ ID NO: 15699 - protein, 426 aa, synthetic construct
MKIRILEPVFQVSQKKKRVCAYARVSSDSRRQEDSLENQTDTYERLITSNPEYEFAGVYADQGISGYCESRPQFQKMLGKARAGEIDLIITKSISRFARNTVTVLKVARELKELGVGIFFEEQNIITLSGDGEMMLAVLASFAQEESRSMSENNKWTIKKKFEQGEIMINTERFLGYDKDEYGGLVINQKEAFVVDFLYDMTLFGMGNSRLKSLMIFLGVKTVTDAEWNESTVNGVLTNEKYKGDYHLQKYFTPENKRNQSRLNRGEVQSYYITDNHAAIVSEEKWNQVQAERERRKKNRNIAADGTEKYQNRYPLSGMLICPYCGKSLRRRMVYKGKIQWLCSTYIKEGKQACRGVRVDNIEVIKRNITEPTVVEEVNVYGKKHYRYTRKADFISGREYGSECAEVTGGGVLQGINRPRRTVIKL

SEQ ID NO: 15700 - protein, 446 aa, synthetic construct
MAAYCRVSTAQEEQLLSYENQVNYYTKFINENPLYEYAGTYADEGISATNTKKRDEFKRMIADCRAGKIDMIITKSISRFARNTLDCLNYVRELKELGIGIIFEKENINTLDAKGEVLLTILSSLAQDESRSISENSTWGIRRRFEKGQHKMSTKRFLGYDTDEEGKLIINRKQAQIVNRLYSEFLNGKTVDYIKRIFEREGVKNWDGGTKWQATTLQSMLDNEKYKGDAILQKSYTTDFLTKKRVQNNGEIQKFYIEDDHEAIIEPWIWECVQLETERRKRYLEEHETKSYSNNTEKNPFASKIVCGECNKVFTRKGWRSSTGETRKIWQCSERYKVKGVMGCANRHIEEDTIQKIYLIAWNKLLECRDILILEWEEKMNSDDLLAKFLAKDFIEVTKEAKPMQELDIGLMLRTLDYIKVYENGIVTTVFLDGTEIEYDTEVIVM

SEQ ID NO: 15701 - protein, 497 aa, synthetic construct
MIAVYARQSVDRADSISIESQIEFCKYETRGETFQTYTDRGYSGKNTERPAFQQMMTDMGNGLINKVVVYKLDRISRSILDFSTMMERFEQYHVEFVSTSEKFDTSSPMGRAMLNICIVFAQLERETIQKRVTDAYFSRSQKSLYMGGRVPYGFRLIPATIGNVKSSMYEVYPEEAEQVKLIYELYAKSECSYGDIIRYFEQHNILKDGKPWGRTRLADVLRNPIYVRADLSVYEFYHAQGAILSNDPSDFIGTNGCYYYKGKEAPGRKQMNLEGNHLVLAPHEGIIPADLWLKCRAKCLAAKQVRPYQKAKNTWLAGKVKCAHCGYALVDKHYSTRKARYFLCSHKMNSRACIGPGTIYSDVFEEVIYEEMVKKMERFRKLHNHKNDEINPELTTLNIEYMRIETEIGSLMERLVSADDVMYQYISSRVKKLDKKKQELTKRISEQKLCQKIDYDEIQYHLDCWEDLSFEDRRQTVDKMIIVIHTADNDIEIQWRI

SEQ ID NO: 15702 - protein, 574 aa, synthetic construct
MRIKPEAEKIVGYVRVSTDDQADHRTSLDSQEAQIRADADAKGQIVVRIFVEAGESGQDARRPEFNRMLDFVEDPANGISEIKIFSLSRLARNVETQVQNFARLKRAKVRLHCLTQHFSDDPMGAMMRNIIASFDEYFALETAKHTRRTMRRNAEEGFFNGGPVPFGYESRTVEMRGTKEKKKLFIHPEHAPTVQRIFDMATIGLGNGPMGARAIAEWLNKHGYTQANGKKFHNANVSGILQRCHYRGYYYDMKLDENGETAPQDTWVRVECPQIISEETMDAVAALRAVRRPRVTPPRITNGPTLLTKVAKCGICGEGMTIRTGKGGRYSYYSCNGKVSAGAARCTCPHVREERLDAVVLGALESQIFEPERLRVILSEMLEASEQADERRARDLKQARMHKTQAETRLRNLYEAVASGLASLKEPTFAGLLAETNSRVASATSTIETLERQIGKSAKRVTPQMVDALGELIRDRLRGEDPALRKAYVALFVSEVAVDREVIKISGSSQLLERAVGRAEPVIMGMVPIFDREWCGREDSNFHGLSATTTSTLRVYQFRHDRTSTGKPAGPVPW

SEQ ID NO: 15703 - protein, 564 aa, synthetic construct
MRRVQVIEAQKEKIDRNTGRTINKARVAAYCRVSTDSDEQMNSYQAQVNHYTDLIKKNEEWEFVDIYADSGISGTQSDNRDEFQRMISDANNGLIDIIITKSISRFARNTMDTLKYVRMLKDENVAIIFEKENINTLTMNGEMLLTILSSLAQQESESLSANTKMGLKMKMKRGDLVGQASCLGYDYDKEKKRLIINEEEAKVVKYIFNRYTSGIGCFVLARELTEMGAKTKKGNTTWSDSSVRGIIKNEKYVGDILMGKTFTLDPISKRRLENFGEEEKYYIKNNHELIISREQFNKAKEILEKRSRNHNQGRMKKHSLKYAFSSIMKCAYCGGNITRRRWHSGTDKQKDVWFCTTAIRKGKKSCPECKAVEEKIIENAFVKAFNILCRDNKTIVEEFLENIEKELQSKDNKKLLNKIDGDIRGIENKIGKLLDLHLEDQIDKENYEVKYTELKKELQELKTEKKELDMVEDEEKTIKERIASFRKLFESKEPLVEFDKEVFKTVVKEVIIGGYKEDGSIDPYMLTFIFKTGLTSKIDGHKQISKSEQNAGLQKCTYQEDNPR

SEQ ID NO: 15704 - protein, 474 aa, synthetic construct
MRCALYVRVSTEEQAKHGFSIAAQIEKLEAYCISQGWEVAGEVYIDDGYSAKDLNRPHFQRMLSEIKKGDIDVVLVYRLDRLTRSVSDLYEILKELDMYSCKFKSATEVYDTTNAMGRLFITLVAAIAQWERENTAERVRMGMEKKVKLGFWKGGTPPYGYKVSDGELLINEEEAKTVKEIFKLAKAIGFYTLARQLTDKGITPRKGGEWHVDSIRDIANNPTYAGYLMFSENPKDIKKPPRERELFEGNHERIIERDEFWDLQDILDKRRTFGGKRETSNYYFSSVLKCARCGHSMSGHKVGKKKTYRCSGKKAGKECTSHIILEENLVKTVFAQWDNLIGSFNSSEGESEFSIEHLNSLNKELSSVQKLMYKKKIMYENDVIEIDELIKETEKLRENEKELLREIKNIEQNNNRNNEELKSILLNIDTLWSKANDYERKALITSIFEQLVIDTKDEYQSSKQAREIIIVSAK

SEQ ID NO: 15705 - protein, 518 aa, synthetic construct
MRTILYARYSSELQNALSTVDQIASLRERADREGWTIIDTFADEEISGRAGIGEMQRPGLNAMLNRVERGDVDQVLAEATDRIARHSGDAHAVREHLEHFGARLFTLADGHVDEITGTIKGLMDSRFLKDLADRIRRGQRGQHGRGFNAGGLAYGYNVVKKIGEDGEIVRGILEVNEAEAAIVRRIFDETLAGVSSRAIVKALNEEGIPSPSGKLWATNVIHGDRVRANGILRNNLYRGVMVYGRTRRAYHPKTRRYVARVNPVSEWRFVEVPHLRIVSDAQWKAIEAHYATFDGDIRTKKRHPKRLLSGLGKCGVCGGTWTVISPAKWGCSTAKNKQACSNTRTISTALYEQRTMGQLKQILLNPDAIQLFVERYNGGIRKRLAEATANRSPLERKAADLRGRISRLVDAIADGAGEFQEVKDRLRTARADLADTEYQLKALDDAAPIALPDDLADRYRIYIAQLDDALAIEGAARERAASAIRELIDTLTLTPNKAGRGVEIQLTGHMANIINLAK

SEQ ID NO: 15706 - protein, 528 aa, synthetic construct
MRTVIYARFSSDNQNPRSTADQIALCRKRAADEGWTVIGAFEDAAISGAAGIGADQRPGLNAMMRMVEAGGVDQVLAESTDRISRHVADAHILRERIEFAGARLFTLFDGAVTPMIGLIKGFTDAQFRTDLAKRVRRGQLGTLKQGRIPGSIAYGYRQANRLDDRGQIVRGLREIDPDKSDIVRRIFREYAAGRSPNAIAAGLNADGIPGSRGGIWHETAISGDTRHKRGILRNETYVGVVTYGRSRTVVNPQTRQRLMRPNGEDVVERQEIAHLRIIDDDLWQQVQARLASNQGVRPERLRRPKHILSGLGVCEVCGARWVLRSSKFWGCSNYRYGKACTNNRLVGTHIFERMVLADLKEGMLSPDVVSAYVREYHRDFARQSADMGRDRAKLERKLEEAERRMKRMLQAFTDGGSEFEEIRDMLTCARADKEALQRQLASMNAVPNVLALHPHVEEVYRRQVEELEAALADPEAQLEAIPRLRSIIASIIVSPRLDRERGVVVQVIRQMDEILSIATGGQQLSQLR

SEQ ID NO: 15707 - protein, 527 aa, synthetic construct
MKKTLSSKIADLYIRVSTDEQADKGYSQRDQAERLKMYCTKLGITVENIIFEDHSAKNFERPEWSKYLKNLKKRRTKDREPRLVLFTKWDRFSRNAGDAYSMISILEGLHVEPQAIEQPLDLKIPENKIVLAIYLSTPEVENDRRALNVFYGMRRARKEGRIMGIPPYGYVNRCTEDGTKYIGVKHPEAENIIWAFEEIAKGELPTEHIRVLMNKREGKDLTRNAFMVAVRNPVFTGKVFIPEFENEAAHYVKGKHVALITEELFEKVQRILDGKSWKVKSEIGENRVLRTDYFPLRGVLICPRCGNTLTASRSKGRKKHYSYYHCNSKCGFRHNSEEVNDKFVDELRKFEILPEYRDVLKILLLKNYKRYCANVDEEKKYLVDEIETHNKKLSKARDLFLTEKLDEDDYAAVKAECKIKIDELEETLKGLTKTGKDQDIPGKLALALDGISNIAQRYNEAAVEDKRKIAGSIYYNKLEFDGRNFRTPISNAFLNLIKLSKRGLEEQKKSHQNSKSPDDHEVIPLGP

SEQ ID NO: 15708 - protein, 639 aa, synthetic construct
MSLKKAALYVRVSTLHQIDKDSLPFQRQELENYAKYALNIEEVVIFEDAGYSAKNTDRPKYQEMMKRIRSGEFTHLLVWKIDRISRNLKDFSEMYEELKDCKVTFVSKNEQFDTSTAMGEAMLKIILVFAELERKLTAERVFSIMLSRAEKGLWNGATVPFGYVWSEEEKFPVIDPDESKIIQYIYNSYESLRSTLKVAYSLHEKRIATKRNGQWTAKTVRDILRNPFYIGTYRYNMRESGGSRRLKNKEEWVVVDNNHPGIIEKEQFDRVNKLLSDNYRGLTDVQRADIHKHIFSKMLYCGKCNSLLTAGLDAARKDGYRPSRYTCVTSGGAKRCSNYVSDIIIGPFIFNYVSNLIRLQERITPKHSLRDMESALLRGNSFIDVVGVDNESLKETYFALTGNMSGQDYSLNTKDEIQIPNIEIERLQKEKAKFVRALKRLEDLYYFGEEEDAISQKDYIFKKRDLQERLEEIDDEINILKQKNDDKTSDVFIDYAQHFLITKEMQQARQVDYRELSEIVGREALSDFMQTIIDNIVVIDKRVQSITFKNGITHTFAYRSLLQSKSSAQTKKQYKNYEGPVLEYLKENGPASRSDLQKATNITRDGIFTLLSELIERGIVIKTGQSTATRYHYNEKQNN

SEQ ID NO: 15709 - protein, 539 aa, synthetic construct
MKRVWTLYRVSTKAQVNIDDDIPTQRQACHEFINTKSDWEITEEWYEKGVSAFKKKLDDRDKLQKIKSGAENGDFDVLLVFMYDRLGRNESETPLIVQFLIEHGIEVWSVKEGQSKIEDHTDILVNYIRFWQSSGESKKTSMRVREFKKQYSDQGYFQGGAAPTGYKIIETDQTHWKNKDRKIKELAVDEEEGEMIKLIFSLYIDKHMGYRKIVDYLNEHGYRNRDGKIFGVSTIQRILANPIYIGFKRYEGFNSKEGATQPYNEKLRIISDDIFKQAEVIRNTRKDKLKDQDKSGIPLTGKLMFSGLAYCKYCGAKLSPNYHYRDQEKNNGTGESYRNIVYRYRCPLNKGKQHCDHKQNIWGAKKFDSIIIQQLKAVISTLDIKAFINTSVNQKKSTLKQKEKNFRNLENELEKLNIQSAKLNAEIGKSLIGESKFTPEQLSGAIDQVNKDIKDKTEAILKLEAEIESERENYADVNYIANELSNWEEKFDKADDDLKKAMLSRVINKVYFGKDEVELELNLMLEECLRQQYEAEASI

SEQ ID NO: 15710 - protein, 568 aa, synthetic construct
MQKPRLYSYVRFSSERQAKGQSVERQKSNIGQLVKKIALEHNLEIFEEYQDFGVSAFKGKNATEGALSEFIQHVDSGKIPRGSYLLIESLDRFSRANAMRAVNMFTSLLLKGIVVITGIDNQIYKESDVNNDTLQQLMFSVMLFSRANEESATKSHRTVASALSKIKRHQQRQPGDPVVAIKELGQDKWWIDSSSGFVKPHPVYYPIAQKLIELKQKGYSNRLILAYLQENHPAPNEGRSRGKWNMQHPSRIIEPAIHGQKVINVNGETFTLDDYYPAIVTKDEYERLKFQIGNKSFAPLREKNPEIPLLSGIGILYCKHCGCHMFKQKSTLKNHPYAYRYVCSSRDSHRDCNKWGFRASTLEIALLQLLADRVFVESSPVQSGVEHLIAEIDEQIQNYMVAIGSAKSAQMINKLTETIDQLETQKADYLKQKQIHDDQMVRMNTAGWDRFKKLDINDTQNPDRLEIRASIKTVIKRIDCARIDPAHNYVFVTYRDERTQKLVIKKDTAWTKGRVYVDSTTVTNEQLLESEGLVMHSHIEIMIDREKFLKEHQERTKHEPTIIDKLTE

SEQ ID NO: 15711 - protein, 543 aa, synthetic construct
MVDCHGPGMVSPTIQPTIPATVYVRWSSEAQTGRDSLRRQLEAAQRYADEHRLLIVETIIDEAVSAFSGHHLTKGRLGQFIRRVEDRAVAMPHVLICESLDRLNRQAPLDALAPFIGLINAGITLVTLTDRQQFTRESMGEDGGLRLLGSLIVMLRAHEESATKSKRVRAAWERKRREADVRKLTKTCPAWLRLAPDRSKFEIVEERADIVRLVFTETASGIGKGSIAARLNDAGVPPFRGKNGWHASYIQKLLSSDAALGIYQPHTMEGGRRVPAGPPVPSYFPPIIAESLALKARAAIIARRHGAAGRKGANFRNILTGIAQCAACGGSMTYVGKGDAERYLACSSARRRRGCSCRALFNFNEAERQFLDAAMRVDPKARNAPAASRTRDELHRVQRDVVRLSGRLTKLLASFENDSTDEVVAAVAAARDRLRLARIEEGRLKDVLVVEEHGAGLPDLQAAIMELRDPDLPTCRSSKFLVRARIAHAAKAAGFTAVCHEHQRRVELRCVGYGGAIWFSCSPQRGDPKRDPLGRFAKRAHDG

SEQ ID NO: 15712 - protein, 696 aa, synthetic construct
MREMPPPGSRVAFYSRYSTSLQSYRSIEGQERLCAAYAEKQGWVEAGRYSDAERSGTTTRGRQGLFAMLAAADRGEFDVLLLEETDRASRDAADMHRIAKELEELDIVLCTVVGGVVTDIELAFKSVQFQQFIKQNAEKSKRGQELAVSQGRMSGSVAYGYRKVQAVDAKGDPINGLRELHPERAAIVERIHRDFDAGKSPFEICKALNAEGVPSPKGGLWRSGSLSGNRQGGIGLLRNPVYIGEYHFRKTKRKRRKDKMKMRFNTEAERMIVRHPELRIIPQDLWDRNQARLAENFDKPFHAKRKGEFVFTGKVYCGKCGCTSVASGGKYICTGRSQKGVCDNTRRAARAAVEESVFDRLQKHLLSAGLLAPCIEAYREEAERTRVEHEARRKSGQSRLEDVDQRIANLVVQLGEMRETGYASQMLATELDRLGAEKSVLEKQLKIRPGAEPPPAEGADVIADRISATLQNLQQALLGDDREAARARELLRGLVSRVVLTPTPGTPTDGRGAGDVTVTVEGPLAAFIDLAAIDIKRVTKDTHRPVYGLDNATAGWRFSYVLPWRDPRLTTVYGDLPVLTGLLDHADVPVTMEAFAKALDAAVLVGAEEGDARTGAQRARNAVAYLQAKGFTRCVNLKTEHTGYVWSDESLTDEEWKARVATPPMTKVLPPLRVSPPEAVVVVVGPLGPADGDQPG

SEQ ID NO: 15713 - protein, 457 aa, synthetic construct
MPEKNIISDGKVMRAALYPRVSTEEQAKFGLSIHDQQNDLERYAKEHGMKIVGVFADAGFSARKKIEKRPAMMALLDAVRRDEVDIVLVTKLDRWFRNIGEYYKMQEILEAHNVSWKTIYEDYETTTASGRLKINIMLAVAQDEADRTSERIKKINEGKRLRREALTGDKPLGYTIINKKFVKDPQTALAVDAFFRKYMACGSVSATQDYIREEFGLTIPYQGANKMLRSTAYHGVYYGVDGMCPPYITKEQYDQIQTMRRKVIKRTDANRTYLFSGLIVCGDCGGRIGGKVNQDHKTFHYNCSNHFCRRKPCENNRSISEKKLERYLLDTVESKLESYEAGFAAIQENAVERDYRAEINALRGKLSRLKDLYLNELLTIEEYKKDHASITEKIQELETKQQPPRPSNLPQIEKLLSDNWRDMYGALSPMQKREFWRIIIKEIRWYPDRHIEFDINF

SEQ ID NO: 15714 - protein, 565 aa, synthetic construct
MTRVALYARYSSDNQREASIEDQLRICHEQAKREKWKIVGTYKDAGISGASMILRPGIQALLQDAQAGQFDVVLAEALDRISRDQADVATFYKHLKFAGVPIVTLSEGEISELHVGLKGTMNALFLKDLAAKTHRGIRGRVEDGKSGGGLCFGYNVVKQLDARGDPIRGDREINEAEANVVRRIFREFAAGVGPRTIARTLNEEGVPGPAGKLWSDTTIRGHVKRGTGLVNNELYVGRLIWNRLRYIKDPSTGKRVSRLNPESEWIIKDVPELRIVDDELWQSVRVRQGEIAEKFANVTEAVRKHHKKNRLNGTRRPKSLLSGLVFCGCCGGPYSLRGADRFACSNHISKGACSNSRTILREELEARVLSGLKDRMMAPEIVEEAMRAYAEETNRLNRERRSSGDAWKAELVKIEKQIRGIIEAIKAGMFHESMKAEMDTLEARKTELNTLLADAPEDKPDILPSASAIYAKKVSALTKALNRKEERQEAAETLRGLIEKISLTPGPERGEIYATLHGELGTILNWTERQVIGKATKTTKPAADATGLSLSVVAGAGFEPAAFRL

SEQ ID NO: 15715 - protein, 489 aa, synthetic construct
MRIAAAYIRVSTHMQEELSPDAQKRLLGEYAKRNGMILSNEFIFMDKGISGKKAEKRPDFMKMISMAKQKPAPFDVILVWKFSRFARNQEESIVYKNLLRNKCKVDVVSITEQTGDGMFGKLIERIIEWMDEFYSIRLGEDVTRGMVENAMRGNFQSSPALGYQVVRKGELPKKVPEESMPVEIAFKKFVYSSMGFLEIARHLNSLGYRTKKGKLFEARGVKYILMNPIYKGWLRWNYRNPDGTKKSKDDWIIVKVPKLEPTVSEELWDAANERIQLMSKIIVKKSKPSSVKRHWLSGLIKCSACGRSLSTSVHTDKRYGRTYINFQCYGYLKGKCSISHQVSEKKIVPIVLSMLKEDSLKKEVPFEILTDTKSSDEISIIKMQLDKIELKELRIKEAYRNGIDTLDEYRENKNILSRERSSLQDKLESLSVPEEEIKADMPNRIKSVYDIVSSESTTKDEKYAAINSIVKKIIYRKSDGEIDIYYYYS

SEQ ID NO: 15716 - protein, 518 aa, synthetic construct
MSKLYCMYLRKSRADLEAEARGEGETLSRHRRTLTELAIRMHLPLGEVYDEIATGESIAARPQMQRMLADIEAGMWAGVLCMDVDRLARGDSIDQGIISQTFLYSNAIIITPGKTYDPRNESDSEFFEMKMFFSRREYAQIRKRLQAGRMRSVLDGRYMGTRPPYGYKRVKIQGDKGWTLEIVPEKAEIVRMIYDWYVNGMDGRPVGCGAIATRLNDMGLRTDMGNRFDPSCILNIITNPAYVGMVRWNQRTTVVSLQNGQRIKSRPKSDEPIIVRGLHAPILTQEIYDAAQERHAGRYVPKTPETLALSNPLAGLVVCHECGHTLQRKPSPRGCWIFCPTRRCKTIGILEDVFERAVLEHLQNWLVTYSDENAPSAPAKNAADAVAEQLQRQKQTLQTQLSRLYDLLEQGVYTTEVFLARQRELTERLSALDEKLAAAQKPPELDMEACIRQALPRVKAVLDAYPLAETAAEKNALLKSVIERIDYQKTKRSTRWQNSLDFLQMTIYPRVPAGEIQG

SEQ ID NO: 15717 - protein, 524 aa, synthetic construct
MPRKPAKHPAKPKRGKKLEIEEPGVLYGRYSSHNQKDISIEQQFEKCYELAAEYGIRIIDTYADRAVSGRTDKRVDFQRMMADAAKGKFRYVLAWKSNRIGRNMLEALVNEARFQELGVRVLYVEEDFDDTAAGRFAARSMMNVNQFYSENMAEDIKRGLYDNAANCMVTNGHLPYGYKADETLHYAIDEPRAAVIREIFTRVSCGEAFVDIMSSLNARGITTSYGRPWGRSSFQKILSNERYRGIYIYGDVRIEGGIPRIVSDELYFKVQEAITTKKNPQGRHRVNGDYLLTGKLFCGHCKSPMTGISGTGRAGKLHFYYVCQKRRTEKTCHKKNVRRDVIELKIAQAIRDYALKDDIIEWIADSCVEDHDRRVSESHLSVFEDQLAEVNRSIKNVMSAIEKGIITETTKGRLMELEAERTAIEGKICAAKAAIVPTNRERLVEWLRSLREGDVHDKKYQAGLFDTFLVAAYLYDDNRVKIVFSFAGDKNTIEIPLEDIIDSIDDEASCVRLSSTLSHQKKWT

SEQ ID NO: 15718 - protein, 525 aa, synthetic construct
MYLEISNPMEYHAALYIRLSKEDENVGPSQSVQNQESLLREFVQQHRVSVYDTYIDDGWSGTNFDRPSFNRMIQDIEAKKVNMVITKDLSRLGRDYIMTGHYMERYFPEHRVRYISLLDGIDTGVDSTANDITPFRAIMNDMYAKDISKKIKSVKRDKQRKGLFIGGKPVYGYKMHPTEKNKIVVDEPAAMVVRRIFAMALSGQSCHSIASQLNQEGVPPPSVYAGIPLKNGRFAGLWSSERISEMLQNETYIGNMVQGRQVKINYKSKKCLKQPPESWVVVENTHEPLVDRETFRQVRLLVNSRKYTRSRTYDYLLKGMVYCHECGALMTVANRKTTKGEDRLFFICKTYQRFTKAGLCTCHTIKVDTVTEAVVSKVREVCQSYLDQDRLLVLAKEALAKNAQKNKVEIQLAELQKKIDLLTSNLDRMYTDRLNGLLPEEDFQRIFNRTKSERQQLELQQADLRSLQKNPVNSSDKAKELVQRFVESACASRELLVSLVDRIELTQDKQLIIHFRIPELQDFSL

SEQ ID NO: 15719 - protein, 438 aa, synthetic construct
MARTIQQISFPAPMRPSLKRVAAYARVSSGKDAMLHSLSAQVSYYSALIQKHAGWLYCGVYADEAFTGTKDSRDGFQSLLTECHAGNIDMVITKSISRFARNTVTLLETVRELKALGVDIYFEEQNIHTMSADGELMMTILASYAQEESRSASENQKWRIRHGFERGELVNLRFLFGYKIEKGQVAVDPEKAEVVREVFRRALEGESLSSLAADLNRRGVTGVLGGKWNAMRIREMLSNEKYLGNALLQKQYRNNHLEKKEIPNRGELPQYYAEGTHEAIIDQSTFDAAQRLLVKLRESTPVRAPWKKSAFTSMITCTVCGRNYKRCTGGKRHFWNCPTAVQTDLPSCGTSQIPEKLLYDLAAQVLGLAQFDEGVFLERVKGIDALPDKTLVFHFKDGSTAERHWEHISRAKSWTPEMKEIARQRALAQRRGEKWQEP

SEQ ID NO: 15720 - protein, 440 aa, synthetic construct
MSVVLRAALYPRVSTEEQKKFGLSIHDQQNDLEKYAKAHNMKVVGVFQDAGFSARKKIEKRPAMLQLLEAVKHDEVDIILVTKLDRWFRNIGEYYKVQEILEAHNVSWKTIYEDYDTSTAAGRLKINIMLAVAQDEADRASERIKKVLDAKKDRNEVCTGHLPKGYKIEGKFAVIDKEAEPVIRRYFSTFLETGSITKAMDAVPELKLKYQTASQMLDNTGYMGDWHGIKLPPYLTPQEFQRVQDLRTRVTRKSPYNRTYIFSGLIVCGECGRRMTGHPSPRPSGACSYSYYCQGSAQRKGCNNGNFTVEWKIEDYLLSTIDEQIQIKLQAKPRQEPKVNQDVQLKTLQKKLSKLSELYIDDMISKSDYSKKYAELTSQMDEITQVKSQSRAPEEIATLFSAGWQEIYKQLNKENKQAFWKLKIKEIRLYKDRRIEFDFL

SEQ ID NO: 15721 - protein, 453 aa, synthetic construct
MKTATKVKKLRVAAYCRVSTDADEQLNSFENQVSYYTEYINSKEEYEMAGIYADEGISGTSTRRRNEFNRMIEDCEDGKIDLVITKSISRFARNTQDCLSYARKLKNMGIGVFFEKEGINSLDGTGELLFTILSSLAQEESRSIPENCKWGIRKGFSDGKLHLNTNRFLGYDKDTNGELVINKDQAATVRRIYEEFMNGINPDIISMRLNEEQIPGVTGEAKWTCGTIWGILKNEKYMGDACLQKTYTEDFLTKKTTKNNGQITQYYIENDHDAIIDKKFWNAVQLEIARRRAFMEKYNLRTLGRYTDEQPFSNRVICGTCGHVSWRRTLTRSNGKFKVWMCGQRYRQKGVLGCKSKSVYEKSIHEAFVKAWNQIVENRDEYIQEWKENMKGENALLAFRSKQMMELTNSKPMKRISLSLVGKVLDHCILYDDRICFILLDGTEITVEIKNKR

SEQ ID NO: 15722 - protein, 522 aa, synthetic construct
MARKKNIAAGLDAVIYARYSSHNQREVSIEQQIAECTKHAAALGLRIVGTYEDRAISGKTDNRPRFQQMMRDAEKGKFQAVVAWKSNRIGRNMLQAMVNEAKLDDYGVKVFYAEEDFDDTAAGRFALRNMMNVNQFYSENMAEDITRGLYDNANKCMANGRQPLGYKRGADGKVMLDEPAAAVVREIFTRVAAGDLFVDIARDLNAKCIKTSKGAAWNKGSFQSICQNERYKGIYIYGDVRIVDGIPRIVSDELWYRVQEAMRMKKNPVGTRHRVGAEDYLLTGKLRCGHCGSYMTGVSGTSRNGELHYYYTCQKRRTEHACNKKNVRRDVIEPAIAQAIKMYCLTDDVIEWMADQTVQYWEKHDNDLQIEALEQQLAENKKATSNMLKAIEMGIITAATRSRMVELETENSKLTAQLSAAKRDVVKINREDLIDELHILRSKDIHDREVQAELFKDFLVAAYIYDDNRLKLVFSFMGKDNSVEIPLETGEDPPDGGDSPDAKMFVLTPDCSTRTKALHGNV

SEQ ID NO: 15723 - protein, 434 aa, synthetic construct
MTRAAIYIRVSTEEQARHGLSMDEQEAHLRDYAKGHGMKVVDCYLDAGKSARKRYTKRPEFMRLLADIESDKIDMVLFIKLDRWFRNISDYYEVQRVLDAHNVTWRATQEDYETVTASGRFKVNIMLSVAQDEADRTSERIKFVFEGKKERNEPITGNVPKGYKLDGKSVVIDPVTGPMVRAAFDMYLEAGSISKVIREYPELGLSYTSARYMFSNPAYMGKFAGITIPAIISPDEYRKANSLRGCIVRKTTQSRVYLFSGLLICPKCGNRLGGYSVSRVHKETHYYGCSSSRKKTGCSNNKNYNEEKIEAYMLDRIEAKVQTSIISRNEQRAISHKPQRDAIQRKLSKLSELYISDLISMQDYKRQFRALNDELAAIPEDVPDIDIEALKSRFWGDWRQLYDDLPRDGKQSFWRKTVKKIYLSNDSVADFDLI

SEQ ID NO: 15724 - protein, 581 aa, synthetic construct
MYGLNSDFQKRDVAIYARVSTEHEAQLSALGNQLDWYKPILAARPDWTLTAQYIDEGITGTSAEKRPQFMKMIEDARQKKFNMIITREVSRFARNTVDTLQYTRLLKEYGVEVFFLNDNIKTFDGDGELRLTIMATLAQDESRKTSIRVKAGQETSMQNGVFYGNGNILGYDRVGKEMVINPEQAKTVRMIYDMYLSGMGVTTIQYELEKAGRLTALGKERWFASYISKMLRNSFYCGIITYHKEYTPDFLKQKKIKNYGDLEYVQVQGTHEPIVTVEEYEQVQKLMDAKSAVLKNHNKGKRRTGRMQHTTVYGRLMICQCGNKFNLRFHSRDGRTDGVDYQCYTSVNRGSVAKRLNKGISIEHSCESPYIQGWKLEMMAEQVFDRYIENADKVMDLSYTMLEKHIADQEELPDNTDVIRRKQGEIEKLMNKRTNLIEMRAEGDIDKEMFRSKKQEIEDRVAKLTEEIKGLQSEKEQTSNEDYSVKLLELRERLKEYTGFDYSVIPESIVEAFIERIWVSKDEFRWYLRTENNADGEFDPDDHIKIGAFTLTIDDAKKYIYSFSTRRRVYKWADLNVSVWI

SEQ ID NO: 15725 - protein, 548 aa, synthetic construct
MKRVLCLYRVSTKGQVDPKDDLPMQRRECLEFIKRMPDWIYYDERLEKGVSGYKVSAAKRDVILEIKALAEEKRFDVLLVFMFDRLGRKEDETPFLVQWFIEHGIEVWSTREGQQRLDSRADKLINYIRFWQAGGESEKTSIRVKAAQTQMTADGIWRGGARPFGYKLIHKGRVGKKNRPLYDLEIDEVEGPIVKEIFDMVCYEGYGTLRLANFLNAKYPHLHKIWTAQTIRSLLRNILYTGRMHMNDTLSEPIESLRLIQDSQLEFAKYAIQSRIPRKYNQQRAAENLLLPDDAETKTSVYGATLLSGILYCAHCDHKLVGSYCTKQRPTGAYHRPIYRCYNGAVEAKRCNGQSVYSAKKIESAVLEIVHQYFNSINQSVDGVWRAQVRRKFRVKQAAKLRAANAEMEKLKQQQIALREEVLKSLTGESSFSADLLRNMLDENKVATERARQQLETCKQESETEEAKLHHLESQYKSIASWAQEFDSAPIDTKKMILARIIQKITVDRNYHIVIRFFVSIDDFESTINVRDSDIHVEQTGSFIETIA

SEQ ID NO: 15726 - protein, 547 aa, synthetic construct
MTLSQYIQTLEALNVSGDKDRKIKDLLDYYHKYVEGIKPGAGAFYAVIYARYSSHSQREESIEGQIREDLEYAVRRNMIVLGVYIDEAISGKTDERTNFQTMIKDAERGNFQYVITWKVDRFARNRYDSATYKARLRRHNVQVVYARESIPDGPEGILLESVLEGQAEYYSASLSENIRRGQADNAMECKVNGGARILGYRTGPDKHYEIDPATAPVVRRIFTLYHEGATLREIIDELNTSGFRTARGQPFGKSGLDKILRNERYIGIYKYRDTRIEGGMPAIIGEELFAAVQEQLDKNKKARARKKSEVEFLLTTKLYCGHCGMGMIGDSGTGGRKSTYYYYTCVGKKRDKTCNKKSVPKDWIEDLVINETIRLVASDEVVNEIADGVMNYIARERDDNSVLKGLRDQLKETQKAIENVIKAIEQGIITPSTKERLEALEADKTRIENGIMEESVAMPRITRDQVVFFLEQFRGGGAKNSDYRKRLVEVFVNAVYVYDDKIVITYNYSGEHNTATLEEIDAAIDGCGDICSGNGFGQRSLCSTKAG

SEQ ID NO: 15727 - protein, 597 aa, synthetic construct
MPKKRGSNEEFLNPGARRFRPPEVMPRKLKAAIYVRVSTRYQVDKDSLPFQKEELINYIKYALNIEDYEIFEDAGYSAKNTSRPKFQEMMSRIRNNEFTHLVVYKIDRISRNLLDFAQMYEELQKHNCSFVSKVEQFDTSTAMGEAMTRIVLVFAELERKMTGERVTAIMFSRAEKGLWNGAPIPIGYKWSEEKKYPVVDPEEAKVVRYIFDRYISLESALKVSYDLSANSVKTKRGGEWTSKTVRDVIRNPFYKGTYRYNHKTQTGTEKPLSEQIIIECNHEPIISEEVWSRANAIMDTNAERSVAHLRNNIRYTHIFSKMLKCWYCGMTMGAGLDRPRSDGYRPSKYYCTSHNRKQGCPNRYISDIIIGPFVLNYLANMVQAAQNVSKRTRVDTLEKMLLRGKFFSNVDHIEREGLLTTFNNMVYGVARADFDPKKGQQDEPNNAELDLLASEREKYIRALDRLQSLYLFSDDGISEKDYIVQKGELEDKLESVNRRIAEIQGEAPEDDADLLQKATRFYIQNELVKKRSLDFKKAVSVFDKESLKDFFSSVIDTMTVKDGRVKAIRFKNGLTNVFVYKGETGPEEHENAVEASE

SEQ ID NO: 15728 - protein, 521 aa, synthetic construct
MPTSKNTARKYAAGGSSDNSCGVEPLRAVIYARYSSSGQREESIEGQLRDCYEFAKKHGIIVIGEYIDKAMTGRVDRRPDFQRMMKDSEKGRFNCVLLWKMDRFARNRYDSAMYKYKLKKNGIRIFYAKETIPDGPEGIILESVMEGYAEYYSENLAQNVKRGNYDSALELKTLGKTCLGLKTGPDGRYMIDQAEAAIVRRIFEEYAEGERAKDIYERLNSEGYRTSRGGKFNKNSLRRILSNKKYIGVYEYEDIYVENGIPAIITDRDLFERVQKMLKINHDAPARGKAQNFLLTTKLFCGLCGSPMIGDGGTSHTGKAYAYYSCTKRKRGRSCKKESVPKDWIEDLVVGELVKIVHNDELIEQIADRVMEYQKREKDQSGLHALEIRQKENEKAISNMLAAIEAGIITPSTKTRLMELEADRADIEKGIAHELLAEPEFERDQIIYFLERFRSGDINDEAYRIMLVDTFLNSVYLYDDDHLVLVMNYSGENCKVDLKLVEGAVSGDGCKGSAFAPSSAR

SEQ ID NO: 15729 - protein, 523 aa, synthetic construct
MRFFSYGRKSVFSDKSDSIDNQFRMNREYCESKFSGQVDSWQQFSDEDFTGANTSRPDLQRMLSFIKGGFCDVLVVYQLDRLSRDVRDFANIYALLEEHGVMFISIKENIDTTTPIGRAMMYVTVVFAQMERETIAARVTDNMLGLAKKGYWTGGNPPVGYVRKHIVVNGKKHCSIEVDPEGARYVTQIFDTFLAYNCSLQGMETRFKNQGIRTQNGKFFSTAQLHKMLTMPYCVEATPEVYDFYAAKGCIMDPGSPREMWDGSVGVIIYGRSTEKNKKHQAQPPEKWTVCLGKHKPFMPAEKWLAVQSRFTQNKCIKDAKWPVPLLKGVLRCKCGNLMQVSRKKKVDGTCSSWYYCRKRMRQGVDACDMGQIKCDLLDEEVLELFRGITADPALIQKFVKAEAPADVPDLKAAQARVSACERKIGRLAASLALAEDSAASKYIIAEMERLDVELGALKREASLAEMESHQAAASAKDAKATAAEIAKLIHGLDGFDDKEKNAIARAVIQECTWDGERLFITL

SEQ ID NO: 15730 - protein, 432 aa, synthetic construct
MRAALYIRVSTEEQARNGLSLGDQRESLLAYAADNGMEVVGVYEDAGISARKPYKRRPALLRLLADCKDGKIDTILFVKLDRWFRSVAGYYAVQEELDRCHVTWQATREDYETRTASGRLKVNIMLSVAQDEADRTSERIKAINEGKRLKGQPTTWRTPIGICVKDRHYAIDEETADAARDMFPAFIRLQSILALRRYMATEWGIKRSYNKYKDALSNRLYLGEAFGVENVLPSLVDQETFNLAGRILEQRSQRNASADRIYLFTGILRCRECGRNMQPETVKKVYKYYRCRTHTLDPADCPHILRIREDVLEDYLLREFEGIAKKYYSKSKTAEKKPPKTAEQIKRKMQKLKDLYLSDLIEIEEYKKDYTELKQQLAAINPEPIKEFDLETLRRELKEYPDLDRQAKKEFWVRTIQRIDADNDGAFFVTPS

SEQ ID NO: 15731 - protein, 522 aa, synthetic construct
MRKVTKTSGNRALAAMQPKLRVAAYCRVSTHSDEQLVSLETQKNHYESYIKANQRWEFAGLYYDEGISGTHKEKRTELLRLLTDCENRKINFIVTKSISRFARNTTDCLEIVRRLTCLGVFIYFEKENINTQSMESELMLTILSSLAESESVSISQNNKWSIQRRFQNGTYKLSYPPYGYNYSDGQMLVNKEQTEVVRRIFSQALSGKGTQKIADNLNAEGIPAKRGTHWTASTIRGILGNEKYTGDVILQKTYTDEHFNRHYNYGEKDRYLIQNHHEAIVTHEDYEACAEILEQHGKEKGIGKGNSKYQNRYPFSGQIKCSECGGTFKRRTHGSGDSKYIAWCCSKHINDVSECSMRFIREDFIHQAFITMTNKLIFGHKSILKPLLRSLRAVNYSDNIVQMQELEVKIEENKEHSQVLMGLMTKGYLDPALFIKQNNELRKEATILKEQKVALSHSVNGGMATVVKVEQLLKFASKANNQIESFDGELFDRFIEKIIVFSQEEIGFKMKCGITLKERLVR

SEQ ID NO: 15732 - protein, 528 aa, synthetic construct
MGVGIYTRVSTDGQKDNTSIENQIEACTAKAQQLGFNQVDLHIYTDEGESGEYIDRPALNALRRDIEHGIISQAVIFLRLDRMGRSLSHQLTLADEFEKNKISLHFADGDYDRNTQEGKIFFAIFGVMSEIEKDKIRERTIVGRLRRAKEGFIMPMRCSPYGYSLQDKKLFINDEEAKIVRNIYDWYNGGETMRGIGKRLIEMGAEPRLSHWNASTIRNILSSETYIGTFKYNRRKHTRIPGKKTVGGNPAIFQTDRPESEHVLIAVPPIIDEVTYYRAQAQKVNNTIFNKRKTKLDYLARGRYLRCSNCGRVLQATSYTAKHKDGTELVGTYRCPNLNPRSYDTPKCQSSSIRSKFLDTYIWLDLTAALMDPDNVKYVGRSEVSKIDFSKEKERLNLTQKKLQEEKDRVVHLYRKDLMSEDDVERHLGEIKRKEQGMAQQWQVMIAAEEESQKAALSDNDREVIFKQIKPLLIDPTKLSFDDKQQIFTLLVDHVKVTLRPGYAKMEYDGVFSMVTEHTYISGQRHSV

SEQ ID NO: 15733 - protein, 523 aa, synthetic construct
MPRKTKKVDAEPMAPVTRGAVLYARVSSVEQEEEGWSTDAQLRKMREYCAKRNLPILQEFEEAASAKKGSDRRAFEAMIGYLAQHPGAEVVVEKVDRLQRNYVDWVRLDEVKPVIHFVNEGIVADENCPSHSRLFIDLRMVLAKNYIENLSEEIRKGLNEKARQGHYPTHAPLGYRNERREQGGKSYLVTDPRRAHLVRRLFNEFATGNHSIATLSEVARKIGLTTKKGNRVQVKTLHQILRNPVYVGRFYWNDVLYDGLHEPLVDEVTWQQVQDVLDGRGRNKRGFGAIQFAYRNLVRCKCGLIMTAEKKKGRYTYYHCTGRKGECDRPFVREEAITSEFRKLLQTLTFPPSLETWIKKALGEDHEERMLYQKRQEERLEAEVQEARQRLDRLYKDFCDQLLDREIYMTLKSQADEQLGQARRGIAAVERAERASYDAGIELVDLVQTALARFDQGHPNDRNELLKRLCSNCVWRGGELLVELRKPYDLMLKATQIDELPKEGDPASGEGNELWWRLGDSNP

SEQ ID NO: 15734 - protein, 481 aa, synthetic construct
MDKINKVALYVRVSTLSQLEEGYSIEEQKAKLESYCDIKDWHIYKVYTDGGFSGSTTERPALEQLIKDAQSKLFDTVLVYKLDRLSRSQKDTLYLIEDIFLKNNIEFVSLLENFDTSTPFGRAVIGLLSVFAQLEREQIKERMQLGKLGRAKAGKSMMWAKTSYGYNYDKETGSMTVNEYEALAVKEIYSSYLAGMSITKLRDKINEEHPKQPAWSYRTIRGILANPVYCGLNQYKGQTFQGTHKPIISLVDFEQTQRELAKRQQTAKELSNPRPFQSKYMLSGLAQCGYCHAPLKVILGAVRKDGSRFKRYECYQRHPRKTRGVTVYNDNKKCESSYYDMELLEHYVLTRISQLQNDPDKIQELFSDDTSPAVDKQAIQKQIDSLTLKLSKLNDLYLDDRITLDELRAKSADFIKQRATLEEEIKKASTDKQAGQKKKIEKLLDASSVLDMSYDNQKVIVRELIDKVQVTSDKVVIRWKI

SEQ ID NO: 15735 - protein, 600 aa, synthetic construct
MAQKLYSYQRWSSAVQADGTTKARQTKSAEEYAQKNGLEIEEIVDAGVSGFKSANTNENGALGQFLRAVDEGLIASNSVLYVEALDRITRSEIDTALELFLGILRRGITVVTGMDNKVYTREAIKGNPVDLLTSILMFSRAHEESKTKQNRTNGNALALIDRFIKQGLPVNIKSIGSHPWWIDDSGSMYEAVKTHPVLWTCAQFAIENFMEGVSVFKVTQMLNEKFPHYYKGKAWAMANIRKLRINKAVYGVREVTVGGKTYVLPNYYPALITEGQFLRLQQIRTTTKYIGKVGEGRVVTNADGSTKIIAEKNNINLLAGMKLFRCGHCGGTMMAMRHGDTIRYLCEKGRGNNHDCKTWSMPGMLVEHTLMLVTTIAYMDIQKRGQGDKADYTQQITAMESTISGYSVQINKATKLAIALDDVDVDELADTIRELKRKRDNAIIELEVLQRKQLLANDSTFESIMMDFFKYVQYKVIQDPLHEYRSKLRDVVYSAIGDVRAWKHDRRLFISFQIKGNEGYYNFSAGNTPYDWGCYVGALPFSQHELEVADEEVQEQTLDRVRERYAELHAVNMMMLRHAKELLSHVGYPELDSKMFWPRK

SEQ ID NO: 15736 - protein, 462 aa, synthetic construct
MIKKELSSAGPLRVALYIRVSGEEQKIKGLSLEAQQERLEEYARNQGWIVVGTYIDAAKTARKDMRKRSEFQKMINSVKRDEIDLLLFCRLDRWFRSVADYYKIMEILQAHHCDWKTTDEEYDTSTANGRLYINVKLSIAQNEADICSERISVVFDSKVQHGTVVSGNCPFGYIVNGEKRLAIDPDAAAIVRDAFNYYESSVSQRGTIRHIRETYGVNWCDATFRRMLSERLYTGVYDSNKRFNENFCDPIIDAAQFDRVQKLLKKNARFSPAGNIYIFTSILKCAECLHNLSGCRTRSSNRYYYYYRCNQHLQRGRCPHNNSVREDYIESWLFEHLQEELERCKLEWEIRSAERKKKNRLNDKAVLKRKLTKLKELYMDDLINIEEYKKDYQIYTAALQQIPEEMPEETPPDFSAVERMLQADFRNIYDSLTREEKRTLWRSVISEIRVDRDNNVTGIIFG

SEQ ID NO: 15737 - protein, 515 aa, synthetic construct
MQYLIYLRKSRADREAELRGEGETLARHEKALLELARRQHLPIADIYREVVSGETIASRPMMQQLLSEVEQGVWDGVLVMEVERLARGDTIDQGIVAQAFKLSDTKIITPIKTYDPNNEFDEEYFEFGLFMSRREYKTIKRRLNNGRQASVKEGKYVGNRPPYGYERIKIENDKGFTLKPLEKEAQVVRMMFRWYAYGAHGISTIADQLNEMAIPSKTGKQWVYPTVRDILQNPVYVGKIRWGWRGQRKKVKNGSVSVSRPRSDDYLLADGIHPPIIDQQLFDQVQKKFSMHKPLPTSAREMKNPLAGLVICAKCGAKMQRRPYQRENIRTGLICPNNKCRNVSAPFDDVEQKLIEVLAEYIKEEKLRISNGHTQIDDSVLQILQNQLADLREETVDLNKQNDNIHDFLEKGIYDVDTFLQRSQKISSRITKIEEKQKTLQQEIIEENKRIESATSIIPMTEQLLLQYENMSALEKNSMLKEVLRCVKYERECSIRDGGTADNFTLYLYPKISHK

SEQ ID NO: 15738 - protein, 437 aa, synthetic construct
KGKVRRVIVYKLDRISRSILDFANMMELFQEYDVEFVSSTEKFDTSTPMGRAMLNICIVFAQLERETIQKRVTDAYYSRCLKGFHMSGQAPYGYQLEPTVVEGIRTKKMVADPETAQYVKLMFEMYSEPETSFGDITRYFEEQNIKVYGKSLFRTFLSQLLRNPVYAQADLELYEFFKSQGAAIVNDASDFAGTNGCYLYQGRDVKEDKDRCLKDQILVIAPHEALIPSDVWLKCRKKLMANKTFQQGRKPKNTWLAGKVKCGRCGYALKATHVPNSPGYFHCTKRTENKGCPGCGKIHKTELEEFIFNAMRARFKNFQVRHDREEKANPKLTAYQIELAQVETEIEKLLDTLTGANATLLAYANKKIEELDTRRQTISKAIAELSVETMSPQKEQELSYYLDHWDSIEFDDKRKAADGLIISIKATSDHVQVEWKI

SEQ ID NO: 15739 - protein, 433 aa, synthetic construct
MERTIQLVQPMKLAERKLLRVAAYARVSCDKDEMKHSLAAQISYYNEYIQRRSDWAFAGIYADEAYSGTKDDRPRFVQMIKDCKDGKIDRIITKSISRFARNTLTLLMTVRELRRRGIGIYFEDKGIDTLTEAGELMITLLASLAQEESRGTSENCKWRIRKMFEEGYTTPFNLIGYHAVDGLVELVPEEAEIVRRIFRLYLEGYGKQAIANILFEEGVPSCLGGEWSTTTIQSILRNEKYIGDLLLQKTYITDHVTKVSKRNRGELPQYFIQDDHEPIISREMFEAVQTENARRLEKYAGARGETSELSSLVRCGICGHNYRRKRAAVRTLWCCSTYNRRGKKYCASNAIPETTLKDACAQVLGLTEYDAESVEKRIVQIEAMPGNVLIFHLNDGSTQEVKWVFPSRSESWTDEMREKAADQVRRRYAKTGN

SEQ ID NO: 15740 - protein, 538 aa, synthetic construct
MQRQVTKRQVQVIQPTLHAGIHQSTLTPVVKKRVAAYARVSTEHEEQQSSYEAQVDYYTRKITERSDWAFVGVYTDKGISGTNTKKREGFNRMIRNALDGKIDLILTKSVSRFARNTVDTLTTIRKLKERGVAVYFEEQSIDTLDGKGELLITIMSSIAQEESRSISDNVTWGQRKRFADGKVSLGYKQFLGFEKGEDGLPKVVEEEARIVRYIYRSFMMGKTGSHIARTLTEAGIPTPGGKKQWQASTIMSILQNEKYKGAALLQKSFTVDFLEKRMKVNEGEVPQYYIEHSHEAIIDPLEHDRVQLEISRRKALDRHYSSAHLFSSKVICGECGGFFGRKVWHSTDTYKNYIWQCNEKYRQKQKCGTPHFQEEELKRRFIDAYNQRAEIKEETLAACHLGIETLCDLTDIDQQIRMVTDEISVLVEMSRQLIEENSQAVHDQDEYQRRHSTLVEKYTEADARLKALQTERSRRIDMRKSIEWFMESFTRQEGLLTEFDDSLFFSVCDIMTVYRDGKVVVRFRDGAEIETFPNFLKK

SEQ ID NO: 15741 - protein, 651 aa, synthetic construct
MKNKKIKCDIYTRVSTTMQVDGYSLDAQKEKLKRYAEFQNMEIVNEYSDEGKSGKSVEGRPEFQRMLDNIENGTDEVQFVLVFKLSRFGRNAADVLNSLQRMQDFGVNLICVEDGIDSSKDSGKLMISVLSAVAEIERENILVQTMEGRKQKAREGKWNGGFAPYGYELVNGELQIAEDEAEIIRLIYDKFIHTNMGISAIAAWLNQHGYKKKKRQNNTLDAFAASFIKGVLDNPVYCGKLAYGRRKNEKVSGTRNEYRIVKQENYMLHDGIHEGIVSETDWELAHQKREKTGVKYEKTHSLDHEHILSGILRCPLCGSGMYGNVNRKKKKDGTLYKDYFYYACKHRRLVDGHKCGYRKQWSEEKINNAVEEVIRKLVKNPEFEEAILNKIGSRIDTEEIEKEIDGLEKQHRQLTGAKARLGQQMDSLDIMDKFYEKKYQDMETRLYRLYDEIEGVENSIEEVKNRLLNIRQQKISEENVYQFLLYFDKLYDKFTDLEKKEFLNSFVEQVDIYEQEQPDGRFLKHIKFRFPVYFGDRETQELCWDNESTVETVILLSRKAPDAEIKVRLDMSELDITSAESKATYKEIQEYVQNKYDLHVTNLYIAQVKREFGIIERENYNTGEGKAKVPQVTAEKREAIIDALKYFQMIE

SEQ ID NO: 15742 - protein, 547 aa, synthetic construct
MAKKKKPAGGNAIIYARYSSHNQRDVSIEQQIEACRKHAAELGLTITDTYEDRAISGRTDNRPAFQRMMRDAEDGKFQYVLAWKSNRMGRNMMQAMVNESRLMDCGVKVFYAEEDFDDSAAGRFALRSMMNVNQFYSDNLAEDVRRGLMDNASKCMANGRQPLGYKRGEGGKVVVDEPAAAIVREIYTRIASGEMFMDIARDLNRRGIKTQSGSEWNKSSFKVLCRNERYRGIYIYGDTRIEGGIPPIVDDVLWYKVQEVLKVKKSKNRHHCPSDEDYLLTGKLRCGKCGGYMIGMSGRSKTGDVHHYYACQNRRVGHTCDKKNIRRDVVEPAVAQAIKQYCLTDDAIEWITDQTIAYWEDEDRKLQIDSIENDLSAVQSSISNVMKAIEMGVITETTRDRLIELERQQTDLKSKLALAKEEIVHVDRKDLISSLLAFRHGNVHDRAYQEKLFNAFLIAVYVYDDDHLKLVFNSFGKDDTVNIALDLGENDDNSGLSDVSKSSPILSNGQPEQSHLRKLRWLFCLYHSEPQPQGRDSSKPLWVIGNF

SEQ ID NO: 15743 - protein, 543 aa, synthetic construct
MNTVIYARYSAGPRQTDQSIEGQLRVCTDFCKQRGLTVIDTYCDRHISGRTDERPEFQRLIADAKRKKFEAVVVYKTDRFARNKYDSAVYKRELKRNGIQIFYAAEAIPDGPEGIILESLMEGLAEYYSAELAQKIKRGMHESALKCQSTGSGRPLGYRVDEQKHFQIDPESAQTVQTIFEQYIKGESNAAICELLNSRGLRTAQGKPFNKNSINRIIKNRKYIGEYRYHDIVVEGGMPAIISKDTFNLAQAEMERRRTRKAPKSPKAEYLLAGRLFCGHCKGPMQGVSGTGKSGNKWYYYYCGNTRGENKTCDKKQVSRDRLERAVVDFTVRYILQEDVLEELARKVHAAQERQNDTASEIAFYEKKLADNKKSIANVLRAIESGAATQTLPARLQELENEQAVILGELSFLKGKHLAFTEDQILFALMKHLEPYPGESEQDYRRRIISDFVSEVYLYDDRLLIYFNISSEDGKLKSADLSNIEGSEFDEGLVSSTKRNGHDEKSCPFLLAVELFRTSPILAKERSRVSYPGPLLFKADFTR

SEQ ID NO: 15744 - protein, 485 aa, synthetic construct
MSKKVAIYTRVSTTNQAEEGYSIDEQIDKLKMYCEAMDWKVSEIYTDAGFSGSKLTRPAMEKMITDIGLKKFDTVIVYKLDRLSRSVRDTLYLVKDVFTKNEIDFISLSESIDTSSAMGSLFLTILSAINEFERENIKERMTMGKIGRAKSGKSMMWAKTAFGYSHNQETGILEINPLEASIVEQIFNEYLKGTSITKLRDKLNEDGHIAKELPWSYRTIRQTLDNPVYCGYIKYKNNTFEGLHKPIISHETYLSVQKELEARQQQTYEKNNNPRPFQAKYLLSGIARCGYCGAPLRIVLGHRRKDGSRTMKYQCVNRFPRKTKGVTTYNDNKKCDSGAYDMQWIEDIVLKTLNGFQKSDKKLRKILNIKEESKVDTSGFQKQLKSINNKIQKNSDLYLNDFITMDDLKKRTEMLQGEKKLIQARINEVDKPSTSEVFDLVKSELGEIPISKISYEDKKKIVNNLISKVDVTADNIDIIFKFQLA

SEQ ID NO: 15745 - protein, 662 aa, synthetic construct
MNRTRQTTDKSKNRITALYERLSRDDELAGDSNSIVSQKKMLEDYAKSNGYTDLVHFTDDGYSGGNFDRPGWKEMLRQIEDGSIGAVIVKDMSRVGRDYLQVGFYTEVFFREKGVHFVAISNGVDSDINTSSEFAPFLNIMNEWYLRDCSRKIKAVLQEKGRDGKPITNNPPYGYIKDPEDKNHWLIDEEAAAVVRRIFRMAVEGIGPYQIARILTEEKVEKPSYYQAKRGYGCYKNRCDMSKPYEWAGVSVVRMLEKPEYMGDTVNFRTKKLSYKDKTAVKNDSDEIVVFTDTHEAIIDRKTWYMVQELRKTKRRINTEGESNPFVGKIFCADCGGKMHYRNEGKRAGRNWRGLPDGSVRTTPACYNCGNYNNSHDQSEKVCCSHNIQAKVIDQLVLETIQYVCKSVRMDERAFVESIRSASEIREQSEAKKLKAALKHQEKRYAELDILLKKVYEDNALGRLPDKRYEMLSAGYEKEQAELEQSIKACREQLTQYDEDTDRTEEFLALVHKYTDITELTPVIINEFVDKILVHKAEKIDGERVMEIEIYLNFIGKVELPAQELTEEELAAIKEKQRLRERNAMYQRRRRAKFMPKTKAIRAKVQEAEIKEALENASAKAEKLLMADNDAHIAEVVAGENKVYVDTGIFPTAEEVKEKYAI

SEQ ID NO: 15746 - protein, 438 aa, synthetic construct
MARTIQQISFPAPMRPSLKRVAAYARVSSGKDAMLHSLSAQVSYYSSLIQKHTGWLYCGVYADEAFTGTKDSRDGFQSLLAECRAGNIDMVITKSISRFARNTVTLLETVRELKTLGVDVYFEEQNIHTISTDAELMMTILASYAQEESRSASENQKWRIRRGFERGELVNLRFLFGYKIEKGRVTVDPEKAAVVREVFRRALEGESLTSLAIDLNRRGFTGVLGGKWNSVRIREMLSNEKYLGNALLQKQYRNNHLEKKEIPNRGELPQYYAEGTHEAIIDQATFDAAQELLTEITENSPVKRPRQRSAFTSMITCTVCGRNYKRCTGGKRHFWNCPTAVQTDLPSCGTSQIPEKLLYDLAAQVLGLAQFDEGVFLERVKGIDALPDKTLVFHFKDGSTAERHWEHISRAKSWTPEMKEIARQRALAQRRGEKWQEP

SEQ ID NO: 15747 - protein, 424 aa, synthetic construct
MADCDAGKIDIVLVKSVSRFARDTVDTLKATRHLKELGIDVYFERENIHSISKEGEILLTLLAAFAQAESRSISENIKWSIRKKFKLGIPNGIKAPYGYEWNGDSFSIIPEQGEVAREIYDRYLVGEPAYSIAKRLAEKGVKGKSGVPMDDSTIKNILSSLSYTGTMLLQKNFFTEGHKRRKNKGELPMYAVEEMFEPLVSKTDFEKAQQIMKDRAEAMPNRNPKLTAFSGIVKCANCGCSISRRTSKYGKKWICNTKERKGKAVCDFRDIYESELEDAATKALNLDGFNGDVVKSQIALITIDNAYITFQMKNGTSRQVIRKYKKGYSGFSTRLFCGGCGGMLEADTWNMGPVGKKTKYKVWVCRNCSAPREFDSTFRKATQKLFHEEQCDGLFAQNIEKAINYDKKIEFYYKKGEVVTWQKE

SEQ ID NO: 15748 - protein, 528 aa, synthetic construct
MATRKVTVIPPTINPLTRISNSTVKKRRTAGYARVSTDKDEQFTSYEAQIDYYTSFIKNHSDWEFVKVYTDEGISGLNTKKRDGFNEMISDALAGKIDLIITKSVSRFARNTVDSLVTIRKLKDKGVEVYFEKENIWTFDSKGELLLTIMSSLAQEESRSISENVTWGQRKRFSDGKVSLPYKHFLGYERGENKGDPPVVNEEQAKLVRRIYHLFMSGKTTGGIARILTAENIPTPSGKEVWQPTTIESVLKNEKYKGAARLQKKFTVDFLSKKMKINEGEVPQYYIENSHEAIIDPMEWDAVQDEFKRRKAIGRAYSGKSVFGAKIVCGDCGGFYGSKTWHSTDKYKTVIWQCNRKFKNNTCCKTPHITEDEIKEQFLKVYNGLISDKEPFIKACKLTRDVLTDTKEIDREMSELLRELEVVTELIKKCIAENSSLSQDQKEYTERYNSYVDRYEKAKSRYDELEQQKENKLSKRKAIDRFISDLSKRGELLTEFDNCLWLTVVDTVTVQSEGILLFKFNDGTEIKG

SEQ ID NO: 15749 - protein, 433 aa, synthetic construct
MNRIVEKVNFPIPKQPKVKRVAAYARVSSGKDEMLHSLSAQISYYSELIQNHPGWLYCGVFSDEAFTGTKDNRTGFQSLIVECRAGNIDLIITKSISRFARNTVTLLETVRELKLLGIDVFFEEQNIHTISADGELMMTILASYAQAESLSASENQKWRIRKAFENGEIANLRFLFGYRINGTKIEIDPAQADIVREVFERAVNGESFTSIANDLNNRNITRCLGGKWNSQRIRELLSNEKYLGNALLQKKYRNNHLEKKLIHNEGQLPKYYAEGTHDAIVDEELFAKAQGILNELATRRETLKKPTLSAFSGMIVCDNCGATYKRTTSKGKHAWQCQTFLTQGKAFCPSRQIPEEELYRLATEVLKLDEFDEDILHSKIKNIRAKNNCTLTFYFTDGTEVSKRWVPRSRKNSWTAEMRECARRRALNQRRKS

SEQ ID NO: 15750 - protein, 523 aa, synthetic construct
MRFFSYGRKSVFSDKSDSIDNQFRMNREYCESKFSGQVDYWQQFSDEDFTGANTSRPDLQRMLSFIKGGFCDVLVVYQLDRLSRDVRDFANIYALLEEHGVMFISIKENIDTTTPIGRAMMYVTVVFAQMERETIAARVTDNMLGLAKKGYWTGGNPPVGYVRKHIVVNGKKHCSIEVDPDGARYVTQIFDTFLAYNCSLQGMETRFKNQGIRTQSGKFFSTTQLHKMLTMPYCVEATPEVYDFYAAKGCIMDPGSPREMWDGSVGVIIYGRSTEKNKKHQAQPPEKWTVCLGKHKPFMPAEKWLAVQSRFTQNKCIKDAKWPVPLLKGVLRCKCGNLMQVSRKKKVDGTCSSWYYCRKRMRQGVDACDMGQIKCDLLDEEVLELFRGITADPALIQKFVKAEAPADVTDLKAAQARVSACERKIGRLAASLALAEDSAASKYIIAEMERLDVELDALKREASLAEMESHRAAASAKDAKATAAEIAKLIHGLDGFDDKEKNAIARAVIQECTWDGERLFITL

SEQ ID NO: 15751 - protein, 517 aa, synthetic construct
MTRKKSPAAEPRGNQEFINSISPKARAVLYLRYSSAKQHEQSIEGQDRVCRDYCRYNDIMIVDSYIDRAKSASHDVDKRTEFQRMIKDSKKGRFDTVVVYKLDRFARSRYDSAIYKKKLKDNGVTVISATEAVPQTPEGLMMEGLLEGMAEYYSAELSQKVKRGIRESVEKRHHLGGPQPLGLMNVDGKLVEDPTTIHIVREVFSMADEGLSFAVMADILNKKGYRTRKGAPFGRSSLRTVLRSKKYIGYYCYNGLEIPDQTDPVVDPDVFWRVQEALETMGRKKRHTNKPDSYLLTGKLFCGNCGEAMLGESGKGKKGTVYRYYKCFGQKKNSGCTKKPIRKEVLEAKVVQMCQEMLTDERIDYLVQEVAKILVDQETVSKARAMEQEIVENVKQLDALTQVVMAGNAPRTIIAKMTELEARQDALQKELAIVRAQERPLGPEHARYYLQQLKTNIADVPGGEARLIQTFVDKVYLYDDDDGKTNAKIKIVFTLDGAKSSECELDGLPSSTFPASP

SEQ ID NO: 15752 - protein, 528 aa, synthetic construct
MDKTKTAAIYARYSSSNQREESIDAQLRVCRKYAEENGYSIVKEYTDSAISGRTDQRPAFQQMIQDSAKGGFDTLLIYSHDRFSRNKYDTATYKTRLKKNGVRIVAVTLPLDDSPESGLMESIMEGFAQYYSENLARSTKRGLEENALHCKSNGPLPYGYKSENGEIVLDPLPAKVVNLIYQLYSEGYGKKMICNTLNRNGYRTNRGGEFKVNALHTILSNERYKGIYIYGDKRIEGGMPAIVSEELFDKVQDQVKRNRRARKAMKDENEYLLNGKAFCGKCGSPLVGESGRSSTGEVYRYYKCAARKKDPQACQLHTERKEDLEDFVIGYICREVLTDDNIQRIAEREFALLEEDAADKTLLMALQAEYRQVSAKVENILEAIEQGIFTPKTKERLLELESRQTELEDRIVREKLKKPEFTVDHIVYWLTKFRQGDIKDFEFRRAVINALVNSVFVYDDDTDPNKKGRIIIALNLKNGPVKTLTRSDVHKMGHHFKRNANFCRIQRYTAVFFIASRNAGISIDLGEI

SEQ ID NO: 15753 - protein, 447 aa, synthetic construct
MLYGKPQNYSWYRARVVLYIRVSTDEQARHGYSLGAQREALREFCDTFQCQIVAEYSDDGVSARKEIQRRPGLLRVLEAVKAGGVDYVLFIKLDRWFRSVREYYRVQDVLDAAGTNWKAILEDYDTSTTNGRLNLNIRLSVAQDESDRTADRIKFVFSERVKNGGAIFGSKSLPYGLEVRDHRVQIVEDQAVIVRAFFDHYEAAQSARSTQVWLRDQCGVDLPRNTIGRMLRNGLYCGQYRDNKNYCPAIISSDQFQRVQEILARQASGHTRQSKYSYVFTGLLRCPVCGCTLKAFPQFDYKWNRLYLRYRCTQHWIENRCSWKTTPWEPRLEGWLLDHIQPQLDAYIAQFDVQEAQRRRAVVDVGAIQRKLSRLQDLYVDGMIDRAAYDEKYQALIRQQEAAQATQQSQKDARGACWRRCRSSWPGISAAYTPRCHRRSATRSGRP

SEQ ID NO: 15754 - protein, 546 aa, synthetic construct
MSRKNEVTISDFKGAIVWSYTRVSSKEQFLKNGSIETQVKRLKSCACDNSLIITREFDAEYESSRRINTQKTLNELLQAIKTTSKSQRPKIILIWSPSRFGRAGSEHIELFVSLRRKYNVYLYSVSTGHNTFTERSENEFSTQLLYAQKENFNRQDVIIPGMINVLEKGTFLGRAPRGYDHYGPRVSDPSKVQAKQEIKLNSDGKLIKEAFRLKLYKNHSDKEIQDYLTLEGLYIPKQSLNKMWSNLFYAGYFTNSLVPDTEIKGHWTPIISRKEFNLLQQKLKDSVQIGTPKINGKLETPLVPKFLICDDCNTNMTSYKNKRKQILYYKCSSCNKTVNANTRTKSLSKGMHQQFSSVLESLKLSKAFQNLFSKQLEKIIKNEISTSADKKRQINSEINKLQEQYDKIEFRYATDEISKDIFEKHGSKLKEQIEKKKQLTLNLPSKMSNHKKVMKHFFKIADNPHQFYESLDYHNKRLLQNILFPEGFRFSMKNKECRTSKLNILFELTNSFLKQYDPKKEKTQTEKLLESHLVAGTGLEPVTFGL

SEQ ID NO: 15755 - protein, 516 aa, synthetic construct
MPEKHSIRCAIYTRKSTEEGLEQEFNSLDAQRESAEAYIASMKHEGWLCMPDRYDDGGYTGGNMERPAVKRLMADIDAGKVDCVVVYKVDRLSRSLLDFAKMMETFDKRRVSFVSVTQHFNTTNSMGRLTLNILLSFAQFEREIISERTRDKIAAARRKGKWSGGRPILGYDVAPGGGKLLVNEAEAARVRSIFELYLDHQSLIETVKALDARGWTTKHWVTKEGHESGGRRFDKNNLIHLLTNVLYLGKITLKKEVFDGEHTAIVDAEVFRRVQAMLHRNGQSGGKHVRNRFGALLKGLLHCVPCNCAMIHTHTLKNGNKRYRYYVCLNAQKRGWHDCPSKSVPAAEIERFVIEQIRGIGKDSSLVAETIRQTRTQSDKRIKELETERAGLEKDLLRHNTDLRKLVGKVSRDGTAADRMADVQERIRVAERRATEVREELIALGRNLVDEKDAVRALALFEPVWDALSPREQVRVMQLLVERVDYDGEKGTVSITFHPTGIRSLADEMKRKEAIA

SEQ ID NO: 15756 - protein, 557 aa, synthetic construct
MQTVIYARFSSALQNARSIEDQIALCRERCDREGWPVVEVFTDYAISGAAGIDENGRPGLSAMLARIEAGGIDQVVAEATDRIARHQGDAFTIRERITFAGARLFTLSDGEVTDITATFRGLMDAQFRRDLAAKIKRGQRGTISQKRSAAGLAYGYRKANRFDDRGELIRGLREVDEEQGKVVRRIFEEFAAGQSPRAIAERLNRDGVESPGGRLSGPRFWRASTIYGDRKRRNGILQNRLYRGQLVFNRTRKVLDPRTRTHLIRANPENEWLVEEVPELRIVDDALWDRVQLMLGKVQSRAPEKNRRPKHILSGLVVCGSCGGSWTIHSGNRWGCSRYKEGGKHACSNNRIISTDRLETRVLHGLQHFMLNEKLIEIYVEEYRAEFAKRSKELGREGDRLKKRHAEAVAKIERLVEAVANGGEDFVEIRDVLAKARTERDQLAEQLSQVEQLPTIVLHPAVVADYRRQVAKLNAALGDNPEARLEAIPQLRALINQVKVSPAEQEKGVTIEVIGRLTSIMALATGQPASEKQYYNVGAGEGIRTLDPNLGKVVLYP

SEQ ID NO: 15757 - protein, 433 aa, synthetic construct
MKDTNELKYVLYARKSSESDERQAMSIDGQLMEMKEKAKREKINIVEIVTESHSAKETGQRPQFNYLLDNIYKGKYNAIITWAPDRLSRNAGDLGRIVDLMDQGKLKLINCYSQSFSNNPNEKFLLMILCSQAKLENDNRGINVRRGHRNKCMIGIRPGPAPIGYINNMRANRISSVEFDKERAPIIKEMFEKVAYEGYSGRMIKKWLDRINFRTPKGNKMVLSRVFATLKNPFYYGEFFFGKHWYKGTYQPLISKALFDKVQIQMETYPKQWNKQVFPFKKICICGNCGSGITAETKYRVLKSTKVNTHTYYHCCHSKDMDCREPYITEGEMINQLISYLPQMKLDKNYMIREFKDEIKRVDNMRMIIENSSYQGKELTPHNGTEEIQPTDEMIRTYLLHILQFGTPQERVHILNGIRSKFELSDKRLIIRN

SEQ ID NO: 15758 - protein, 529 aa, synthetic construct
MPTIRVIQPIVQRNFGGVACNSKLRRVAGYARVSTDSDEQFTSFEAQVEYYTRKIQENPEWTFVKVFTDEGITATNTKKRDGFNTMIADALAGEIDLIVTKSVSRFARNTVDTLTTVRKLKDRGIEVFFEKENIYTLDAKGELLITIMSSLAQEESRSISENVAWGKRAKAASGRVYLPYKQFLGYERGSDGLPQIIESEAESVRLIYKLFLEGRTPSGIARHLESLLILSPGGKEKWQHGTIVSILANEKYKGDAILQKTFCADFLTKKMKRNEGELPQYYVSGSHPAIVPAEVFDEVQLEMKRRREVNYTAREHCFSGRIICGDCGAPYIEKVWHSTSQYRRRIWQCSRKFKNDERCRTPHLYEDDVKAAFIRAMNTMIDGKDDLISDYKQIIRLLTDHAALDSEAKQQTEEANVVAELIRKCVAENATNSQDQEAYFERYKGLKVRYEVAAQRLKQIEDQRTERKQRRQKMLEFIQMLEQTDGMLTEFDEGLWNATVEMATVQIDGSMVFRWRNGMELLIEVVCKF

SEQ ID NO: 15759 - protein, 528 aa, synthetic construct
MEAIKKVTKIDRAVVAKSLTHQPVASLRRVAAYARVSTDSDEQFTSFEAQVDYYTRQISANTDWALVEVYTDEGISGTNTKKRDGFNRMIADALSGKMDLIITKSISRFARNTVDTLTAVRQLKEKRVEVYFEKENIYTMDSKGELLITIMSSLAQEESRSISENVAWGKRAKCEEGKVYLPYKQFLGYKKGPDGQPQIVEEQAKTVRLIYSLFLEGLMPSGIAKRLEAMGTLSPAGKQRWQTSTVESILRNEKYKGDALLQKTFCVDFLTKKMKRNEGELPQYYVEQSHPAIVSPEVFDEVQQVLKRRREARYVGRSGCFSSKIICGECGSYYGRKVWHSNDKYRTVIWRCQHKYDNGEPCKTPHVTEDQIKAAFVAEMNRVIANKEQVLSDIRTLITTLTDTRELEESEVTTGKELVAVSELMRKLVDTYAHALIEQGEYDDRYAELMVQSRTLEERIAQIGEQREQRKARKRELEAFYKLLKETGPIWEFDEELWMLMVRKVVVEENGKINFVLHPIGKEVYGAS

SEQ ID NO: 15760 - protein, 445 aa, synthetic construct
MNRVIHKVQPTIPVIPQRMRVAAYARVSNDKMAMVESLAAQVSYYSAHIQRNPQWIHVGVYADEGLSGTKDNRPEFQRLISDCYAGKIDMVITKSLSRFSRNTLDTLNILRELKQRGVDVFFERENIYSNSGDGELMLTILSSYAQEESRSASENIKWRIRKKFEQGEISGWCQLYGYTIQRGKVTIDDYKAEIVRRIFAEYLAGDSATLIAKRLRLEGVPCEQGGQWKQFTVSEILRNEKYTGNQLLQKTFTKDYLSKRAKKNHGELPLYLVENAHPAIIDADTYLRALARMEGKQKAAKRPETKMENQLFRRKIICSHCGRHFIRKNTNGTPGYVCSTYSAEGKDFCLSKKIPESTLVEFSMKAQGIPEFDKELFDKEIDHIIARYPNDLVFVFRDGHTCEYTWEDRSRAESWTEEMKKSAGDKTRSRKRSNSHGSHQESHED

SEQ ID NO: 15761 - protein, 506 aa, synthetic construct
MRTVITYLRFSSATQGAEGADSTRRQNDLFKQWLKKNSDAQVVASFSDEGLSGYKGKHLTGQFGDMLARIEAGEFPGGTILLVESIDRIGRLEHLETEALMNRIIAHGIEIHTLQDGLIYTRDALSDDLGISIIQRVKSYLAHQESKQKSFRVSEKWKQRAKLALAGKQRLTKMVPGWIDPDTLKLNEHAETVRLIFKLLLSGESLHNIARHLQSNGIKSFSRRKDANGFSVHSVRTILRSETTIGTLPASQRNDRPAIPNYYEAAIYAATFNKAQEILDKNRKGRTPASDNPLTINIFKGLFRCQCGASVHPTGTKNKYAGVYRCNNHLDGRCDVPPLKRKPFDKWMIDNFLGMIDVGNDGEAEGKIASLQHEVEIVTARIKKATALLLEMDDIDELKIQIKELNQRRTELQTTIDSMRRKASLTDKELPQLKDIDLTTKAGRVECQLILSKHLKGLTLGKGSVTITLQNDTEITIPTNPLPLNDGSPIFEIADKELLDIDAYQL

SEQ ID NO: 15762 - protein, 480 aa, synthetic construct
MTMHKVAIYVRVSTTSQADEGYSIDEQKAKLTSYCEIKDWNIYEIYTDGGFSGSNTERPALEQLIRDAKRKLFDTVLVYKLDRLSRSQKDTLYLIEDVFLENNIEFVSLLENFDTSTPFGKAMIGLLSVFAQLEREQIKERMQLGKLGRAKSGKSMQWAKTSYGYDYIKETGTLSVNPYQALIVRKMFEWYLSGMSITKLRDTLNEQYGQDKEWNYRTVRVILSNPVYCGYNQFKGQIFPGTHEAIISEDDFNKTQEEIKTRQRTAAQRFNPRPFQAKYMLSGIAQCGYCSAPLAIKLGMKRKDGTRLVKYECKQRHPRKTKGVTVYNNNEKCDSGFYFKDDIEHFVLTEISKLQTDSDYIDKLFANTNQETIDRDSYQKQIDKLNAKISRLNDLYIDDRISLEELQKRSSDFMAERTALEKELDADSSLKTVERKKDIRRVLDTKDVLSLDYEQQKAIARALISKVRVTSETIVILWKL

SEQ ID NO: 15763 - protein, 466 aa, synthetic construct
MSITIGYARQSVDKKKTENSVHSQISAIKKYTDNHKIQDVKFISDVKSGRSTTRTGYQSMLDIIRKGECQHIIVFRVNRLNRNFKDFMELQTLCEEHHVLITSLSDGRFDLSDKTQAFKIRCLAILGETESNIISENVRSANAIKAKNNELLGTNAPFGYIYVNKSFHIDESKVKTIRFIFNMYVNQGWGYKKISQALTNHSKLYNRTPKQVMRIITNEKYAGLIRNHFGEYEGNFEPIIEKSLFRKAETIRGSKKTLTHYHPIVLLRKKIRCICGATMTPIRMNRKHMTCPITYYICPLNDKLGYKKCSMGYFVASKIDKQVIKIIEDNIINQQMIQRLENTIHSKLSLKIKRSRPKYNQDQLITKLSKQQISIEEYKNQLNKIKEWHNKMNRYNQVNSANQLECITQNILSNYTLYIDQLSEMITQITVNKDKEITGVFLKNTPLNLLKEKDDKHDERSTFIST

SEQ ID NO: 15764 - protein, 541 aa, synthetic construct
MDKMKKKLVGGYIRVSTERQVEGYSIEGQITQIEQYCQFNGYELVDIYADRGISGKSMNRPELQRMLNDAKNGKLDCVMVYKTNRLARNTSDLLTIVEELHRQNVEFFSLSERMEVKNSTGKLMLQILASFSEFERNTILENIYTGQRQRALEGYYQGNLPLGYNNIPDNKKELMINQHEANIVKYIFESYAKGHGYRKIANALNHKGYVTKKGNPFSISAVTYILSNPFYIGKIQFAKYKDWNDKRRKGLNDKPVIAEGKHTPIISQSLWDKVQARKRQVSEKPQVHGKGTNILTGIISCPQCSAPMAASNTTNTLKDGTKKRIRYYSCSNFRNKGSKVCSANSVRADVIEKYVMDQILEIVKSDKVLKQVVERVNQENQVDVAALNHDIAYKQQQFDEISTKLKNLIQTIEDNPDLTSALKPTIHQYETQLNDITNQINQLKHQQNQEKPFYDTKQIAALLQRIFQNIESMDKSQLKALYLTVIDRIDIRKDENHKKQFFVTLKLNNEIIKQLFNNNNLDEVLLSTSSLFLPQTLYFQI

SEQ ID NO: 15765 - protein, 558 aa, synthetic construct
MKGKIALYSRVSTSEQSEHGYSIHEQEQVLIKEVVKNYPGYDYETYIDSGISGKNIEGRPAMKRLLQDVKDNKIEMVLSWKLNRISRSMRDVFNIIHEFKEHGVGYKSISENIDTSNASGEVLVTMFGLIGSIERSTLISNVKMSMNAKARSGEAITGRVLGYKLSLNPLTQKNDLVIDEHEANIVREIFDLYLNHNKGLKAITTVLNQKGYRTINQKPFSVYGVKYILNNPVYKGYVRFNNHQNWAVQRRSGKSDKNDVILVKGKHEAIISEEVFDQVHEKLASKSFKPGRPIGGDFYLRGLIKCPECGNNMVCRRTYYKTKKSKERTIKRYYICSLFNRSGSSACHSNAINAEVVERVINVHLNRILSQPDVIKQIASNVIEELKQKHSKQTEIKYDIDSLEKQKAKVKTQQERLLELFLDDEMDSEMLKAKQSQMNEQLEVLDQQIKEAQQINQSQDDVPNFDKLKGRLILIITRFSVYLRKATPEAKNQLMKMLIDSIEITTDKQVKLVRYKIDESLIPQSLKKDWGSFFMPKFQFEIDGRNNYFIDQITTFTT

SEQ ID NO: 15766 - protein, 547 aa, synthetic construct
MDTTSPTIKIAPYVRTSSIKQIDNYSISAQLAEIEKYCKLNDYEMLPPYIDNGISGAEMGNRPGLQQMLNDLKNNKLDKIVVWKLTRLGRSMKDILQIIEECEKNNVSFYSVSEHLGIDTDMNKLMLNIMGSLGEYERTILKDNIRIGASNKASEGKSVGGQPPYGYDRIDGLLIVNQHESRIVKEIYQMYSQGMNFTAIAKVLNDRHEVTKLGKPHSKDSVSYILKNKVYRGLVVYNQYVDWKKKGRKGYNDNPIITEGEHEAIISQELWNKVQTLLKARKRHKRGNNKTDNLLTGLLKCKCCNSNYVISNTINTLKDGSKRHFRYYVCRTRKQRSKDCKESPNIRADFIENYIFQNIKNLIQKPELIKKVVEAVNHKRTPNTDEINHEIANKQFQIDDLKSRYNNLIQVITTDTSLTESIKPTLLKYSEQINELNTSIKQLESNKNVNHPKIEADTVINIFHILFKNLENTKNSSLKAVYHLVIEHIYIKADSNNKKQFYITFKFNQDIVETLLNNINPDEQLLNCSSSLLANIPSEIIFLSFEL

SEQ ID NO: 15767 - protein, 627 aa, synthetic construct
MAGIRTENKIYEVGIYCRLSKDDGTDNESASIATQKSILTDYVKRQGWHLAKTYVDDGYSGTNFQRPSFQNMIKDIENGLINCVITKDLSRLGRNYLDCGLYLEVFFPEHNVRYIAVNDGVDTLNKSAMDITPFRNILNEMYSADVSVKIKSAYRARFQQGKFMGTTAPYGYVKDPADHNHLLIDDKVAHVVREIFDLALAGNGIAKIRKHINKQHILRPAAYAVEQGATGYERYFEDNEENRYIWSENSVRGILRSPIYAGNLAGYKRIAANMKSKKRPSKLPEEWEVIPDTHEGIVTQEEFDTVQQLMTSRRREQNAGGFENIFSGVIKCADCGYAMRAASANRRKRPDIIDCVQYTCNNYGRYGNVMCTAHSIEARDLFNAVLADINRFADMAVNDEKAVRAIERRLTETDQSRAKSLEKEKKKLNKRLAELDRLFSSLYEDKVMERITERNFEMMSGKYQKEQLEIEARLKEVTETLNDSYEKSQGVRDFLSLIRNYQGLKELDATIINALIDKILVSEREKLADGTVRQEIKIYYKFIGFVGELHITPTKRWTALKPKNCTVCGVEYVPSSGISKYCPACAKRIQREKSNESKRRSRERNRRACIELSAKNDRLIWCSAMVG

SEQ ID NO: 15768 - protein, 558 aa, synthetic construct
MSKEKIKVYLYTRVSTSIQIEGYSLEAQKSRMKAFAIYNDYEIVGEYEDAGKSGRSIEGRIQFNRMMEDIKSGKDGVSFVLVFKLARFARNAADVLSTLQIMQDYGVNLICVDDGIDSSKDAGKLMISVLSAVAEIERENIRIQTMEGRIQKAREGKWNGGFAPYGYKLEDGKLFINEEEAVAIRTIFDQYVNTTIGANGLSKYLENHGIRKIPRQNGKNPLFDAGLIRKILKNPVYNGKIAFGRRTLEKVHGTRNEYKQVEQDEYLISEGIHEAIVSDEVWQAAQVKLKSQAKKYEHVNKGKDTRTHLLSGIVKCPICGVGMFGNKCTKKKKDGTKYKDFYYYGCKHRQMIRGHKCTFSKQIREELLDDAVAEVIVKIVSNPKFASMMQEKINMKVDTSEIEKEIDNYQKELRKCHSTKFKLIEEIDNLDVEDKHYKRRKQDLDDRLYRMYDKIDELESSLIDAKAKKQTIEAEKLTGDNIYKVLIYFDKLYKVMNDVERRQLITALISEIQVYEEKQPNGQWLKSITFKLPIIDDDLNISLDNDEQVECVALLVKA

SEQ ID NO: 15769 - protein, 556 aa, synthetic construct
MSNTKRTGQTALYERLSRDDEMQGESNSITNQKQLLESYAKRNGFVNIYHYTDDGVSGTTFDREGFQKMIKAVEENKVSTVIVKDMSRFGRDYLKVGFYTEILFKEKGVRFIAINNGIDSEKQAESDFTPFLNIMNEWYARDTSRKIQSIFRARMEEGKRVSPSVPYGYYRNPKNKQQLLVDKESAKVVKRIYHLVIEGYGVTQIADILIKDKVLIPSAYAEIHYPENNHSSKKRGIEDPYFWTPTTVSYILEKQEYMGHTVLGKTICLDYKTKKRRKAKEDELIIFKNTHEAIIDEETWNNAQRLRKTVRRSPKYGTTSHPFTGLLICADCGGKLSYREPAEHKEKKYDSDYSFVCQHYRHRKGTCSMHYIKVKTVNEILLKSIKEITDFAKEDKQEFLKVMNKLSDEKREEKYQEDKEKLEKLLSRNAELTTLITKLYEDHALGKIPVKHFDRLFNIYDTEQQDLEKQIQYFEQEIESYHQRKVDTDKFLKMIEKYTDIEELTVPMINEYIEKVVVHEATGGRKGKDRKQQVDVYFNFIGNCQVPQKADIEKMA

SEQ ID NO: 15770 - protein, 485 aa, synthetic construct
MAEKRKVAVYCRVSSMHQAIEGYSIEQQRDSLTKYCEAMEWNIYDIYIDAGFSGGKLERPAMDKLIREAEAGKFDTVAVYKLDRLSRSVQDTLHLIRDVFKEHDIDFVCLQENIDTKSAMGNLFLTLLSAIAEFEREQITERMAMGRHGRAKSGKSMMWARPAYGYRYDRESQTVSVVQSEAMIVKRIYKEYLEGKSVSQIKNDLNSEGHITKEKPWVYKRITYILQSRVYTGVNEYKGEIYDGKHEAIIDTETFELTQMEFAKRQQQTKDKKNNPRPFQAKYMLSGLARCGYCKAPLKLRLGAVRKDGTRAMVYDCHNRWNRKVTYLTIYNDNKQCTESGRYQKADLEAYVLDKIKELQLNPDTIREKMDLNEKPTANTEEIKKQIAKINQQIDKLNDLYLNDLITVEKLKERANKLKKERELLEAELSKNSDHLFKAKKKQLNDLLMNKDIDSMTYEEQRNLVKMLIYKVDVTKEDINIIFDF

SEQ ID NO: 15771 - protein, 556 aa, synthetic construct
MSNMKRTGQTALYERLSRDDEMQGESNSITNQKQLLESYAKRNGFINIYHYTDDGVSGTTFDREGFQKMIKAVEENKVSTVIVKDMSRFGRDYLKVGFYTEILFKEKGVRFIAINNGIDSEKQAESDFTPFLNIMNEWYARDTSRKIQSIFRARMEEGKRVSPSVPYGYYRNPKNKQELLVDKESSKVVKRIYRLVIEGYGVTQIADILTKDKVLIPSAYAEIHYPENNHSSKKRGIEDPYFWTPTTVGYILEKQEYMGHTVLGKTICLDYKTKKRRKAKEDELIIFKNTHEAIIDEETWNNAQRLRKTVRRSPKYGTTSHPFTGLLICSDCGGKLSYREPAEHKEKKYDSDYSFVCQHYRHRKGTCSMHYIKVKTVNEILLKSIKEITDFAKDEKQEFLKVMNRLSDEKKEEKYQGDKEKLEKLSSRNAELTTLITKLYEDHALGKIPVKHFDRLFNTYDMEQQDLEKQIQYFEQEIESYHQRKVDTDKFLKMIEKYTDIEELTVPMINEYIEKVVVHEATGGRKGKNRKQQVDVYFNFIGNCQVPQKEEIEKLA

SEQ ID NO: 15772 - protein, 618 aa, synthetic construct
MAGIKEEKKIYLVGIYCRLSKDDGTDNESASIATQKSILTDYVKKQGWHIAKTYVDDGYSGTNFQRPSFQNMIKDIESGLINCVITKDLSRLGRNYLDCGLYLEVFFPEHNVRYIAVNDGVDTLNKSAMDITPFRNILNEMYAADISVKIKSAYRARFQQGKFMGTTAPYGYIKDPADHNHLLIDDKVAHVVKEIFDLALKGNGVAKICRHLNKQHILRPAAYAAERGETGFERHFEGNEDKRYIWSGNSVRSILRSPIYAGNLVGYKRIAANMKSKKRPSKLPEEWEVIPNTHEGIVTQEEFDIVQQLITSRRLPQNKGGFVNIFAGVIKCVDCGCALRAMNVHRRKRPEIIDCVQYSCNNYARNGRSECSAHNIEARDLFNAVLADINCFADMAVNDEKAVRAIEKRLTETDQSRAKALEKERKKLNKRLAELDRLFSSLYEDKVMERITERNFEMMSGKYQKEQLEIEARLKEVTETLNESYEKSRGIRDFLALIRNYQGLKELDATVINALIDKILVSEREKIADGTVKQEIKIYYKFIGFVDELHIIPTKRWAAMPAKNCTVCGVEYVPGSGASRYCPACAKKIRREKSNESKRRSREQKRIACMNCPQKMTD

SEQ ID NO: 15773 - protein, 540 aa, synthetic construct
MKQPYNTTIYNTALYLRLSRDDELQGESGSIQTQRMMLRQYAAEHGLTVVDEYIDDGWSGTNFERPSFQRMIDDIEDGKINCVVTKDLSRLGRNYILTGQYTEIYFPSKGVRYIAINDNVDTINGESELAPFLNILNEMHARQTSKKVKAAMHTRFANGAHYGAYAPLGYVKDPDKKGHLLIDPETRWIVEKIFDLAVHGRGAASITRILVEEKVPTPGWLNYERYGTFANIYAGAPPEKAYAWTIAQVKSILKEETYIGHSVHNKQSNISFKNKKKVRKPQEEWYRVENTHEAIISEEVFQKVQELIASRRRRQKNGTTQIFSGLVKCADCGWSLAYGVNSQNKNPYAHYHCSKYGQGLRQCSMHYIRYDVLYAYVLARLQYWSMLAQKDEDKLLKRLLNASDRERNSAKKKQAAELKKAEKRKAEVDGLFAKMYEDWSAGRITEYNFNMLSEKYQNEQRELETKIRQLHETMEAAVQTAADAEKWIALMKQYVNPVELTAELLNTLIEKITVHEAVKGEDGSREQEVEIYYRFIGKID

SEQ ID NO: 15774 - protein, 453 aa, synthetic construct
MTKAAIYIRVSTQDQVENYSIEVQRERIRAYCTAKGWDIYDEYIDGGYSGSNLDRPDIKRLLNDLKKIDVVVVYKLDRLSRSQRDTLELIEEHFLKNNVDFVSITETLDTSTPFGKAMIGILSVFAQLERETIAERMRMGHIKRAENGLRGNGGDYDPSGYTRKDGQLIIKKDEAAHIKRVFDLYEQYYSITKVQEVLKEEGYPIWRFRRYRDILSNTLYIGRVTFSGKEYEGQHEPIVTSEQFKRVQTLLKRHKGHNAHKAKQSLLSGLITCSCCGENYVAYSTGKSKAAESKRYYYYICRAKRFPAEYEERCMNKTWSRKKLEEVIFDELKNLTVKQSASQKKEKKINYEKLIKDIDKKMERLLDLFTNTTNISRQLLETKMDKLNSEKEHLILKQQSYEQEFSISKDMITTINESLETMDFKAKQVMINTFIQQIHIDHDVVDIIWRWRF

SEQ ID NO: 15775 - protein, 590 aa, synthetic construct
MNTKVKLIKASNTGARNRNALDLDLKRVAAYCRVSTDSKDQLESYKSQVDYYTNLIKNNKNWTLAGIYADEATTGTTATKRADFMRLISDCQNGDIDMIITKSISRFARNTLDTLKYVRLLKENNVGVVFEEENIDTLTMDGELLLTILSSVAQQEVENTSAHVKKGLKMKMEKGELIGFQGCLGYDYDPITKSISINEEEAKIVRYIFKRYLEGNGGSVIGRELEEQGYLTPRGKTKWSDTTVLGIIKNEKYIGDILMGKTFTVDPITKRRLANFGESDKYHIENHHEPIISKEDFEKAQEIRLRRAQNRNTIANKDRKREKLSRQYAFSSMLECGFCGEILSRRTWHTSSIYKKINWQCVRSTKKGKKYCPHSKGIQEAAIEKAFVESYRQLCHADSTVIDDFLKIVEEEINDNTLVKVLKKIESQLNRIISQERKLVDLHLEDSIDEEVYAKKYKKLTKQKEELLDEKKTLELTIKDENSIKERLKQFKKVLENREIIEEFNRTVFESIVDKVVVGRIDKDGTVHPYDLTFYFKTGVKDSQDSNNFKDKRKNAKDNDSEKLCSYKNDEDKKLCSQSKDNARGVCKFT

SEQ ID NO: 15776 - protein, 559 aa, synthetic construct
MSKEKIKVYLYTRVSTSIQIDGYSLEAQKSRMKAFALYNDYEIVGEYEDAGKSGKSIEGRVQFTRMMEDIKSGKDGVSFVLVFKLSRFARNAADVLSTLQIMQDFGVNLICVEDGIDSSKDAGKLMISVLSAVAEIERENIRVQTMEGRIQKAREGKWNGGFAPYGYQLIDGKLLINEEEAIAIRTIFDQYVNTSIGANGISKYLENHGIRKIPRQNGKNPLFDAGLIRKILKNPVYNGKIAFGRRTLEKVHGTRNEYKQVEQDEYLISEGIHEAIVSDEVWQAAQVKLKSQAKKYEHVNKGKDTRTHLLSGIVKCPICGVGMFGNKCIKKKKDGTKYKDFYYYGCKHRQMIRGHKCTFSKQIREELLDDAVAEVIIKLVSNPKFASMMQEKINMKVDTSEIEKEIDNYQKELRKSHSTKFKLIEEIDNLDVEDKHYKRRKQDLDDRLYRMYDKIEELESLLIDAKAKKQTIEAEKLTGDNIYKVLIYFDKLYKVMNDVERRQLISALISEIQIYEEKQPNGQWLKSITFKLPIIDENINIGLDNDEHVECVSLLEKRS

SEQ ID NO: 15777 - protein, 460 aa, synthetic construct
MKCAIYRRVSTDEQAEKGFSLENQLLRLQAFAESQGWEVIADYMDDGYSGKNMNRPQIKRMLHDLKLNKFDIVLVYRLDRFTRSVKDLNDLLEVFKENEVDFKSATESIDTSTATGRMILNMMVSTAQWERETISERVKDVVRKKKDLGLISTGYPPYGYTMNDGVISQVPHEVEIVKFIFEKAKIYGFQKISKLLNEQGLVTRNGTKWLISTASRIAHNPFYSGEMRYKRDGETSTVPINVEGYEPVITKEEHKEVLKAIKKRNRNQTRAKSNEVYPFSGIVLCPECGHPMKGTRVSSRGYYYKYYRCDRASDHFCNGKLIRCEKLDKAFAEYIHDAFQIDRIEIKEETNTKDIQREIKRCKSKIERLKDLYVDGDISKKKYKNDVGELNEKIYDLEQKLLSAENKISHDHIRENLKRLSEFWGLIDDNTKMESIRGVFDTITVEIQGNDVVITDHTLL

SEQ ID NO: 15778 - protein, 407 aa, synthetic construct
MKPEKIRVCAYARVSTMTEKQQDSLTNQQSYYNHFYQNKKDVDFIGVYYDQGISGKLAKRPGFQQMLEDCRAGKIDVIHTKSISRFARNTELLLTVSRELKTIQVDIFFEEQNLHTLSNEGEVMLTVLASYAEEELRNMSENQRWAFQNKFQRGELVINTKRLLGYDKDENGELIINPEEAKIVKRIYNLYLSGMGVHVIAKLFNEEKVSTVDGGKWYSSTITNILKNEKYKGDAILQKYYFAEIKAKQRLNQGQVQQYLITDNHEAIVSREDWEAVQKRLKQNRKANLSIDYNRRYPLSGLLKCEHCGSTLKRQKYYKGKVVWVCSKYIREGKDSCIGMRVPDSVVQDWQVTKPTIVKEEIISGKKHYCYSSKENNSSENSEAGSENQNGGLLSSVYRPRRTAIKL

SEQ ID NO: 15779 - protein, 435 aa, synthetic construct
MAAYCRVSTDQDEQLSSYENQVRYYREYINQNPLYELVGIYADEGISGTNTKKRTEFNRLISDCRQGKLDRIIVKSISRFSRNTLDCLQYVRELKELGIGVTFEKENIDSLDAKGEVLLTILSSLAQDESRSISENATWGIRKKFERGEIRVNTTKFVGYDKGEDGNLVINPQQAKIVRRIFRDFLQGETPESIARSLKEEGVPGWNGKANWYPTTIQRMLQNEKYMGDALLQKTYTVDFLTKKRSENQGQVNQYYIEGNHEAIINKEEWDLVQLEVERRNQYRQDNHINFYIIQCEQNPFTCKVFCKECGGLFGRKNWTTSRGKRPVWQCNNRYKVKGIQGCTNRHIDEETLQQAFLRAIEVLRENKEKLEGKWDNFSEEQKLEKYHAAQLKGMLSSDQEVFKGRKMCQVLEKITLGEDGGITVKFLEGTEVNL

SEQ ID NO: 15780 - protein, 451 aa, synthetic construct
MTKAAIYIRVSTQDQVENYSIEVQRERIRAFCKAKGWDIYDEYIDGGYSGSNLERPGIKKLITDLKNIDAVVVLKLDRLSRSQRDTLELIEEHFLKNKVDFVSITETLDTSTPFGKAMIGILSVFAQLERETIAERMRMGHIKRAENGLRGNGGDYDPAGYTRKDGHLVIKKDEAVHIKRAFDLYEQYYSITKVQEVLKEEGYPIWRFRRYRDILSNTLYIGRVTFSGKEYEGQHEPIISSEQFKRVQALLKRHKGHNAHKAKQSLLSGLITCSCCGENYVSYSTGKSKAAESKRYYYYICRAKRFPAEYEERCMNKTWSRKKLEEVIISELKNLTEEKKQTNKKEKKINYEKLIKDIDKKMERLLDLFMNTTNISKGLLEQQMEKLNLEKEKLLLKQQRSEEESISHEVTLTAIDDAFEILDFKEKQVIINNFIEQIYINQNNVKIIWRF

SEQ ID NO: 15781 - protein, 594 aa, synthetic construct
MKKDVKVIKGDTTLKRTASGCVQRSIKRVAAYCRVSTDTEDQINSYNSQVEHYTEFIQKNKEWTLAGIYADEAITGTQVDRRIDFQRLINDCMNGDIDMIITKSISRFARNTLDTLKYVRKLKEFNVAVFFEEENINTLTMDGELLLTILSSVAQQEVENISANVKKGLRMKMERGEMVGFQGCLGYDYDPETKSISINEKEAEIVRYIFRRYIEGVGGMVISRELEEQGYLSPRGNKRWTETTVLGIIKNEKYKGDLMMGKTYTVDPISKRRLDNFGEQDKFYIENHHEPIISEEDFEKAQGIRLRRSKNRNTVANNGGKREKYSRKYAFSSMLECGFCGHNLSRRNWHSSSEYTKVIWQCVNATKNGKKYCPHSKGIEEEAIEKAFMESYRQVCHNNVEITNEFLKTVEEELKDNSLAKDLKKITNQLDKILKKEKDLVELRLNESISMDIYQDKYNEIAISKEKLLAEKRTLEVTLTDEKALKKRLEGFKKLLESNKYLEEFDRSVFESIVDKIIIGGTNDEGEIDPAMITIIYKTGKKDSQDGRLFKSRRKNAKEVNEETDNKLYPHSSDEVNNLYSYPIDNTRGVCKFT

SEQ ID NO: 15782 - protein, 545 aa, synthetic construct
MIAAIYSRKSKFTGKGESVENQIEMCKEYLKRNFNNIDDIEIYEDEGFSGKDTNRPKFKKMIKAAKNKKFNILICYRLDRISRNVADFSNTIEELQKYNIDFISIKEQFDTSTPMGRAMMNIAAVFAQLERETIAERIKDNMVELAKTGRWLGGTSPLGYKSEPIEYSNEDGKSKKMYKLTEVENEMNIVKLIYKLYLEKRGFSSVATYLCKNKYKGKNGGEFSRETARQIVINPVYCISDKTIFKWFKSKGATTYGTPDGIHGLMVYNKREGGKKDKPINEWIIAVGKHRGVISSDIWLKCQNLIQQNNAKSSPRSGTGEKFLLSGMVVCKECGSGMSSWSHFNKKTNFMERYYRCNLRNRASNRCSTKMLNAYKAEGYVANYLKELDINAIKKMYHSNKKNIIDHDAKYEVNKLNKSIEENKKIIQGIIKKIALFDDLDILEMLKNELERLKKENDEMKIKLKELKSILELEDEEEIFLSTMEENISNFKKFYDFVNITQKRILIKGLVKSIVWDTSGEEKILEINLIGSNTKLPSGKVKRRE

SEQ ID NO: 15783 - protein, 540 aa, synthetic construct
MKTIAIYARKSLFTGKGDSIGAQVDTCKRFIDYKFANEDYEIRTFKDEGWSGKTTDRPDFTNMVNLIKSKKIDYVITYKLDRIGRTARDLHNFLYELDNLGIVYLSATEPYDTTTSAGRFMISILAAMAQMERERLAERVKSGMIQIAKKGRWLGGQCPLGFDSKREIYIDDMGKERQMMKLTPNKEEIKIVKLIYDKYLEVGSMSQVRKYCLENSLRGKNGGDFSTNTLKQLLTSPIYVKSSDNIFKYLESQNINVFGIPNGNGMLTFNKTKEIRIERDKSEWIAAVGKHKGIIDDNKWLQIQQQLQQQSEKQIKSSGRQGTTSTGLLSGIIKCAKCGSNLLIKTGHKSKKNPGTTYSYYVCGKKDNSYGHKCDNKNVRTDEADSAVITQLKLYNKELLIKNLKEALIKNEKADTDNIEILESKLKEKEKAVSNLVKKLSLVDDENISNIILSEVTKINKEINDIKLQLSNETLKINEVTKATLDTEIYIKILENFNKKIDDITDPIEKMNLLKSALESVEWNGDSGEFKINLIGSKKK

SEQ ID NO: 15784 - protein, 515 aa, synthetic construct
MKTAIYLRKSRADLEAEARGEGETLAKHRTTLLKIAKEMNLNVLAVREEIVSGESLVKRPEMLALLEEIEDNKYDVVLCMDMDRLGRGGMKEQGIILETFKRSNTKIMTPRKTYDLNNEWDEEYSEFEAFMARKELKIITRRMQRGRVASVEAGNYLGTHAPFGYDIHRLNKRERTLTINPEEASVVRMIFDWYANEDMGANAIRSKLNDLGYKSKLGNEWNPYSILDILKNNVYIGKVTWQKRKEVKRPDAVKRSCARQDKSDWIIADGKHEPIIPESLFEQVQEKLNSRYHIPYNTNGIKNPLAGIIKCAKCNYSMVQRYPKNRKETMDCKHRGCENKSSYTELIEKRLLEALKEWYINYKADFEKHKQDDKLKETQVIQMNEAALRKLEKELVDVQKQKNNLHDLLERGVYTVDMFLERSNVVSDRITEITSTMENLKKEIKTEIKKEKVKKDTIPQVEHVLDLYFKTDDPKKKNSLLKSVLEKAVYKKEKWQRLDDFELVLYPKLPQDGDI

SEQ ID NO: 15785 - protein, 550 aa, synthetic construct
MNRQSTFSTIRKSTLAFEEAKITALYCRLSRDDELAGDSNSIVNQKTILKKYAEDNGFRNIEFYVDDGVSGTTFDRPDFNRMIADVESGRIGTIIIKDMSRFGRDYLKVGYYTEIMFPEADVRFIAINNGIDSANQADSDFTPFLNIINEWYAKDTSKKIRAVFKSKGQSGKPLCTNPPYGYIKDPEDKLHWIIDEKAAEVIRDIFRLCMAGFGPTQIAKQLEKRCIDTPTVHLRKMGINTPARPPENPYAWSARTVADILAKMEYLGHTVNFKTSKKSYKSKVKILNNPEDWLVFKNTHEAIIDEGTWETVQKIRDGKRRPSRLGEMGMLSGMMFCADCGAKLYQVRGKGWTHDKQYFVCATYRKKKGMCSSHQIRNVVVEQLLLEDLRRVTSFAKDHEQEFIRIVMNNSEKELAKELRQSQKEYEQAQTRIADIDKIIRKLYEDNVMGKILEERFYKMSAEYEAEQKALEERITKLKHTIDTANEQSLNTDRFLALVKKYTEITELDAEIIREFIDKIIVFKAEKIDGRRTQRIQIFYNCIGAIDLPK

SEQ ID NO: 15786 - protein, 528 aa, synthetic construct
MTYQEGGEAMKKITKIEGNKVASIIKPKLRVAAYCRVSTGSDEQLVSLQAQKSHYEAYIKANPEWEYVGLYYDEGISGTKKENRTELLRMLSDCENKKIDLIITKSISRFARNTTDCLEMVRKLLDLGIYIYFEKENINTQSMESELMLSILSGLAESESISISENNKWAIQRRFQNGTFKISYPPYGYDNIDGQMVVNPEQAEIVKYIFAEVLSGKGTQKIADDLNQKGIPSKRGGRWTATTIRGILKNEKYTGDVILQKTYTDSRFNKRTNYGEKNRYLIENHHEAIISYEVFEAVEAALNQRAKEKGIEKRNDKYQNRYSFSGKIICSECGSTFKRRIHSSGTRKYVAWCCSKHLKQITECSMQFIRDEDIKTAFVTMINKLIFGRKLILQPLLDALRGMSNSDNLSRIQELEKQIEKNAEQRELLVKLMAKGYLEPALFNRENNELQMEADNYMGQKEALIHALNGELSKVQEVGNLIKFTNKAEMINTFNEQIFNDYVEKIIVYSRVEIGFVLKCGITLRERM

SEQ ID NO: 15787 - protein, 521 aa, synthetic construct
MAVSKNVMIIPAIKRVGNNRKEDETPKLRVAAYCRVSTDSDEQASSYEVQIEHYTEFIKKNSEWEFAGIFADDGISGTNTKNRDEFNRMIDECMAGKIDMVITKSISRFARNTLDCLQYIRKLKDKNVAVYFEKENINTLDAKGEIMLTIMASLAQQESQSLSQNVKLGYQYRYQQGEVMVNCSRFLGYTKDENKRLVIVPEEAEIVKRIYREYLEGSSMDKIKKGLETDGILTGAGKKRWHTSTIRKILSNEKYIGDALLQKTYTVDFLTKKRVVNNGIVPQYYVENNHEAIIPREIFMQVQEELVRRSRGHISTSGKKRNFSSNHVFSQIIFCGECGEIYRRVHWNNRGKKSIVWRCVSRLENTGLTCHSRTVLEDMIGLATVDAINKLIGQKDGFLTILKENIETVISEADNNIVFEIDKKLEELQKDLLRLANSKEDYNDIADEIYRLREERHKALAEEAGKKGSKQRLEDMEKFLNEQSTLLEEYDEQLVRRLIEKITVYDDKLTIEFKSGVEVDV

SEQ ID NO: 15788 - protein, 521 aa, synthetic construct
MIPNRNVVIIPAMKRAGNNGNKDEVPKLRVAAYCRVSTDSEEQSSSYDVQIEHYTEFIKKNNEWAFAGIFADDGISGTNTKKREEFNKMIDECMAGKIDMIITKSISRFARNTLDCLHYIRKLKDKNVAVYFEKENINTLDAKGEIMITIMASLAQQESQSLSQNVKLGYQYRYQQGQVMVNCSRFLGYTKDENKKLVIVPEEAEIIKRIYREYLEGSSMDKIKKGLEADGVLTGAGGKRWHTSSIRKILSNEKYIGDALLQKTYTVDFLTKKRVKNNGIVPQYYVENNHEAIIPREIYMQVQEELVRRSRGHISSSGKRRNFSSSHAFSQIVFCGECGEIFRRVHWNNSGKKSIVWRCVSRLESTGLSCNARTVGEDILYEKTVEAINILLGQKNDFLPQLKKNIETVVFETSNEAVEKIDKKMLELQKELLQKANAKEDYNDVAGKIYRLREERHRALTEQAERKGSKQKLEEMEKFLNEQDGLLEEYDERLVRMLIEKVTVFDDKLTVEFKSGAEIEV

SEQ ID NO: 15789 - protein, 452 aa, synthetic construct
MKAAIYIRVSTQEQVENYSIQAQTEKLTALCRSKDWDVYDIFIDGGYSGSNMNRPALNEMLSKLHEIDAVVVYRLDRLSRSQRDTITLIEEYFLKNNVEFVSLSETLDTSSPFGRAMIGILSVFAQLERETIRDRMVMGKIKRIEAGLPLTTAKGRTFGYDVIDTKLYINEEEAKQLRLIYDIFEEEQSITFLQKRLKKLGFKVRTYNRYNNWLTNDLYCGYVSYKDKVHVKGIHEPIISEEQFYRVQEIFTRMGKNPNMNRDSASLLNNLVVCGKCGLGFVHRRKDTVSRGKKYHYRYYSCKTYKHTHELEKCGNKIWRADKLEELIIDRVNNYSFASRNVDKEDELDYLNEKLKTEHVKKKRLFDLYISGSYKVSELDAMMADIDAQINYYEAQIEANEELKKNKKIQENLADLATVDFDSLEFREKQLYLKSLINKIYIDGEQVTIEWL

SEQ ID NO: 15790 - protein, 485 aa, synthetic construct
MGEIVKYAVYVRVSTDRDEQVSSVQNQIDICRYWLEKNGYEWDSNAVYFDDGISGTAWLERHAMQLILEKARRNELDTVVFKSIHRLARDLRDALEIKEILIGHGIRLVTIEENYDSLYEGGNDIKFEMFAMFAAQLPKTLSVSISAAMQAKARRGEAIGKPGLGYDVIDKRLVINEKEAEIVRVIFDLSKKGFGYKKIASILNDKGMYTKLGQLWSDTTIAKVLKNQKYKGDLVLNRYKTVKVDGRKKRVHTPKDRLTIIEDHYPAIVSKELWGAVNDNRLSQKKTKLDMRNEFRGMIFCNHCGGSITVKYSGRYSKKNKKEWIYLKCSNFLRYDQCVNFKPIYYDEIREVVIYRLKQKEKELEIHFNPKIHEKREAKSMEIKKYITLLKVKKEKLIDLYVDGLIDKDVFSKRDLNFENEIKEQELELLKLMDQSKRMKEDQQIKKAFSMLDEEKDMHEVFKILIKKITLSKDKYIDIEYTFSL

SEQ ID NO: 15791 - protein, 504 aa, synthetic construct
MDESIDAQIRAIEEYADKNDIKIVNKFIDRAKSATSDKRPAFQDMIKYCEADNTGISMVIVHKLDRFSRDKYDSAMYKQKLKVKGIRVVSVLENLNDSPESVILESVIEGMAQYYSANLAREVAKGQKENALKALHNGGDAPLGYDVAFDKTYLVNEEEAQAVKIIFDMYVNGYSYSNIIDKLNDLGFLTKRKNKFGKNSLYGILSNEKYTGVYVFNKTQRKGVNGKRNGHKQKSEDEIIKVEGGMPQIIDKEVFIQAQEMMQKRKKAPGSHKATTLYLLTGLIRCGECGHAMQGNKRKDKYGNDYISYRCGCRKQKRDCDNKEIKRDYLEEFVLTELEKHVLNDDAIPALSKELNERLKIKSNDNNEMITNLRSKLEKVNKEIENILNAIMNGIVNNMLKDKLDELEQVKLNLDLKIKELSIESNGVESIDITEDQIRGMFGKFKEFVLTRNLPECKKFISDYVKEVIVYRDHIEVIFNVVFSFVNNEITHDLHIAISREKIK

SEQ ID NO: 15792 - protein, 515 aa, synthetic construct
MYRPQELDVFIYLRKSRKDLEEEKKVMEHGQHYDTLERHRTQLLELAHKEHHNIIDIFEEVVSGEYISERPMMQKLLREVETGIADAVLVMDLDRLGRGDMVDQGTIYRVFRYSETFIITPTEVINPNDENQELTFSIKSLIAREELKTIVKRMQRGRRASAKEGKSISRVPPYGYLRDNNLKLYPDPEKSWVISKIFELMARGTGRQAIAQELDRLGLAPPEGEYWNPSTISSIIKNEVYLGHIIWGKIRYTKQNGKYSRKKVSKERWQRHDNAHPPLVSEELFQRANTAHSKRWRPPTIKTKKLSNPLAGILLCELCGHSMLYQPRKDRPNPQVRCIQPSCKGIQKGAALALVEQRILDGLKQIIENFEIQENMIQKKKSSNNIHLQQKALEKKEQQINDLQKQKGNLHDLLEKSVYDVDTFFERQKSITARLKTTKEEIEELKHEVEKILEKEKHLHEFVPKVKNVLEAYFTTSHIERKNLLLKSVLEKVTYLRKKEWKRKDEFIVELYTKI

SEQ ID NO: 15793 - protein, 522 aa, synthetic construct
MKLSHILQSKMNAAFYGRHSTDKQDMDMQLNSVMEIIRKYECIHTHSFLDKAVSARKNKMTSRKELENMFKSAKRKEFDFVIVYKSDRLARDPLEHQTIRIVMKTLGIPIIISSTESVYNTDTDLIVQLMEDGFTKYEVDTIIARTQSGLENKAKQGKWLGGKPPFGYTYDKTNGQFIEYPEELCYVREIFNLYVNGHGFQYIANTLPNGSRRGKDWGKENVKAIVLNPFYCGLLSWRRQTDGKQNARDIWIEAPNHYVKPIISRTTWESCWHIYSEKRNGNMVPKHYKTSFLLQGLLSCENCHELMKTKNQQTVSSTNKQYGGKIYFCTNCKLRIDADLLHDKVVNQTLTDVKISGFHNVYHAIEQKIQYEIQELNSNIQKHQRLFENYTIKLHNITEELKQRMKNNDDKRFLKSLAIYRLDVQRKLDGVTQQINDFKQQITLKEKVEKSKETWLHTLNEVFQDDVKLQEISDMDKRRFLLPLIQSVSIKENKKRNEYDISLQLRTDFSKRDVKNQISLIL

SEQ ID NO: 15794 - protein, 557 aa, synthetic construct
MLQSNKITALYCRLSQEDMQAGESGSIQHQKMILQRYADEHHFLNTKFFVDDGFSGVSFEREGLQAMLQEVEAGRVATVITKDLSRLGRNYLKTGELIEIVFPENGVRYIAINDGVDTAREDNEFTPLRNWFNEFYARDTSKKIRAVKQAQAQKGERVNGEYPYGYIPDPNNRHHLIPDPETAPIVKQVFAMFVSGVRMCEIQKWLAENKVLTIGALRYQRTGQARYQRAMIAPYTWPDKTLYDILARQEYLGHTITAKTHKVSYKSKKTRKNEEEQRYFFPNTHEPLVDEETFELAQKRIATRHRPTKAAEIDIFSGLLFCAGCRHKMYYQQGVNIEPRKFSYSCGAWRNRARTGSECTSHYIRKNVLLDLVLEDMRRVLRYVKEHEQDFICKATEYGDMEARKALAQQQKELFKAQARMTELDTLFRKLYEDNALGRLTDERFVFLTSGYVDEKKSLAARIDELQQQIATVTERKRDISRFIQIVGKYSDIQELTYENVHEFIDRILIHELDRETNTRKIEIHYSFVGQVDTEQEPTQVVNHDRRNMVDVKSIAI

SEQ ID NO: 15795 - protein, 523 aa, synthetic construct
MAVSRNVTVIPAIKRIGNNKDSESKPKIRVAAYCRVSTDSEEQASSYDIQIEHYTDYIKKNKEWELAGIFADDGITGTNTKKRDEFNRMIEECMAGNIDMIITKSISRFARNTLDCLKYIRQLKDKNIAVFFEKENINTMDSKGEIMLTIMASLAQQESQSLSQNVKLGIQYRYQQGEVQVNHKRFLGYTKDENKQLVIDPKGAEVVKRIYREYLEGASLLQIARGLEADGILTAAGKSKWRPETLKKILQNEKYIGDALLQKTYTVDFLSKKRVKNNGIVPQYYVENSHEPIIPRDLFMQVQEEMVRRANLSGGKGGKKRVYSSKYALSSIVYCGQCGDIYRRVHWNNRGYKSIVWRCVSRLEEKGSECTAPTINEETLQTAVVKAINELLANKKPFLSTLQKNIATVLNEENDNATDNIDRKLEKLQQRLLIQAKSKNDYEDMADEIYHLRELKQNALVENAEREGKRQRIADMTDFLNEQSCELEEYDEQLVRRLIEKVTIYEDKLTVEFKSGIEIGIEI

SEQ ID NO: 15796 - protein, 520 aa, synthetic construct
MKKITKIEGNLANSFIKPKTRVVAYCRVSTDSNEQLVSLQAQKAHYETYIKANPEWEYAGLYYDEGISGTKKENRSDLLRMLSDCETGRIDLIITKSISRFARNTTDCLEMVRKLIGLGVHIYFEKENINTGSMESELMLSILSGLAESESISISENTKWAIQRRFQNGTFKISYPPYGYQNNDGQMIVNPKQAEVVKYIFAEVLSGKGTQKVANDLNQKGIPSKRGGRWTATTIRGILTNEKYTGDVILQKTYTDSHFNRHTNYGEKDMYLVENHHEAIISHEDFEAVDAVLNQRAKEKSIEKRNSKYLNRYAFSSKIICSECGSTFKRRIHSSGRKYIAWCCSKHISQITECSMQFIRDDDIKTAFVTMMNKLIYGQKFILRPLLNGLRNQNNLASFRRIEELETEIENNMEQSQMLTGLMAKGYLEPALFNKEKNSLEAERERLLVEKNQLTRSVNGNFTKVEEVDRLLKFATKSQMLTAYEDELFENYVEKIMVFSREEVGFELKCGIALKERLVN

SEQ ID NO: 15797 - protein, 601 aa, synthetic construct
MARKKKFAPNDNNLAIAYYRFSSHSQNDASIDQQRELAHDWADAHGFKIVKEYEDAAISGTTENRPGFQMMLSEVAKIRPHTLIMWKTDRLGRDKYVLAMAKKKIRDAGCEIHLLAEHIPTEGPEGVLIEGLMEAMAEYYSRQLSQNIQRGMDYNAQHALYNGHKLFGYDVDRSTKKYIPDPNTAPFVQWAFREYASGRPLKAIADKMNAQGLRTPRNAKFSVNMLNKMLKNRAYIGEYHHGDIVVAGGMPVLVDEATFDRAQRRFAENKRKGSQRAHGMGGSDAPRYWLTGKLYCGECGSTMQGVSGTSKTGRTYYYYYCSAQRRKECHLHKARKRDLEDMVLFALHNIVDDEENVTALALDAAEYYEKSHDDTAYLEALEAKRREVEKSLANLVKVIEKGVVSDTVTQRLTQLEEQKSALNDAIGTENVRVSLCEDRHSIQAYFDKFLHADVNDPEIRDQVFEYFVDKVYLYDDKLVVSVWFSEDDKQEITWRDWFSLDEYWTDESPFVKGEAAEFDCFPLGSTEQNVPPSGRGVSCFFEPIPAGEDPRHRQLPGHDRLGAQAPPRLRFRCAGRRVARRARHRFRCSLLQRLPAMGAES

SEQ ID NO: 15798 - protein, 558 aa, synthetic construct
MTKLYSYIRFSSMRQSDGSSYERQIRMAKEIADRYNLELVNDYQDLGVSAFKGANSKTGALSRFLDEIGRSIPVGSWLFIENLDRLSRQDIISAQELFLSIIRRGITIVTGMDNKIYSIETVTANPMDLMFSILLFIRGNEESQTKRNRTNSSALLKIKAHQQNPQNPAVAIEEIGKNMWWTDTTSGRVLPHPVYFPVLQKIVQLRQEGHSAGAILDYLNEHHEPPAPTSNKKHGKWSRAMVSRLFATKALIGVKTVNVDGVEYELRDYYPRVLSDSEFYFLRKNIVKKAWDYNHDKEKVIPLLSGIGVLRCVHCGATMVKQTAANGKREQYRYCCDGRKSGRTDCPYPNWGFRAVTLEGAVLQLLADKIWIAEDKTNPIPEIQVKIDEISRKIDNLINLSAMMGATKELANQITDLNSQREALHEEIRLFEREMYSVDSQGWDKLAQFDLSDVQNEERLKVRMKIKGALHEIECSRIDSKKNLFVLVYLDGLRQRLVIENNRGLKKGQIFVDLKTINDMQILESAGMVLHPCIEMIIDADWKAPEEIPGLLSEEFGI

SEQ ID NO: 15799 - protein, 521 aa, synthetic construct
MSKNITVIPARRRVGNTVNKEVKPKLKVAAYCRVSTDSDEQATSYEAQVEHYTNFIQKNDEWEFAGIFADDGISGTNTKKREEFNRMIEECMAGHIDMIITKSISRFARNTLDCLKYIRQLKEKNIPVFFEKENINTMDSKGEVLLTIMASLAQQESESLSKNVKLGLQFRYQNGEVQVNHNRFMGYTKDDKGHLVIEPEEAEIVKRIYLEYLQGASLKQIGEGLQEDGILTAAGKERWRPETIKKILSNEKYIGDALLQKTYTVDVLTKKRVKNNGIVPQYYVENNHDPIIPRDLYMQVQEEMLRRANLHSGENRKKRVYSSKFALSSIVYCPKCGDIYRRIAWNNRGKHSIVWRCVSRVEHGPSCCDSPTVQETDLQNAVVKAINLALGGKNEMLVTLEDNIATVFALGDDGSIESINAKLEELQKELLKRANAKKDYNDLADEIDRLRELKQDAMVENAVREGLKQRMAEMKQFLAEQTDEIEEYDEALVRRMIEKITVHEDRFTVEFKSGTSINVER

SEQ ID NO: 15800 - protein, 520 aa, synthetic construct
MKRITKIEENKALLIRKKIRVAAYCRVSTASDEQLISLEAQKAHYEDYIKSNDEWEYAGLYYDEGVTGTKKDCRDGLLSLVEDCEKGLIDLVITKSISRFSRNTTDCLELVRKLLDLKVTVIFEKENLNTGTMESELMLSILSSLAESESVSISENSKWSVQKRFQNGTFIIGYPPYGYMNLNGEMVIVPEQAEVVKQIFADTLAGKSTHVIAKELNDRGIKSKKGGKWYPGTINAIIRNEKFTGDVIFQKTYTDSRFTRHTNYGECDRYLCEGHHEAIVSHEIFDKANEVLNQRGKEKGNGENTQRYQNRYGFSGRIKCGECGSVFKRRIHYKPSGDYIAWCCTHHIEDKTACSMKYITDDGIKAAFLTMMNKLIFAHQIVLKPLLHSLQGLDDKDRLLQLQDYEDRLEKNMEQRQVLTSLMASGLLEPALFNRENNMLIAQEQQLLEEKNSIMNSVSGDRTKVDALKKLIKAVSGRSMLTEYEDEFFLSHVETVTVLSRDEIVFVLKCGLKLKERLVA

SEQ ID NO: 15801 - protein, 521 aa, synthetic construct
MNTGFPVKKQVISYIRFSTGKQSKGSSEWRQDEKVKAWLDSHPEYEPSDLSFEDLGKSGWKGAHIEGGGGMGELLAAIEAGYIRSGDVVLIEALDRAGRLPLRQMLERVINPILDAGVSLVTVDDGVTYTGESSDDVHSHLLVAKIQAANQFSKRLSGRVSESYKKRREEAAEGKVPKRRTPLWLDGDGKLIGHLEPHIKAAFELYADGFGERRILRRLQETGIPEFQGLYGSTLKRWLQNKIAIGNWGEIVNVYPRVVEPELFYRVQERIAGNKKTRPSSPSRHELTGIVKCAHCGRNYNYHIFKEQPTVLQCSNRFMSTVEKCENSKSVPLGVIQYILFRTSKQARIEAIQKKKLTVNQKRIIVLEGEIANLSQRLQHVAKAIAAVGDDEPELVEQMKLLSVQRKEMRAELASIFATGDLASVMDQAAHTLVTNADPMQLGADLQTVGYTITCDKSGSITTSHGDCKRWEYVGYERKRDAYIVKGGEVTEAVPVAPFRETTGSVDIMVVMGWKLDLTKE

SEQ ID NO: 15802 - protein, 559 aa, synthetic construct
MPAAIPYIRFSSARQTTGSSAERQQQMVTQWLTQHSEYTLSDLTYKDLGKSGYHGDHIEEGGGFAMLLVAVKAGDIKAGDVVLVEAIDRAGRLHPLKMLNEVVTPILEAGVSIITLDDGVTYTFESAASGHLFLLVAKIQAAHNYSKQLSERTKASYAIRREQAKATGKVKRNTPIWLNSDGEPNETVVPYIKQVFELYVSGVGKNAIANRLRASGVEELATCSGPTVESWLRNQAVIGNWEYGKDDPNKTTEIIRGVYPRVVSDELFLLAQQRKKEAATKPRERTSKHFLVGLVKCAICNSNYIIHHKDGKPNNMRCGVHHRLKSAGCSNAETIPYQVVHSLFVSTAHLYIGKALQAIQLTENDKRKLALNAERGEVTASIERLVKLALKFDTPEIEAELEVTTQRRIAIDEELSVLERSNNAERRVGNSHFETQYKSAVEHDRMLRDDPIQLSALLRQAGYAITVHTEHKLFVSDDIEPWVYIGVKRKGNQTLGYRIKSGKEEWLISPTIPQPPIANATTDHSDQLSDHLKYIFQRSVPFEGYLQNQFEWTTKTETK

SEQ ID NO: 15803 - protein, 564 aa, synthetic construct
MKIAAIYARVSSDQQKGANTIASQTAALIEFAREQGFTVPDEWIIEDEGFSGASLLRPGLERLRDLAAEGQIQAVLIHSPDRLSRKYAYQVLLTEEFARHGVEAIFIKAPHSATPEDQLMLQFQGMIAEYERAQILERSRRGKRHRAKSGEISVLGGAPYGYRYIRKMPETPARYEIDAAEAAVVRLVFEKYTVDGLSIGAIARLLREMGPPTRRRVTRWERSVVWGMLRNPAYKGTACFNKTQVGPRQKVTKPFRLSGRSVHGEKTSAHERPREEWIEVPVPALVSEETFALAAERLADNKRFAPRRTIEPSLVQGLVSCRKCGYALYRASTRTSARKIHYYRCLGSDGWRHLGGSVCDSRPIRQDLLDHIVWQEVMRLIADPGLINAELDRRLDAARASEPTKKRQDAVERDLTRLSKSMDRLVTAYQEDLVSLDELRGRMPELRARKQGLKSELQAIFSQAADRMSFLRLAETLTAFLQRLRESAETLEISDRQRIVRLLVKEVLVDDDTITIRHSIPAQPTTPSASTQPPPSNGNATIPEQSYLLRSGRVIAAAGQHPAR

SEQ ID NO: 15804 - protein, 548 aa, synthetic construct
MTPAQAPATFQGSHVDTDGEPWLGYIRVSTWKEEKISPELQETALRAWAARTGRRLLEPLIIDLDATGRNFKRRIMGGIQRVEAGEARGIAVWKFSRFGRNNLGIAVNLARLEHAGGQLASATEDIDVRTAVGRFNRRILFDLAVFESDRAGEQWKETHQWRRAHGVPATGGRRLGYTWHPRRIPHPTLIGQWATQREWYEVEESARTHIERLYARKIGTDLRAPEGYGSLSAWLNSLGYRTGNGNPWRADSVRRYMLSGFAAGLLRIHDLECRCDYTANGGQCIRWTHIDGAHEAIITPETWERYVAHVAERRRMAPRVRNPTYPLTGLIRCGGCREGAAATSARRAAGQILGYAYACGQSRSGLCDSPVWVQRAIVEDELLLWISREVAAEVDAAPPTGIPQQRDDGTERTQAERARLEGEHTRLTNALTNLAVDRATNPEKYPDGIFEAAREQILQQKRAVSEALEAHTMVAALPQRSTLIPLAVGLLDEWDTFHPPETNGILRSLLRRVVITRGAAGRKGVRGSAQTKIEFHPAWEPDPWEGLE

SEQ ID NO: 15805 - protein, 619 aa, synthetic construct
MDAKEDNAMTQYNKITALYSRLSVGDEDRDGGESNSIVNQKAFLERYARQEKLTNIRHYIDDDESGRFFDRSAYVRMMDDVESGKIGIVVMKDMTRWGRDYLQVGNAMEIFRRNRVRFIAVNNGIDSEKPDTLEFAPFINIMSEWYAKDISKKVKTGIKTKGMSGKPIATEAPYGYMKDPDNKDYWIIDEEAAAVVRLIFSLFLEGKNRNQIAVYLENEEVLTPTFYLKYHDRGTSKSRNLNEENRYNWNKATLTRILTRQEYCGDVVNFKTAKHYRDKRNHYVDKNEWQIFENVHEPIIDRNTFENVQRILENAPVRRPNGDGEIHPLSGLLFCKDCGAKMHIRIDYRYSGKRHVAFCSEYRKGKSKNPKCHSPHNIDADLLLQTVADVLRKIADYSISNRADFEALVKKSLAIQQTDKVKKQQKRIPQITARLEQIDTVLNKLYEDIALGRIEQDRYEQMSQKYSEEYYTLKTELAEIKEQLSEFENADGRAQRFMKLTERYAAFTELTPAILNEFISKILVHERDVKRSKYAVHRIEVYFNHIGRFENELTAQLEPTEQECERMRAEIEEAKREKSRAYHRAYYKEYRKKNLERCREYERMKAREYRAKKKLQAAT

SEQ ID NO: 15806 - protein, 495 aa, synthetic construct
MKTAYLYVRVSTDEQKRKGYSLPEQEDRLLKYCKYNNIEVKGIYREDYSAKNFNRPEWKELFSEIKKKSSEDKNILFIKWDRFSRNVEYAYEMIGKLRKYKTTAMAIDQPIDFSVPESTVMLAVYLAVPEAENTRRAQNTSNGIRRAKLMGRYPNKAPIGFINVTLIDGKKAIVPKEPEAEIIKWAFSQAVQNHHKISEISKIANEKGLICSRSYFFRILRNPIYCGIISVKLNSNERQMIKGLHEPLISEALFDQVQSVINTKRKMTAKRDDLKEMFFLRGFLTCPVCGRKLTGSFSKGKQNRYPYYHCDNRCKIRIGAVLLNDSYQNKLQELILADNTMELFKNILENQNIKTQKANYLYAQQLVDRKIKEEKLTLSRGRKLFIAGILKIDDYNELKQESQINTKNLKKEERDITLNLRVIDKMNQMENKTFREIFQKFVEFDTSDKKHLVNLIPPIDIDYKTGDLSLEFKPAFSKILSKKSNRKNNRKNEFH

SEQ ID NO: 15807 - protein, 529 aa, synthetic construct
MKIADLYIRVSTDEQADKGYSQRDQHERLEKYCQQNEITIGQVIFEDHSAKNFNRPEWNNYIQNIKKRSLRSNLILFTKWDRFSRNAGDAYQMIKLLLSNNISPQAIEQPLDMSIPENKMMLAIYLAAPEVENDRRALNTFYGMRRAQKEGRLMGTASYGYINKCSEDGRKYIALKEPEASNMRWAFNEIAKGKYSINQIRLKMNTMAGTKISRTSFYRAIKNPLYCGKIYIKPYKDEDACTVDGKHESLISESLFNKVQMVLSGITTTERPKGKINAAKEFPLRGFLKCPRCGGHISGSGSKGKKSIYYYYHCNSTCGYRYRSNIINCAFEKELQKYEYHEGVNTLLKEIIFTNFKYIQEDIDAQKKEISSQIQSLNNRLNNAREKYLEDRLDYDDYQLIKNECKKKIDDLEISLQNHKLSNKNSDIKLKLDRVIKIVPNLYKLYVQGNDETKNTILCSILAEKLEFHENSFRTPKLNSALSHILLISNKLKDKKKGKSTFENAFSRKVTRLGFEPRTHTLKVYCSTS

SEQ ID NO: 15808 - protein, 551 aa, synthetic construct
MLNSDYLQSLGIDSIINYLRKSRQDLELERRTGEDTLKSQADLMERVLAPLGIPYEQKAEIGSGDKISTRPVFQGVIEDLKVAKYQAIAVKEISRMGRGSYTDMGIIYDLLCERRIYIITPWKVYDPKNPADLRQIRFELFMSREEFEMTRERLTGGRFNKALTGQWMAGKSPFGYSLNSTTKKLEINEEEAKTVRIVFDLFINGIQSKNGTVRDVRSRAIATHLRKIGIPSPQGKVNWRPEGIDYMLQNEVYIGVLKYRSTMTIEGRAVERPEDERVVIQDAHDSIIDPETWKQAQDKLQNKRIIHVPRVKSEFIPYELSGLTICKVCGKRMVRQYSNRPYTKKNGEISYHEKELLWCSTAGCTFVKYRPIVEDLIEVLRYFKDIDDNDNVIEEKLKAITAQKNLPPKETEEDITQHIERRKKELKHRLKFALSKHASGVYDDELFLEQKNEIDAELERLNTLSQQREQQQEDEREETIDIHLVKQNMTTILDLYNACTDRGEKNTLLRKVFDHVVIERLEKGRGSSPSKHIIYPVLKYNFIRSDFWHNQ

SEQ ID NO: 15809 - protein, 520 aa, synthetic construct
MRAAIYVRVSTTKDSQKDSPEHQIAACKYFAEDMGWETAEDMIYEDRESGTNITDRLAIQQALKDAHQGAFQVIIFAALSRFARDIGDSINLKRKLVNALRIRLISIDDHYDSDRDDEMLFSIISSINQSLSEQISRSTRRGKRESALKGNFTGNRPPYGYDKETRNGLKTLVPNENQKMVVETIFQLYTANHFGEKSIAAYLNDQGIPSPKDGKWGITTIQRILQNEAYVGKNRSSKFEIRKVYTNVDDMTERKKVLVQKPKREWRYAHNSWTHQGIIDEATFRLAENLRLQRGGGQRGGPRQKVNVFAGMMKCAHCGSSMVSMKSTRRIREQSRRDYRYLICSRRRRQGESGCCNNYWLPYDPFHEDLIQCISQILRSTFSPEELLEKHKRLVQVTHTDLESEMKKRKKWIIENRKCLMELRKERLKGHVLDEHQYELEKSHYEREIVQHESRLIQLQQEWQRKTDMTDLYEKTMERLNDLLNVSFETFDDSQLTLKKLISRIEADRQGNVHVFMTFD

SEQ ID NO: 15810 - protein, 563 aa, synthetic construct
MKAAIYARVSTGMQVEGTSLDVQIQLCLKKADELGFNPDKVIIYREEGASGEDLERAALNNLRAEIATGGISHIIVTHPDRLSRDLTDKLLICKEFDVNSVNLVFVDAEYKTTPEGMLFFNLMSVIAQYELQLIKKRTVRGRLRAVEKDKKIMPMRVPPFGYDLINQQLVINEVEAEVVRDIYEWYVVEHLTLRQIGEKLVQMGIEPKRCESKNWSASSILNILSSEVYTGRFYYNRRKTKKIKGEKTKGGSPKKKYEYRDPEDWIIVEVSPIIDSVLYQLAREQKIKNRKLSGNTKYEYLLKSKLKCGLCGRTWDCTTYSGKLNKKTGIKSKYTCYRCPNHIPRRYGESVERCPSKTIRTELLDNYIWSLLMDVLSNPQDYIDQLLETSRCVVKELLHAKDLLQKGLLQKEKEIEKVKILFKHEVIHEEEMLNEFKRIQKEREEVNAEIKKYDIQIMKFNEEELFNENMSVVIRKVQEFIDSGGKQLDYDQRKYILDTLVDEIIVRYKEEEVMLTIVGHIGALSGMDGVTLQKSFQLIRTGPRNEKKIVEMLHDNSKMLRME

SEQ ID NO: 15811 - protein, 476 aa, synthetic construct
MTVALYIRVSTDEQAEQGFSLESQKEKLILYCKSQGWEDYKLYIDDGYTGTNINRPAMKRLLRHIEEKKITSVLVYKLDRLSRKQKDILELIEDHFEKNNVSFNSHQEKIDTSTPFGKAMLGVLAVFAQLDRDMIIERLTAGRRQRVNEGKWYGGRIPFGYSWDKETQQLLVVPEEARIVKEIFNMYLNGHSCLSISEWASARVNNRAMYHNIIRDMIARPVYKGKFHNAGKIVDGIHEEIIDEETWEAAQIESKKRKDGITPLGDFLLTGLLRCGGCGGNIVHVKRYTQNNNKTYFYEFYVCAAQHVRKKDAKTLNCKLGYAHRSNVEKYVTDQIQSIGIYPEKFKEIFLAVTDVNENSNELLLSQLQDQLQKISSNLENLYDAIQNGDIKASAVSDRIRHLEEQREVIENDIDDIIEEIPSKHDEQSAYDLVKQIGEAWEFFSDEEKKMAIRKIIKSVILYGKNGTPQIEWNLY

SEQ ID NO: 15812 - protein, 559 aa, synthetic construct
MKKQLKCYIYTRVSTSMQVDGYSLDAQKDKLHKYADYQDMIIAGEYSDEGKSGKSVEGRPQFQQMLQDIETGKDNIDFVLVFKLSRFGRNAADVLSSLQRMQDFGVNLICVEDGIDSSKDAGKLMISVLSAVAEIERENILVQTMEGRRQKAREGKWNGGFAPYGYQLINGELHIAEDEAEVIRIIYDKYANTTMGIAAIATFLNNSGYKKKLRQNNTIEGFSTSFVKGVLDNPVYCGKLAFGRRKNEKIPGTRNEYHVVKQNNYMLNDGIHEAIVSEELWNQVHKKRQETGVANIKTHSLDHEHILSGIIKCPICGSGMYGNVNRKKHPDGGHYRDYFYYACKHRTFVNGHKCTYRKQWSEDKINAAVEEVIRKLVNNPKFKTEIQKHIGNSIDTEELDREHTGLQERLKQVTGAKNKLANQMDNLSVSDKHYDKKYEDMQVRLDKLYGEIEEIETSIEAIETRLYNIKQEKISGENVYQFLLFFDKLYDRFADMEKKTFMKSFLEEVNIYEAEQEDGRILRSLKFRFPVFFNDQELYELDWDNESTVETVCLLSKKP

SEQ ID NO: 15813 - protein, 524 aa, synthetic construct
MAKTITRIPASVNRYTAKPIAEKTKRRVAGYARVSTEHEEQATSYEAQMDYYTNYITSRDDWIFVGMYSDEGITATNTKRREGFNQMIEDALAGKIDLIITKSVSRFARNTVDSLTTVRELKEKGVEIYFEKENIWTLDAKGELLITIMSSLAQEESRSISENTTWGKRKMFADGRASIGFKHFLGYDRGPDGEFIINEEQAVTVRYIYKRYLEGYSTYKIACELTEMGVKTPAGKDKWHPSSVMSILQNEKYKGDALLQKTFTKDFLTHKLVVNNGEVPQYYVEGHHEGIVTADQFDQVQAEILRRKGMQKYSGVGLFSSIIRCGECGSWYGAKVWHSNDKYRKVIYRCNNKYADGCKCKTPHINEDELKKLFIKAANELFSEREEILANTKVMMEMVCETDSLDRDLQDSITELNIISEQMQIAIAENSRVALDQDEYEKRYAELTARYEKAKAKYDDIAEQIESKKAKRELFKGFIRTLEKQDGLMEDFDAGIWSSLVQEVIVKTKDDIRFIFKNGFEVRV

SEQ ID NO: 15814 - protein, 423 aa, synthetic construct
MKDCDAGKIDLVLVKSISRFARDTVDTLNATRHLKDLGIDVFFEREGIHSMSGEGELLLTLLASFAQAEAESISANEKWSVQKRFERGEPNTGILCFGYDWNPETKSLTINEEEGKWVKYIYEQYLAGASIKGLTLDLKEKGVRGKRGDLMGRTTLRRILSTETYVGDLLLQRYFSPEIHKPKLNEGEMEQILVSNAHEPLVSREDYAKVQERLNRRAKAADNHGYEKTFFAGLVKCGKCGYACNHVLYHRQPADKAYIECNKRKTKECDLLPIRELELKGIMEQIAGCRENVERITLFDGHIDFLMKDGTVKSHIRKYSGDGFNKTPFSRKIFCGYCGSSIVRMGGNKRRTCWMCSVKKTDKAGCEHELMSDGELYGAAQSILGTEENLDMEIYLHIEKTISYNDRIEFYMKEGGKKVWQRR

SEQ ID NO: 15815 - protein, 542 aa, synthetic construct
MITEKIPVCAYCRVSTEHESQLNSLDNQTYYFEEKTEKSGKYELYRIYADQGLSATSWKKREYFKEMLADAGLDIEIHRKEIKAYVSNREPRFRRILIKDVSRFSRNASEGLELVTKLREKNVHIDFVSLGLSTEQMTNDMIIGFFLLAAENESKDRSQKVLWGKKMGAEKGVIHTTDNFYGYKYIKDTNTLEIIEEEATNIRLIFDLYVNHNYGFRKIIKHLNDNNIFTRRGKSFVPQSIKRILENVAYTGDLVRNKMDSPKVFTSKSYATYKPKSEWLITKDRIPQIIEPELLAKSIEIRRSKLHYKQRVGIYNGLSEYSGLIVCGSCGCNYTKNREARTGYDFYNCRTKKYKGRKYCQNINVSLKQIEETIRVLADGKFYDAILKDKNKNIEKIEDEITEIKKRMNQQSVKEVENLREELKLLNEENNRLAVLFVKGNIDEDYLNTLQREIDEKVSKLIIEIKEKSMDNNQLEEEILRLKNTVTDLSNLEIKDKYTVHEIKDQISNIRVHRDKDNNKKAHLEIRFKVFENIAGIMHDFQ

SEQ ID NO: 15816 - protein, 505 aa, synthetic construct
MVAKADGTAIGVMRAAIYIRVSTDMQAEEGFSIEGQRSRLTSFSESQDWSIYDFYVDDGYSAKDLKRPDMQRMLADMEERKFDVVLVYKLDRLTRSVADLHALLKTFDLHGVKFKSSTEIFETTTAMGRFFITLVGAMAEWERGTISERVRFGVEQMVAEGRRPGGVLPYGYTQQGQLIPEEAELIREVRDMYLSGMGYKTIAMKLNRSDKQRRGHDWTDGTVGYTLENPFYAGIIRLGSKTAAGTYVNSKRDERVKCIYGKGSHEAIFTQEEYDEIKAFMARKAKGGYSRINTYWFSGVLRCGRCGAAMFGRLTTKRTTTKGDVRTQYYICSNRHHIKTCDLPIFRQIHVEHLVLQYIERLQVDMERLKEEAQRITEDEGKKKTEIDKEKRELAKISERREKWQYMFVEGLISKEDIRKKIAEEDLKERAVRQRIADNQKSLSGIPRLTELAGLADAWPYLDDQEKKDLVYTLFSQIVINTDLKQVKGVKNKFFDAYIQDITFN

SEQ ID NO: 15817 - protein, 495 aa, synthetic construct
MLAYGYCRYSSNLQDEKSIEQQKNELEEYAKKNNISIIKYYIDEAKSGTKDTRDSFQNMISDACKSKEIQAVLVWKTDRFARKAIDSLYYRNKLEKVGIKLISITQPIDTETPEGKLMSTMLAGVDEYYSQNLASNVKRALKLNAQNAQFNGGIAPLGYDIVNKKYVINEREASSVRFIYDLYIEGYSLIEIALKLNSMGFKTKKNKPFSKTSIYDIIGNEKYIGKYIFNKGTKSNHDGIRADAIILEDAIPQIISKEVFEKAMNKRTKRKNAENTAKNFYLLSGLIKCECGGSYVGTTIKKQKNGNTYVSGYYRCSNHNKLGKCQMPSLKQELIENKVIKMLTEELLNAETRENIVKAVNAQYIEAQKDCKNDVEILKENLSSINQEINNIVNAVAKGYATDSLLKRLEEIENTKKNIEDEINFKDNIATHNYITSEKIEEVLKKDLSELKDKSKEKLKILVQKYIKKIEVKTTEVLIYLDFGESSPKKLVAKM

SEQ ID NO: 15818 - protein, 477 aa, synthetic construct
MRCAIYARVSTEEQAVEGYSISAQKKKLKAYCDAQDWDVVGYYVDEGISAKNTNRPELKRMIEHIEKGLIDCVLVHRLDRLTRSVLDLYTLLDVFEEYDCKFKSATEVYDTTTAIGRLFITIIAALAQWERENIGERVRVGQQEKVRQGKYTSPRKPYGYNADHKEGILTIIEEEAKVVRSIYNDYLKGHSATRISKRLNATKTAGRDYWNEKAVMYILENPLYIGTLRWRKETEHYFEVPNSVPAIIEEEMFNSVQILRESRQESHPRSQYGSYIFSGILKCPRCGRSLVGNYVVSKKKDGTKIKYKHYYCKGRKLNVCTMGNMSERKLEQAIIPHILSFYIDATDEDVKLENSNTENEIEQIKSELKIIEKRRKKWQYAWANDHLKDEEFTEFMQEENENEKVLTEELYKLKPAENKKLQNEELKNILKDIKLNWANLNDEEKKIFMQIILKKLVIERSDKLHAYKLEIVEMEFN

SEQ ID NO: 15819 - protein, 522 aa, synthetic construct
MKLSHILQPNMKAAFYGRHSTDKQDMDMQLNSVMEVIRKYDCIHTHSFLDKAVSARKNKITSRKELENMFEAAKRKEFDYVIVYKSDRLARDPLEHQTIRIVMKTLDIPIIISSTESVYNTDTDLIVQLMEDGFTKYEVDTIIARTRSGLENKAKQGKWLGGKPPFGYTYDKDSEQFIEHTEELCYVKEIFNLYVNGHGFQYIANTLPNGSRRGKDWGKENVKAIVLNPFYCGLLSWRRQTDGKQNARDIWIEAPNHYVKPIISRTTWESCWRIYSEKRNGNMVPKHYKTSFLLQGLLSCEKCQELMKTKNQQTVSSTNKRYGGKIYFCSNCKLRIDADFLHDKVVNQTLTDVKISGFHNVYHAIEQKIKYEIQELNNNIQKHQRLFENYTIKLHNITEELKQRMKNSDDKRFLKSLAIYRLDVQRKLDGVTQQINDFKQQITLKEKIEKSKETWLHTLNEVFQDDVKLQEISDMDKRRFLLPLIQSVSIKENKKHNEYDISLQLRTDFSKRNVKNQISLIL

SEQ ID NO: 15820 - protein, 515 aa, synthetic construct
MYRPQELDVFIYLRKSRKDLEEEKKAMEHGQHYDTLERHRTQLLELAHKEHHNIIDIFEEVVSGEFISERPMMQKLLREVETGIADAVLVMDLDRLGRGDMVDQGTIYRVFRYSETFIITPTEVINPNDENQELTFSIKSLIAREELKTIVKRMQRGRKVSAKEGKSISRVPPYGYLRDNTLKLYPDPEKSWVVSKIFESMAGGMGRQAISQELDRLSISPPEGAYWNPSTISSIIKNEVYLGHIIWGKIRHTKQNGRYIRKKVPKERWQRHNHAHPPLISEELFQKANTAHSKRWRPPTIKTKKLSNPLAGILLCEICGYSMLYQPRKDRPNPQVRCIQPSCKGVQKGASLTLVEQRILDGLKQIIESFEIQENMVQKKKSSNNIHLQQKALEKKEQQINDLQKQKSNLHDFLEKGVYDVDTFLERQKSIAVRLKTTQEAMEELKHEIKKILEKEKHIHEFVPRIKNVLEAYYATNDIEKKNHLLKSVLEKVTYLRKKEWKKKDEFVVELYTKI

SEQ ID NO: 15821 - protein, 480 aa, synthetic construct
MRTALYVRVSTQEQANEGYSVGEQEERLKAYCTAKGWTVYKVYTDGGFSGANTERPALKQMLIDIKNKKVNAVVVYKLDRLSRSQKDTLLLIEDEFLKNNVEFVSMSENFDTSTPFGRAMIGILSVFAQLEREQIRERMQMGLDARAREGFWHGGGYDPIGYDYIDGYLQINEYEAMQVKKVHELFQKGLPIARIQKMMREKYTTKHGSWVNHSTVRNALTQPIYTGKIEWKGELYEGKHEAIIDEDTFNKSVKRYNEISWNKGDGKNKKRPFQAKHVLTGLVYCNHCGARYFAKGNYSGRGENRKYRPYYTCYSRAKSAKNMIIDPNCKNKSYATVDLDRIIFDEINKLAFDPTLIKEIESDKPEKENSNAAIETRIKEIDKQVERLLDLYQMGTSSVDDVLTRMDKLNSEKQALTDELEVTESDDTPNLSQDEAEKLLVEASEILESDDLIKKRELVHSLIDSIEIDGEDIIINWAFV

SEQ ID NO: 15822 - protein, 455 aa, synthetic construct
MDIIRAALYIRVSTEEQAREGYSVEAQRDNLKRYAKNKGYSVVGVYADEGITARKKYTNRKELMRMLDDVEAGKIDIILFIKLDRWFRSVGDYYKIQEILDRNKVDWVTTTEHYDTTTANGRLYINIRLAVAQDESDRTSERIKFVFDKKVMDGEAIWGNAPFGYKIVNKKLEKDEKEEVFVNECFEKYKIFRSVNALTNYMNQKYNKKMSYSTYRNIVKINLDYYKGIYKNNKNFFPPYITEEDYQEIQAINKASRNRYGGKTYNYIFVGLLRCANCGLIMGSAGHSLNPKNGYIYRYYKCRRSSFSICGNKLRMEERKIENYLLDHLEDEIRKYKVTYEIEKEQPTKRPVTTKHNIEKKINRLRKIYLAEVIELEDYKKEYLELQKQLEAVEKEIANAVKFEEKDFTELDKLLRSDFKEMYDKLDNLEKRALWQSVIKAIYVKDAKIVKIEFK

SEQ ID NO: 15823 - protein, 611 aa, synthetic construct
MKVHVEKDVGIGTKAVIYCRVSDTKQTTRGDGLNSQETRCREFAKYKGYNVVAVFKDDMSGKFSMRPGMKETLSFLRQHRKTPHVLIIDDITRLARGLEAHLKLRSDISAAGGILESPSIEFGEDSDSILVENLLASVSQHQRQKNGEQTKNRMRARLQNGYWPFQAPIGYRYERSSAGHGKMLVRDEPNASILQEALEGYACGRFQTQVEVKRFLERQPAFPKDLNGKEIRNQRVYEMLTRCLYAGYVEHADWGISVRKGQHEGLISYETHLKIQERLTSTAKAPARKDISLDFPLRGFIQCDDCGEALTACWSTSKTGKKHPYYLCKTKGCDSYRKSIKRDQIEGDFEELLQRLEPSKGLFHLAKAMFKDIWNARLAQASDTSKVLKRDIHKIEKQIESLLDRIVEASTGSVIAAYEKRIAKLESEKVLLEERIATGGKPANTLEESFELALRFLSSPWNIWKNGRIEWQKTVLRLAFSEPVRYSRNQGVRTPTFSFPFKVLEEISTAESEMAHLRGFEPLASAFGGQRSIQLSYRCQCGFVYGGAGASSSDFARPRAAFITAPDSDAGRPSAPRSHCPPSPSSVTARAERWRSARHPGAFRFPTAHAG

SEQ ID NO: 15824 - protein, 524 aa, synthetic construct
MMNSKVIVIPAKKKKGNSIKESEKKKLRVAAYARVSTDSDEQATSYDTQIDHYTNYIKRNPDWEFAGVFSDEGISGTYTKKRAGFNKMIEEAMEGNIDYIITKSISRFARNTLDCLKYIRKLKENNIPVYFEKENINTMDAKGEVLLTIMASLAQQESQSLSQNVKLGFQYRFQQGQVQVNHNRFLGYTKDEDGKLVIVPEEAKIIKRIYREYLEGASLRDIKVGLEKDKIVNGAGNKKWHVSNLNQILTNEKYMGDALLQKTYTVDFLNKKRVKNDGIAPQYYVENSHEAIIPKEIFMRVGEEMYRRSNMVSGKGKRRIYSSKYALSSIVYCSECGDIYRRIAWNNRGKKYTVWRCCTRVTHGPDACHARTIKEDDLQEAVVKAINQLISESNELKEIIKENIEKAITGDGSGQIEEIDKEMLKVQEELLKVANAKKDYTDLVERVEELRNEKEKILLEMAEEKNEQSRLKELEEFLDNQELEIESYDEELVRKLIDKIVIYEENLKVVFKSGLEVEIDKDKK

SEQ ID NO: 15825 - protein, 521 aa, synthetic construct
MLKKITKIEANQKEESTLRVAAYVRVSTDEEAQLVSLKTQKTHYEKLISENKSYTFAGLYFDEGITGTKKECRDGLLKMLKDCENGKIDFILTKSISRLARNTTDCLEIVRRLLDLNIGIYFEKENIDTRTMESELMLSILSSLAESESRSISENNKWSIKKRFQNGTFIISSPPYGYENIDGKMVVNDEEGKIIKEIFEQYLSGKGTHKIAEDLNKRNIKGQKGASWHGSTINGILKNEKYTGDVIYQKTYTDENYNRHKNKGEEDQYKIIDNHEAIVSREEFEKVQDLIKIRAIAKGNGKNTKKYQNRYNLSGKIKCGECGSTFKRRHHYNGKDKYIAWTCSEHLRDINKCSMKFIKDKDIKLAFVTLVNKLIFGKDSIFTPLLESLKRVDSKGEVEKIEKIEESLEKLKERKEVLSKLITSGVLDASIYAKESSEISSEESYLLREKERSKKVILGNDEEIRELEKLIGILGKSEMIDRFEDDLFEEIIAHIQVVNRVTLDFHLKCGLVLREEVKEDV

SEQ ID NO: 15826 - protein, 548 aa, synthetic construct
MIQTNSNHFSFKAAIYCRLSKDDEQKGESASIQNQKELLENYVKSKGWSIYDVYIDDGYTGLNTNRPSFQRLIRDIENKKVDIVITKDLSRLGRNYLQTGYYTENFFPKNNVRYIALNDGVDTFQENNEIVPFKNVLNEFYSRDVSKKMKSAYMTRARQGKFIGCLAPIGYRKDDDDPHKLVIDDETSWIVEKIFDLAFSGYGVQAIRRRLFEEKIPTPTWWNRKKGLRNKKTKLEMTVDGGEYWWDCTTLKEIIENPVYIGHIASQKVNYKFKVGWLSDKPKEEWIIVENTHEPIISEDIYNIANEKLKSRRRPFKNGEESIFAGIVKCPDCGKSLNLGRNKSKKREKLLTCNTYRRYGKSLCSQHRIYYDTLYEIVLKDIRKNAEIALKDEKEIIKALEKSREIDNEEEQKFIMDKIYEDQIRVEDLTKKIERLYDDWLDNKISESNFQKILEKSQNEQDYLNQRIEDNQKLIVKEDLEDINVKKWIELIKKHRDIKKLDKETLNELISKIYVHEKEVVNGEITQTIDIYYNFIGNTDTLQVFYNL

SEQ ID NO: 15827 - protein, 617 aa, synthetic construct
MRNFEKITALYERLSRDDELEGESNSIVNQKKILEEYASKNNLTNIIHFTDDGISGTQFDRPGFMEMMNGVNTGNIGCIIVKDMSRLGRDYLKVGQCMEILRQKGVRLIAINDNVDSFYREDDFTPFRNIMNEWYARDTSRKIQSTFRSKGESGKHTASTPPYGYIKDEKDKDKWVVDEKAAEIVRRIFNLTMDGAGPYKIAKILEADKIDIPAYHQKKLGYGLHQSKNFEYPYRWCSSTIASILKKKEYLGHTVNFKTRKHFKDKKSKYVSEDNWLIFENTHEAIIDQETFDNVQRIRGNVKRYPDGWGEYHPLTGLMYCADCGSKMYVHRTNNYKNIPYYVCSNYKKVPCGTLCPSAHRIKAEVVLNLIQETLKDIKNYLDEDNEAFIHSIQNEMEEKEKAHIEKKKIRLTESQNRLQELERLMCRIYEDMILNKIPNNRYEILNNQYETEQLTLSKEIKDLELVISRYEKETDKARKFISLISRYENFDNLTNTMINEFVKKIIIHERDRKGSQTSKQKIEIYFNFIGNYEVPKEELSEEERSKLEEEERKINERRDRLHQNYLKRKANGKQQEYEERYKERREQKKQEKLKVLKRAGILMKDYKNKESFKESV

SEQ ID NO: 15828 - protein, 514 aa, synthetic construct
MRIGIYPRKSVYRDNSDSVSVQVKMCKDYASILYRDEHLDFYVYDKDEGYSGKNTNRPSFKELMRDVKSGKLDIVMVYKLDRISRNVQEFATMYETMQQHDVSFISVKETFDTSTPIGRTVMYILAAFAQLERENTSERVADSMRSLGVTGRWTGGKLPTGMASTRKKVDGKEHSYLVVDNNKIGLVKMLGQMILSGYSITSLERYCRDNNITSQSGKYLNTSQIHGILTNPVYCQNDLQAYYYFQDKGCTLPDERCFDGTKGLIAYGRTKGTAQKRILTSENWIISIGIHDWVFSSDDFIAIQKRIGQNKQIRKQKHEVGILKGVLRCKCGRLMHNRVYIKNGKMFAYYYCQERDRKGLQYCDAEFVKIDVIDDMFFDKLREIRLNPEYVYLATSNGTADTDGLKKEIRAVERSLENLATQLQENISSTASKYIISQMETLDRKLDSLNRELHSEEVRKANEKTEEEERKEVFNNICFLLDNLDMLSYKEQNELVRKIVKRCVLDGKNLSISF

SEQ ID NO: 15829 - protein, 504 aa, synthetic construct
MLQPRDLKGRLAISYARWSSGKQASGDSLARQTKNAEEFCASFGLTLDRQLVDDGVSAFKGANLEASLGKFVGDVKSGKIPSGVILIVENIDRITRVKPTRAIRYFLDLLDTGLTLVTLTDQRVHTSEGYDDNFANLMMSLMAMQAAHEYSAKLSYRVSEAWGRKPEKARAAVASGGRIKVAKLPFWIDRDTNGLNERADDARLIFELAKEGHGQQAIAQILNTRGIPSPAGNTWSQVVVGDVLRSPAAYGCLVLKGEEVPGYFPSLISETEWLATRQRTKARLHSRQVGRTSNLFSRMVHCGHCGSPVVLTSSKKGGVSWGYYICTGKTFKRTGCTAPNWRYDHFERELIDRIGFLAVPIPQDHTAPNLSDKLEEDIRALEFKQSNILAGIADAETADVRKVLLGQADAMTRQIEAKRKEIVAIRENDARYRESAAAVVDFDKDQEEIRRLALEDRKGAQGLISNLVQRIDLESDSKTLRRAVVTMRSGYSQALIFDSTGEPG

SEQ ID NO: 15830 - protein, 464 aa, synthetic construct
MKSKTLRCAIYIRVSTTEQMMHGKSLEAQKDYLIHYAKEHDMNIVGIYADEGKTARKELKRRKAIQELVKAVERDEIDVILFWRLDRWFRNLSDFYKVQDILDQHNVRWISASEPGINMETRDGRLQLNVVLSIGQNEVDTTSERIKFVNEASIRQGKVIFGDSNMPIGYIVGTVDGVKRMVKDPEKEDLVNAFYRYFRTHQSKMKTLKFIQENYDPTFSYSQLRNMLESDFYHGTYRDNPHYCPAYLTEKEWAEIQEISNRNVKHPASGRVYLFSGMMRCPVCGQLLAGRGGSSIINRKTRETRTYCYYRCNKACIDHMCTYRHNVSQNLIEEYLISNLEEEYNRYKIQSQNIHSKADLPKKKRTPAQVKKEMQRLNLLFQKERIEWDYYNEEYEKLTTELSSLEESDQQPKTNFDNIEKILHNDFRKTYDNLSPENRRAFWRSIIKEIHINTSHEVTGIDFY

SEQ ID NO: 15831 - protein, 566 aa, synthetic construct
MSRTRRAVLYCRISRTTEESVSLQNQERELRRYAAEKGWDVVEPPIIDDGLSGTKERSNARRALDALSNGTADTLLTRSFDRWSRMGFRAVADLQDVLDATPGSLFVAATDGLRSDGQEWTMFVGFMATIGAAEAENTRKRVRAARAFHLSQTAPESQRFLGARAPFGYRAIKSPHGPGKVLIPDEYEAPIAREVADMLIAGATLADATKWLAENRVPTPQSEARRRRQNGIDLDAPDFDEPDTIKSGKGREQAFRGAWRATTVRNLWRSETLIGRTTRAEPILGPNGDPVLDEKNKPKMRDDVVRDASGLPITRWEPVLDADTFTRLQSRFKAPGREQPRRMVSWLTGVLYCQECGRRLYAHRRDRDDRDASYFRCAGVSDVLAPCPAPARVSFSRVEEYVESLFLGLAGDWPELERREFLESADVAQRLADVERALDDITAALRRDGADYPVLLANMDALKKQRLELQATPSTMRVETVPTGRSLRDIWDDTADDLRARRIVLSDVVERIYVARADSPGKPTPLDGEHVRIQWDSERVPTHDLDLLDESTLATPGAPSRLRIKL

SEQ ID NO: 15832 - protein, 513 aa, synthetic construct
MKRITKIEAAKDSGRRKLRVAAYARVSTDSSEQLISLETQKNHYERYIKARPDWEYAGLYYDEGVTGTSMARREGLHRMLNDCDRGLIDYIIVKSISRFSRNTVDSIETVRKLCEKGIYIFFEKENIDTGKMEGELLLSILSSLAESESHSIAENNKWSIQKRFQNGTFKIGYPPYGYDNVDGQMVVNEEQAKTVRWIFDAILSGKSPGTVARELNKRGTVTKRGGRWTGHTINGMVKNEKYTGDLILQKTYTDDRFSRHINRGEKNRYYVRDHHKPIVSHEDFEAANAIIEANGLEKGIRKDEDKYKNRYAMSGRIICGECGGTWKRVKLNNHFGFACNTHVRDKNTCGMKSIPEEPVKAAFVTMMNKVTWGRSRILLPFAEMLKEDQKAGFLDRLNELEALLEKNEERRQQIHQFFTKGLLDPAVYAEERDALTEEAERLAAEQDALESKVSGSHEQQEALTRLLKYTARGMMLTGYEEALFTEHVDHIVIYERTEVGFAMKCGPIFRERI

SEQ ID NO: 15833 - protein, 523 aa, synthetic construct
MALAQNITVIPARRTIGTQKPAEKVQKTRVAAYCRVSTEFEEQESSYEVQVEHYTAYIKSNLEWELVEVYADDGISATNTAKREAFNRMIQDCRDGKIDLILTKSISRFSRNTVDCLKYTRELKGMNIAVFFEKENINTLDAKGEVLMTIMAALAQQESESLSANVRLGIQFRNQQGKVQVNHNRFLGYTKDEDGKLIIVPEEAGIVRRIYAEYMDGRSFLQIKRSLEADGILNGAGNAKWHESNIKQILTNEKYIGDALLQKTYTVNTLEKKRVANNGLAPKYYVEGSHEAIIDKDIFLRVQAEIVRRANILTDGKKRVYSSRYALSSIVFCGHCGDIFRRVKWNNRGCKSTVWRCVSRVLKKSSGIDCPARTIREEELHAAVVTAINDAWSQKNNILPALQQNIREVLESDTEERLAAVDAAIREKQVELLDAGKDQGRIDEIGDAIISLREQRQAILTEAAKNTELKERVDDLASFLDEQTEILTEYSETLVRRLIEKITVCDEKLIVEFKSGLEIDVET

SEQ ID NO: 15834 - protein, 628 aa, synthetic construct
MRKNEKITALYERLSRDDFGKDDDQQRESNSISNQKAMLEEFAARQGFTNIVHFTDDGISGTCFDRPGFLAMMKEVEAGNVEYLCIKDMSRMGRDYLKVGQIMEILRQRGVRLIAINDGVDSARGDDDFTPFRNIMNEYYARDTSRKIRSTFQSKGKSGKHLTGTVIYGYLWNEARDQWLVDPEAAEVVKRIFSMTIDGYGPYQIASKLKSEKVLIPSAYLAQHGEGVNKNKTFKDVYGWGSSTICNILEKREYLGHTINFKTRKHFKDKKSHYVPEDEWTIFENTHEPIIDQQTFDLVQKIRGNVRRYPDGWGEAAPLTGLLYCADCGGKMYVHRTNNGKRISQYTCSQYTKVPCGTLCKTQHRINEDVVLSLVSEMLKAIAEYAKHDRAEFVRVVQEAQSSQQTTEVRKQRTRLATAKQRVSELEVLLCKIYEDNILGKLSDSRYATLDAQYEKEQSELTAEISVLEKAVKSYEKHEKDADRFIALIDKYENFDKLTIAMLNEFIEKILVHERDRKGSIQTTQEVEIYFNFVGRFVPPAFGEVELTPEELEEIRKREERKDRLHQNYLKRKASGAQKRYEDKIKKRKKAEIEAKKAAIRAEDIAKGVFVPVSSLPQREPMKGVQTA

SEQ ID NO: 15835 - protein, 523 aa, synthetic construct
MTTCVIYARVSTAKQAEKELPVQSQIDKCLAHAESLGADVKKVFTDEGISGATDNRPAFQQAISYCENFDVDYFICWSTSRFARNALEAKLNKRRLANSSTKISYVSQNIDKGDSGFIYEGILELFDEYYSRQVSQDTKRSMIANAQKGYFNGGYLTFGYQVEKVLGEKNKTRLIPNPMEVGTVNRIFELKLSGYGGKQIAELLNAEGRLNRGKKWNKTSILGLLRNERVVGRIAFGKKGREGSLPRSEWIVVDSHEPIVCYELFDAVQKTMDSQTQKAVKEGGSPKSTRFFTGLLKCGKCGKSMKIEKAKGATKTYYYYNCSTKQAGLGCEDRRINSAIFDPWMTDVICSEVLTERNLKDLLLQLNDLCGSWAQKKRDRCNEIIQQIKEYERKNSRLYELLEDDSGIYNLQDLAPRLRSNNETIRKLNTELAVAETEKPPQLEISETDLSDLSELLLDIIKTSSNPGKVREFFKTFIHSIVLQDNEIKVKYRPEALISVNSEIVPSEVKWLPLPDSNGGPAD

SEQ ID NO: 15836 - protein, 558 aa, synthetic construct
MASIQAITKHHDVELLPENIFSDTGVSAHDGSNKKKGKLKDLIDMINDVHIKPGDYIFVESIDRLSRQRLLQAKELVNSILEKGVILITTIDGQRYEKPNETNRIDDLQQDILLSVIAKRAHEESKTKSVRRKSAWNRAKKLADDEKAIFNGHNPPYGISYNKEENRFEIVEEEAQEIRDIFESLKFVGVSLTIRKINAYSKRKWTNKNIHLLFQTKYVLGSYMAQRRDENKNKVFERFIEGYYPQIVSYELFNEALEAMKLRAHRKHYGNQTVGSLNIFRHSIKCDCCNASMLFEKQTNPKGVCYGYFHCFTRKELKTNCNQPRFRFDLAYGLFLELVYQATTKEDFDVHPWQTLELEEEKQDREHYIKNGVRYSFATQHDVEIEEKIESFRELLISLLSNKKRQASDNKKLVELRNALLEQKSYKDNLLKSFAGFTNGVIPQEFLAVVSSTEFKINDIEGELSKLQAEMNTRKTSINIYSENDIIDLYNTEEGRLKINQFFITNDIVFKFNFEKETRTLYCKIHYQGIMIDKIAKQFSLHNPLSEFGIKNLNEYFN

SEQ ID NO: 15837 - protein, 536 aa, synthetic construct
MPSAISYIRFSSSKQSDGNSHQRQMEAAQRWLVNNPSYTASTMNFEDLGVSGFHGDHIKDGGGWAKLLLAVDAGHIKAGDVVLVEAMDRTGRLPALQMIEIIRPVLQAGIAIITLDDNNRFDEDSLNGPQIFLLVAKIQAAHGYSKILSERTKESYQIRKERARKGEPVKRGVPIWLTSDGKLKEHIAPHIKEVFDLYISGIGKNTIANRLRASGVPEFKTCSGPTVGSWLQNTTTTGHWDDIPNVYPAVVSREVFLQAQNRWKELTTAPPGRTSKNFLVGLVKCGICNGNLIFHNKDGKPNSMRCLTNHRLRANGCSNNKSIPHSILWHIYRITSSQHFRRALERVELTATDKRKLTVKAELEALQVKIDRAVNALINLPDMPELVNSTRELNAQRDNLHNELLILDRTVDESEGHQIHFTSALVEDDLLVSDPIRLNSLLKGVGYTITAYPDGLIIVAGESYPWLYTGVKRKGNHTLGYKVQYLAMEDVISPEINLPSCGKHTEDKSEQLQYVLKRSHKLVSVGRPVDAKQSEE

SEQ ID NO: 15838 - protein, 541 aa, synthetic construct
MQTSQGLVYSYLRFSDPRQAAGNSADRQAEYAKSWAAARGLTLDESLSLRDEGLSAFHQRHIKQGALGVFLQAVDEGRIPAGSVLVVEGLDRLSRAEPIQAQAQLAQIINAGITVVTASDGREYNRERLKAQPMDLVYSLLVMIRAHEESDTKSKRVKASIKRLCDGWIAGHYRGLIRNGSDPRWVRLVDGHWELIPERVEVVRFAIDKYREGHGADRAHAMMQERGFDTSYLGISPQQIYRLIKLVALKGAKQISVDGEDFLLKDYYPRLLTDVEFDELQLLRGQRSRRRGKGAIPGVMTGIGITYCGYCGTPMTAQNVMHKVRSDGTLMDGHRRIMCMSYMNKGGCDVGGSCSVAPVERAVMSFCSDQMNLLRLQQPVGPSGDLQQGVMISRKHVVDLEAQLGRITEALALGEGDGVLPITFLRKARDLEEQLTAAKAKLHQEERELAGIASRQRPADARAWLDLAAGVEAQEVEARDKVRQLMIDTFDRIVIYMRGVVPEGRKAWYIDVLLISKAGQRRWLRVERKSGKWAAGVDRPD

SEQ ID NO: 15839 - protein, 518 aa, synthetic construct
MNTGHPVTKRAISYIRFSTGKQTKGSSEWRQDAKVRDWLDSHPDYEPSDLSFEDLGKSGWKGAHIEGGMGELLAAVEWGSIRSGDVVLIEALDRAGRLPLMQMLNKVITPILEAGVSLVTMDDGFTYTAESLDGVHAHVLVAKIQAANQFSERLSERVTKSYKKRREEAAQGKIPKRRTPLWLDGDGKLIEHLAPHIKTAFELYADGFGERRILRRLQETEIPEFQGLYGSTLKRWLQNKIAIGNWGDIVNVYPRVVDPELFYRVQERIAGNKTTRPSSPSKHELTGIVKCAHCGRNYNYHVFKEQPTVLQCSNRFMSTAEKCENSKSVPLGVVQYILLRTSKQARIDAIQKKKLTVNQKRTIVLEGEIASLTQRLQGIARVIAATGDEEELVEQVRLLSAQRKEMRAELAMIAASGDVVSVMDQVKDIQITNDDPMQLGADLQSVGYTIICDMNGGIATSHGDCKEWQYVGYERKRDAYIVKGGEDTTAIPVAPFRETAGTVNIMAALGLELDLTKE

SEQ ID NO: 15840 - protein, 559 aa, synthetic construct
MKTKLYSYIRFSSMKQADGSSYERQKRTAAEIAAKYDLELVTSYQDFGVSAFKGANSRTGALSRFLDEIGRSVPVGSWLVVENLDRISRQSIIEAQELFLSIIRRGITIVTGMDGKVYSKESVNANPIDLLLSVMLFARANEESQTKRNRTNSSALIKIKAHQENPQNPAVAIEEIGKNMWWTDTTSGYVCPDPVFFPIVQEVVELRRNGRSTAEILDHLNATYTPPPAASHKRHSNWSRAMIERLFHTRALIGIKEISVDGVKYELKDYYPRVLDDAEFYHLKKSIGVRACNYGDKEEAKPIPLLSGVNLLKCEHCGSAMVKVKGTNKRPNQYRYSCDAMRSSRIACVHTNWSFRGDQLEKAVLQLLADKIWIAEDKANPVPALKVQIDEISRKIDNLITLSAMTGATKELADQITTLNSERETLYNQIKMAEEEMYSVDSQGWEKLAEFDLEDVYNEDRIKVRFKIKQALKRIGCSRIDKYKNLFVLEYIDGKTQRVVIENSRGPRKGRIFVDLKTINDRQILESNGLVLHPCLDMLTDKNWKPEEEIPGPLQEFGI

SEQ ID NO: 15841 - protein, 507 aa, synthetic construct
MKRVISYIRFSSEKQAKGDSLRRQSKMVTDWLKAHPEYYLDESLTFRDLGVSGFTGKHLKGGLGDFLTAIEKGLVKAGDTLLIESLDRLSRQDVDRASELLRNILRSGVDVVTLSDGEHYTRESLKDPLSLIKSILIMQRAHEESLRKSERIQAAWDAKKEAAKAGIKISRRCPAWLRLNDDRKSFSVIPEKVETVKRCFQLRLEGKSIWEIVRTLNDEGHQSMSQYKPGKFGQTSVQDLLKNRSVIGYFTPKGCEEISGYYPAIIDETTFYKVQQLSHYRYGRKPVSDKPLSVNLFKGVIRCSECGHALIITGFSDTRNGIYRCPLRNENRCSAKGLSRKQTDGTLLALLSRLDRFDSDTTNIIDTLKLHREHISSNIEKLVQLSLEIEDLSAITSKLKQLKGELSQVDADIEKETQRLKSIDVGCLSDCDLTTKAGRIEAQLIIKSAVKEVVLNTAKRRCKVTFHNGKAITLPITENPSEDVTEAIQSLSEVTERGLIDVDEVII

SEQ ID NO: 15842 - protein, 507 aa, synthetic construct
MKRAISYIRFSSEKQSRGDSLRRQSKMVTDWLKAHPEYYLDQDLSFRDLGVSGFTGKHLKGGLGDFLTAIEKGLVKAGDTLLIESLDRLSRQDIDIASELLRNILRSGVDVVTLSDGEHYTRESLKDPLALIKSILIMQRSHEESLRKSERIQAAWNRKKELISEGIKISKRCPAWLRLNDDRKTFSVIPEKVETVKRCFQLRLEGKSIWEIVRTMNAEGHQTLHQHKAGSFGQSSVQDLLKNRSVIGYFTPKGCEEISGYYPAIIDETTFYKVQQLSHYRYGRKPVSAKPLSVNLFKGVIRCSECGHALIITGFSDTRNGIYRCPLRNENRCSAKGLSRKQTDGTLLTLLSRLDRFDSDMTNTIDTLKLHREHISSNIEKLVQLSLEIEDLSAITIKLKQLKGELSQVDADIEKETQRLKSIDVGCLSDCDLTTKAGRIEAQLIIKSAVKEVVLNTAKRRCKVTFHNGRAITLPITENPSEDVTEAIQSLSEVTERGLIDVDVVAI

SEQ ID NO: 15843 - protein, 599 aa, synthetic construct
MKKIIPYGYLRVSSLEQVRSGGGLEAQDEEVRRYITQKSDVFDIDKMVMMSDEGLSAYSGRNIKEGELGRFLADVDAGLIPAGSALVCYSVDRLSRQNPWVGTQLISTLIGAGIEIHSVAENQILRSDDPVGAIMSTIYLMRANNESVIKSERAKHGYTKRLNESIANNKVLTRQMPRWLYDNDGKYAIDPNMQKVIDFTFDSYIAGQSTGYIAKKLNDMGLKYGDTSWRGSYVAKLIRDERLIGKHIRYSKQIKGVKREIIETIPDFYPVTIDTDKFHIANNMLTSVAKNIRGRTRMTYGDISILRNLFNGVIKCGVCSGETSVVQNTRRKITNGVVTYVPYKTFLRCRNRYELKTCTQGDIRYEVIERAILNHLMGLDITTLLAAPVDNKIERYRTELELCKAEEEELQAIIKERENEGKRPRPQTLKSYEDVADRIDELTQLIESHVEDNFIPHFNVDLDSITDVSNVSERSLIKKGIATIADSICYKRISDFILVEIKYRNLNDKHVLVIDNKNSEMVVNFSIEYNEENKVYICNSLVMEYDNLSCEFTVSKTTMEDYAHMMNFVDYVSDDESYNAKEFLVKNFTHIKFIDKSNE

SEQ ID NO: 15844 - protein, 523 aa, synthetic construct
MRQVITYLRFSSKPQERGDSIRRQKGLFERWLKDNPDAKVVDEFSDEGASAYHGHHLKGDFGRMLQNIQDGKYLSGQTVLLVESETRLNRQKARNTENLVDLITGKGVDVICLESGKIYTSTNIDDLDTSIQLKIAAHIAHQQSKEKSIKVSAAWEHRAQLALVGKQQLTKNVPGWIDPDTRKLNEHSSTVVTIFDLLLSGESLHNIARYLQANNIKSFSRREKANGFSVHSVRTILRSESTVGTLAASKRNDRPAIPNYYEPAIDVATFNKAQEILSKNRVGRAPASDNPITINLFKGIIRCQCGASVHPTGVKATYQGVYRCNNVPDGRCNVPTIKRKPFDKWMLDNIVGFLERDDGNNTDKRKAEIEYQISLVTSKLKKATTLLLELDDVTELKEQVKELNIQRSNLQSELDELTQRETLSDKPLHHLSEIDLTTKAGRVEAQLILSKFVQSIELQREMIIITLRNGTVIGKSRDLSPVLSQDLMKQVVSSPSPTDIDMFSVITSDEEFRKSGKQVTKRS

SEQ ID NO: 15845 - protein, 517 aa, synthetic construct
MRQVITYLRFSSKPQERGDSIRRQKGLFERWLKDNPDAKVVDEFSDEGASAYHGHHLKGDFGRMLQNIQDGKYLSGQTVLLVESETRLNRQKARNTENLVDLITGKGVDVICLESGKIYTSTNIDDLDTSIQLKIAAHIAHQQSKEKSIKVSAAWEHRAQLALEGKQQLTKNVPGWIDPDTRKLNEHSSTVVTIFDLLLSGESLHNIARYLQANNIKSFSRREKANGFSVHSVRTILRSESTVGTLAASKRNDRPAIPNYYEPAIDVATFNKAQEILSKNRVGRAPASDNPITINLFKGIIRCQCGASVHPTGVKATYQGVYRCNNVPDGRCNVPTIKRKPFDKWMLDNIVGFLERDDGNNTDKRKAEIEYQISLVTSKLKKATTLLLELDDVTELKEQVKELNIQRSNLQSELDELNQRETLSDKPLHHLSEIDLTTKAGRVEAQLILSKFVQSIELQREMIIITLRNGTVIGKSRDLSPVLSRDLMKQVVSSPSPTDIDMFSVITSDEEFRKSGK

SEQ ID NO: 15846 - protein, 512 aa, synthetic construct
MKAYLYIRFSSKQQEQGDSVRRQEEAAQKWCKTHDVELSDMTFEDLGVSAFKEGGKRPALADLIEAIELGKIARDSYVLVENDDRLSRRGWYATQQMIRHMVLDLGVKLVVLSSNTIYDQTNIEDIAQNILLMFNADRAHKESLRKSEMIRAARQTRRDDETLTGKLPFWLTRVNDQILLDPIKADTVRMIVDLKKSGKSNQATARFLNDQNIKSATGGKWNASAIRMVCSNHAIYGAKAYFITDSSRKMTLDKVVEDKLPAIVTKADFDAVQTTQKHRGRRSTKTPFSLLLKCGKCGGGMVQRTSMYKEKKMIYRRCIASLEGRCDQNRLIREPDLILSTALKDMQYIDSVEQHVSKASGIQTQIDTLKQTQDKLIELGQVDALTNLYTRLAQLENQLVHAKVEDEANEQKPIDFNFKNVFDLEDAGEQNAMLKRVLESIEVHYLGVVDKKTSSKWRIKVNQRNKHHQSFVINQYHGFGNWEIVQVTDTEKFKKELDALTDDIDDCLDFDE

SEQ ID NO: 15847 - protein, 664 aa, synthetic construct
MFSFDKSKFKGICVPYARFSTKGQSKIGKKSLERQIEEARRYAKSNNLYINEDLIFADKGISGFAQQGNIAKAFKKGQMQVMLALLEEVPYQEREFIYVTFHNFDRFSRMSPKQARTYFDLILQKGFNVVTTIDNQLYTRHDKDLGKMLISTIKMTTAWEESQVKSIYIKDALARKKMVVEYLYNHPSQKGKYKHIGVVQPNMPRWIDHEKIELTYTDESGSKKTDSFKKFTLNKEKTKIVNYIFDLKIQGLGYARICRRLNEEGIPTFDQGKHRIAKKWHIFAVQNLICNEMVLGHITLHTHNEEEYMCEIDKVFKKRKIKQTATEKLYNYYPAAVSEAKYLEAHKNTIQQDKPKKLGRIGERTNIFAQILLCECGGTLQYRRTKKNKKKSESVSVNEYLQCNNAFVNHKCNSQTINYTMLETAFFRYVNNIDFKKICSTTNSKHALKIIDLDTDIKELTDEIESLKLREAGLAKTYMSLASAGLDGSIALIDREKTKKEIAEKVLELENLELKKKGLEIEADKDNREFVDINDYMMNKDNYSTDEKIIIRKKINDFLHSKIEWMEVVSTERQKFVIIAFHDTVIRTFAFDDRCANDLMFNEIDVDLSGLNRVQASNLMFTFIKAIRNSLKGVEAVITKADLISYLQHIKQDYLNNIGEQASV

SEQ ID NO: 15848 - protein, 644 aa, synthetic construct
MFNFDKSKYKGICVPYARFSTDVQDEIGRKSLERQIEEAKRFSNEYGLFFDEDIAFVDRGVSGFALSGDTAKTFQKGQMQLMLELLEEIDIAEREFIYITFHNFDRFSRMSPDVASRYFEQILDKGFNIVTTIDNEVYRRNSGNLEQMIISIIHMSTAYYESEVKSIYISDSRQRKRDVIEYLYNDKTQKGKHRHVGIKACCPRWIKTKDIIYEYVAKDGYVKKEALKRFEIDEERAQIINYIFDLKIQGLGNGKICQVLNEQNIPVFHSGNYTKAKYWNLSIISNYLKNENVIGHSYLYHKAKEEVFNEKTQTFSTKRVRKIATDKLYNYYPAIMSEEKFNQAKEAVKANSIKVDRSKSSEKPHMFSNLMRCSCGTRLHYKLTKKNNVKKVDDYFEYLKCERSALNDGCTGENINYKNFEAQFINFIRYIDVNEILDHANGVEGETQGLTELEEREAAINLKITGLTKTYQSLINAGVDGSDVLVELEKAKGELQEVEFEQSKLLNSMKNQTSSSSESIRQKKSALKSKVFAEKVEARIAVNELLKQKIRWMEVYATAYAKFVIVCFVDDVIRTYAHQDEFATDLMFNTIKINTGGLKGYEADELMVLMIKTVRESLAGMNEVITNTDLKLKLAAVKSEYMDK

SEQ ID NO: 15849 - protein, 551 aa, synthetic construct
MEYVAYLRISSYNQKEKGDSIDGQRKSITRWATERGGNIIKWYIDDGVSAYKGKRNNFDLMLQELESDIVKVDGLIVYSLSRFSRNLLAQLEATKVLQRKEIRLISATEALPESYEESYVMSTILGLMNEHSSMQNGKVVRDRLRDTALKQYFTGGPIPFGYHSVTVSGVTSKCRRKLQILEEEAELVTEIFNLSEKGVNGKPLGVKSIAEMLNKRKSYRRGTKWNRNSVCRILNNRAYIGEFIYNSSDSEPIVVNIPNIISKDQFYNVQEGLKSRDIFSFESRRIRSKCLLTGLLKCGVCGASMVVTSGKSGKYSYYQCSKKVRHAPDSCTSKRIRRDKAELLVKDKFMNELLAEAHLKTIHCQAKQRLKETSKLLLVDKTKLSKRISNLETRYSRLITMIADGDLVPDVRINKTITDLSTQLDVLESEMAKLAVRINLPVKNFGEARLVEVAAAVQKYLQQIDNEALKQLMLATVTSVKVVDAKKKLIFEGSNMAVLYLIANAKTGTDFSVPAFITKWRRDRDLNPRYAINVCRFSRPVLSTTQPSLRC

SEQ ID NO: 15850 - protein, 481 aa, synthetic construct
MITTNKVAIYVRVSTTNQVEEGYSIDEQKDKLSSYCDIKDWNVYKVYTDGGFSGSNTDRPALESLIKDAKKRKFDTVLVYKLDRLSRSQKDTLHLIEDVFIKNGIEFLSLQENFDTSTPFGKAMIGLLSVFAQLEREQIKERMQLGKLGRAKSGKSMMWTKTSYGYDYHKETGTVTINPAQALTIKFIFESYLRGRSITKLRDDLNEKYPKHVPWSYRAVRTILDNPVYCGFNQYKGEIYPGNHEPIISKEEYDKTQSELKIRQRTAAENVNPRPFQAKYILSGIAQCGYCGAPLKIMLGVKRKDGSRLKKYECHQRHPRTLRGVTTYNDNKKCDSGFYYKDKLEASVLKEISKLQDDADYLDKIFSGDNAETIDRESYKKQIEELSKKLSRLNDLYIDDRITLEELQSKSAEFISMRGTLETELENDPALRKNKRKADMRKLLNAEKVFSMDYENQKVLVRRLINKVKVTAEDIVINWKI

SEQ ID NO: 15851 - protein, 481 aa, synthetic construct
MITTNKVAIYVRVSTTSQVEEGYSIDEQKAKLSSYCDIKDWSVYKIYTDGGFSGSNTDRPALEGLIKDAKKRKFDTVLVYKLDRLSRSQKDTLYLIEDIFIKNNIAFLSLQENFDTSTPFGKAMIGLLSVFAQLEREQIKERMQLGKIGRAKAGKSMMWAKTSYGYDYHRETGTITINPAQALAVKFIFESYLRGRSITKLRDDLNEKYPKHVPWSYRAVRTILDNPVYCGFNQYKGEIYPGNHESIISKEEYDKTQSELKIRQRTAAENVNPRPFQAKYILSGIAQCGYCGAPLKIMLGVKRKDGSRLKKYECHQRHPRTLRGVTTYNDNKKCDSGFYYKDKLEASVLKEISKLQDDADYLDKIFSGDNAETIDRESYKKQIEELSKKLSRLNDLYIDDRITLEELQSKSAEFISMRGTLETELENDPALRKNKRKADMRKLLNAEKVFSMDYESQKVLVRRLINKVKVTAEDIVINWKI

SEQ ID NO: 15852 - protein, 481 aa, synthetic construct
MITTNKVAIYVRVSTTNQVEEGYSIDEQKDKLSSYCDIKDWNVYKVYTDGGFSGSNTDRPALESLIKDAKKRKFDTVLVYKLDRLSRSQKDTLHLIEDVFIKNGIEFLSLQENFDTSTPFGKAMIGLLSVFAQLEREQIKERMQLGKLGRAKSGKSMMWAKTSYGYDYHKETGTVTINPAQALTIKFIFESYLRGRSITKLRDDLNEKYPKHVPWSYRAVRTILDNPVYCGFNQYKGEIYPGNHEPIISKEEYDKTQSELKIRQRTAAENVNPRPFQAKYILSGIAQCGYCGAPLKIMLGVKRKDGNRLKKYECHQRHPRTLRGVTTYNDNKKCDSGFYYKDKLEAYVLKEISKLQDDADYLDKIFSGDNAETIDRESYKKQIEELSKKLSRLNDLYIDDRITLEELQSKSAEFISMRGTLETELENDPALRKNKRKADMRKLLNAEKVFSMDYENQKVLVRRLINKVKVTAEDIVINWKI

SEQ ID NO: 15853 - protein, 481 aa, synthetic construct
MKTMNKVAIYVRVSTTNQVEEGYSIDEQKDKLSSYCDIKDWNVYKVYTDGGFSGSNTDRPALESLIKDAKKRKFDTVLVYKLDRLSRSQKDTLHLIEDVFIKNGIEFLSLQENFDTSTPFGKAMIGLLSVFAQLEREQIKERMQLGKIGRAKAGKSMMWAKTSYGYDYHRETGTITINPAQALAIKFIFESYLRGRSITKLRDDLNEKYPKHVPWSYRAVRTILDNPVYCGFNQYKGEIYPGNHEPIISKEEYDKTQSELKIRQRTAAENVNPRPFQAKYILSGIAQCGYCGAPLKIMLGVKRKDGSRLKKYECHQRHPRTLRGVTTYNDNKKCDSGFYYKDKLEAYVLTEISKLQDNAGYLDKIFSGDNAETIDRESYKKQIEELSKKLSRLNDLYIDDRITLEELQSKSAEFISMRGTLETELENDPALRKNKRKADMRKLLNAEKIFSMDYEGQKVLVRGLINKVQVTAEDIVINWKI

SEQ ID NO: 15854 - protein, 481 aa, synthetic construct
MITTNKVAIYVRVSTTNQVEEGYSIDEQKDKLSSYCDIKDWNVYKVYTDGGFSGSNTDRPALESLIKDAKKRKFDTVLVYKLDRLSRSQKDTLHLIEDVFIKNGIEFLSLQENFDTSTPFGKAMIGLLSVFAQLEREQIKERMQLGKLGRAKSGKSMMWAKTSYGYDYHKETGTVTINPAQALTIKFIFESYLRGRSITKLRDDLNEKYPKHVPWSYRAVRTILDNPVYCGFNQYKGEIYPGNHEPIISKEEYDKTQSELKIRQRTAAENVNPRPFQAKYILSGIAQCGYCGAPLKIMLGVKRKDGSRLKKYECHQRHPRTLRGVTTYNDNKKCDSGFYYKDKLEASVLKEISKLQDDADYLDKIFSGDNAETIDRESYKKQIEELSKKLSRLNDLYIDDRITLEELQSKSAEFISMRGTLETELENDPALRKNKRKADMRKLLNAEKVFSMDYESQKVLVRRLINKVKVTDEDIVINWKI

SEQ ID NO: 15855 - protein, 1640 aa, synthetic construct
MSKEKIKVYLYTRVSTSIQIDGYSLEAQKSRMKAFALYNDYEIVGEYEDAGKSGKSIEGRVQFTRMMEDIKSGKDGVSFVLVFKLSRFARNAADVLSTLQIMQDFGVNLICVEDGIDSSKDAGKLMISVLSAVAEIERENIRVQTMEGRIQKAKEGKWNGGFAPYGYQLIDGKLIINEEEAIAIRTIFDQYVNTSIGANGLSKYLENHGIRKIPRQNGKNPLFDAGLIRKILKNPVYNGKIAFGRRTLEKVHGTRNEYRQVEQDDYLVAEGIHEAIIPDELWQAAQVKLKAQAKKYEHVNKGKNMRTHLLSGIVKCPICGAGMFGNKSIKYKKDGTKYKDFYYYGCKHRLMNRGHKCTYNKQIREELLDDAVAEVIIKLVSNPKFASMIQEKINMKVDTSAIENEIDNYQNELRKSHSTKYKLIEEIDNLDVEDKHYKRRKNDLDDRLYRMYDKIEELESQLIEAKAKKETIEVEKLTGDNIYKVLIYFDKLYKVMNDVERRQLIEALISEIQIYEEKQPNGQWLKSITFKLPIIDEDLNISLENDEQVDGVSVPGVDPNTGFPLPDIGGGIGVEVTFDVVVESIPNPNPTNNIATIDYSYTPVEGGIPNDFSVDSNPVPVEVISADVEVTKLSEPTIVNPGEELIYTIKVVNNGPFPSENVVLTDDVPASIINPEYSLDGGVTFQPWTGSLNIGTLEVGETRVIIIRGIVNPSTVGIITNTAVVSSTTADPNLNNNTSTIETEVNLLADILVMKTAEPNSAVPGTLLRYTIQVENLGPANAENVILNDDIPASIINPEYSLDGGASFQPWNGSLNIGTLNSGISLTVLIQGTVSLNSSEYIVNTATVSSTTPDPDLSNNISTIITPVNPQAGISIIKVADEDVAVPGEEFVYTIEIFNEGPSNATNVVLTDDIPDVILNPEYSLDGGATFQPWNGSLNIGTVAPGQLIRIIIKGLVSSTATGDITNTAEVSADVPEPVTDSSTVTTPIVPSADIEVIKTSNMDTAVPGETFSYTITVINLGPSAAQSIVLTDDIPDVILNPEYSLDGGVTFQPWNGNLSIGTLDAGEIRSIIIRGTVSQTAVGTIINTATISSPTPDPNPDNNTSTDETDISPLADISVIKGNEPVAIPGGRFIYGIEIANAGPSFAENVTLTDNIPASILNPEYSIDNGVTFQPWNGSLNIGTLDAGEIRNIIIRGTVSQTAIGTIINTATVSSTTPDPNLNNNTSTSEAEVSSSADISVVKRSNQTVVVPGDVLDYTIEVRNAGPSTAQNVTLTDNIPASILSPEYSIDNGVTFQPWNGSLSIGTLDAGEIRNIIIRGIVSQTAIGTIINTATVSSTTPDPNLNNNTSTSEAEVSSSADISVVKRSNQTVVVPGDVLDYTIEVINAGPSTAQNVTLTDNIPASILSPEYSIDNGVTFQPWNGSLSIGTLGAGEIRNIIIRGIVSQTAIGTIINTATVSSTTPDPNLNNNTSTSEIDISSSADISVIKLANKTEACVEEQIDFVIVVSNAGPENAQNVTLIDNVSDKLKKAVFSLDRGVSFQPWTGSLNIGTLPAGTLRVILLRGIIKSTCLDRLTNIAEVTSTTPDSNLNNNISRVQVEIKQCCCNDCCCNNCSNCCCNDCGCKDCCCNCCKNDFWC

SEQ ID NO: 15856 - protein, 481 aa, synthetic construct
MITTNKVAIYVRVSTTNQVEEGYSIDEQKDKLSSYCDIKDWNVYKVYTDGGFSGSNTDRPALESLIKDAKKRKFDTVLVYKLDRLSRSQKDTLHLIEDVFIKNGIEFLSLQENFDTSTPFGKAMIGLLSVFAQLEREQIKERMQLGKLGRAKSGKSMMWAKTSYGYDYHKETGTVTINPAQALTIKFIFESYLRGRSITKLRDDLNEKYPKHVPWSYRAVRTILDNPVYCGFNQYKGEIYPGNHEPIISKEEYDKTQSELKIRQRTAAENVNPRPFQAKYILSGIAQCGYCGAPLKIMLGVKRKDGSRLKKYECHQRHPRTLRGVTTYNDNKKCDSGFYYKDKLEAYVLKEISKLQDDADYLDKIFSGDNAETIDRESYKKQIEELSKKLSRLNDLYIDDRITLEELQSKSAEFISMRATLETELENDPALRKNKRKADMRKLLNAEKVFSMDYEGQKVLVRRLINKVKVTAEDIVINWKI

SEQ ID NO: 15857 - protein, 563 aa, synthetic construct
MSKEKIKVYLYTRVSTSIQIDGYSLEAQKSRMKAFALYNDYEIVGEYEDAGKSGKSIEGRVQFTRMMEDIKSGKDGVSFVLVFKLSRFARNAADVLSTLQTMQDFGVNLICVEDGIDSSKDAGKLMISVLSAVAEIERENIRVQTMEGRIQKAREGKWNGGFAPYGYQLVDGKLFINEEEAVAIRTIFDQYVNTTIGANGLSKYLENHGIRKIPRQNGKNPLFDAGLIRKILKNPVYNGKIAFGRRTLEKVHGTRNEYKQVEQDEYLIAEGIHEAIISDELWQAAQVKLKSQAKKYEHVNKGKDIRTHLLSGIVKCPVCGAGMFGNKCIKKKKDGTKYKDFYYYGCKHRQMMRGHKCTFNKQIREELLDDAVAEVIVKIVSNPKFASIMQEKINMKVDTSEIEKEIDNYQKELRKSHSTKFKLIEEIDNLDVDDKHYKRRKQDLDDRLYRMYDKIEDLEGQLIEAKVKKETIEAEKLTGDNIYKVLIYFDKLYKVMNDVERRQLIEALISEIQIYEEKQLNGQWLKSITFKLPIIDEDLNISLDNDEQVEAVSLLVRVEASAK

SEQ ID NO: 15858 - protein, 591 aa, synthetic construct
MKKVEVIKASSSISKSKRGKMIECLRVAAYCRVSTDSEDQLNSYKSQKTYYTDLIQKNNEWIFVGIYADEAITGTQVTNRQDFQRMINDCMNGEIDMIVTKSISRFARNTLDTLKYVRMLKEKNIAVFFEDENINTLTMDGELLLVVLSSVAQQEVENISSNVKKGLKMKMKRGELVGFQGCLGYDYHPEDKSITVNKEEAEIVRYIFNRYIEGAGGSVIGKELENLGYLTKYGNATWAPTTVLGIIKNEKYKGDILLGKTFTVDPISKRRLENMGEEDQFYIRNHHEPIISEEVFDKAHEILNRRNKNRGKIGNGNTKREKYSRKYAFSCLLECGFCKGTLTRRKWHSGSEYSKVIWQCVTATKKGKKHCPESKGIPEQAIEDAFIESYRILSDDNKDVLDEFLKIMDETLSSSSINKQLTKVDKEIEAIEKKKSKLVDMRLEDIIDSDTYESKFSNMTNKQENLLKERIKLQETATTEKDVKRRLREFKKTLENNEVLHEFDRHVFESIVEKVIVGGYDEDGNIDPAQLVFVYKTGFKNSLDGNQFKPARKNARGNRKSNKLCSQTNDDVKDLCSYTSTNTYRISRFIR

SEQ ID NO: 15859 - protein, 481 aa, synthetic construct
MKTMNKVAIYVRVSTTNQVEEGYSIDEQKDKLSSYCDIKDWNVYKVYTDGGFSGSNTDRPALESLIKDAKKRKFDTVLVYKLDRLSRSQKDTLHLIEDVFIKNGIEFLSLQENFDTSTPFGKAMIGLLSVFAQLEREQIKERMQLGKLGRAKSGKSMMWAKTSYGYDYHKETGTVTINPAQALTIKFIFESYLRGRSITKLRDDLNEKYPKHVPWSYRAVRTILDNPVYCGFNQYKGEIYPGNHEPIISKEEYDKTQSELKIRQRTAAENVNPRPFQAKYILSGIAQCGYCGAPLKIMLGVKRKDGSRLKKYECHQRHPRTLRGVTTYNDNKKCDSGFYYKDKLEAYVLKEISKLQDDADYLDNIFLGDNAETIDRESYKKQIEELSKKLSRLNDLYIDDRITLEELQSKSAEFISMRGTLETELENDPALRKNKRKADMRKLLNAEKVFSMDYENQKVLVRRLINKVKVTAEDIVINWKI

SEQ ID NO: 15860 - protein, 481 aa, synthetic construct
MITTNKVAIYVRVSTTNQVEEGYSIDEQKAKLSSYCDIKDWSVYKIYTDGGFSGSNTDRPALESLIKDAKKRKFDTVLVYKLDRLSRSQKDTLHLIEDVFIKNGIEFLSLQENFDTSTPFGKAMIGLLSVFAQLEREQIKERMQLGKIGRAKAGKSMMWAKTSYGYDYHRETGTITINPAQALAIKFIFESYLRGRSITKLRDDLNEKYPKHVPWSYRAVRTILDNPVYCGFNQYKGEIYPGNHESIISKEEYDKTQSELKIRQRTAAENVNPRPFQAKYILSGIAQCGYCGAPLKIMLGVKRKDGSRLKKYECHQRHPRTLRGVTTYNDNKKCDSGFYYKDKLEAYVLTEISKLQDNAGYLDKIFSGDNAETIDRESYKKQIEELSKKLSRLNDLYIDDRITLEELQSKSAEFISMRGTLETELENDPALRKNKRKADMRKLLNAEKIFSMDYEGQKVLVRGLINKVQVTAEDIVINWKI

SEQ ID NO: 15861 - protein, 600 aa, synthetic construct
MKKDVKVIKGDTTLKRTASGCVERSIKRVAAYCRVSTDTEDQINSYNSQVEHYTEFIQKNKEWTLAGIYADEAITGTQVDRRIDFQRLINDCMNGDIDMIITKSISRFARNTLDTLKYVRKLKEFNVAVFFEEENINTLTMDGELLLTILSSVAQQEVENISANVKKGLRMKMERGEMVGFQGCLGYDYNPETKSISVNEKEAEIVRYIFRRYIEGVGGMVISRELEEQGYLSPRGNKRWTETTVLGIIKNEKYKGDLMMGKTYTVDPISKRRLDNFGEQDKFYIESHHEPIISKEDFEKAQGIRLRRSKNRNTVANNGGKREKYSRKYAFSSMLECGFCGHNLSRRNWHSSSEYTKVIWQCVNATKNGKKYCPHSKGIEEAAIEKAFMESYRQVCHNNVEITNEFLKTVEEELKDNSLAKDLKKISNQLDKIIKKEKDLVELRLNESISMDIYQDKYNEIAISKEKLLAEKRTLEVTLTDEKALKKRLEGFKKLLESNKYLEEFDRAVFESIVDKIIIGGTNDEGEIDPAMITIIYKTGKKDSQDGRLFKSRRKNAKEVNEETGGKLYPQSSDEVNNLYSYPIDNTYILWRNYGSKSKW

SEQ ID NO: 15862 - protein, 537 aa, synthetic construct
MKQQIYNTALYLRLSRDDELQGESSSITTQRSMLRLYAKEHHLNVIDEYIDDGWSGTNFDRPSFQRMIEDIEAGKINCVVTKDLSRLGRNYIMTGQYTELYFPSHNVRYIAIDDGVDSEKGESEIAPFKNIINEWVARDTSRKVKSAFKTKFAEGAHYGAYAPLGYKKHPDIKGKLLVDDETKWIIEKIFSLAYQGYGSAKITKQLRAEKVPTASWLNFTRYGTFAHIFEGKPESKRYEWTIAHVKAILKSEVYIGNSVHNMQSTVSFKSKKKVRKPESEWFRVENTHEPIIDKEVFYRVQEQIKSRRRQTKEKATPIFAGLVKCADCGWSMRFGTNKTNKTPYSYYACSYYGQFGKGNCSMHYIRYDVLYQAVLERLQYWAKAVQQDEEKVLNKIQKAGNAERIREKKKKASTLKKAENRQNEIDRLFAKMYEDRACEKITERNFVMLSSKYQKEQIELEQQITSLREELSKMEQDMIGAEKWIELIKEYSVPKELTAPLLNAMIEKILIHEATTNEDNERIQEIEIYYRFIGRVE

SEQ ID NO: 15863 - protein, 452 aa, synthetic construct
MKAAIYIRVSTQEQIENYSIQAQTEKLTALCRSKDWDVYDIFIDGGYSGSNMNRPALNEMLSKLHEIDAVVVYRLDRLSRSQRDTITLIEEYFLKNNVEFVSLSETLDTSSPFGRAMIGILSVFAQLERETIRDRMVMGKIKRVESGLPLTTAKGRTFGYNVVDTKLYINEEEAKHLQLIYDIFEEEKSITFLQKRLKELGFKVKSYSSYNKWLMNDLYIGYVSYSDKVHVKGVHEAIISEEQFYRVQEIFSRMGKNPNMNKESSSLLNNLIVCEKCGLGYVHRAKDTVSRGKKYHYRYYSCKTYKHTHELEKCGNKIWRADKLEELIIDRVNNYSFASRNLDKEDELDSITEKLKTEHSKKKRLFDLYINGSYEVAELDKMMADIDAQINYYNSQIEANKELKRNKKVQESLAELATVDFDSLEFREKQIYLKSIINKIYIDGEQVTIEWI

SEQ ID NO: 15864 - protein, 452 aa, synthetic construct
MKAAIYIRVSTQEQIENYSIQAQTEKLTALCRSKDWDVYDIFIDGGYSGSNMNRPALNEMLSKLHEIDAVVVYRLDRLSRAQRDTITLIEEYFLKNNVEFVSLSETLDTSSPFGRAMIGILSVFAQLERETIRDRMVMGKIKRIEAGLPLTTAKGRTFGYDVIDTKLYINEEEAKQLQMIYDIFEEEKSITSLQKRLKKLGFKVKSYSSYNNWLTNDLYCGYVSYADKVHTKGVHEPIISEEQFYRVQEIFSRMGKNPNMNRDSASLLNNLVVCGKCGLGFVHRRKDTVSRGKKYHYRYYSCKTYKHTHELEKCGNKIWRADKLEKLIIDRVNNYSFASRNVDKEDELDNLNEKLKTEHTKKKRLFDLYISGSYEVSELDAMMADIDAQINYYEAQIEANEELKKNKKIQENLADLATVDFDSLEFREKQLYLKSLINKIYIDGEQVTIEWL

SEQ ID NO: 15865 - protein, 452 aa, synthetic construct
MKAAIYIRVSTQEQIENYSIQAQTEKLTALCRSKDWDVYDIFIDGGYSGSNMNRPALNEMLSKLHEIDAVVVYRLDRLSRSQRDTITLIEEYFLKNNVEFVSLSETLDTSSPFGRAMIGILSVFAQLERETIRDRMVMGKIKRIEAGLPLTTAKGRTFGYDVIDTKLYINEEEAKQLRLIYDIFEEEQSITFLQKRLKKLGFKVRTYNRYNNWLTNDLYCGYVSYKDKVHVKGIHEPIISEEQFYRVQEIFSRMGKNPNMNRDSASLLNNLVVCGKCGLGFVHRRKDTVSRGKKYHYRYYSCKTYKHTHELEKCGNKIWRADKLEELIIDRVNNYSFASRNVDKEDELDSLNEKLKTEHVKKKRLFDLYISGSYEVSELDAMMADIDAQINYYEAQIEANEELKKNKKIQENLADLATVDFDSLEFREKQLYLKSLINKIYIDGEQVTIEWL

SEQ ID NO: 15866 - protein, 600 aa, synthetic construct
MKEVEVIKARSSSSNSARGKMIEQLRVAAYCRVSTDSEDQLNSYNSQKEYYTDLIQKNAEWIFAGIYADEAITGTQVTKREDFQRMINDCMNGEIDMLITKSISRFARNTLDTLKYVRMLKEKNIAVYFEDEKINTLTMDGELLLVVLSSVAQQEVENISANVKKGLKMKMKRGELVGFQGCLGYDYHPEDKSITVNEEEAEIVRYIFNRYIEGAGGSVIGQELENLGYLTKYGNSTWVPTTVLGIIKNEKYKGDILLGKTFTVDPISKRRLENLGEEDQFYIRNHHEPIISEEVFDKAQEILNRRSKNRGKIGDGNSKREKYSRKYAFSCLLECGFCGGTLTRRRWHSGTEYNKVIWQCVTSTKKGKKHCPHSKGIPETAIEEAFIESYRLLCDNNKDVLEEFLNRIDETLSSSSVNKKLLKVDKEIEAIEKKKSKLVDMRLEDTIDSDTYESKFSSMTSKQEDLLKERLQLQETARNEKDIKRRLRDFKKTLEQNEVLNEFDRYVFESIVEKVIVGGYDEDGNIDPAQLVFVYKTGFKNSLDGNRFKPERKNARGNRKSKDLCSHANDENQSLCSDTKADTYRSCDCSTFKLSIQKPP

SEQ ID NO: 15867 - protein, 452 aa, synthetic construct
MKAAIYIRVSTQEQVENYSIQAQTEKLTALCRSKDWDVYDTFIDGGYSGSNMNRPALNEMLSKLHEIDAVVVYRLDRLSRSQKDTITLIEEYFLKNNVEFVSLSETLDTSSPFGRAMIGILSVFAQLERETIRDRMVMGKIKRIEAGLPLTTAKGRTFGYDVIDTKLYINEEEAKQLRLIYDIFEEEQSITFLQKRLKKLGFKVRTYNRYNNWLTNDLYCGYVSYKDKVHVKGIHEPIISEEQFYRVQEIFSRMGKNPNMNKESASLLNNLVVCSKCGLGFVHRRKDTVSRGKKYHYRYYSCKTYKHTHELEKCGNKIWRADKLEELIIDRVNNYSFASRNIDKEDELDSLNEKLKIEHAKKKRLFDLYINGSYEVSELDSMMNDIDAQINYYEARIEANEELKKNKKIQENLADLATVDFNSLEFREKQLYLKSLINKIYIDGEQVTIEWL

SEQ ID NO: 15868 - protein, 520 aa, synthetic construct
MKKITKIDELPQGQLPNTNLRVAAYARVSTDSDEQLESLKAQREHYERYIKSNPEWEFAGLYYDEGISGTKMEKRTELLRMIRNCKQGRIDFIITKSISRFARNTVDCLELVRKLIDIGVYIYFEKENLNTGDMESELMLSILSGFAAEESASISQNSTWSIQKRFQNGSYVGTPPYGYTNTDGEMVIVPEEAEIIKRIFTECLSGKGGGTIARGLNKDKIPARRGNHWSAGTVIDMLRNEKYMGDVLLQKTYTDSNYNRHPNTGEKDQYYYKDSHEAIISREDFAKAQDLIDERAKMKCKGVKKNVYLNRYALSGKIVCGECGRNFRRKTNYSAGRSYIAWSCIGHIEDKESCSMLFLRDGEIKATFTTMMNKLAFSNKLILEPLFKSISQIDEESDRERMDAIDKRMEQLMEERNTLITLMAKGFLEPALFNQERNVLDSEIKNLTTEKTNLVTNSTSGVLRANDIKDLIDYVSADNFNGDYTEELFEEFVENIIVNSRDELTFNLKCGLSLKEKVVR

SEQ ID NO: 15869 - protein, 520 aa, synthetic construct
MTEKNIMVIPARKRVGSTAAKEKIKKLRVAAYCRVSTETEEQNSSYEVQVAHYTEFIKKNNEWEFAGIFADDGISGTNTKKRDEFNRMIAECMDGNIDMVITKSISRFARNTLDCLQYIRQLKGKNISVYFEKENINTMDAKGEVLLTIMASLAQQESQSLSQNVKLGLQYRYQQGKVQVNHKRFMGYTKDEDGNLIIVPEEAEIIKRIYREYLEGQSLVGIGRGLEKNGILTAAGKPRWRPESIKKILTNEKYIGDALLQKTTTIDFLTKKRVKNEGHVPQYYVENNHEAIIPKEIYLQAQEELHRRNNIYTGADKSKRIYSSKYALSAITFCGECGDIYRRTYWNVHGRKEFVWRCVTRIEQGPEVCKNRTAKEGDLYDAVMTAINRLLAGGDNMIKTLEENIHAVIGDTTEYQISEINILLVEKQKELINLANKGKDYEPLADEIDNLRGKRQTLLVEDASISGENERINELIEFIRNNKYRTQRYDGALVRKLIQNVTVYDDHFVICFKSGIEVEV

SEQ ID NO: 15870 - protein, 516 aa, synthetic construct
MAGKKVTVIPMKPRQWAAENTEEKPKLKVAAYCRVSTEMEEQASSYEAQVQHYTDYIQRNPDWELAGIFADEGISGTGTKKRDGFNRMIEACQKGDVEYIITKSISRFARNTVDCLQYIRQLKDLHIAVFFEKENINTMDAKGEVLLTIMASLAQQESQSLSQNTKMGVQYRFQQGQLRINHNHFLGYTKDEDGNLVIEPKEAEVIKRIFREYLEGSSLQEIANGLMSDGILTGGKRKLWRGEGVRLILRNEKYMGDALLQKTYTTDFLTKKRVKNDGSYAQQYYVENSHPAIIPRDIFMQVQQELDRRKSMKNKHSQCFSGKYALSGITVCGDCGNAYRRVHWKNRGTVWRCKSRVDKREHNCSGRTIYEKDLHEAIIKAINETLVDREYFLQQLSENINSVLTDGLTGRLEELDSKLKELESEIISMAIGGQGYDELATKILALRNERDMVEREIAADANMQQRIDEMGDFVKNHDTISEYSEVLVRRLIEKVTIFEKDIVVDFKSGVNIAIEI

SEQ ID NO: 15871 - protein, 452 aa, synthetic construct
MKAAIYIRVSTQEQIENYSIQAQTEKLTALCRSKDWDVYDIFIDGGYSGSNMNRPALNEMLSKLHEIDAVVVYRLDRLSRSQRDTITLIEEYFLKNNVEFVSLSETFDTSSPFGRAMIGILSVFAQLERETIRDRMVMGKIKRIEAGLPLTTAKGRTFGYDVIDTKLYINEEEAKQLRLIYDIFEEEQSITFLQKRLKKLGFKVRTYNRYNNWLTNDLYCGYVSYKDKVHVKGIHEPIISEEQFYRVQEIFARMGKNPNMNRDSASLLNNLVVCSKCGLGFVHRRKDTMSRGKKYHYRYYSCKTYKHTHELEKCGNKIWRADKLEELIIDRVNNYSFASRNVDKEDELDSLNEKLKTEHTKKKRLFDLYISGSYEVSELDAMMADIDAQINYYEAQIEANEELKKNKKIQENLADLATVDFDSLEFREKQLYLKSLINKIYIDGEQVTIEWL

SEQ ID NO: 15872 - protein, 558 aa, synthetic construct
MASVSNRTTAAQSRRAAIYARVSTDRQSVEGQIEFAREWAPKHGYTLTEIYADNARSGTIPFAEREAGRRLLIDLRAGRFDVVLVYKYDRLGRDREVGDIETRQAILDIERAGGQIIAMTQPIDASTIMGRFTRSVQIDIGTIERLNTLERSADTLATLVRRPGFFTGGTAPYGYRVEGQDRDARLVVDEEPIPGLDISPADVVRMIYHWLVAEGRSTVWIAAELNRRGIPTRALLAGRARPTAGIWRPGRVSTMVRNTVYKGVAVYGRRKSGRSPFPVPVTEREVPAIVDAETWEAAQEQLRRNKKRAKRNAKRQYLLSGLVKCGACGSNYTGLAYTTKDGQERRYYTCNNIHQRHNTGGERCTNPALSWQYEELIWRDIDAWLENPGPILEELAAQLNTDADDAGNIEADIERRRRQLAGQEKERERLLTAYRKGIIDDTDLERELAAMRRERAVLEEEIEALKRAQQRREERRAGLVTAAALLEELKARRREGLTFAVKRQVVEALVKEIVVQPDGTPDVTYRFAVINNRTELCGGTAGGTPRRSRRGRAARSRS

SEQ ID NO: 15873 - protein, 596 aa, synthetic construct
MPVAYSYIRFSTPDQIKGDSLRRQLDTSARYAAEHGLTLDDSLNVRDLGVSAFTGSNFERGALGQFVTAINEGRVAPDSYLLVESLDRLSRLPVTEALAVFQTIINLGVTIVTLVDSTIYSKDRLRNDWTPLLVALVSMSRAHEESAVKSRRVKAAWDAKKERVKAKKEVMSGRCPWWLRPSADNSRYEIIEEKAETVRLIFNLAKDGFGGEAIAKQLNARNVPTAQHAKRWQNSTVQFNLRNIAAIGVLQLDQDNNGRTTTNTFVEDYYPPVIDKALFYEVQALRAERNRNKNTMSAGRKGQCYNVFQGTAKCGYCGSPMHLRRKPGMNSGFLYCSKSLQGGGCVGVSYNIRQLEAEFIEFTRELDLSHVLGDTSMDNARSEKNAGLSACNAMLEEAQTKLANLLNAIEAGGDMPILIQRLRDVEAQVNDLKKQRLALQSEVEILSNTSRDEQASLEMLSQLMEQLGSKESDLEEKLRLRFRMLGEVQKVVRRLDLFPGGPILAQDEIDELRSQLQSGGFDNGRIDDYLTQLPIKPDRSARYFIAHLRNGISRTVRQGRIMETDSARSHKVRSAIRGAMNEEANRDDETLLPSGR

SEQ ID NO: 15874 - protein, 529 aa, synthetic construct
MKVPVWSYARVSTLNQVDGFGIQRQVNTINQFIQYLVLDHRLPYVLDTDNITQMVAEGRSAFKGKNWNPKTKLGQYRKMVMDGVVPDSVLIVENIDRLTRLDPFQAVEIISGLINRGTTILEIETGMTYSRYIPESITVLTMQINRANGESKRKSVMMKKSHQNRYGNVSKVRPRWFDVVEVDGIKQYRTNNTAKAIQRMYNDYVNGIGAAQIVRTYGDTDNGKPWTLVTVLRALSDKRVADDARYPSIIDKELYERVQALKISPSKGKTHQKNMLNLFAGMSRCPICKQAIITKRNSHGGLFTVCLGKRTDKTCTARSIAYNALERPLLNAIVGLDFSEVYGQEESNVLTLRDQWIQNERDIAAFRDRLTKASRHEKFAILDELEVMNREQDELTIRLKSVDAPKDITLTYDDDKLDMNVEYRIELNNRMKKLIQRIDIVREDVSKTNYKIFCSIKYWTELLTHLVIIDVDVKRIGRGGTNQLTTTLRSVSSLDLEGNIKGNPDMEALEHWESVVNQAVDIAVKQVQK

SEQ ID NO: 15875 - protein, 558 aa, synthetic construct
MTKLYSYIRFSSMRQSDGSSYERQIRMAKEIADRYNLELVNDYQDLGVSAFKGANSKTGALSRFLDEIGRSIPVGSWLFIENLDRLSRQDIISAQELFLSIIRRGITIVTGMDNKIYSIETVTANPMDLMFSILLFIRGNEESQTKRNRTNSSALLKIKAHQQNPQSPAVAIEEIGKNMWWTDTTSGRVLPHPVYFPVLQKIVQLRQEGHSAGVILDYLNEHHEPPAPTSNKKHGKWSRAMVSRLFATKALIGVKTVNVDGVEYELRDYYPRVLSDSEFYFLRKNIIKKAWDYSHDKEKVIPLLSGIGVLRCVHCGATMVKQTAANGKREQYRYCCDGRKSGRTDCPYPNWGFRAVTLEGAVLQLLADKIWIAEDKTNPIPEIQVKIDEISRKIDNLINLSAMTGATKELANQITDLNSQREALHEEIRLFEREMYSVDSQGWDKLAQFDLSDVQNEERLKVRLKIKGALHEIECSRIDSKKNLFVLVYLDGLRQRLVIENNRGLKKGQIFVDLKTINDRQILESAGMVLHPCIEMIIDADWKAPEEIPGLLSEEFGI

SEQ ID NO: 15876 - protein, 427 aa, synthetic construct
MRIALYARVSTEEQAIHGLSIEAQSEALEEWAKQEHANVVGTYIDAGISARKPASKRPSMQRLLADIERGKIDMVVFTKLDRWFRNIAEYYKVQEILERHGVNWRTIHEDYDTSTASGRFKVNIMLAVAQDEADRTSERIKAVFDSKRKRGEVVSGSVPPGIKICNKKFIVDEDKAPIMRDVFNFFIANHSVYATQRYAANTHGFLRDTSTLKRLLANPLYRGRVVDEATFDLAKELLSVRSQRNSGSPRGRIYLFKGMLHCDVCGGMMSGIVCKDFYYYRCNKHTFTGNCPNSKYIRESHVEQWLLERVVSECDAYNSRITQERTERPRIDDAGIRRKMSKLKDLYLSDLIDRDEYERDYTELRQTLEKVQEAEPPARPIDVEYVRSAVAMYDDLERPEKKEFWMRIVKEIIAYPDGTFSFVLRNI

SEQ ID NO: 15877 - protein, 551 aa, synthetic construct
MVNFTNNKCTIYCRVSSDQDEQVNSIKNQTSGLIDYAKQNNMIIADSGVFCRRNQESEPFRGYIDEGFSGAQSAKYRRAFQQMIIDSKMGLFKTILTKSVARFGRNVKDMLITIDELEKHGVGVWFEDIKAYSLNGADKIRIQLFATLAEEESRAKSDSVQWAKKQAARKGIWAGREPYGYDIQKGKLVINEYEKNIVIMIFDMYLKKGYGVNKIAKALETELKVPGKRGGRWTGSHVAGILQNSVYTGHTTLHRTRKSNINLGLIEKIPESDQIKFDDESLRIITDETFQLAENERNRRPKMKDCEKGIDTRYSNAHLFSNLIYCSNCGGSMRKKVQKSTRTTHHYYYCRNHEIYGNDICKYRNLQREEELLEWVKEEFRTFISNTADHEFNFKLLLETKYESEDFDVLIKEAKLKLSEVENEKEVNFRLLSKQIIDDEEFGIRNTAIKLEIGKLKSAINRYSNINKEIDMLHAEYKNFIKSLSEIDLDNLDNVTLRKFISGISVATMWIPGQGDEEQTIRSINWNFMEWDQLDIINDHVKKFVLDKQPN

SEQ ID NO: 15878 - protein, 515 aa, synthetic construct
MELDASLSLRDEGLSAYHQRHVRQGALGVFLRAIEDSQVPAGSVLIVEGLDRLSRAEPLQAQAQLAQIVNAGITVVTASDGREYNRERLKAQPMDLVYSLLVMIRAHEESDTKSKRVKAAIRRQCQGWIAGTWRAPIRVGRDPHWVREIEGGGFELIPERASAVQLAIQMFKQGHGAVQVVRELAARGLKISETGRTHSSNIYKILANRMLIGEKTVEVEGETFRLEGYYPALLTPAEFADLRYLAEQRGRRKGKGEIPGVVTGLGITYCGYCGAAIVAQNLMGRKRLPDGRPYPGHRRLHCVTYSQGAGCKISGSCSVVPVERALMLYCSDQMNLTRLLEGDASTASVSAQLASARQRVAELEAQVRRVTDALLLDDGEAPAAVLKRLRELESQLAGERREVDSLEHHLAASASVVAPAAADAWRELVHGVEQLDYDARMMARQLVADTFSRIVIYQSGFRPGVDSGAIGVVLIGKRGNTRMLNVDRRSGEWRAAEDLAISETTSIPLPTIAHP

SEQ ID NO: 15879 - protein, 591 aa, synthetic construct
MKKVQKIDVKKSLIETRKKVAAYARVSMETDRLKHSLSAQISYYSKLIQNNPEWEFKGVYSDYGISGTSTAKRPGFMEMMEECEKGNIDIILTKSIKRFARNTVDLLEVVRHLKSMRIEVRFENENINSLSGDGELMLSILASFAQEESRSISENVKWGTVKRFKQGIPNGRFNVFGYVWEGDKLVIVKEEAEIVRRIYSEYLSGKSRMQIEKMFAEEGITTRRGYRWVDSNIKVILRNITYTGNLLFQKEYVVDPITKKRKLNRGELPQYFVENTHEAIIPKETYDKVQVKMERRRLAGAIGNPAIPTTEMTGKIRCPHCGKNFQSSVRNLVNGKNKYWVCATRKAGHGNPCHTGDINDRLIKEIICEVLEIEEYDSELFTKEIDHVDVIGKEKFIFYLTNGRIVEKPYRKIDRKKYFTEEVRAKISEQRKNKHNYHRKNPATPFTGLIECDRCGNSFNALKTTLKTGEKITYLSCRTKRSECPHNSIQEGTLKKLLCEVLELDEFDEKVMDEKIQRIYIADNKVRFKFKDSHEETKEYLEKKRGTPWTKERREKQIPQMREYWKDENHRKEASKRMIKIRSEKEWPTRK

SEQ ID NO: 15880 - protein, 525 aa, synthetic construct
MANKKVTTIPATISKFNLAPINEVKKRRVAGYARVSTDSEEQQTSYEAQVDYYTNYIKSRDDWEFVQVYTDEGISATNTKKRDGFKRMVKDALDGKIDLIVTKSVSRFARNTVDSLSTIRKLKEHGTEVFFEKENIWTFDSKGELLITIMSSLAQEESRSISENCTWGQRKRFADGKVTVPFERFLGYDRGEDGNLIVNPEQAKVVKKIYRLFLQGYSPFGIAKELTGEGILTPGGKKKWSARTVAAILSNEKYKGDALLQKSFTVDFLTKEKKKNEGEIPQYYVTGNHEAIIPPSTFDRVQRLLEQRKAGKNRISSVSIYSSKIKCGDCGSWYGSKTWHSTSKYRQKIWQCNHKFEEKCTTPHLTEEEIQKLFLEAVNKLVKNKKEIISNHKEMAKIIFDTSVLEKEKIELEEELNIVAEQVNDCINENARKVQNQDEYEIRYTSLVNRFNATKTRLDEIKQTIIEKQSKRDEVEDFIQELEKQELMTEFDKNVWLSMVDYLTVHHDGKIEFTFLDGSKVELSR

SEQ ID NO: 15881 - protein, 548 aa, synthetic construct
MGKEVIKLEPKFPQLIKVEKLKVAAYARVSTEKDEQHNSLEAQKDYFLKYIKNEPEWEYVGLYYDDGISGLSKKNRDGFNSLVKDALDGNIDLIVTKSISRFARNTVDTISTIRKLKREGVGVFFQKENIYTLDSKSEFVLTLMSSFAQEESRSISENCTWGQRKRFADGKVSIPFARFLGYDRGENGELVVNEKEARIVEYIYSLFILGFTFSEIKSALEFYKIKSPGGTDSWNHQNIKSILTNEKYKGDALLQKSFTVDFMTKKKKKNEGELPMYYVENNHQAIIPKKIHDYVQNKMNNDVTIRVSHLGGKIICAKCGEYFGRFKIHPDWYGGRWAWRCRNKYSKSNKCVMRHLYDDNVHQAINVAAFEVLSARKDLITYVSKITGITSRKINKIIKEMGVDFTGNYQILENIIDSIKVKESHDTTFLFIDGSKAKGHIFGTGKTRIKGVREGKTHNYGNKSIRPEPEHFDEFVKWLKEESGLSESTQKSIRKRTRLAHSICKLDDIEGYIEKLETRAKYKKLDDGVKSNVKYAFRVYFRFLEQCK

SEQ ID NO: 15882 - protein, 529 aa, synthetic construct
MTPTMSLTRQNVRRGTFAAAGVSATFKPVGSYGRLSEDKALKTGRTDREEGEQVATQFKRNRVLSESLNWTIVREYNDNNIPASDPLIVRPDFEQMLKDLESGVIEGIVFTHSDRVARLEYDAARINRLYTINPKLVGRSVDGGTDLSTVEGRAMFMMQATMGGVEVYNTKRRTSGTNLANAEKGRRHHGRRAFGWNSDGTLHPEESRLLAAAIRAVPGGLRVGNFRKQLIALGYEPRPDKRRKEGAAKYNLQHSTVESYLVNPAVCGYVAYLAQADRRGGKKVWLPDHVLYVDGQPVKGNWPKIVEPEEWAACVETLEKRKQDRKDGNQQPHDTSDKYVLSGFVRCGKCSFPLLANPYTKGTTAYEKWGYRYACLSNQGGCGGITRVGPPIEELVIRVFLAEVRRSLGVVTKAEEIDETKNDARLREIDKEIEEVNVRRRERRISAIRALDLIEELEKEQNDLRRERRKLQALKVQREDASPNLLKDWDGYSVSEKKQRLRQSIRAVMVHPAGRGKRFDPELIEIVWA

SEQ ID NO: 15883 - protein, 552 aa, synthetic construct
MPIKAFAYVRYSDPSQSTGNSVARQTEMAISYAATAGVELDWTYRDDGVSAFHGLNRTTGDLGRFIGDVQSGKVAKGSHLLIEGFDRFSREDPMEALWTFLTVIRSGIVLVTLADNQVWSAETLMGQSHRLFGVLPHMERAHSESKVKSTRTLHNWQQRRAKGVVVDRLTKPAWLDVVDGEYKVNDDKQRILLRIFEEVAAGTGVDRVARRLNEAGERAWGHAYKDTGSRAGQTRKWHGSYIQTILNSRAIIGEHQHHQYESGSRKRIPIGDPIPGYFPPAISLDLYHRAKAAFKSRNVGGGRKEASLVNLFGDAIRCADCGSRMRWGGHHHRERDGGNFAYYRCSSTVQRTGCDHTPKHRVVYLENAVLNLVTEIRLEGLADDAEAKAKVAEAKHQRQLAKDRAMKAARLVLEMDNAIMRELANEASDASLAANKAVLDAEEELAIVRTRLMPSNQQTAIADLRAAYTETKDIGLRMQLAGAVKTVMDNIIIDRDGFATVSVMGGARVYRFKIAKTVTSFTLVSGETVMEIGQARTNAEAQAFKDSLKRAA

SEQ ID NO: 15884 - protein, 520 aa, synthetic construct
MARRKKSKQPSQLRLVAYARVSRAREAMESPEIQLRSVREWCAQHGHTIVTEIVDPDATGRNFNRKVQAGIGMVEDGRADGIVVYKFSRFGRHNAGVQLNLGRILGAGGELYSSTEVVDATTAAGAFSRDMLIAVASFESNRFSEQWSDSQEYRIARGLPHTGDPRFGYVHHKCRSQPITAAGWLLKNEKDPDCHPGGDCREEYRIDPVTGPVLAEMYRQYVDGSSLASIASRLIALGVPTTRNGQWRSSLVGDLMDSGFAAGFLRVGGRGLPSEANDTELVAGAQDRLISEEEWSAYKARRARMRGNASSVRYRWPLSGITRCGLCGGPMTCTTGSPGGKKLVRGYIMRCVTAQDNRACRGVWRVTADVETALFDRLDVLASLLEEAGRAASRVAPAVRSEQENQRRRIEKKLAKVRADRGRLVDLATSGALPIIEVAAKRIRLDAEIVALEDAATVAGAPAKAWTAPQVRTLRKDWPTLGMDVRREMIRTLVESITVHRDKSILVRLVEPLEGVASYS

SEQ ID NO: 15885 - protein, 624 aa, synthetic construct
MTTIADDPAASLIDPPKTAAAAVSYLRVSTREQAEKGGTDEGFSIPAQREATRRKAEQLGAGIVEEFVDAGASAKSSDRPELMRMIQYVKANKVAYCIVHKVDRLARNRADDVSIHLALQQCGVMLVSASENIDETPSGMLLHGIMSTIAEFYSRNLATEVAKGMTQKAIGGGTNGRAPIGYLNVRKRDELGREVRTIELDPERAPMIEWAFKAYASGNWSVSQLHDELTSRGLRSLPTPKRPAKPLAVSTIHRLLTNPYYKGDVVYRGTRYKGNHPALVPAEVWYQVQSVLTAHQCAVEATQVHGHYLKGTIHCGQCGSRLIVSNAKNRHGNVYCYFVCSGRHSKRTDCTRQAMLIEDVEKLVEDYYTRVQITPAQQDALAGMLHHEFDRLMAAETEELERLTTNRDRLESEQDRLMQAHYADAIPLSVLKREQDRIVAELDQVTRRIDAHYGDYADARSHLDDALGLLANCADIYTRCDDTNRRLCNQAFFTKVFIDEDNELRVEHNRPFEMLLDPQVNANALTWAADAHKARTSTNVSVGKGSSLVRAVDLRGLEPLTPCMPCRCATSCATGPESLRISRSNPFRLLHSPAPAKSTDQPTTAGCTCSIGTTGQSFQSRSRP

SEQ ID NO: 15886 - protein, 535 aa, synthetic construct
MKRAAIYARYSTDHQTDRSIEDQIALCTDFAKKQGLTVVSVFHDRARSGASILGRDGMLSAMDAGRDGGYDVLVVEALDRISRDQEDLAGIYKRLTHVGIEIRAVHDGRADIVQIGIRGLVGALYLQDLAHKVRRGMAGVVREGRNAGGRAYGYSTVPGKPGELVIKPDEAAIVVRIFEAFTAGNNPRDIAGHLNAENVPPPRGRYWQASTIYGNPKRAYGILQNAIYDGRIVWNRVHMVKDPDTGKRISRTNPKSEWQEVEAPHLRIVPAELFAAVNGRQRREHVAPHRKNGRILSGLLRCGACGSGMSIKDKMGKITRIMCTRAKEAKSCENIRPYALDDIEATVLSGLRSRLKDPKLLDHYVACYNDEHRSLYAGQGAEREKARQRLAAAEREHDRVLNGYIKGIISEQEAEQRLPLLKAEKADLERALSATPEPPKVVTLKPALVSRYIRELEELERVLAAGDELSEHGRNTVRNLVSTVTVHPAASGEKPTIQIDSYLSNMVDEALSQRFAVRGGRMVAGEGLEPPTPGL

SEQ ID NO: 15887 - protein, 602 aa, synthetic construct
MQSPTKPLAYSYIRMSTDIQLKGDSLRRQQQSSKAYADQNGLELAEAFKLEDIGVSAFKGANVSSGALGQFLALVKAGEIARGSYLLVESLDRISRQQVLDSIPVFFDIIKSGINVVTLADRHLYRAGETNFADIMYSVMVLGRAYEESKTKSMRVGAAWENKRKNAGTRKLTKVCPAWLSLQENRTGFDLIPERAEVIRQIFQLADTGNGSFSIARRLNQTAVPTFTKSNGWHESYVTKILNSRAVLGEFQPHRYDDHGDRIPHGEPVADYFPKIIEDDQFHRVQASRRRRLVEGAGRKGPEYRNLFTKIAKCEYCGAPMRFVHKGRPPKGSQALKCTNAVRGLGCESISWRYSDFETSFLYFVKEIDLTATLKAAAERSERATVEQQITVIEEKIRQLTARRERIFELLTEPGSSTAFIKGKLDECEASIATEEAQIAQLRDQRSMADMLPTISADELRSLIASVQDMSAPDIFERRAAVANRLSILVTSLRIAADGRRPKMKGIRTFLESQELNPDERDRLIDHIEKTNKQAQRYSRSFNVMLADGVSRFVVVKSDDPTDIIAEVLVDKDGEISGSDRGMPIGWSDGWDNVFDEPASVQ

SEQ ID NO: 15888 - protein, 571 aa, synthetic construct
MSTDIQLKGDSLRRQTERSKQYADEHGLDLVEDFKLEDIGVSAFKGDNLSSGALGKFLDAVKAGRIPRGSYLLVESFDRLSRQKLNASVSLFFDITSNGINLVTLSDNQLYKAGEAEFAQLIMSIVVMARANEESEMKSQRLSAAWDAKRRAVGEKKLTGLCPAWLELSEDRKDFYVIEDRAQVVRRIFEDSASGQGSFVITRRLNDAGIPAFGRSTGWVQSYVTKILQARAVLGEFQPHTKQNGRRVPLGDSIPGYYPQIVDENLFLRAQFARGKRRIEGGGRKGEALRNLFTHLATCGYCGAPMHFLNKGTGPRGGTYLKCRHALRGMDCVPTAWRYQDFERSFFLFVKEIDLAEMLRASSQKSEVLILDERAVALAEKKSELELKRERTYALIDDGAISVEFLTTKLRECEAELASVEQQIADVDGQRQEIREQQSISPDELRLLIDQLQQMEGPEAFLQRSMLATRLREIVTELKLEVEGSLPRQSRAAAFLDAADIDPQERNQILDHIERSNREALRYNRSFSVVLADGVSRRVVLRNDDPTDFVAEVLVDKDGTISGSDRGMPIG

SEQ ID NO: 15889 - protein, 510 aa, synthetic construct
MALHENSKIAVYSRKSREDRDSEDTLAKHRNELEYLIKRENFKNVQWFEEVVSGETIDERPMFSMLLPRIENGEFDAVCAVAMDRLSRGSQIDSGRILEAFKQSGTLFITPKKTYDLSIEGDEMLSEFESIIARSEYRAIKRRTINGKKNATREGRLHSGSVPYGYKWDKNLKAAVVVEEKKKIYRMMIKWFLEEQHSCTVIAEMLNELKVPSPSGRSIWYGEVVSEILSNDFHRGYVWFGKYKKSKSNNSIVQNKNLDEVLIAKGHHETMKTDEEHALILNRIEKLRTYKLAGRRLNMNTHRLSGIVRCPYCHKAQAIEQPKGRKKHVRKCLRKSAARTKECEQTKGIHEEVLFQSIMKEIKKYNEALFSPTEQDVNDDSYTTQLIGLREKAVKKAKGRIERIKEMYLDGDISKTEYKEKLNISQETLQKAENDLAELIASTEFQNALSAETKKEKWSHHKVQEMIESTDGMSNSEINLILKMLISHVTYMVEDLGDGTKNLNIKVYYN

SEQ ID NO: 15890 - protein, 515 aa, synthetic construct
MRVAIYARISSDRDGARLGVARQVEDCKALAAKKGWTVTTVLEDNDLSAWTGKPRPGYETLLDLMREGHIDAVVVWHTDRLTRSSVDLNTIITAAERHNVVVHSVMAGLLDLSTASGKMQARIVGAVAEHESDQKAERIRRKHQELAEAGKPASLGQAYGYNADGTVNAVEAAVIRDLVARLLAGESIRSLTRWLNAEGIRSKKGGEWSTSTVRQVLTSGRICGWREWTPRTPRTREERANWNGKPRRGWGMGELVAEGEWEGIISRSQTDRIRALLDDPERRTTKRRHYLLSAGILKCGVCGRSMNHKVESRVTRIAMRDEQGRTVKDAQGRVVRVRKPGATATTASRYACIAQPGRGCGRVSISCPEVDALVTEAVFEALSGADLSPRASTPSDSEVAAIRDQMADAEARLVQVGLDHADGVIGRAEWLAMKKRIESNLEGLRARLPDAEGANVLAALPTGSAGLRRAWSEMDLDLRRAVVQAVIERVIVHPSRGPKGSARFDPDRVEAVWRA

SEQ ID NO: 15891 - protein, 567 aa, synthetic construct
MTMTNMEKKQRAVIYCRVSDSKQATEGHGLDSQETRCREYAAHRGYEVVEVFSEDKTGKIAERSGIMEVLDFLQTNRNRDHIVVIIDDISRLARDIEAYKHLRRAIKAARGKLESPSIQFGEDSDSTLIENLLASVAQHQREKNAEQTKNRMRARVMNGYWVFPPPIGYRYEKVEGHGKILVRNEPFASIVAEAFEGYASGRFETFSEVKRFLEAQPVWPKGHKGEVHFERIGELFSRPVYSGHISHETWGLTLVQGKHEPLVSLATWQAVQDRRDGVAKAPAKKNISEDFPLRGFVTCGCCGHAMTANWSKGRSKLYPYYLCDTKGCPDYRKSIRKEKIEGEFTALLASLKPSEGLFNLAFDMFRDLWNAKLSSSQNQGATLRKDIAAIEKKIDQFLERVTEADSDTLIRAYEKKIKELTTQKALLSERVAHCGKPLKTFGEAYRTAFDFLANPCKLWLSDRLEDQRAVLRLVFAERLPYRRGEGYRTAKISTPFKMLGDIDMSKNGMVPHAGIEPALLSELDFESSASTSSANGARHLQPSPFTRSARGRQPANPRMRTITCLCG

SEQ ID NO: 15892 - protein, 507 aa, synthetic construct
MKRVISYIRFSSEKQAKGDSLRRQSKMVTDWLKAHPEYYLDESLTFRDLGVSGFTGKHLQGGLGDFLTAIEKGLVKAGDTLLIESLDRLSRQDVDQASELLRNILRSGVDVVTLSDGEHYTKESLKDPLALIKSILIMQRAHEESLRKSERIQAAWDAKKEEAKAGIKISKRCPAWLKLNDDRKSFSVIPEKVETVKRCFQLRLEGKSIWDIVRTLNAEGHQTLNQYKAGSFGQTSVQDLLKNRSVIGYFTPKGCEEIAGYYPSIIPETDFYRVQQLSYSRYGRKPVSENPMAVNLFKGVIRCSECGHTLIINGFTEKRHGIYRCPCKQENRCNAKGLSRKQTDGTLLALLSRIDRFEPEQINVIDTLKLQREGILKNIEKLVELSLIIDDMTAITSKLKQLKSELSLIESDIEKENQRIKSIDTGSLSDCDLSTKAGRIEAQLIIRGVVKEAVLDTTNKRCKVVFHNGKVIDLPITENPLEVVTEAIQSLSEIASKGLLDIDEFSL

SEQ ID NO: 15893 - protein, 583 aa, synthetic construct
MDSPANCILYIRFSTKRQESGASRERQLEDCYAYAGRQGWTVTRVVEDLGRSAWSGHHLNGGNLGKLADEIRAGEIPQGTIILTEKLDRLSRMESRVTRRWMEDMTDAGVMFATVTPGKLHDRDTFGGSRLTDFLEILLGAKAANDYSENLSEKVTDGWEKKLKRQKTDLITRKVPGWITVTKDGDRVCNEHAATVVKIYQLAADGRGVRMIAKRLNDDKVPTWGRTATWDQSNVRFVLTSPAAEGDYLSGGANPGRVKNAGVFHPGYYERAVPADLVAKARAQLAGRKLTGGRETGKAVNLFSGLIVCDHCGARMYLRTLPNKTRVYQCSAANQRRGCPYNETFRYEPFEEAALDVVLTRALDDRHFRRPDDSLSLVHQVAAQQKAIADADLLAKNAYAIYLKHPDNQMAEDQFNELSAALKTAKAALGPLEDALAKARGWVSPAEHARRVMEIRDAIASPDKVIREAARLKVMDALKGVVAEVRCNAVDTQRGEPERTFALTLVGGMIGVKFDNNGMVIADYDLTKNLEVVTLPDGTAVDMAPGLRAGMLGGEQRLENALDAVLRRQEAAASSSSLTGARA

SEQ ID NO: 15894 - protein, 538 aa, synthetic construct
MSTAPNVMIIPAKVQTAESRRKYHQLRVAAYCRVSTAQEEQQNSYQVQIAYYTDLINRKKEWTLAGIFADEGISGTQTKKRTEFNRMIRMCRNKKIDLVITKSISRFARNTVDCLEYVRQLKDLGIGVIFEKENINTLTMTSEFMIALYGSFAQAESESISKNVSWGKEKAYREGKVQFQYKYLLGYKKGEDGKPEIVPEEAETVRLIYTLFLDGYSMKGIKNVLESKKLLTSMGNKIWNESFIRSILKNEKYVGDALLQKTYTLDCITHKVVKNYGERPMYLVTDHHDPIIDRDTYNRVQQELARRSSKRKVSDKTITEQGKYSSKYALTELLICGKCGTPYRRTTWVSRGKKLIVWRCISRLEHGRRYCPDSPTIKEENLHRGIIRAINNYYSCRDDIKRILKANISSVLECQGQKEILATEKRLKEIDQARTDLVGLIASGGCDEDTLDGDFAKLYAEEQDLNERLKMLKLQNQTSDETQQKLDKVTKMIEHEKFELETFDNVLVRKLIECIKILSKNEILVIFKGGYEVRSEIE

SEQ ID NO: 15895 - protein, 513 aa, synthetic construct
MTTVTIIQPTISEEQNHKLRCAAYCRVSSNSEDQLNSFMAQTRYYEKAFEKSDREQLVDIYADEGITGTREDKRDEFQRMISDCRKGRIDRIYTKSISRFARNTKDCLKNIRELKSLGITVLFEKENIDTADMTDEMMITIMGGLAQEESTSISQNLRWSIKKRMENGTIKMCKAAFGYKLANGELVLKEDEAEIVRKIFEWYLSGAGTTQIANKLNSMAVEKYGKECHWTSGTVCTMLKNEKYIGDQLFQKRYTTSVLPYKRVYNRGEHAKYYYSQRHKPIITREVFYKVQKILNEQKKAHKGFQHKHIFSKKIYCGECGTIYKLKKSKTEACWVCRNHDYDSASCSMKRVSERNIKSAFVKLHNKLLYNYRQILTPLAVNLERVNLKSLSNNTDLLEIHKQIAKLKEQTHVLARLKTKGFLDEAKYLEQTTELNSKTAKLQTEIKKLNVSDEEDETLEQLDMLIGYFEKRQKLMVEFEESAFESIVDKIVVKNQNELEFHLIGGLELAEEI

SEQ ID NO: 15896 - protein, 452 aa, synthetic construct
MIRMCRNKKIDLVITKSISRFARNTVDCLEYVRQLKDLGIGVIFEKENINTLTMTSEFMIALYGSFAQAESESISKNVSWGKEKAYCEGKVQFQYKYLLGYKKGEDGKPEIVPEEAETVRLIYTLFLDGYSMSRIKKLLENKGILTSQGKKVWNESLIRSILKNEKYVGDALLQKTFTSDCITHKVVKNHGERPMYLVTDHHDPIIDRDTYNRVQQELARRSSKRKVSDKTITEQGKYSSKYALTELLICGKCGTPYRRTTWTSRGKKLIVWRCISRLEHGKRYCPDSPTIKEEQLHKAIIRAINNYYSCGNDVEKILKANIGNVLECQGQEEIIAAENRLKEIDQARNDLISLIATGGCDEDKLDSEFEKLYKEEQSLSERLAMLKSKNQTSAETQAKLDKIIDMIEHEKFELETFDNVLIRKLIECVKVLSKTEILLIFKGGYEVRTEIE

SEQ ID NO: 15897 - protein, 515 aa, synthetic construct
MRAAIYVRLSRDTDESTSPERQRAACEAICEARGWEVVAVEEDIDVSGFSRGLERPGLQRILARLADLDVVVFFKIDRLARSTVDFAEIMQIAETQSVALASAQEPLDLTSSMGRAMARVIAVFAELESDTIGSRVSNAHEHLRREGRWTGGRVPYGYRVVPNPNGAGRVLEINPDEEKVVHGIVDRVLAKESLMKIATDLTKAGVVSPGHRSRQPNGKRSDSERWYTTTLRSLLTNPQLLGQVIEDGKPILRTDGLPLVTRPPILDMRTWHALQDELTRRSDRSERRREGTALLRGVLFCSLCSGRMYTYVAGGRTRYRCIGRLKQRQAGQDVDCYGPSVAAEALEAHVAKEFLRGIGHMPVVKIEKKVAEDFRPQIRQAEEALKDLEADRYERGLFKGEDGAHRYAAQYAKLEERLSSLKARQSDAAPGGVEEIPTGKTHAELWDDSDTAGRRDLLLNAGTFVEVAPAQRGGKKLDPSRISVYFGPEGFIRRAEAEGKDPESATLMLIDSDFN

SEQ ID NO: 15898 - protein, 487 aa, synthetic construct
MQLSSTPTIGRLKCALYLRISKDKKGLSLGVDRQEEACRALAAQLGWEVYAAFSENDLSAYSGKPRPLYNQLLDVMRSGQVSAVIALHTDRLHRSPVELEEFIDICEQNRVEVRTVQAGELDLTTATGRMAARIYGAVARHEVEHAIERVKAAKLQAAKAGKTSGGNRAYGYRPGGMVIDENEAQFVLEAIDRFIAGDSWRTIALDFNRRCITTAKGNMWKAINVRNMATLPRHAGYREHHGVLYEATWPPIITRDTYEQLQSTAKRRQEQDKRRSYAKKHLLTGFVFCGLCGNRMTIINAQNRDGSYSPAFSCRKIDQFGNPTGCGKVKRRKDPVEHLVIESLLYRLDTPDLGALLGQSEHDDGELRTKLGEHATQSARLQEILDAYASGDLTMSEWKTAKATAQARLDQLDKDIAKLTSRRTIAHLPAGLTVRQAWEAGDLEWRRQLLDVLIERVLIYPREKGDQKVRYAGFIFNPERVEIRWRA

SEQ ID NO: 15899 - protein, 521 aa, synthetic construct
MTRKVITIEPAKIVSQKNIIPSLTKRRVAGYARVSTDNEDQASSYETQMNYYKSYIESRNDWEYVKMYSDEGISGTNTKKRLGFQEMLEDALKGKIDLIITKSVSRFARNTVDSLTTVRKLKEVGVEIYFEKENIWTLDSKGELLITIMSSLAQEESRSISENVTWSKRKLAAEGQVQFNYTLTLGFKQKQDGGFEIDEEEAKIVRYIFGEYLKGENPNSIAKKLTEKQIPTPAGKKIWSYTTIKRILSNEKYKGDALLQKSYTVDFLTKTRKENKGQLPQYYVENSHEAIIDKTTFDLVQEELKRRERRVKTSYSGKIKCGDCGKGYGRHTWHSSSKYKRHIYRCSYKYKGKEKCKTPHLYQEEIETIVVESINKLIINKQEIIGNLKELINITEQSQIQTKEEIQEIEQDLERLAIEVDDLIKENSKKIQNQDLYKERYNKLVNKYKKLEEYHKKKQSQCIKQEERKIEIKLFIEKLKMQDKLLEVFDEQLFNILVEKLVIHREKRIEVHFKTGQVISM

SEQ ID NO: 15900 - protein, 582 aa, synthetic construct
MPKAYSYLRFSTPEQAEGDSYRRQMAAAVEWCRRKGVELDDNLRFHDLGKSGYTGANFTEGALGRFVDAVQAGKIERGSYLLIESWDRFSRQNAMTATARLFDLATAGITVVTVDDGQEYSKERLTGPDVSPMLLLVVKLSQAHLESARKSSNVGKAWAEKRQRARAGEHKMTKRAPEWLSLQDGRFVERDERVRIVCRVFHETIEGYGRRTIARRLNEEGEPAFKGANGWHSSAIAKILSNRAVLGDFFPGTGSARFRTYKKEAEPIKNYYPAILEEATFWRAQAVIASRRRVTNDEGEVVQRGTAGRRGGGIAHLLIGLCRCARCHGAMHTINKGKPPKGALYFECDTARRKAGCDNAMRWRVDDIERRLLRHLSYIDADAVLRGEASHGELEAVEGAKARLADAQKRKANRAAMMEVAEGLDTDSLARYRELVDEVAARQAELAEAEKALAQTAADPGLKARLAEAVDLNRAMSEAEGEQRTAIRVRLAEQLRQLVDHIRFDHELSVVAVLKPRPDVPTNQIPFTWGDGGLWTLSLDYDSQPHGPDFSEDMGDYDDDQTRARTLAFLNRRLAEKARGAS

SEQ ID NO: 15901 - protein, 628 aa, synthetic construct
MRKNEKITALYERLSRDDFGKDDDQQRESNSISNQKAMLEEFAARQGFTNIVHFTDDGISGTCFDRPGFLAMMKEVEAGNVEYLCIKDMSRMGRDYLKVGQIMEILRQRGVRLIAINDGVDSARGDDDFTPFRNIMNEYYARDTSRKIRSTFQSKGKSGKHLTGTVIYGYLWNEARDQWLVDPEAAEVVKRIFSMTIDGYGPYQIASKLKSEKVLIPSAYLAQHGEGVNKNKTFKDVYGWGSSTICNILEKREYLGHTINFKTRKHFKDKKSHYVPEDEWTIFENTHEPIIDQQTFDLVQKIRGNVRRYPDGWGEAAPLTGLLYCADCGGKMYVHRTNNGKRISQYTCSQYTKVPCGTLCKTQHRINEDVVLSLVSEMLKAIAEYAKHDRAEFVRVVQEAQSSQQTTEVRKQRTRLATAKQRVSELEVLLCKIYEDNILGKLSDSRYATLDAQYEKEQSELTAEISVLEEAVKSYEKHEKDADRFIALIDKYENFDKLTIAMLNEFIEKILVHERDRKGSIQTTQEVEIYFNFVGRFVPPAFGEVELTPEELEEIRKREERKDRLHQNYLKRKASGAQKRYEDKIKKRKKAEIEAKKAAIRAEDIAKGVFVPVSSLPQREPMKGVQTA

SEQ ID NO: 15902 - protein, 506 aa, synthetic construct
MRTVITYLRFSSATQGAEGADSTRRQNELFKQWLRKNSDAQVVASFSDEGLSGYKGKHLTGQFGDMLARIEAGEFPAGTVLLVEAIDRIGRLEHLETEALMNRIIAHGIEIHTLQDGLIYTRDALSDDLGISIIQRVKSYLAHQESKQKSFRVSQKWKQRAKLALAGEQRLTRNVPGWIDPDTFKCNEHAETVRLIFKLLLDGESLHNIARHLQANNISSFSRRKDANGFSVHSVRTVLRSESVIGTLPASQRNDRPAIPNYYEAAIDASTFNKAQEILGKNRIGRTPASDNPLTINIFKGLFRCQCGASVHPTGTKNKYQGVYRCNNHLDGRCDVPPLKRKPFDKWMIDNFLGMIDVGNDGEAEGKIAALQHEVEIVTTRIKKATALLLEMDDITELKTQVKELNQKRTELQTTIDNMRRKASLTDKELPQLKDIDLMTKAGRVECQLILSKHLKGLTLGKDSVTVTLQNDTEITIPTDPLPLNDGTSIFEIAEKNLLNIDTFQL

SEQ ID NO: 15903 - protein, 507 aa, synthetic construct
MKRVISYIRFSSEKQAKGDSLRRQSKMVTDWLKAHPEYYLDQDLSFRDLGVSGFTGKHLKGGLGDFLTAIEKGLVKAGDTLLIESLDRLSRQDIDIASELLRNILRSGVDVVTLSDGEHYTRESLRDPLALIKSILIMQRAHEESLRKAERIQAAWDAKKEAAKAGIKVSKRCPAWLKLNDDRKSFSVIPEKVETVKRCFQLRLEGKSIWEIVRTLNDEGHQSMSQYKPGSFGQSSVQDLLKNRSVIGYFTPKGCEEIAGYYPAIIDETTFYKVQQLSYARYGRKPASDKPLSVNLFKGVIRCSECGHALIITGFSDTRSGIYRCPLRNENRCSAKGLSRKQTDGTLLALLSRLDRFDSDMTNTIDTLKLHREHISSNIEKLVQLSLEIEDLNAITNKLKQLKNELSQVDADIEKETQRLKSIDVGCLSDCDLTTKAGRIEAQLIIKSAVKEVVLNTAKRRCKVTFHNSKIIDLPITENPSEDVTEAIQSLSEVTERGLIDVDVVEI

SEQ ID NO: 15904 - protein, 559 aa, synthetic construct
MKTKLYSYIRFSSMRQNDGSSYERQIRMAREIAVKYDLELVNDYQDLGVSAFKGANSKTGALSRFLDAIGRSVPVGSWLFIENLDRLSRADIVSAQELFLSIIRRGITIVTGMDNKIYSLDTVTANPMDLMFSILLFIRGNEESQTKRNRTNSSALIKIKAHQENPQNPAVAIEEIGKNMWWTDTTSGYVLPHPVFFPIVQEVVELRRNGRSTAEILDHLNATYTPPPAASHKRHSNWSRAMIERLFHTRALIGIKEISVDGVKYELKDYYPRVLDDAEFYHLKKSIGVRACNFGDKEEVKPIPLLSGVGLLKCEHCGSAMVKVKGTNRRPNQYRYSCDAMRSSRIECVHTNWSFRGDQLEKAVLQLLADKIWIAEDKANPVPALKVQIDEISRKIDNLITLSAMTGATKELADQITTLNSERETLYNQLKMAEEEMYSVDSQGWEKLAEFDLEDVYNEDRIKVRFKIKQALKRIGCSRIDKYKNLFVLEYIDGKTQRVVIENSRGPRKGRIFVDLKTINDRQILESNGLVLHPCLDMLTDKNWKPEEEIPGPLQEFGI

SEQ ID NO: 15905 - protein, 596 aa, synthetic construct
MMSKIIPYGYLRVSSLEQVKSGGGLDSQDEAVRRYINERSDLFDIEQMVMMSDMASAYSGKQLSEGQLGGFLADVEAGKVPSGSALIAYSIDRLSRQNPWIGTKLISTLIGAGIQIHSVAENQILKSSDPVGAIMSTIYLMRANNESEIKSDRAKTGYQKRLKESIQNKKVLTRQMPRWLFDNDGKYAVEPKMKRVIEFVFDSYIAGQSSGYIANELNNKGWLYGNTYWRGSYVAKLIRDERLIGKHLRYSKQIKGVKREVIETIPDFYPNAVDVEKYHLANNMLTNVAENIRGRTRITYGDTSILRNIFSNVIKCGLCGGDTSVVQNTRKKVVGDKFVYIPYKMFLRCRNKYELKTCTHGDIRYEIIERAILVHLMGLDIANLLATPIDNSIELYKTELERCIADESQYREIIELRRKAGKRVRPETVEVLEDVLDRIDELNRLIESHVVENFVPDFNVDLGNIADVSNVEERSLIKKGIATIAKRIFYKRVGGYILVEVMYRNLSIKHILVIDNKSSNTVVNFSIKYEEEKQIYTCNSFNMNYLIKSGDFEIHEETTMEDYAQMMNFIDIVSEDEAKKAKEFLVKNFNQNFISK

SEQ ID NO: 15906 - protein, 507 aa, synthetic construct
MKRAISYIRFSSEKQSRGDSLRRQSKMVNDWLKAHPEYYLDQDLSFRDLGVSGFTGKHLKGGLGDFLTAIEKGLVKAGDTLLIESLDRLSRQAVDRASELLRNILRSGVDIVTLSDGEHYTSESLKDPLALIKSILIMQRAHEESLRKSERIQAAWDAKKEAAKAGIKVSRRCPAWLRLNDDRKSFSVIPEKVETVKRCFQLRLEGKSIWEIVRTLNAEGHQTLNQYKAGKFGQTSVQDLLKNRSVIGYFTPKGCEEISGYYPAIIDETTFYKVQQLSHSRYGKRSVSDKPLSVNLFKGVIRCSECGHALIITGFSDTRNGIYRCPLRNENRCNAKGLSRKQTDGTLLALLSRLDRFDSDMTNVIDALKLHREHISNNIEKLVQLSLEIEDLSAITIKLKQLKGELSQVDADIEKETQRLKSIDVGCLSDCDLTTKAGRIEAQLIIKSAVKEVVLNAAKRRCKVTFHNSKSITLPITENPSEDVTEAIQSLSEVTEKGLIDVDVVEI

SEQ ID NO: 15907 - protein, 508 aa, synthetic construct
MKKAIAYMRFSSPGQMSGDSLNRQRRLIAEWLKVNSDYYLDTITYEDLGLSAFKGKHAQSGAFSEFLDAIEHGYILPGTTLLVESLDRLSREKVGEAIERLKLILNHGIDVITLCDNTVYNIDSLNEPYSLIKAILIAQRANEESEIKSSRVKLSWKKKRQDALESGTIMTASCPRWLSLDDKRTAFVPDPDRVKTIELIFKLRMERRSLNAIAKYLNDHAVKNFSGKESTWGPSVIEKLLANKALIGICVPSYRARGKGISEIAGYYPRVISDDLFYAVQEIRLAPFGISNSSKNPMLINLLRTVMKCEACGNTMIVHAVSGSLHGYYVCPMRRLHRCDRPSIKRDLVDYNIINELLFNCSKIQPVENKKDANETLELKIIELQMKINNLIVALSVAPEVTAIAEKIRLLDKELRRASVSLKTLKSKGVNSFSDFYAIDLTSKNGRELCRTLAYKTFEKIIINTDNKTCDIYFMNGIVFKHYPLMKVISAQQAISALKYMVDGEIYF

SEQ ID NO: 15908 - protein, 547 aa, synthetic construct
MKLLVTYIRWSTKEQDSGDSLRRQTNLIDAFYAKHKDDYYLLPAHRYVDKGKSGFHQQHKNQGSDFRRMFENVMSGAIPEGSLIVVENFDRFSRADIDTAIDDVRQILRKGVSILTLGDGELYDKSALTDPVKLIKHIIIAERAHQESLVKQKRIAQVWNHKTQLARELKKPMGKQAPGWLELSEDGSHYIVDEDKASLVNIIYDKRLSGMSMFAICKWLNEQGYPTINQRKVRISKTKKPDGNWSALSVKHILTSRSVLGYLPAKISTEDRKTVLREEIEGFYPQIVTDSKFYAVQQLLEETGKGKTSSGEHWLYVNILKGLIRCKCGLVMTPTGIRKPVYQGTYRCNGNKESRCSYGTVSRKLLDTQLCSRLFSKLSQLHDEATDTAKLDELQRRLNTVDSELEKLTETLIQLPNITQIQEALRVKQEEKDELIVQLSREKARVKSVSSLDLSGLDMESVEGRTEAQIIIKRLVKEIVVSGNEKLVDIYLHNGNMIRGFPLDGKDDHTLTLEEATDEMQSLDDMLIFGEPVTRIYPAGDMEEVDA

SEQ ID NO: 15909 - protein, 506 aa, synthetic construct
MRSVITYLRYSSAIQGAEGADSTRRQNDLFKQWLKKNSDAQVVASFSDEGLSGYKGKHLTGQFGDMLARIESGEFPEGTILLVESIDRIGRLEHLETEALMNRILGNGLEIHTLQDGLIYTKDALADDLGISIIQRVKAYIAHQESKQKSFRVSQKWEQRAKLALAGEQRLTKMVPGWIDPDTFKLNEHAETVRLIFKLLLSGESLHNIARHLQSNGIKSFSRRKDANGFSVHSVRTILRSETTIGTLPASQRNDRPAIPNYYEAAIDAATFNKAQEILDKNRKGRTPASDNPLTINIFKGLFRCRCGASVHPTGTKNKYAGVYRCNNHLDGRCDVQPLKRKPFDRWMIDNFLGMIDVVSDGETERRLAELQHEVEIVTARIKKATALLLEMDDIDELKIQLKELNQKRTELQTTIDNMRRKASLTDKELPQLKDIDLTTKAGRVECQLILSKHLKGLTLGKDSVIVTLQNDTEITIPTNPLPLNDGTSIFEIADKELLDIDAFRL

SEQ ID NO: 15910 - protein, 515 aa, synthetic construct
MKTAIYLRKSRADLEAEARGEGETLAKHRTTLLKIAKEMNLNVLAVREEIVSGESLVKRPEMLALLEEIEDNKYDVVLCMDMDRLGRGGMKEQGIILETFKRSNTKIMTPRKTYDLNDEWDEEYSEFEAFMARKELKIITRRMQRGRVASVEAGNYLGTHAPFGYDIHRLNKRERTLTINPEEASVVRMIFDWYANEDMGANAIRSKLNDLGYKSKLGNEWNPYSILDILKNNVYIGKVTWQKRKEVKQPDAVKRSCARQDKSDWIIADGKHEPIIPESLFEQVQEKLNSRYHVPYNTNGIKNPLAGIIKCSKCGYSMVQRYPKNRKETMDCKHRGCENKSSYTELIEKRLLEALKEWYINYKADFEKHKQDDKLKETQVIQINEAALRKLEKELVDVQKQKNNLHDLLERGVYTVDMFLERSNVVSDRITEITSTMENLKKEIKTEIKKEKVKKDTIPQVEHVLDLYFKTDDPKKKNSLLKSVLEKAVYKKEKWQRLDDFELVLYPKLPQDGDI

SEQ ID NO: 15911 - protein, 565 aa, synthetic construct
MGLKKFLNEARIPEKRKLVALYCRVSTIEQAEEGYSIDEQERLLEEWCKKNNYSIYKCYSDRGISGKDIKNRPQLKELLSDAQEKKFDMVISWKINRISRKLSDVLKIVDILEENNVIFKSYSEPFETNTPAGKMQFQMMALISEFERGTISQNVRMGLCAKARAGEWCGGRVLGYDLVPMENQEGAKRRKTKLTINENEAEIVKLIFNEYSEGKGYKAITSKLNRLGYKTKRGNNFSVASIKDILTNPVYIGKVRYNVRQNWSEKRRRNINPNPIITDGIHEAIIDEKLWDKVQAILESKQGKPARIYDGEYPLTGILKCPKCGAGMVIMRTTNTLKDGTKRRIQYYACGNWKNKGTSVCNSNSIRVDKANEYVFNKLSELLSNEKMVETIVNNINKERHKKINPAKKDLERIDKELEKIDKKKTKLFEGYEEDLISKEEFKERKDELNKRAKSLQEEKEPLLVTLSDDVSEEIPYEFIKSILENFGKVLTESATREQQKKLLHMIISEITINEAREIDSIKLKINDSLVDYISKEEGVSIKDAPSSFLLRNIGVNTLNLDIAI

SEQ ID NO: 15912 - protein, 549 aa, synthetic construct
MKNKLKSSLNIESPKIAIYMRVSTSKQADNQSLDTQEKTINSYIASRHDWINPICYKYVESHSASLKPKASNNLKESSFDSLKRPKLRELFLDATIGKFDYVLCASHDRLTRNTNEGIILKHLFSRLNITLIYCRPGETISSENEALNKFFENLLVNIAALESNITGGRVALANKHKIQNNFWAGGPPPFGYNLVSQPNNKRNSFLEINFEEARIVKKIFELYNLGCSYNEILTRLNRDFTLPPKRLWTHNTLKEILRNPVYTGFLVWNKRGGARKPNRHSPNDFVKSNLVEKNIIIPENEFLETQKLRNILSKDSKFLSTDFLLRDFLYCNKCNKKLLAKNYGNNKRFYYCHSHNNMEINKKCRSIKASKIESTILSNINDLINSSLQSEVQIEKFYDNYIENFNAELLDNKKSLEITINQLKSSTDLLELCVNEINISKDNLTVDYENFNSNSTEFSFINALSEFQVITQTEIKSLKARKEYLTYKINSSPKSFDDFKSNLNKSFKLFKYDEEKQKLVSSPRSFRLFLFKVVKKIILSDHEITIIFK

SEQ ID NO: 15913 - protein, 537 aa, synthetic construct
MKKAAIYTRKSKFTEKGDSIESQIKLCSKYLDNINIKDYCIYTDEGFSGKNTDRPEFQRMLSDAKAKKFDVIICYKFDRISRNVSDFSNLINKLNELNISFISVVEQFDTNSAIGRAMMYLCTVFSQLERETISQRITDNMYSLATKGYWLGGETPTGFRSEKKFFNSNNKQKMYSSLVPIKEELDLVKLIFNKYLEFNSISRIEKYLLSNNIKTKRNKDWSKASISLILRNPAYVKADEETFKYIESTGSKVYGNPDGKHGLLIYKKNKGRKGAKHDISEWIYAVSEHEGIIDSDIWVAIQKQIKKNAILAPALGTSNIALLTGLIRCAKCNSPMRVAYGKRNPKTNKKNYYYVCTLKTKSGKTRCNSKNLPGLDLDNLILDKLKEMSLDKNTLLKELNKYKDTIESNFHNDVLKNIQNNISKNNSMIDNLLNNVALSTDSEVTAILLEKISKLKDENKLLTQKIDDLKAELEAQETLLNDCNSLITKLKYFSKFIDNSSIEEQKQLVSSVIEKVIANGDTGSIEIKFRPLLDFKI

SEQ ID NO: 15914 - protein, 549 aa, synthetic construct
MKNKLKSSLNIESPKIAIYMRVSTSKQTDNQSLDTQEKTINSYIASRHDWINPICYKYIESHSASIKPKVSNTLKESSFDSLKRPKLRELFLDATIGKFDYVLCASHDRLTRNTNEGIILKHLFSRLNITLIYCRPGETISSENEALNKFFENLLVNIAALESNITGGRVTLANKHKIQNNFWAGGPPPFGYNLVSQSSNKRNSFLEINFEEARIVKKIFELYNLGCSYTEILTRLNRDFTLPPKRIWTHNTLKEILRNPVYTGFLVWNKRGGARKPNRHSPNDFVKSNLVEKNIIIPENEFLETQKLRNILSKDSKFLSTDFLLRDFLYCNKCNKKLLAKNYGNNKRFYYCSSHNNMKINKKCRSIKASKIESIILSKINDLLNSSLQSEVQIKKFYDNYIENFNTELLDNKKSLEITINQLKSSTDLLELCVNEINISKNNLTVDYEDLSSSSTEFSFINALLEFQVVTQTEIKSLKARKEYLTCKINSSPKSFDDFKFNLNKSFKLFKYDEEKQKLISSPRSFRLFLFKVVKKIILSDHEITIIFK

SEQ ID NO: 15915 - protein, 537 aa, synthetic construct
MKKAAIYTRKSKFTEKGDSIESQIKLCSKYLDNINIKDYCIYTDEGFSGKNTDRPEFQRMLSDAKAKKFDVIICYKFDRISRNVSDFSNLINKLNELNISFISVVEQFDTNSAIGRAMMYLCTVFSQLERETISQRITDNMYSLATKGYWLGGEAPTGFRSEKKFFNSNNKQKMYSSLVPIKEELDLVKLIFNKYLEFNSISKIEKYLLSNNIKTKRNKDWSKASISLILRNPAYVKANEETFKYIESTGSKVYGNPDGKHGLLIYKKNKGRKGAKHDISEWIYAVSEHEGIIDSDIWVAIQKQIKKNAILAPALGTSNIALLTGLIRCAKCNSPMRVAYGKRNPKTNKKNYYYVCTLKTKSGKTRCDSKNLPGLDLDNLILDKLKEMSLDKNTLLKELNKYKDTIESNFHNDVLKNIQNNISKNNSMIDNLLNNVALSTDSEVTSILLEKISKLKDENKLLTQKIDDLKSELEAQETLLNDCNSLITKLKYFSKFIDNSSIEEQKQLVSSVIEKVIADGDTGSIEIKFRPLLDFKI

SEQ ID NO: 15916 - protein, 525 aa, synthetic construct
MGKVRIIPAHQQKGNSVQPQKNRLPFEQLRVAAYCRVSTDYDEQASSYETQVIHYKELIQKEPTWKFAGIYADDGISGTNTKKREQFNQMIAACKAGKIDLIVTKSISRFARNTIDCLKYIRDLKAINVAIFFEKENINTMDAKGEVLITIMASLAQQESESLSQNVKMGIQYRYQQGKVFVNHNHFLGYTKDAQGNLVIEPAEAKVIKRIFYSYLNGMSMKQIADSLKADGILTGGKTKNWRSSSVAKILKNEKYMGDALLQKTYTVDFLNKKRVKNEGIMPQYYVENDHPAIIPKSVFMQVQQLIKQRRNGITTKNGKHRRLNGKYCFSQIVFCGKCGDIFQRNMWYRPEKVAVWRCASRVRRSKTGRRCMIRNVKEPLLKEATVEAFNQLIEGHELASKQIKANIMQVIKDSQGPTLDQLDKQLEEVQMKLIQAANQHQDCNALTQQIMDLRKQKEKVQSRETNQQVKLHSLEEINELVEFHKYGLVDFDEGLVRRLIEKITIYQRYMEFTFKDGEVIRINM

SEQ ID NO: 15917 - protein, 553 aa, synthetic construct
MSTITKIQGYQHDVKQLRVAAYCRVSTDNFEQLESLENQRAHYQKYIDNHPNWELAKIYYDEGISGTKMTKRNALKELLTDCHNHRIDLVVTKSISRLSRNTTDCLQIVRELQQLNIPIIFEKEHINTGAMASELFLSILSSIAQDESHSTAGNLRWAIRKRFASGKFHVSSAPYGYSIEDGNLVINHTEAKTVRQIFQRFLSGTSASQIAKELNQKQVSTKRGGQWRSNTVINILRNGNYTGDMLCQKTYRDDQYHRHFNQGELAQYLIEDHHPSLINHENFNRVQVLLKEAVKKRHIETGSHKYQQHYLFSGKIICGQCGTIFKRQTRPHKIYWACQQHLRSAQQCPTKAVSEASLKAAFCNMINKLVYSKKFLLQPLLEGLKEEANVNSDGQLISLTKQIKANDHKAETLTELMHAGLLDKAIYVNQTARLEQDTYQCQEKIKQLNGQNTDSANDFEDVRTLLRWCHQGKQLTEFDEGVFQEFVQQIVVNSSNKATFILKCGLKLPEKLNKNATIDGHFYRDIIKQRYNDPIKQAEYLYSIIESEGDLIG

SEQ ID NO: 15918 - protein, 467 aa, synthetic construct
MKCVIYRRVSTDMQVEEGISLDMQRLRLEQYAKSQGWVVVNDYCDEGYSAKNTERPAFQQMIKDMKKKQFDIILVYRLDRFTRSVSDLHSILKTMDEYNVKFKSSTEIFDTTTATGRMFITLVATLAQWERETTAERVRDSMQKKAELGLRNGAKAPMGYDLNKGNLYINHTEAEIVKYIFEMFKTKGIISIVKSLNSRGVKTKQGKIFNYDAVRYIINNPIYIGKIRWGEDILTDIAQKDFESFIDKDTWYTVQQVQDSRKIGKVRLHNFFVFSNVLRCARCGKHFLGNKQVRSHNRIVMSYRCSSRHHKGTCDMPQVPEDVIEKEFLNLLEDAIVDLDDTEERPIELSNLQEQYNRIQDKKARLKYLFIEGDIPKNEYKKDMLTLTQEETIIQKQLANITDTASSFEIKELLNQLKDEWHNLNNESKKAAVNAIVSSITVDVIKPARVGKNPIAPVIKVTDFKIK

SEQ ID NO: 15919 - protein, 540 aa, synthetic construct
MKAAIYSRKSVFTGKGESVENQIQMCKEYGEKNLGIKEFVIYEDEGFSGGNTKRPKFQELLRDVKKKKFDTLICYRLDRISRNVADFSTTLELLQDNNISFVSIKEQFDTSTPMGKAMVYIASVFAQLERETIAERIRDNMLELAKTGRWLGGQTPLGFKSEKISYFDAEMKERTMYKLSPENKELELVKLIYNKYLETGSIHLTLKYLLSNSIKGKNGGEFASMSINDILRNPVYVRSNQMVIDYLKDKGMNVCGTANGNGILIYNKRNSKYKKKDINEWIAAVSKHKGIIPANTWIEVQKTLDKNSSKSTPRQGTSKKSILSGVLKCSRCSSPMRVTYGRKRKDGTSIYYYTCTMKAHSGKTRCDNPNVRGDYLEKAIIKKLQNLNSDVVIKELEEYKKQLAATTENSIIKNISKEIEEKKKEMDSLLKQLSKVESPVASEFIISKVDSLGTEIKDLEISLTKTNSKKKENSNIELNIEIVLQSLKEFNTFFNSVESLKTDELTIQRKRYLLERAVDEITIDGETKKIGIDLWGSKKK

SEQ ID NO: 15920 - protein, 467 aa, synthetic construct
MKCVIYRRVSTDMQVEEGISLDMQKLRLEQYAKSQDWVVVNDYCDEGYSAKNTERPAFQQMIKDMKKKQFDIILVYRLDRFTRSVSDLHSILKTMDKYNVKFKSSTEIFDTTTATGRMFITLVATLAQWERETTAERVRDSMQKKAELGLRNGAKAPMGYDLNKGKLYINQTEAEIVKYIFEMYKTKGIISIVKSLNSRGVKTKQGKIFNYDAVRYIINNPIYIGKIRWGDDILTDIAQKDFKSFIDKDTWYTVQQVQDSRKIGKVRLHNFFVFSNVLKCSRCGKHFLGNKQVRSHNRIAMSYRCSSRHHKGTCDMPQVPEDVIEKEFLNLLEDVIVDLDDTEEKPIELSNLQEQCNRIQDKKARLKYLFIEGDIAKNEYKKDMLTLTQEENIIQKQLANITDTASSFEIKELLNQLKDEWHNLNNESKKAAVNSIVASMEINVIKPARVGKNPIAPVIKVTDFKIK

SEQ ID NO: 15921 - protein, 546 aa, synthetic construct
MKAVIYARVSTQDQALGFSLATQEELCEKKARALGALEVEVVEDAYTGTELNRPSLDYVRQLVAAGKVDLVVVYDPDRLSRNLTDLLILCREFDKAGVKLEFVNFEWQKTPQGMLFLQMRGAFAEFEHALIKERTQRGKAKKAASGKIRCYAKPFGYDWDAERDTLVINPQEAKIVKQMFEWLTDPLEPLTPWQITQKLGQVYPQGPRGKGWVHSSVVRMLKNPVYTGRLRRKDEQPDWKPVLVPAIIDQETFMRAQEMLARSKRFNPKTTRRRFLLQRLLVCGECGRRLTVVSHNNPQRAKYSYYTCPGRYPTKFDDQGRVGRCGLPPWRTEEIDKTVWDTIASIIKNPELFYQYITSEKLETASIPRRRLEEARKRLEQVQRVIERIDRAYFILEALPEEDYKRYRAEQEGELVRIEEDIKRLEAVINAQKQVQKGVEFLRQYAENLARSVDELNFFQKQNITRELVQRVKIYADGSLEIEGYFNLPFTGPGKNVPDHCEELTTLTTQKNLKEPLSSSVLTCTHRKKGHPKVAEGIIHLKILAV

SEQ ID NO: 15922 - protein, 554 aa, synthetic construct
MKAVAYARFSSDNQREESITAQLRAIHDYAEKNGVIIVREYVDEARSATTDDRPEFLRMIEEVTSGCLQVDYVYVHKLDRFARNRYDSAIYRRKLASKGIKLIAVTQPLDDSPESVILEAMLEAMAEYYSKNLGREVMKGMRETAFQCRHTGGKPPLGYDIDPGSNKYIINEREAEAVRIIFSMYLQGCSYKEIADYLNSHGYRTKLGSQFVKTSLYEILRNEKYTGVFVFNRAASKTGGKRNNHKSKDDEEIIRIPGGLPAIIDPSTFREVQKMMDRRKHAPGAAKAKEVYLLTGLVWCGACGGPMIGNRRRAGRNKDIYVAYECNNRKRLKTCHAKSINKEYLEQYVLNELIRVIFSDEGISILVKKLNEANKQRLERNSKELDYTRQQLLEVEKKISNIVNAIADGLYSPTMKETLAKLEEEKARLQVAINEIQRANVVELTEDMIKAYLEKDKQVILSGDLQACKAIISTYVDKVIVYEDHIDVILKIVDFTGGGGGSRTPVRRYIHSSFYQDSFRFQSRRRVSRKPDTLGPARLRFPSGPRAGALPVAC

SEQ ID NO: 15923 - protein, 566 aa, synthetic construct
MLILKGDQKLSTDNIMHLIGKINALIYARVSTTDQANKGFSIESQIERCKERAISKFGYKESEIIALVEPGGMGDDPNRPALNHALYLLEKGLGKKFIVLHPDRLTRDNTLQGVVSRRIWGMGVDIEFIEFEVNPHDPESMLMYNIQGSIAQYNKAKIHANSKRGRLAKAKKGEFPSFKRLYGYKFNTVTDLPEYNEEEKEILLEMKDMLLNKKMSSNEIAKELSRRGVAAPNGKTWYQATVSRMLQNEDYTGDFYYGKSKVVQINGKKKQVPTNKDEWILIKIPPMWDKATREQIIERLKSNFKGRSRATKDYLLKNKAKCGRCGGACGSGITSKTKSGVYKYYSCRAKTAKGYQNGKKVISCEGKNWRVDIVDEVFWNWFIKLMKNPEKFLESFLEEASDQKKIDELKAKASRLEKQLGEIDEEIANYVILFGKGKIKESMFDQLSQPLEQNKEHIENEIKIINSQLAANKQTEDKKQKMIEYIGSFSKMIKNEITIEEKRQFLDFFIEKVTLFDDDHMEVVWKSSSLNNENSHVDFLNGEQGGEFINSHKRLNYIQAYGRQTA

SEQ ID NO: 15924 - protein, 515 aa, synthetic construct
MKTAIYLRKSRADLEAEARGEGETLAKHRSTLLKIAKEMNLNILTVREEIVSGESLVKRPEMLALLEEIEDNKYDVVLCMDMDRLGRGGMKEQGIILETFKRSNTKIMTPRKTYDLNDEWDEEYSEFEAFMARKELKIITRRMQRGRIASVEAGNYLGTHAPYGYDIHRLNKRERTLTINPEEASVVRMIFDWYANEDMGANSIRSKLNDLGYKSKLGNEWNPYSILDILKNNVYIGKVTWQKRKEVKRPDAVKRSCARQDKSDWIIADGKHEPIIPESLFEQVQEKLNSRYHIPYNTNGIKNPLAGIIKCAKCGYSMVQRYPKNRKETMDCKHRGCENKSSYTELIEKRLLEALKEWYINYKADFEKHKQNDKLKETQVIQMNEAALRKLEKELVDVQKQKNNLHDLLERGVYTVDMFLERSNVVSDRITEITSTMENLKKEIKTEIKKEKVKKDTIPQVEHVLDLYFKTDDPKKKNSLLKSVLEKAVYKKEKWQRLDDFELVLYPKLPQDGDI

SEQ ID NO: 15925 - protein, 519 aa, synthetic construct
MTATAKAIKHVAMYLRISREKKGKNVDTLENHRVKLLEKIKEEGLTHEEFGEVVSGGSSELEKRPKLQELLERIEEFDAILCFEISRLSRNGLISQTVKQYCIDYDKPIITNEDIYDLANSSDDRLWFDVESMFSSQEHSKIGKRSKMNKIQMAKAGLDIAGGVPFGYKRNKETKKLEIYEPEAEIVRYIFKLHGQGLGSFKIRDILNEKGIKPARGNHWNLPAIKRIIRNEKYKGWNFFNDRKRIKRNGKFTYEIVDTIIVKDAHPPIIPPEEWDNANIERERRAKVASRIKHKKTVSMVSDLLYCGICGRKLSIRSDRKTKKVHVKTCDYLMHENGSKCRNNGVLLEKVEEEVLKTIKKYKKDLQEVIDQLLEADISNVEQEIKSEITSLQRQQRELHSQKKNLIKAVASGVLTGEDIRSEKEKIEAKQNAVNSKLEELESQLQTLDVDTIIEVNKRAIEALKDFERHSPENQNNTLKRVISRILYTRDMPDEIKALTTRNPLRREYPFTLEIEYLT

SEQ ID NO: 15926 - protein, 515 aa, synthetic construct
MKTAIYLRKSRADLEAEARGEGETLAKHRTTLLKIAKEMNLNVLAVREEIVSGESLVKRPEMLALLEEIEDNKYDVVLCMDMDRLGRGGMKEQGIILETFKRSNTKIMTPRKTYDLNDEWDEEYSEFEAFMARKELKIITRRMQRGRVASVEAGNYLGTHAPFGYDIHRLNKRERTLTINPEEASVVRMIFDWYANEDMGANAIRSKLNDLGYKSKLGNDWNPYSILDILKNNVYIGKVTWQKRKEVKRPDTVKRSCARQDKSDWIIADGKHEPIIPESLFEQVQEKLNSRYHIPYNTNGIRNPLAGIIKCSKCGYSMVQRYPKNRKETMDCKHRGCENKSSYTELIEKRLLEALKEWYINYKADFEKHKQGEKLKETQVIQMNEVALRKLEKELVDVQKQKNNLHDLLERGVYTVDIFLERSKAVSNRINEITSTMENLKKEIKTEIKKEKVKKDTIPQVEHVLDLYFKTDDPKKKNSLLKSVLEKAVYKKEKWQRLDDFELVLYPKLPQDGDI

SEQ ID NO: 15927 - protein, 515 aa, synthetic construct
MKTAIYLRKSRADLEAEARGEGETLAKHRTTLLKIAKEMNLNVLAVREEIVSGESLVKRPEMLALLEEIEDNKYDVVLCMDMDRLGRGGMKEQGIILETFKRTNTKIMTPRKTYDLNDEWDEEYSEFEAFMARKELKIITRRMQRGRVASVEAGNYLGTHAPFGYDIHRLNKRERTLTINPEEASVVRMIFDWYANEDMGASAIRNKLNDLGYKSKLGNDWNPYSILDILKNNVYIGKVTWQKRKEEKRPDAVKRSRARNDKSDWIIADGKHDPIIPESLFEQVQDKLNSRYHVPYNTNGITNPLAGIIKCSKCGYSMVQRYPKNRKETMDCKHRGCENKSSYTELIEKRLLEALKEWYINYKADFEKHKQGEKLKETQGIQMNEVALRKLEKELVDVQKQKNNLHDLLERGVYTVDIFLERSKAVSDRINEITSTMENLKKEIKTEIKKEKVKKDTIPQVEHVLDLYFKTDDPKKKNSLLKSVLEKAVYRKEKWQRLDDFELVLYPKLPQDGDI

SEQ ID NO: 15928 - protein, 515 aa, synthetic construct
MKTAIYLRKSRADLEAEARGEGETLAKHRTTLLKIAKEMNLNVLAVREEIVSGESLVKRPEMLSLLEEIEDNKYDVVLCMDMDRLGRGGMKEQGIILETFKRSNTKIMTPRKTYDLNDEWDEEYSEFEAFMARKELKIITRRMQRGRVASVEAGNYLGTHAPFGYDIHRLNKRERTLTINPEEASVVRMIFDWYANEDMGASAIRSKLNDLGYKSKLGNDWNPYSILDILKNNVYIGKVTWQKRKEVKRPDAVKRSCARQDKSDWIVADGKHEPIIPESLFEQVQEKLNSRYHVPYNTNGIKNPLAGIIKCSKCGYSMVQRYPKNRKETMDCKHRGCENKSSYTELIEKRLLEALKEWYINYKADFEKHKQDDKLKETQVIQMNEAALRKLEKELVDVQKQKNNLHDLLERGVYTVDMFLERSNVVSDRITEITSTMENLKKEIKTEIKKEKVKKDTIPQVEHVLDLYFKTDDPQKKNSLLKSVLEKAVYKKEKWQRLDDFELVLYPKLPQDGDI

SEQ ID NO: 15929 - protein, 487 aa, synthetic construct
MKYAVYVRVSTDKDEQVSSIQNQIEICRYWIEKNGFEWDENSIYKDEAVSGTAWLERRAMQLILGKARKKELDTVVFKSIHRLGRDLRDALEIKEILLGHGVRLVTIEEGYDSYYEGKNDLKFEMYAMFASQLPKTLSVSISAALAAKVRRGEYTGGTVPYGYKIVDKKYVINQEEAEIVREMYELYDNGLGYLRISNALNDVGKYKRSGKLWTYSAVKLIITNPMYKGDYVMGRSTEVKVDGRKKRIQEPREKWVVFENHHPAIIERPLWDKINNPKINKKIKRRVAVTNELRGIARCIHCGSPFVLHTYKYKNKEGEELNYGYLTCGTYKLTGGRGCVKHSGLRYERLRSLVLRKLKEKERDLEKVFKLNDKDKHQEKQKKLRKEKKELEIKRERLLDLYLDGGSIDKETFTKRDGNFVKNIQEKELEILKLDDVKALIVEQQKVKDAFKLLEDAENLYPVFKKLIARIDISQNGAVDIRYRFEE

SEQ ID NO: 15930 - protein, 457 aa, synthetic construct
MRCAIYRRVSTDEQAEKGFSLENQKLRLESFATSQGWEVVEDYVDDGFSGKDTNRPALQRMFSNVDKFDVILVYKLDRFTRSVKDLNEMLETIKENEIAFKSATESIDTTTATGRMILNMMGTTAQWERETISERIKDVFGKLRENGIFSTGHPPYGYRCSGNKSIEIVEEQAEIVRYIYEISKTMGLFKISVELNRKGIKTRRNNKFGQSAVKRILHNPFYCGYMEVNNKWVPIKNEGYIPIISEEEFKTTQKILTKRNKAQTRSRSVSYYPFSGIVLCPECQRAMRGDRAKYGDYYYRYYRCVYGRENINCTNRKRIRAEQVDKAFAEYISGSFENTTIKLDSKDIKSDIEYELKHLDSKIERLSDIYIEGDITKSKYNEKMNSLLNEKEKLKKDLTSCKENVDAEFVRDQINKLESIWHLIDDKTKSESIRSIFDTIKIKQDKNKVTIMDHTLL

SEQ ID NO: 15931 - protein, 515 aa, synthetic construct
MKTAIYLRKSRADLEAEARGEGETLAKHRTTLLKIAKEMNLNVLAVREEIVSGESLVKRPEMLALLEEIEDNKYDVVLCMDMDRLGRGGMKEQGIILETFKRSNTKIMTPRKTYDLNDEWDEEYSEFEAFMARKELKIITRRMQRGRVASVEAGNYLGTHAPFGYDIHRLNKRERTLTINSEEASVVRMIFDWYANEDMGANAIRSKLNDLGYKSKLGNEWNPYSILDILKNNVYIGKVTWQKRKEVKRPDAVKRSCTRQDKSDWIIADGKHEPIIPESLFEQVQEKLNSRYHVPYNTNGIKNPLAGIIKCSKCGYSMVQRYPKNRKETMDCKHRGCENKSSYTELIEKRLLEALKEWYINYKADFEKHKQGDKLKETQVIQMNEAALRKLEKELVDVQKQKNNLHDLLERGVYTVDMFLERSNVVSDRITEITSTMENLKKEIKTEIKKEKVKKDTIPQVEHVLDLYFKTDDPKKKNSLLKSVLEKAVYKKEKWQRLDDFELVLYPKLPQDGDI

SEQ ID NO: 15932 - protein, 527 aa, synthetic construct
MKCAIYIRVSTNKEEQKQSLENQKELFMNLLTEKEWDMYDTYLDVQSGTKMTKRPELKRMIEDAKMGKFDIILAKELSRLARNGQLSYEIKNLAEHRGIHILTLDGAIDTLSGNTQMFGLYAWMYEQESQRTSDRVKAALRIRAKNHFKGSVPPYGYYLQDGVLKIKNDFTPGVVRRIFNSYLSGKGFDRIAKELLEDGISTPSEIAGKRNSSSIWHGSTIRNILENPHYIGNLVQQRETSISVTTEKRKSNDPSNYVISEGSHDPIISKDDFQVVQQLIAERKRKRPYAKKHLFTNISFCADCGKSMHFKANRKGYICGKYNKHGNTQCSSHLVRENVLIEMISEDIKEMFSELSTKSIQKNVEKKLTTYIRRDQKRLAKILKEIENIKKDKTTALRMKIRAEIQDDEYRLLVEDNSDRITKLNEEKKKLEKGLLQQKQTIDFTKLIQQIEQFVQNPILNEEMLHKLIERIEIKEDGSPRIHYRFSDPYISSIFLRATHSTPHDSSAETYQQAELLSFHTRLHQGS

SEQ ID NO: 15933 - protein, 539 aa, synthetic construct
MKTIVIYARKSLFTGKGDSIGAQIDTCKRFIDYKFAHEEYKLKIFTDEGWSGKTTDRPEFNKMLKLIKQKNIEYIISYKLDRLGRTARDLHNFLYDIDRLNIIYLSATEPYDTTTSAGRFMISILAAMAQMERERLAERVKGGMMQLAKKGRWLGGQTPLGFDSIKEVYIDNAGKERQLMKLTANKEEIKIVKLLYDKYLELTSMSQVKKWCIENSIKGKNGGEISTNTLKQILSSPIYVKSSSKVVDYLENQGINVFGEPNGNGMLTFNKTKEIRLPRDKSEWISAVSKHKGIIDDIKWLQVQSQLELQSEKQIKSSGRKGTSDSALLSGIIKCAKCGSNMVLKTGHKSKKNPNITYSYYICNAKIDSYGHKCSNKNIRTDEADLAVISQMKLYNKNLLVKNLLVASKEINKDTELDKITILKDNIAEKEKGIANLIKKLSLTDDETISTAILNEVSILNMEIKELKTSLNASEIKNNEATTIKVNIDSYIQSLKNFNENIDIASITDKKSLLASVLESVVWDGESCELKINLINSAK

SEQ ID NO: 15934 - protein, 526 aa, synthetic construct
MKAAIYSRKSKFTGKGDSIENQIQMCKDYGTKNLNIDKFYIYEDEGFSGGNINRPKFKALLSDIKKKKFDVLICYRLDRISRNVADFSSTLELLRSNDISFVSIKEQFDTSTPMGKAMVYIASVFAQLERETIAERVRDNMLELAKTGRWLGGQTPLGFKSKKIVYIDEEYKERSLYKLSPIMEELEIVKYIYSTYLETHSLRKTVSRLYDKRFKTKNGGDWGVSQVQNILVSPTYVKSSEEVKDFLISQGMSFAGEVNGNGIFLYNKKKGKTKHRDINEWIAAVGKHKGIIESDIWLEVQSLLSSKRFTRGRLGTGSNSLFSGLIKCGKCGSNMTIIHGGVSKGIRKHYYTCSLKRASKGSECNNSNLTVDITDQLLINHLKNIKVKDIKKELNDLYIKKNNTNEIQLIENRIKDEEKAIENLTMQLSTISNSIVSKPIINLLEKKTFELEKLKKQYKELKNNLTKEQLQIVDITNLTDNLNNFKNMIDTAKNIEQKKMLIKSVVENIIVLDGTIEINIKNAKPK

SEQ ID NO: 15935 - protein, 436 aa, synthetic construct
MSTNIDNIIDMIITKSISRFARNTLDCLQYIRQLKDKNIPVYFEKESINTMDAKGEVLITIMASLAQQESQSLSQNVKLGLQYRYQQGKVTVNHNRFLGYTKGEDGKLVIDPEQAEVVKRIYREYLEGSSMDKIAAGLEADGILTGAGKTKWHTSTINKILRNEKYMGDALLQKTYTTDFLTKKRIKNNGTVPQYYVEDDHEAIIPKELFMQVQEELVRRRVVHKSPSGRKRTYSCNHCFAQIIVCGECGELYRRVHWNNHGCKSIVWRCISRLEPTAADMNCTNRTVNEAVLEEVTVKALNQILSSRKAFLKHLQENIARAVVTTDTLSPDGIQARLEELQKDLVKAVGDQKNYDALTDEILRLQQMKKDSEVDDHRRTETMNRIKELQDFIAEQDTVITEFDEADVRKLIQKITVYEDRFTVEFKSGFSVDIAE

SEQ ID NO: 15936 - protein, 626 aa, synthetic construct
MRNEKITPLYERLSRDDELQGESNSISNQKQMLEDFARRNGLPNPTHFTDDGISGTRFDRPGFLAMMEEVEAGRVEAIVIKDMSRLGRDYLKVGQVMEVLRQRGVRLIAINDGVDSLKGDDDFTPFRNIMNEFYARDTSRKIRSVFKSKGMSGKHLTGTVIYGYLWDENREHWLVDEEASEVVRRIFSLTLEGYGPYQIACKLSTDRIEIPVVHLARFNEGVNRSKPIKDPYGWGSSTIVNILKKREYLGHTINFKTRKHFKDKKSHYVSEDEWTIFENTHEAIIDQQTFDLAQKIRSNVRRYPNGWGEAAPLTGLLYCADCGGKMYVHRTNNGKRVSQYTCSNYTKVPCGTLCPTQHRINESAVLTLVSDTLRAIAEYSRNDRTEFIHTVQETQVAQQSADISKKRRRLAAAQKRAGELEKLICKIYEDNALGKLPDARYKALDAQYAKEQGALEIEIAELEKAVTGYEQSQKSAEKFIALIDKYENFDTLTNTMLNEFVEKILVHERARKGSQDTTQEIEIYFNFLGRYIPPSLQPVPLTPEEQEELRKKEERKDRLHQNYLKRKASGAQKQYEDKIKAKKKAEMDAKKALIRAEDMKKGVFSTVGQLPKEEPHKGSIAASAAV

SEQ ID NO: 15937 - protein, 362 aa, synthetic construct
MKQAIGYLRQSTTKQQSLAAQKQTIEALAKKHNIPYITFYSDKQSGRTDKRNGYQQITELIQQGQCDVLCCYRLNRLHRNLKNALKLMKLCQKYHVHILSVHDGYFDMDKAFDRLKLNIFISLAELESDNIGEQVKNGIKEKAKQGKMITTHAPFGYHYHNGTFTIDTVKAPTIEAVFNYYLQGYGYKKIAQYLEADDKFINRKPYQVRNIILNPNYCGRVINQYGQYENMFPAIVSTTIYEEAQVTRTQKQVKRKPSENQLKQKIKCPYCDSTLTNMTIRKKNHTLRYYVCPQNLNASRFVCEFKGINAQELETSVLATCQDFFQNQQLYPKINHTIQQRLKKQKDIEAKSTVTQEQLIEK

SEQ ID NO: 15938 - protein, 517 aa, synthetic construct
MYRPRNLDVFIYLRKSRKDIEEEKKAAESGASYDTLQRHRDNLLAVARKEGHNILGIFEEIVSGESIAERSEIQKLLRELETGVADAVLVMDIDRLGRGDMLDQGILDRAFRYSGTKIITPTEVYDPESETWELVFGVKSIVSREELKVITKRLQGGRRDSAAKGRSISKKPPYGYLRDEQLKLYPDPETSWVVVKIFEMVRDGHGRQAIAAELDRLGVKPPDEKRAFWSPSTISAIIKNEVYLGHIIWGKVKYIKQNGRYKRKKMPRERWYVKENAHEPLVSKELWEAANKAYRSRWRPSTVESKPLANPLAGLLKCEVCGYTMWYQPRKDRPHPLVRCPNPKCKGVQKGALLPLVEEKILQSLAEFVDQFEVQEDTFARKEQRSVIPLKQKAIEKKEKELRELHKQKDALHDLLERGVYTIETFLERQQTIVSRIKKTQEKIDQLREEIDKEQLKEKNINEYIPTVKKVLDAYRLTDDVEKKNRLLKSVLEKATYLRKPEWTKKDQFTIQLYPRI

SEQ ID NO: 15939 - protein, 496 aa, synthetic construct
MYGYNLKPCLTRRNTLKRMEQITPPPISASPLVKVAAYARISMETERTPLSLSTQVSYYQQLIHDTPGWTFAGVFADSGISGTTTHRPQFQEMLALAREGAIDLILTKSISRFARNTVDLLETVRELKDLGVEVRFEKENISSTSADGELMLTLLASFAQAESEQISQNVKWRIWKGFEEGKANGFHLYGYTDSADGTDVQIIEEEAAVVRWIFDQYMKKTSCEKMAAQLIADGRVPHLADNKLPGEWVRHILKNPHYTGDLLLGRWSTPEGRPGRAVRNTGQLPQYLVENAIPAIIDRDTFVAVQTEIARRRELGARANWSIETVALTSKIKCVSCNCSFVRNVRNPKTQNSISTEHWICTERKKGRKTGCGTCEISDTALKGFIAQVLGIDAFDEDVFNERIDHIDVQGKDQYTFQYTDGTSSSHTWRPNLKKSSWTPARKAAWGELVRARWAEAKRLGLDNPRQAPTPPEALAKYRAVAKAEAERLRAERGER

SEQ ID NO: 15940 - protein, 473 aa, synthetic construct
MVKKVSAARSAAVYARISADVEGKSLGVQRQLEDCRKLASDRGWVVGREYVDNDVSAYSGKARPGYEAMCADLAAGVRDAVIVYNLDRLHRRPAELEDFVALCEAAGVNQVATVTADIDLGNDDGLFMARIFAAFAAKESGRKSARMRRKYEQKAAQGLPHGPNRPFGYEDDKMTIRETEAEVIRELVTRVIAGESLNSLTVWLNETGIRPVRGERWASTAVRGIVSSPRIAGLRAYKGEVVGDAAWEPIITAAQRDQVLASLAVRSWNRKRSPRKYLLSGLCRCGRCQARMFSAARLEAGASKRRYVCSSSPDHGGCGRMTVVADPLEKLIADAVLTRLDSKVLADALAGKVRANPDTAALSAQVEAAQTRLDELTGLYSSGAISAREWIMARDPITDTIGRLRREIAETADTGPLAELVGQGKALRGQWESLSLDRQHAIVRTVIDHVTINPGTPGARGLDIGRVEPHWRI

SEQ ID NO: 15941 - protein, 426 aa, synthetic construct
MRVKVINKRPASVLQKKMVCAYARVSTDSRRQEDSLENQMETYERLITGNPEYEFIGVYADQGISGYCENRPQFQRMMEKARAGEIDLIITKSISRFARNTVTVLKFARELKELGVGIFFEEQNINTLSGDGEMMLAVLASFAQEESRSMSENNKWSIRKKFERGEVMITTSRFLGYDKNEYGDLIVNRKEAEIVSLAFDLYLMNVGSSRIGELLDYLGVKTVTGTTWESGTINGMLCNEKYKGDFHLQKYYTPENKRNHTKKNNGEVQSYYISENHEPIVSPEVWERVQEVREQRKRDRNIGQDNTMKFQNRYPLSGMLICPYCGKTLRRRQVYKKKIQWLCSTYIEKGVKACKGIRIDDTELQGLNITEQTVVEEVIQNGKKHYCYTSKADFDCGIRNSASSTETENGSVLPSVNRPRRTVIKL

SEQ ID NO: 15942 - protein, 444 aa, synthetic construct
MAAYCRVSTDQEEQLLSYENQVNYYTNYISENPLYEYAGTYADEGISGTNTKKRDEFNRMIVDCRAGKIDMIITKSISRFARNTLDCLNYVRELKDLGIGIIFEKENINTLDAKGEVLLTILSSLAQDESRSISENCTWGIRRRFETGKHKMSTKRFLGYDADETGKLVINRLQKPIVVRLYQEFLDGKTTDYIKRIFEKEGIKNWDGGTKWQATTLMSMLENEKYKGDALLQKSYTVDFLTKKRTQNKGEIQMFYVEDDHDAIISKRIWECVQLEIKRRKKYLEEHGTNSYSHRPESNPFASKIICGDCSKVFARKGWRSSTGVDRKVWQCSERYKVKGVMGCANRHVEEETLIKAYLMAWNALVENREDFMEQWTEQLQSENLLEGYRAEKFIEYTDGAEPLTQMDTDFMLKTLDHIKVFEDGTLLVVFLDGTEIECKDEEE

SEQ ID NO: 15943 - protein, 474 aa, synthetic construct
MGFNEKSNCIKDSVYIDEGISATNTKKRDGFNQMIEDALAGKIDLIITKSVSRFARNTVDSLTTVRKLKEKGIEVYFEKENIYTLDSKGELLITIMSSLAQEESRSISENTTWGKRKQFADGKGSLAYSTFLGYEKGEDGSLQVNPEQAETVKLIYQLFLQGLSPYAIGKKLTGLGIKSPAGKDTWHQSSVKSILTNEKYKGDALLQKQYTADFLTKKRKKNQGEIPQYYVEGNHEAIIPPETWELVQEEMERRKSMDTRYSSASIFSSKIKCSECGNWYGSKVWHSKDKYRRVIFQCNHKFKNDKKCQTPHITEDEIKEAFVKAVNAVIPEKDELIANTKVMMRTLCDTTELEVEQSRLLTEMKTVAEMVKRIVAENKAAATDQGEYQRRRNELVARYEAARDGYEKASGEISDRQGKRKTYMRFIGGLQKLDGFCGKFDEELWTALLDYATVYARDDIRFTFKAGNEVKVDG

SEQ ID NO: 15944 - protein, 525 aa, synthetic construct
MAKSVITIPATVNRHTAAPIGSYKKRRVAAYARVSTDHEEQQSSYEAQVDYYTNYINGREDWEFVSVYADEGITGCNTKKRDGFNKMVEDALSGAIDLIITKSVSRFARNTVDSLTTIRKLKENRVECYFEKENIWTFDGKGELLLTIMSSLAQEESRSISENCTWGQRKRFADGKVTVPFKRFLGYDRGEDGNLVINEGQAETVRRIYGLFLQGRSPHAIAKLLTAEGIPSPGGKEAWSSSTVKSILTNEKYKGDALLQKVYTVDFLTKQKKVNEGEVPQYYVENNHQAIISPSVFEEAQHQMAARHSGKNRASSTGVFSGRIKCADCGGWYGSKVWHSNSKYRKTIWQCNHKFDGGEKCGTPHLDEETIKQLFLKAANAIFAEKDGVREDYDSIKDTLFGTAGLEAERLRLQEEMNVVAELIEQCVAENARVALDQTEYQKKYDGLAGRFNRAKGRLSEVSQAITERQAKREKIGRFVSALEKLDGSLTAFNEDDWYSLVEYAMVYSREDIRFTFKNGMEIKA

SEQ ID NO: 15945 - protein, 517 aa, synthetic construct
MKKISRIEPVRPVLTDRKKVAAYARVSRDTERLMNSVSAQVSYYSALIQNNPEWEYAGVYADCGISGTGTARRSEFLRMLADCEAGRINIILTKSISRFARNTVDLLETVRHLKSLGIEVRFEKEHINSLSEDGELMLSLLASFAQEESRSISENVKWGVRRRFQSGEIGTANKHILGYRYDEDEKKYVIIPEEAEAVRWMFQMYIDGVSFRRIAENMNRVGIRTTLGNDFQEASVRQLIFNEVYAGDIRRQKCYMADPITKAKVKNGGELPQYYMADCHEAIIDRETYAKVQAEMERRAGLVNPAYPFTGKMKCGVCGQPFTRKKGTIRGKTYVHWICRSKKETGMSCTSVNFSEEELERISARTLGMDEFDGAVFEKAVRGITIMENGDLEFHLTGGETKVWKNLHLDPPRHIATVTDCFQGKIRCAACGNTYHRVNGAGKWVYWYCIGKKRKNVECHNPNYTDYKLRQVSAHMMGLEEFDEAEFEKQIEEITAFPDGSLEFNFYGGRKERWQRA

SEQ ID NO: 15946 - protein, 644 aa, synthetic construct
MLRPICYERVSSIQQVDMGKGLDDQRSSLTAYLDKNADKFTDERIFITDAGLSAFKNANISPESQLGIFLQDVGNRKYGVGDALVVLSLDRLSRRSSWAESTIQYIVNSGIEIHDISTNLVLRVDDPMSKIHMELIQHRSHNESLMKSVRAKLAWDNKITRAVQNGEVISNRMPNWLRNVDNKYQVIPEQAELIVKCFMWYREGLSTGEIVKRIGRKWQMVTVSRLIRDRRLLGEHERYNGEVVPNVYPKIIDEELFLTANRMMDRVMLEKKKPAEDLLLEPEVVREIFKLYETGLGSGAIVKRLPKGWSTVNVLRVLRDKKVVTMKIIDNLTFERANEKLSRNGIANRIRKDITIAQDDYITNLFPKMLKCGHCGGNIAIHYNHVRTKYVICRNREEKKICDAKSIQYMRIEKNILQLVKNVDFNKLMMEGKSDSDSLLASLREELSTLQKEAETYQVKINERKAAGKKASLPLMTGLTEVQDRIEEIESEILNSKNIKEIPVFDFDINKVLDPLNVELRAKLRKEVRLVLKSVKYWVFEKRIFVQLEYFNDVLSHTLVIDNKRGGGEVLHEIVISETSGERVYTVNEEGKTVFIASVTSGTDMWSLAISRTKILDDVGLYLNLLKREKFEIIVNEDMIDWMD

SEQ ID NO: 15947 - protein, 452 aa, synthetic construct
MKAAIYIRVSTQEQVENYSIQAQTEKLTALCRSKDWDVYDIFIDGGYSGSNMNRPALNEMLSKLHEIDAVVVYRLDRLSRSQRDTITLIEEYFLKNNVEFVSLSETLDTSSPFGRAMIGILSVFAQLERETIRDRMVMGKIKRIEAGLPLTTAKGRTFGYDVIDTKLYINEEEAKQLRLIYDIFEEEQSITFLQKRLKKLGFKVRTYNRYNNWLTNDLYCGYVSYKDKVHVKGIHEPIISEEQFYRVQEIFTRMGKNPNMNRDSASLLNNLVVCSKCGLGFVHRRKDTVSRGKKYHYRYYSCKTYKHTHELEKCGNKIWRADKLEELIIDRVNNYSFASRNVDKEDELDYLNEKLKTEHVKKKRLFDLYISGSYEVSELDAMMADIDAQINYYEAQIEANEELKKNKKIQENLADLATVDFDSLEFREKQLYLKSLINKIYIDGEQVTIEWL

SEQ ID NO: 15948 - protein, 516 aa, synthetic construct
MKTIHKLERPKLPETPKLKVAAYARVSTASDEQLSSLKTQITHYENYIQKNDQWEYVGVYYDEGISGTKTDKRDGLHRLINDAEHGKIDLILTKSISRFSRNTVDCLNLVRKLTEIGVTMIFEKENINTSDMESELLLSILSSLAESESYSHSENMKWANRKRMAKGNYKGVPPYGYCRKGIDFHLVPDEAKVVEQIFQWTLNGLSMHQIASKMNVANITTKRGVKWQASGVSIILHNIVYTGTMIFQRYFNDEQFKKRKNNGELPMYRIDNNHPAIVSMEEYERVQEIIRIRATSKGNTKDGKNTNRYAFSKKVLCDKCGNTYKRIQTYWKGNTRKVQWGCKGHLKDKNSCDALPITDEKLKIAYLTMLNKLIFAHKVVLEPLLKQQSNAAELERALDEMSNKASEIDEKLEVLASLNASGIVSTKTSFEEQNKLQLELKNLQEEQQKIINSANGKSTQRIELEELYRFTKRSNMLTEWEELLFLRFADQVIVYNRQEVGFKLKCGLILKERLPE

SEQ ID NO: 15949 - protein, 452 aa, synthetic construct
MKAAIYIRVSTQEQIENYSIQAQTEKLTALCRSKDWDVYDIFIDGGYSGSNMNRPALNEMLSKLHEIDAVVVYRLDRLSRSQRDTITLIEEYFLKNNVEFVSLSETLDTSSPFGRAMIGILSVFAQLERETIRDRMVMGKIKRVESGLPLTTAKGRTYGYDVVDTKLYINEEEAQHLQLIYDIFEEEKSITFLQKRLKKLGFKVKSYSSYNKWLMNDLYIGYVSYSDKVHAKGIHEPIISEDQFYRVQEIFSRMGKNPNMNKESSSLLNNLIVCEKCGLGYVHRAKDTVSRGKKYHYRYYSCKTYKHTHELEKCGNKIWRADKLEEIIISRVKNYSFATRNLDKEDELDSITEKLKTEHSKKKRLFDLYINGTYEVAELDKMMADIDAQINYYNSQIEANKELKRNKKVQESLAELATVDFDSLEFREKQIYLKSIINKIYIDGEQVTIEWI

SEQ ID NO: 15950 - protein, 452 aa, synthetic construct
MKAAIYIRVSTQEQIENYSIQAQTEKLTALCRSKDWDVYDIFIDGGYSGSNMNRPALNEMLSKLHEIDAVVVYRLDRLSRSQRDTITLIEEYFLKNNVEFVSLSETLDTSSPFGRAMIGILSVFAQLERETIRDRMVMGKIKRIEAGLPLTTAKGRTFGYDVIDTKLYINEEEAKQLQMIYDIFEEEKSITSLQKRLKKLGFKVKSYSSYNNWLTNDLYCGYVSYADKVHTKGVHEPIISEEQFYRVQEIFSRMGKNPNMNRDSASLLNNLVVCGKCGLGFVHRRKDTVSRGKKYHYRYYSCKTYKHTHELEKCGNKIWRADKLEELIIDRVNNYSFASRNVDKEDELDSLNEKLKTEHVKKKRLFDLYISGSYEVSELDAMMADIDAQINYYEAQIEANEELKKNKKIQENLADLATVDFDSLEFREKQLYLKSLINKIYIDGEQVTIEWL

SEQ ID NO: 15951 - protein, 452 aa, synthetic construct
MKAAIYIRVSTQEQIENYSIQAQTEKLTALCRSKDWDVYDIFIDGGYSGSNMKRPALNEMLSKLHEIDAVVVYRLDRLSRSQRDTITLIEEYFLKNNVEFVSLSETLDTSSPFGRAMIGILSVFAQLERETIRDRMVMGKIKRIESGLPLTTAKGRTFGYDVVDTKLYINEEEAKQLQMIYDIFEEEKSITSLQKRLKKLGFKVKSYSSYNNWLTNDLYCGYVSYADKVHTKGVHEPIISEEQFYRVQEIFSRMGKNPNMNRDSASLLNNLVVCSKCGLGFVHRRKDTVSRGKKYHYRYYSCKTYKHTHELEKCGNKIWRADKLEELIIDRVNNYSFASRNVDKEDELDNLNEKLKTEHTKKKRLFDLYISGSYEVSELDAMMADIDAQINYYEAQIEANEELKKNKKIQENLADLATVDFDSLEFREKQLYLKSLINKIYIDGEQVTIEWL

SEQ ID NO: 15952 - protein, 538 aa, synthetic construct
MTNQSTNNLKITALYVRLSNDDEREGESNSIMNQKKMLSKYASDHNLRKTTFYIDDGVSGTTFNRKGFQAMITDIEAGIVGTVVVKDMSRFGRDYLQVGMYTDIMSPEHNIHFIAINDGVDSEQGDNEFTPFRNIINEWYAKDTSKKIRAVFKAKGMTGAPLTTNPPYGYIKAPDNPTQWLVDDYSATIVRRMFQLTMEGYGPTQIAKKFQAEKILVPTHYAVSQGRKTNIVPSQSPYYWSDRTIAKLLEKPEYLGHTVNFRTTRKSYKDKRKIERDKKDWVIFENTHEAIIEQSVFDTVQELRKHKRRLTKQNELPLFSGLLFCADCGGKLYFCRGKSIARNQENYICSSYRRRTTECTSHYIRSVVLEEVVTNNLRKTMAYIQANGKSFFCDVLKGDQQAKKKEAQNQQKQLHDAQKRITELDAIFPQLYEDMVSGRINSERFDKLSSSYEEEQVLLKQQVVDISKEIQTELDVNVYIRELRKFVHKHVNFDSLTPELLHEMIDKIIVHTGKKIEVHYKFGLGELGNLVDEHIIKK

SEQ ID NO: 15953 - protein, 558 aa, synthetic construct
MTKLYSYIRFSSMRQSDGSSYERQIRMAKEIADRYNLELVNDYQDLGVSAFKGANSKTGALSRFLDEIGRSIPVGSWLFIENLDRLSRQDIISAQELFLSIIRRGITIVTGMDNKIYSIETVTANPMDLMFSILLFIRGNEESQTKRNRTNSSALLKIKAHQQNPQSPAVAIEEIGKNMWWTDTTSGRVLPHPVYFPVLQKIVQLRQEGHSAGVILDYLNEHHEPPAPTSNKKHGKWSRAMVSRLFATKALIGVKTVNVDGVEYELRDYYPRVLSDSEFYFLRKNIIKKAWDYSHVKEKVIPLLSGIGVLRCVHCGATMVKQTAANGKREQYRYCCDGRKSGRTDCPYPNWGFRAVTLEGAVLQLLADKIWIAEDKTNPIPEIQVKIDEISRKIDNLINLSAMTGATKELANQITDLNSQREALHEEIRLFEREMYSVDSQGWDKLAQFDLSDVQNEERLKVRLKIKGALHEIECSRIDSKKNLFVLVYLDGLRQRLVIENNRGLKKGQIFVDLKTINDRQILESAGMVLHPCIEMIIDSDWKAPEEIPGLLSEEFGI

SEQ ID NO: 15954 - protein, 515 aa, synthetic construct
MKTAIYLRKSRADLEAEARGEGETLAKHRTTLLKIAKEKNLNVLAVREEIVSGESLVKRPEMLALLEEIEDNKYDVVLCMDMDRLGRGGMKEQGIILETFKRSNTKIMTPRKTYDLNDEWDEEYSEFEAFMARKELKIITRRMQRGRIASVEAGNYIGTHAPYGYDILRLNKRERTLTINLEEASVVRMIFEWYANEDMGASVITNKLNQLGYKSKLGNDWNPYSVLDMLKNNIYIGKVTWQKRKEVKRPDATKRSCTRQDKSEWIIADGKHDPIISESLFEKAQEKLNTRYHVPYNTNGLKNPLAGVIRCGKCGYSMVQRYPKNRKKTMDCKHRGCENKSSYTELIEKRLLEALKEWYINYKADFNKNNQENLSKEKQTIKINQAALRKLEKELLDVQKQKNNLHDLLERGVYTVDMFLERSNVVSDRINEITETMENLRKEIKTEITKEKVKKDTIPQVEHVLDLYFKTDDPQKKNSLLKSVLEKAVYTKEKWQRLDDFKLVLYPKLPQDGDK

SEQ ID NO: 15955 - protein, 620 aa, synthetic construct
MAGIRTENKIYEVGIYCRLSKDDGTDNESASIATQKSILTDYVKRQGWHLAKTYVDDGYSGTNFQRPSFQNMIKDIENGLINCVITKDLSRLGRNYLDCGLYLEVFFPEHNVRYIAVNDGVDTLNKSAMDITPFRNILNEMYSADVSVKIKSAYRARFQQGKFMGTTAPYGYVKDPADHNHLLIDDKVAHVVREIFDLALAGNGIAKIRKHINKQHILRPAAYAVEQGATGYERYFEDNEENRYIWSENSVRGILRSPIYAGNLAGYKRIAANMKSKKRPSKLPEEWEVIPDTHEGIVTQEEFDTVQQLMTSRRREQNAGGFENIFSGVIKCADCGYAMRAASANRRKRPDIIDCVQYTCNNYGRYGNVMCTAHSIEARDLFNAVLADINRFADMAVNDEKAVRAIERRLTETDQSRAKSLEKEKKKLNKRLAELDRLFSSLYEDKVMERITERNFEMMSGKYQKEQLEIEARLKEVTETLNDSYEKSQGVRDFLSLIRNYQGLKELDATIINALIDKILVSEREKLADGTVRQEIKIYYKFIGFVGELHITPTKRWTALKPKNCTVCGVEYVPSSGISKYCPACAKRIQREKSNESKRRSRERNRRACIELSAKNDRLM

SEQ ID NO: 15956 - protein, 522 aa, synthetic construct
MKLSHILQQNMKAAFYGRHSTDKQDMDMQLNSVMEVIRKYDCIHTHSFLDKAVSARKNKITSRKELENMLEAAKRKEFDYVIVYKSDRLARDPLEHQTIRIVMKTLDIPIIISSTESVYNTDTDLIVQLMEDGFTKYEVDTIIARTRSGLENKAKQGKWLGGKPPFGYTYDKNIEQFIEHTEELCYVKEIFNLYVNGHGFQYIANTLPNGSRRGKDWEKENVKAIVLNPFYCGLLSWRRQTDGKQNARDIWIEAPNHYVKPIISRTTWELCWRIYSEKRNGNMVPKHYKTSFLLQGLLSCEKCQELMKTKNQQTVSSTNKKYGGKIYFCSNCKLRIDADLLHDKVVNQTLTNVKISGFHNVYHAIEQKIQYEIKELNSNIQKHQRLFENYTIKLHNITEELKQRMKNNDDKRFLKSLAIYRLDVQRKLDGVTQQINDFKQQSTLKEKVEKSKETWLHILNEVFKDDVKLQEISDMDKRRFLLPLIQSVSIKENKKRNEYDISLQLRTDFSKRDVKNQISLIL

SEQ ID NO: 15957 - protein, 519 aa, synthetic construct
MNIAAYCRVSTDKADQLNSLEAQKEFFSEYTKRTGDTLVRLYADEGISGTKIKNRKEFLRMMSDAEHGLFDMVVVKDISRFARNTVDLLQNVRKLKSLGIETQFLTANMTSMGNSEFVLTIFGALAQEESANTSKRVKFGKKMNAEKGRVPNIVYGYDKTIGDYFNLAINKEESKVVKQIYKWYTEEGYGAAKIANMLNEKGYKTKRNCKWSQNATCRILTNEIYTGKIINGKQEVSDFLTGQRRDKDETEWMVVERSELRIIEDETFEKAQEILRGRHDAFNLSHERQSNKHLFSTLIKCKECGWSFRRTVRTYKNTYVRWVCSGRNGRGADSCPNKTVVDEEELIEVLQEYFTNVLKQKKKVIAHVVNEFQRVYKAKDENVEYEKELNAELAKLQKTRQKYMDMYTDDLISREELNEKIGGSRQEMERIENELKMVSYHLTKGEQLENILNNTFKEIEDITDVHQMTNQQLKRLIQKIEVDKDGNVDIYLRLLGDLGLDESVLIEDNENILNCNDQT

SEQ ID NO: 15958 - protein, 626 aa, synthetic construct
MRNEKITPLYERLSRDDELQGESNSISNQKQMLEDFARRNGLPNPTHFTDDGISGTRFDRPGFLAMMEEVEAGRVEAIVIKDMSRLGRDYLKVGQVMEVLRQRGVRLIAINDGVDSLKGDDDFTPFRNIMNEFYARDTSRKIRSVFKSKGMSGKHLTGTVIYGYLWDEKREHWLVDEEAAEVVRRIFSLTLEGYGPYQIACKLSADRIEIPVVHLARFNEGVNRSKPVKDPYGWGSSTIVNILKKREYLGHTINFKTRKHFKDKKSHYVSEDEWTIFENTHEAIIDQQTFDLAQKIRSNVRRYPNGWGEAAPLTGLLYCADCGGKMYVHRTNNGRRISQYTCSNYTKIPCGTLCPTQHRINESAVLTLVSDTLRAIAEYSRNDRTEFIHTVQETQVAQQSADISKKRRRLAAAQKRAGELEKLICKIYEDNALGKLPDARYRALDAQYAKEQDALEIEIAELEKAVTGYEQSQKSAEKFIALIDKYENFDTLTNTMLNEFVEKILVHERARKGSQDTTQEIEIYFNFLGRYIPPSLQPVPLTPEEQEELQKKEERKDRLHQNYLKRKASGAQKRYEDKIKAKKKAEMDAKKALIRAEDMKKGVFSTVGQLPKEEPRKGSIAASAAV

SEQ ID NO: 15959 - protein, 571 aa, synthetic construct
MTDVKEDTKKIVRILLRVSSDQQLEANGDLSIQRKLVVEEVKKHEEWILDSKEYFEGSNSGYKNSVADRDVLQEALRDAENREYDILLAYKDDRLGRRMLEIPVYIMSLKQFGVDVYTVKDGLLTPDLGDVMGMLKLAMQYGMAEKSSSDTGMRVKDTAKKLVQQGKFMGGKAPYGYKLEYSGEYSKHQRALKHLVIVPEHAEVVKYIYKLSLYKEYGSGKIATTLNLDNRYKNLAPNDVWKSGTITSILTNPIYAGYTAYGRRQHTAGRYRSLSQEDWIIAEKPNDEITIIDRDMWEKVQISRQKRGTKYQKQPWNEKATVISRNDGQLALIDVAYCGYCGRKLTNGTKYDYWTIKGTGERRSSQKSIYKCQNVWQGVPHEKMKQIRADKIEPIVFKKLSEYVGRLQEDENIFEQILENQSFEKSQQEQILVREKRNLQEIEKNIDILNDAIPNAITGTYPLSLEDLAKSIERQKDKASKQKTVVEELETNIKNLSVSQEDWENLYHNLPTWQDIFMNADVATKRVLVNKLIERIDITDDTVVIHFKVDLDHFCPQPRMTNYDGVPEPGL

SEQ ID NO: 15960 - protein, 522 aa, synthetic construct
MKLSHILQPNMKAAFYGRHSTDKQDMDMQLNSIMEVIRKYDCIHTHSFLDKAVSARENKITSRKELENMFEAAKRKEFDFVIVYKSDRLARDPLEHQTIRIVMKTLDIPIIISSTESEYNTDTELIVQLMEDGFTKYEVDTIIARTRSGLENKAKQGKWLGGKPPFGYTYNKNSEQFIEHTEELCYVKEIFNLYVNGHGFQYIANTLPNGSRRGKDWGKENVKVIVLNPFYCGLLSWRRQTDGKQNARDIWIEAPNHYVKPIISRTKWESCWRIYSEKRNGNMVPKHYKTSFLLQGLLSCEKCQELMKTKNQQTVSSTNKKYGGKIYFCTNCKLRIDADLLHDKVVNQTLTDVKISGFHNVYHAIEQKIQYEIQELNKNIQKHQRLFENYTIKLHNITEELKQRMKNNDEKRFLKSLAIYRLDVQRKLDGVTRQINDFKQQIILKEKVEKSKETWLHTLNEVFQDDVKLQEISDMDKRRFLLPLIQSVSIKENKKHNEYDISLQLRTDFSKRDVKNQISLIL

SEQ ID NO: 15961 - protein, 515 aa, synthetic construct
MYRPQELDVFIYLRKSRKDLEEEKKAMEHGQHYDTLERHRTQLLELAHKEHHNIIDIFEEVVSGEYISERPMMQKLLREVESGIANAVLVMDLDRLGRGDMVDQGTIYRVFRYSETFIITPTEIIDPNDENQELTFSIKSLIAREELKTIVKRMQRGRRVSAKEGKSISRVPAFGYLRDNNLKLYPDPEKSWVIPKIFELMANGMGRQAIAQELDRLGISPPEGEYWNPSTISSITKNEVYLGHIIWGKVRYTKQNGKYIRKKLPKERWQRHNHAHPPLISEELFQEANMAHSKRWRPPTIKTKKLSNPLAGILLCELCDHSMLYQPRKDRPNPQVRCVQASCKGIQKGASLALVEQRILDGLKQIIESFEIQENMVQKKKTTNNINMQKKALEKKEQQINDLQKQKNTLHDLLEKGVYDIETFLERQKSIVIRLKTIQEEIKQVEHEIKHVLEKEKHIHEFVPKIKNVLEAYYATEDIEKKNRLLKSVLEKVTYLRKKRWQRKDEFVVELHTKI

SEQ ID NO: 15962 - protein, 491 aa, synthetic construct
MGLAAIYLRLSRNEEQLDIDEILSSHRNALTKLAKQQKLTYDMYQEISSGVNTDRPQLNLLLSRLDDYDALLVMDIDRISRDNAHAEEIKKMLILHDIKILTPQGAIDLSQESNEMLFSFQAMMANFEYKQIRKRLGRGRLAAAEQGKWTMSNRVPLGYKKNEEKRLEIVEDEAKIIRFIFQKTLERVSANEIAKQLDTLGWRSRNGKVLTSAHISQVRRNVVYYGVVQACRRVNGRVVDEVFVENAHEPIISKQTFLEVQEILAENTTGNFFNKAKSIRKLQGLIYCNCCKRKRYIQCDGHGVDFVKSCIYKVDNNNCRDRGHKYAPIEQFVLQKVKEKKPAFEQELRMLKSLDTVEVENKLLIQKESLEKQLDKFNKRQRNLKEMRMDGEITKVEFYEMRDRNEEQIKQVRQQMELIDIRLENLSNTDEEQKRLEDAIKKLDMLEELNDEVCNAFLKKFIKKIWFSSNTEANHDTTRERVEATVEIEWL

SEQ ID NO: 15963 - protein, 463 aa, synthetic construct
MRRKTTAPVEKILLRVAIYIRVSTDKQVKDGDSMRDQLATGQKYIDSHENMILVDTYIDDGISGQKLKRDDFQRLIDDVRAGRIDLIIFTRLDRWFRNLRHYLNTQDILDKHGVSWTAIEQPYFDTSTPHGRAFVNNSMIWAELEAQNDSDRILGVFDDKVDNGEVLSGSTPLGYTIVNKHLVPDDDAPTAVAIFQYYRKTGNLSMTLRYMESEFGLVRSAASLKNMLTNTKYIGEFRDNKNYCPAIIDRDLFFDVQRLLKINIKSGKKHDYIFSGLVVCDDCDHIMSGCQQRARGRVRADGTRIIYKYSVYRCRQGVNLHRCPNRKLVFETTLEKILLERIRPELENYIAEYEVANLPALRTDAKRRSVEGKMQKLKDLYLNDLITMDEFKLDREKLLMQLEKINAEDSRPVKDLSYLKNFLKMDFESVYDSLSIPERRELWRSIVKEIRVDHDKNIHIIFL

SEQ ID NO: 15964 - protein, 608 aa, synthetic construct
MNTAVNEYNYRFKLTDYSLFDRNRARKVAIYGRVSTEHEAQLSALENQLQWYDDQVKYHPNWTVCERYIDEGITGTQAKKRPAFLKMIEDAKQGKFDLIVTREVCRFARNVVDTLVVTRELKGIGVEVFFIDDNIWTMDGDGELRLSLMATLAQEESRKTSERVKAGQKISRDNGVLYGNGNILGYDRVGDTYVINEEQAETVRMIYDLYLQGYGSMKIAKILTERKRKTASGLIKWSVSNIMRAIKNATYTGTKCYNKSRSNNFLEQKRINNLDMSTYEYVEGDFPSIISQEIWDKAQAIRESRVKPVCVSAGKNTHSKRDSRDIWVNKLRCSCGSSYRKNKWHTKLDGKTSYGYQCYNQLNNGIKRKRAEIGLDTEGYCDSRMITDWKLDFMAKALLEHLWTERKESVLIALDLIKYYYKEEKSNETQSDTVTIQAKLDKANSRLTNLIAMRADGEISKDEYQAMRSPVDEEIKKLQKALDEIPQEKSNPKGLDIEGIRSTLNSFIDFSGSTISHDVVNQFVYLITPTSDTTFDWYVNLNGTADVKATFTAEGRKKNCIIKLEEIEKISSVHREKNEDNAHFIKNPHIFTYLHRLLSQSRQNRQRF

SEQ ID NO: 15965 - protein, 491 aa, synthetic construct
MRDEGLSAYHQRHVTQGALGVFLRAIEDGRIASGSVLVVEGLDRLSRAEPIQAQAQLAQIINAGITVVTASDGKEYNRAGLKAQPMDLVYSLLVMIRAHEESDTKSKRVKASILRLCQAWQSGTYRGLIRNGKDPQWLRWTGSAWEMIPERVLAVRRALALYQEGMGAARATKILHAEGLDYSAGGISKQQIYRLIKLQALRGAKCLSVDGEDFILEDYYPRLLSESEWADLQHLAGQRLRRRGHGEIPGIITGIGLTYCGYCGTALVGQNMMTRQRADGTIADGHRRLHCVSYGVNGGCTAGGSCSVVPVERALLTFCSDQLNLQRLLKVGDDGQGIRQQLAVARSTAEKLSVQLGRITDALLADDSGTAPTAFIRRARELEAEQAEAHKKVQQLEYELATVSGSGKPAQAERWVELAELVRSGDYSAREKVRQLVMDTFERIVVFMRGMSAEDRSGRFIDVQLLSRTGQQRLLQINRKTGAWVASEDWD

SEQ ID NO: 15966 - protein, 481 aa, synthetic construct
MKRMEQITPPPISTSPLVKVAAYARISMETERTPLSLSTQVSYYQQLIHDTPGWTFAGVFADSGISGTTTHRPQFQELLTLARKGAIDLILTKSISRFARNTVDLLETVRELKDLGVEVRFEKENISSTSADGELMLTLLASFAQAESEQISQNVKWRIWKGFEEGKANGFHLYGYTDSADGTDVQIIEEEAAVVRWIFAQYMKKTSCEKMAAQLIADGRVPHLADNKMPGEWVRHILKNPHYTGDLLLGRWSTPEGRPGRAVRNTGQLPQYLVENAIPAIIDRDTFTAVQTEIARRRELGARANWSIETVALTSKIKCVSCDCSFVRNVRNPKTQNSISTEHWICTERKKGRKTGCDTCEISDTALKGFIARVLGIDTFDQEVFNERIDHIEVQGKDHYTFHYTDGTSSSHTWRPNLKKSSWTPARKAAWGELVRARWAEAKRLGLDNPRQAPTPPEALVKYRAVAKAEAERLRAERGER

SEQ ID NO: 15967 - protein, 537 aa, synthetic construct
MARTVTAIPATRALHTGAPLGQTTLRRVAGYARVSTDHDDQVTSYEAQVDYYTRYISDHAGWQFVKVYTDEGITGTSTKHRAGFQQMVIDALDGKIDLIITKSVSRFARNTVDSLTTVRALKDKGVEVFFEKEGIWTFDAKGELLITIMSSLAQEEARSISENVTWGHRKRFADGKVTVPYSRFLGYDKGEDGSLVINPEQAKLVRRIYNMYLGGMSIGTIARTLTDEPETFTAAGNKTWYYRSIRAILTNEKYKGDALLQKSYVADYLTKRQVINQGEVPQYYVTASHEAIISPAVWDFVQAEIAKGARDQRTQHRTRPFSSTLECSQCGHFFGSKTWHAGSKYEKVIWRCGHKYAGQEKCATGHISDQRLKYMFLEAIRLRFGSPADDTVNHAVLDALDTSDLEVEAAGLIAQIDQVAKKLESLITHNARVAQDQQVYEKAFNASHEQHQALLAEHAAVVDEIHNKHNRLAAYHYYRQETANLELEQLAFNPYLCVALLDKGTVNIDGTVTFHFRDGSTQVVAIKADIGQAPGCD

SEQ ID NO: 15968 - protein, 551 aa, synthetic construct
MATKARVYSYLRFSDPKQAAGSSADRQLEYAKRWAAEHGMTLDAALSMQDEGLSAYHQRHVTKGALGVFLAAIDEGRIPAGSVLIVEGLDRLSRAEPIQAQAQLAQIINAGITVVTASDGREYNRAGLKAQPMDLVYSLLVMIRAHEESDTKSKRVRAAIHRQCRGWQDGSWRGVIRNGKDPSWTRLEPETKTFQLVPERAEAVKLAIRMFRDGHGAVRIMRTLAEEGLQLTNGGNPAGQLYRILRNRALIGEKVLEIDGEEYRLAGYYPSLLSAEQFADLQQATEQRAKQKGTGEIPGLITGLRISYCGYCGSAMVAQNLMNRGRREDGGPQHGHRRLICVGNSQGMGCAVAGSCSVVPIEHAIMSYCADQMNLARLFEGGDRSEALGGRLAIARARVADTTAKIERITDAMLADDAGDAPAAFMRRAREMEAALAAQQSEVEALEHEMAAIGSSPTPAVAKAWADLQEGVKALDYDARTKARQLVADTFERISIYHRGTEPEQTRSWKGTIDLVLVAKRGSARILHVDRQTGEWRGGEEVRDLPDDPVQ

SEQ ID NO: 15969 - protein, 456 aa, synthetic construct
MYTALYLRVSTMEQADNNFSLAAQESKLRAYAEAKTLSNIKVFTDPGYSGSNMNRPALTQLLESVKRNQVSNILVYKLDRLSRSQKDTLNIIEDYLLPHDTNLISLSESFDTSTSFGRAMIGILSVFAQLERENFKERSRMGMIQRAKEGKISGYGGKVFGYDYIDGELIINDYEAMIVRKIYDYYVKGLGVTKIFMQLQKEHPNVIKSSHHIWQILRRRTYTGDFDYMDESYEGIHEAIIDKSIYDQVQVLRDSRNSKQKSDAVYMLTGLTYCKCCGYKMQGTVSSSTYKDKRYERRYYKCNTNKRNKVNHNPFRCNTKSIKKDELEHAVISQIKALDIDLKIDDIQTNTIDDKAIDKRLNELEKQSEKLLNLYIEDSISKSILDKKLEEINTEKEALENTETEDNQSKLQALELAKEFNFDDATDYELQNLIHLLVKRIDVDNSSVDIQFIFSV

SEQ ID NO: 15970 - protein, 552 aa, synthetic construct
MLRAAIYARFSSDMQNETSLDDQIRKCRQMADDEGFLVEESLIFTDAAISGHGKDIKKRQGLARLFDAWDGGYIDIVLCTEMSRLGRDAVGGLAVIARLHDGGVHLLTSDGIDSRRTGWMMLAMIRLGLATEEARTLSARVSRSMTGVLERGGLIAPPPIGYALDVNAYRDPNRAAGALWRIDPEKAQVVRDMFTMRAQGMSMYQIARALNDRGVPSARNGRDGLPTVWRAGSVNRILRNAIYKGLFVYGGSSFSVTRSRKTGVPLETKVFDRPHLRIVEDDLWEKCNPPARPKRARGGAKHLLSGLVSCGQCPAYLNVKVSGVHASLACQQCEQRSRCEEGAPRAMYTSPRAALAALRAVLLDAVSKAGAIEEVRTRLRQRLKNGPAAELQAAQSEVKKLASAESRLLELAVQPCIGIEVVGAKLSENRAALATAKARLQALSKEAGSLTAAAVERQCAVTADDLVDRLLAGQPSVLQVRAMLGRLVQRFVYVNCPGRGQAVFEIELVPGALIALAADDKQLDEQSATYQVTTRIDRASKTNVFTQVKRIK

SEQ ID NO: 15971 - protein, 509 aa, synthetic construct
MLSDTGKHQFQVVIVWKVDRFGRNREEIAFNKHTCKKNGVRVEYVAESLPNSPEAVILESVLEGMAEYYSIQLSQNIRRGQLESAKKCQCVGGSVPLGYTLDSDKHFVIDPQTAPVVKKIFDLYAEGATISEITGQLNEQGIRTIRKQLFTKNSLTKLLKNEKYIGVYTYKDIVRVEGGVPAIVDKSTFDRVQELLKINRRAPSHTWTKVEYLLTDKLFCGHCGSPMVGESGFSHTGAKYSYYGCIKRRREKACDKKPVRQDWIEALVLDETVKLLHDDELMEYIIDRTWEYYQVTDKVQEEKAVLEAQLAEVDKAINNLVRAIEAGIFNAATKSRMDELDAQKAALTASLADLELTSGIRITRDHIEYFLLRLRDLDVKDRECQKRLVQTFVNAVFIYDDGRVKITYNYSGQSSTITLNQIASAEKGKGFVCCLPCSTSSPRFPRGVAALFLFWGKSGVNRLPISAVLCYNGSENGRGGRKNEKAACCVPDGARLLGLCGVRGRNAGR

SEQ ID NO: 15972 - protein, 540 aa, synthetic construct
MKQPYNTTIYNTALYMRLSRDDENYGDSVSIETQRTILQQYAKEQGLHVVGEYVDDGWSGTNFERPDFQRMMDDVEAGKVNCIVTKDLSRFGREHVMMDYYLEFLFPEKRVRYIAVAENEDTEKGLSDFVPFKNLFNEWFAKDTSRKVKAAFKAKFATGQRIGAYAPIGYRKHPEIKNKLIIDEETRWIVEKIFDLAIHGRGAASITRILIAEKVPTPGFINFQRDGTFANIYAGAPEEKSYAWTIAQVKSIMKDETYIGHTIHYRETNISFKNKRRIRKPQSEWVRVENTQEPIISEQVFRQVQEQIANRRRKCKDGTTQIFSGLVKCADCGWSLSYGENRQNSKPYGHYHCSKYGQGTRQCSMHYIRYDVLYAYVLSRLQYWSGLVQHDEERLLKRLLNANDKGQAAARKKQAAELNKAEKRKAEVDTLFARMYEDWAAGRITEYNFSMLSGKYQSEQAELDEKIERLQSAIATESQNAADAEKWIALMKECVNPTELTAELLNTLIEKIVVHEAVKGEDGSREQEVEIFYRFIGKID

SEQ ID NO: 15973 - protein, 494 aa, synthetic construct
MKVKRSVLYTRVSRSTEESVSVDRQERELRQVAEREGWPVVAVFQDDGLSGRTERAKADAALAMLAEGRAEVLMVWEMSRWSRMGLGAVAKLVEVLDAKPDALFLAQKESLRSDQPAFRLMASVISEVARMEAESTRDRIKAMRSYVLSETDPSQTRWLGGPVPFGYQAVARPGGGKALQLDPEEAPVAREAAEKFVAGMSLTDVTRLLQERHVATPQSPARRARQAGKPVDGLDAGTWRITTVRKLLLSPTLIGRTTQGDGVVTDATGLPITRWEPVIDVGTWNAIQTKAKARAPYQDRKASSWLSGFLFCGLCGSVLYVNSRKDRVNGSFRCANKAIPGQACKGVSISREGVEAYMEGTILRMIGGLDEYRVSERVEGTDAGELDAVAQAIADVQSALAGDEADYGVLLPRLDKLKARRRALQEAPGRVVKTQVPTGRTLADAWAEGDVRERQWIISDMIRGIEVQPAARPRQPVEERLVIVWDEPEAEPDD

SEQ ID NO: 15974 - protein, 544 aa, synthetic construct
MKIAIYSRKSKFTGKGESMQNQIELCKEYAQKHFDNIEEFIVYEDEGFSGGNVDRPEYQNMIKHAGQGKFEVLMCYRLDRISRNISNFSDTIETLQSKDIAFISLREQFDTSTPMGRAMMYIASVFAQLERETIAERIRDNMMQLAKTGRWLGGMTPIGFESESVETTDQIGKQRKLYRLSPIPSELETVKIIYDKFLELKSLTKVETYCIQNNIKTRNNIDFTRFALRGILSNPVYATADKTLYNYLSTNGFELYADENDFNGQNGIMAYNKTIQKKNTANKVRDYSEWVISIGAHEGIISSEKWINAQKMISKNKSKTFRKVKNTQSLLSGLLRCENCNSFMRPKTGRIDKDGIQIFYYMCEMKEKSKKMKCDMKNINGNKLDKLVIEEIKKLSENNSTLDTKISTDKINIETADNNIKSQITMLENHIKNNERSIANLVDTLSQAQNSTATKYIISQIEALDQKTATLKDQLFELRERTECNQLKSNSLDIMNDMLTTFSNMIDSLDVYGKRNLLRTLVEKIIWDGENIDLVMFGVNTGKK

SEQ ID NO: 15975 - protein, 511 aa, synthetic construct
MERVCMYLRKSRADEDAEKRGEGETLSKHRKALLKLATHTGLNIVKIREEIVSGESLMHRPEMLELLKEVEAKKYDAVLCMDIDRLGRGNMQEQGLILETFKKANTKIITSRKIYDLDDEFDEEYSEFEAFMARKELKIINRRLQSGRIRSIEEGNYISPLPPYGYEIHYTDKHRTLTPHPEQADIVKMIFDLYTEHGLGCNKIANKLNELGHKTYAGKDWSGSSTLTIIKNPVYAGKITWKKKEIKKSSDPNKVKDTRTRSKDDWIIANGKHEALISMEIFQRAQEILQNKYHVPYQLEKRITNPLAGLIRCNNCNASMILRPYKTKDSQIMCYSNCGNKSSKLKYIEARLIDGLSQWLEQYKAQWNSEKQSKKNVDTSSSIHKKVLEHLEKEIVELEKQNGNLHDLLERGIYDIDTYLERSQNLADRIESTKLTIKKAKVDLVQEIKREKVQHDIIPKIEKVLDTYSRTDDPAKKNTLLKSVLAYAVYRKEKDQRNDQFTLILYPKLPQ

SEQ ID NO: 15976 - protein, 621 aa, synthetic construct
MTNPAIDVLSDNPVPSTEPKRLAYSYIRYSSDQQMTKKNGDVGDSVRRQMENQRKAVERYNLHVVDVFEDLGKSAFRGKHRLKGALSLFLASLDEGKIPHGSYFVIESFDRLSRERMTDGLTTVLTILRKGIKIITTDDLKLYDLSIKGKDLEQTIMITVLLERANNESETKSDRQKAKWEGRRERIISGDKKFLSKNLPWWIALDEETGTYSLIPERVAEIKRIFDLLMNQNLGLRSAAAHINQESPLKVVFGKNATDTGWTARGIKRLVETPSIYGSLHLCEYIYDNGKATPDRKSVKMMDDFYPAIFDKEYVETVKAKIASRQNTKTVTRRDKQYYNIYHGLTKCSLCGGNVRFSQKVKYSYLVCRNSEIGLCKYPKTLSIQYQRFDEVFFKYAEHYDFDLLIKNGGNQNEQVFKEIAELQETITVEKAKIQKFTEKLFDMFDGEIPPEQEAAMLTRNKKVKALQAKVKALQAKVTHGNTDAATISDAMQHARSLYESKNGRLELSNYLSKVVDKIVIDFGKVHGSEQDYIKVLFKNKNFSHHILVGKTESYSYDSDGEMFLDTLQGIKREEGYYLEAAASPDWFDVPDFTDEEIQSDIEANRTNPPMPEGMVAESLD

SEQ ID NO: 15977 - protein, 586 aa, synthetic construct
MNDVQVIKANRNENRIRGRKVEILRVAAYCRVSTDSEDQLNSYKSQVMYYTDLIKKKPEWSLADIYADEAITGTQVTKREDFQRMINDCMNGDIDMVITKSISRFARNTLDTLKYVRMLKEKGIAVFFEDENINTLTMDGELLLVVLSSVAQQEVENISSNVKKGLKMKMQRGELVGFQGCLGYDYHKDTKSISVNEKEAEIVRYIFNRYIEGAGCTVIANELENLGYKTKYGSSRWVQSTVIGIIKNEKYKGDLLLGKTFTVDPISKRRLENFGEEDKFYIRDHHEAIISEEIFEEAQKILAKRNVNRGVHQEGQKRNKFSRKYAFSCMIKCGFCGGTLSRRNWHSSSAYTKTIWHCVTATKHGKKNCPHCKGIPEEVIENAFVKSYQLLCSDQHEVVSEFLQKVEDILKDDASLKRLPKIEKEMTDLQRRKEKLLDLRLDNNIDRDIYDKKNQELSEQLKKLQAEQLQLVELSKNQESTKTRIREFRKNLNSGELLESFDRVVFESVVERIIIGGYNDEGVEDPLKITFVYKTGIHSNLNAKDFKPKRKNAAAVHTDAELCSYASVEDNKLCLHSSSDTLRDYS

SEQ ID NO: 15978 - protein, 604 aa, synthetic construct
MEYDTSKLADLLMADSQINTQTAAKIAVSYPRVSSKKQAEKDGDPDGYSLPAQREANRRKAATLGAVVVEEFVERAESAKSADRPKLQEMLTYIREHKVDYVIVHKIDRLARNRADDVEISLAIKQAGAELVSATENIDETPNGMLLHGIMSSIAEFYSRNLAVEVTKGMTQKAKIGGTPGKAPLGYLNVRKINAHGADVRTVDVDLVRAPLITWAFHAYASGDWTLKALAAELEQRGLTTRPTPKTPARPIKYNSLHKILTTPYYKGIVVFSKAAYPGKHKPLVDDVTWAKVQEVLSSHATGEKQREHPHYLKSSVFCGNCDSRLVITNAKNPSGTVYPYFICLGRHQKTTDCEQKAVLIAKVEQKVADYYRAVQLDPESRGQIETMLRDEMASYRTTAETQHKQLSLQKDRLERERTSLLQAHYAGAVPLDLLKAEQDRIARSLAEITERLTATNMEFEQFERALVSALDYAMNCHRAYIGAAHAPGGNQIRRLLNQAIFTEIYIDDEDIHGDLAEPFRTLLSGELAKAAQQHAANKDSALAVDGKHQASSDNDPGTPLTEILERTNKKPDDSVASLKLTTLVPSAGFEPATPALGEPCSIP

SEQ ID NO: 15979 - protein, 524 aa, synthetic construct
MAKSVITIPATKSKYTATPLSCKKKRKVAAYARVSTDHEEQQSSYDAQVDYYTNYINGRDDWEFVSVYADEGITGCNTKKRDGFNSMVEDALAGKIDLIITKSVSRFARNTVDSLTTIRKLKEHGTECYFEKENIWTFDGKGELLITIMSSLAQEESRSISENCTWGQRKRFQDGRVTVPFGRFLGYDRGEDGNLVLNEKEAQIVRRIYGLFLQGRSPYSIAKLLTAEGIPTPGGKKKWCGTTVKSILTNEKYKGDALLQKVYTADFLTKKKIKNDGQVPQYYVENNHAAIIEPGVFDRVQKLMALRHPGQNRNSSISPFSSRIKCGECGSWYGSKVWHSNDKYRKVIWQCNHKFDGDCKCETPNITEDEIRSLFIKAMNILITEKDALIEDFEAIKDTVFDTSALAQERTDLQIEMNTVAGLIEECIAENARIAQDQGEYQKRYDSLAKRFDRTRDRLEAVERSIAEKQAHREMVEQFLSELAKQDAVTEFTDELWYSMIDYVTIHNKDDIRFTFQNGTEIKM

SEQ ID NO: 15980 - protein, 453 aa, synthetic construct
MIKGACYVRVSTDNQLENYSIEEQTDRLKAYCKAKDIQIVKIYTDGGYSGGNVNRPALQQMLQDIGKGLIDSVIVYKLDRLSRSQKDTLMLIEDCFLAKNVDFVSVNENFDTSTPFGRAMIGILSVFAQLEKDQITERFTMGRIGRAKNGYFHGGGNAPTGYDYIDGELIINDYEALQVKDLYNRFLKGYSIHNCWQYMHQKYGGWSNEVSVRNVLKNELYIGKVKFKGVAYQGNHQPIISEEIFRQVQDLFNSSRRTSDTFKRSPFKASTLLSSLVYCGKCGARFHGEHGNYSCYSRTKGDKKYIVDPNCKNKKWKIEELDKLVLDYITRLDFSKLQNSHPAPVPVTDYSLRLTEIDKQIEKLIDLYQVSGIPLESIQKKMDALTKEKEALLNVSKPKNVPVTTLAEMITARDTLMSLSDSGSLDEKRACLTMIIDRIIIDDDNVNIKLKQL

SEQ ID NO: 15981 - protein, 583 aa, synthetic construct
MTNNHQTPSPRSTSTTTSTPPSVVSYSRYSTKKQSKGFSLERQDENLKRWSDANGIPISDLSFADLGISAFSGTAVREGLSNMLEAVRHGAVPRGWWIAFERIDRLSRRGITETRRLIDQILQHEVNIVCIGEGIELRSDDDANDELKGSLMVAIHAHLAREQSAKASERIRATAAAKRRRARETGAPIKKRLPYWLELSPDGTKYQFKAGRIETVRYIVKRRLEGRGFHGICAELNAMNTPPLTRMSKQWNDMAVASTVRNVALFGQYQPAITNEVEKVDSDGRRKMVRVAIPDGDPLDSYFPAVIDRATWDAIQSDSRTKMKAGRRGDNPVSGLTFCRHCGGTLPMKPASKTSTNGTRHTYRYWTCRGAVDGKCDHGKGIKDLDQFVIKACRRIVPRTLGQGGGGQDPAAAFEYQSLLERRGKVTTQIATLDAAMADPELGAAALKHIARQIDVATDNLEQVDAEIAAVEARQKAELDTTPEAVERLKQLEGDPVAYNLHLKTLVHRIVAGAVRLDDGSWSDVALLFRFTVELLNGQRIEVTVSRRNRWDKNPVEFYSHSEDATAGVDVEQDLYPWEQDQD

SEQ ID NO: 15982 - protein, 528 aa, synthetic construct
MQETNISINEIIMYLRKSRSDDPYMTVEEVLARHERQLQEYALSSFGSIIPEERIFREVVSGETIADRPVMQSVMKYLESGQIKGVLVIEPQRLSRGDLEDCGRIINAFRYTNTLVLTPPKTYDLSDEYDRKFFEMELTRGNDYLEYTKKILNRGRLASVKQGNYIGSIAPYGYRKIKTGSGKDTAHTLEIVPEQADAVRMMAQLYLAGNGFTRIAAHLDSLGIKPLKSDHWSPAAISDILSNPVYIGMIRWNHFKTIKTMQNGQIVKSRPTNHDTDYILVPGKHPAILDQGTFDAIAQRRGKSPKIKRGHELRNPFAGLVFCGTTGCGRSMTFKQFTNYRSKVPRRSESMICPNQRICHTKSVQYSAFVERVKEILSKTVDDFEIKLQNDDGNIVRIHENIIRNLEQDLVKLKDKDLRQKDAYEDGIYTKEEYASRNAKLQEQICEVQLSIQRAKDTMPPEVDYQERVSRFSDCLSKFEDTDISASEMNLLLKSCIEKIIYHNSSESKPGIGRFVANPFELDIYLRL

SEQ ID NO: 15983 - protein, 706 aa, synthetic construct
MSRTSKITALYERLSRDDDLNGESNSITNQKQYLEDYARRNGFTNIRHFTDDGFSGVNFNRPSFQELIKEVEAGNVATIIVKDMSRLGRNYLQVGFYTEVLFPQKDVRFLAINNSIDSDNASDNDFAPFLNIMNEWYAKDTSNKIKAVFDARMKDGKRCSGSIPYGYNRLATDKQTLVVDPVASEVVKRIFLLANEGKSPRAIAELLTEEKVLIPAAHAKEYHPEQYNGIKFTDPYLWGMSTIRAILSRQEYLGHTVLRKSVSTNFKLHKRKNTDEDEQYVFYNTHEPIISQELWDSVQKRKKRANRTATKGTHSNRLSGYLYCADCGRRMTLQTHYSKKDRSVQYSYRCGGYASRVNACTAHSISADNVEALILSAVKRLSKFVLNDEEAFAKELQALWNEKQTEKPKHNKSELHRFQKRYDELSKLIRGLYENLVSGLLPERQYKQLMKQYDDEQAELETKIEEMEKELTEEKANTVDIKHFISLIRKCKEPTEISDLMFAELIDKIVVYEAAGMGKARTQKVDIYFNYVGQVDIAYTEEELAEIKAQEEQIEMERLAKQREREKAYREKRKAKKLAENGGEIVKTKICPHCQKEFVPTSNRQIFCSKDCCYQARQDKTKADREAEKGNHYYRQRVCAVCGSTYWPTHSQQKFCSEECQKQNHNEKSLEFYHKKQKEKSGCNDLLQTKELVSSTNSSEIITIPA

SEQ ID NO: 15984 - protein, 525 aa, synthetic construct
MQVASYARVSSEKQDVDLSLSAQLKALRAFAANKGYSVVKEYVDEAETGRTTSRPAFREMISAARRPSKPFQAILVWKYSRFARSREDSIVFKTLLRKNGVQVISINEPSEDTPVGRLMEGIIESLDEFYSDNLGEEVTRGMRESVSRGFYISIDPPYGYSKLRVQDGSKTRTRLELNTTQAPVVKSIFESVLAGRGVIEVVRDLNSRGIPSARGKHFTKNSVYTILTNEVYTGTIVWGRNSKRGLSPVKTPGACPAIIDKEMFDSVQKMMSLRAPKVVHPRVVSSRFLLSGLAECGYCGRALTGQDAKSGQFAYYICGSLTKKGAGACPSKYLNAKRFERTVIEEIKNSILTKENLTQLAKLITEEWDESLSHLRREIDATEDALRDTRCRLDNIFNAIETGKVDSVDLSPRIKELRSRQEQLNSRKSSIEAQYAEHRYQIMDPRDIAEYVGDLRGLLEEGEICERKAFIKGFINRITVKGDEVTLEYTPPFPHSEREKVLSIDCHGGRPWTRTTDFLRVKQAF

SEQ ID NO: 15985 - protein, 600 aa, synthetic construct
MTLLDLPAGLDLSALRSLAGSATQALDVTLPDGKVPAISYLRVSTKDQATRNGLEEGLSIPAQREAAQRKAEQLGAVIVKEFIEPGESGKTARRKALQEMLDYLAEHPVRYCIINKVDRIARNRLDDAIIHATLRQAGVTLVSVMENIDETPSGMLMHGIMASIAEFYSLNLAQEVTKGLVQKASIGGTPHKAPIGYLNVRLTDANGHEVRDVQLDPDRADLIRFAFTAYATGDWSLSKLARELETRGLVTRPTPTFPAKPVTTTGLHKILTNPYYQGIVTFREVTYPGTHEPLVTPETFEQVQTILQQNHVTGDKPQKYDHYLKGSIYCGCGKKLMFERPRNHQGVAYDYFTCTGRRFKRNDCQRTAALVHRVEQSIENRYQHVSVTEDEAEQIKAVLGQVFDALAESTSDERTLLAGQKAKLEAEQVKLLQAHYADAIPIDLLKTEQDRIRASLHAIKSRLDTLATTYDNARIGLDAILGLLTDIGDVYAKAEPAERRMLNRALFDRITIDDEDQATLEPARTIATILDVIPRPHNERTLPRDHAGQGSNVQLYVELGGFEPPTFSLRTRRATNCAIAPCHMATMTDYHREAPDDDSS

SEQ ID NO: 15986 - protein, 557 aa, synthetic construct
MPKVFSYVRFSSAKQSAGDSKARQIKYAKAFADEYGYELADPNDYLFFDAGRSAYKGKHLDDTGELARFLAFVEDGTIPTGSVLVIESLDRLSRERVRDALPRFLDLLAKGINVYTSIDKRLYTREYNEIDLIISIINMSRAHEESATKGSRVSSAWRNKHRQARESGKPIGKLRPLWLDVTPDGYVLNAERADVVRRMFHLTAEGYGSRVIAAKLNQEGIPAFSAGRKNLSGLWAFSTIRHILESRTVLGEYQPHIFIDGVRTPDGEPIAGFFPAAVTEDEYYLATAARASRRQYQVTKTTQNFNVMAGVLFCQRCDASMHLQASRGRKHFKCANKAKGMCDSGIVTTSRAELVFREVLAKIDSLSLVRTSSGSLTKQLQVVEGRIEELRAKQAEAEASHEEFPSRITARQLQQLESDLERLDSERTVLSQELATDNVLSKEDFFEKLDLISYGGRSAANNLVKRLGVRINVAKWGRLNEAYAVTVNTAPTFVIIHDKDDIAVRALDRASLDKLALHGDIDEETRVRLAAVGDLVKGVATQLSDQLIAQLRSRPSK

SEQ ID NO: 15987 - protein, 486 aa, synthetic construct
MNTRYAIYVRVSTDKDEQISSVENQIDICRNWIERQGLEWNENCIFKDHGISGTLFLERPAIQQILAKAKKKEIDMVVFKSISRLARDLKDSLEIREVFIAHNVRIISVEEGYDSHKAGKNDMAFELWSLFSAQYSRTLSAGVSAALAAKVRRGEHIGKIPYGFDREDGKLKILEDEARVVRMIFNWYNQGWGFKRITKELNSLGIPSKQNNKWQMTSVQRLIGNPICCGDFILNQYTSVKAGGRKKQIRNSPEQWLWFRDHHPAIITREEWEQANPNRTNKNKITPWNDLRGILKCGNCDSNMVVLQSHKVLSTGKKKHFRYIKCSRYRRMGSDGCVNHEPITYEEVRTFLIETLLEKGRSINLNLTNNPFSDREEQIKEAQKALKTVQTKKQQLVDLYLDQLITKTEFEEKRAELDSQTQHIEEQLALLQQNDYQVRQIKTIQEAFNALEEQNQDLLNVFKTLLDKVILQPNLEIDLVYSFEKP

SEQ ID NO: 15988 - protein, 446 aa, synthetic construct
MSTPDCLLSLAIYTRQSLAHDDEFSSCDAQFEICHEFITANRSKGWVWCGRRYDDAGQSGERLDRPAMSQLLDDLRRGHVDGLVVHRLDRLSRKLIDLTALLTELRTRNIPLLIVTDPTLGTSATDTLVLNILGSFTEFEREMIRDRLADTRAAMKRKGLRVAGKVPYGYTTDPHTKQLVVHRQQAKRVKAFFEWAVEGQTPAAIAAIANARRWLTNPSPKKPSGGRWTPRQVADILANPVYRGQIHTANGPAPGTHEAIIPVELFERVREVIAGRRVSTTPRGKAVLAWPLRGLVVCGRCGRTMSTSVIHHRHFRYRHYRCRSHAGGRPPCKGIAVPAHELEQWVIRELSSLSPDQFRLPQRRQEVTDFQSLWAMLSEKEQIENLAAVVEQVRFDPARSKIQLSLRAGAVGAVAGIIAKREQAREPEPRRSRRKRSPADKPLGTG

SEQ ID NO: 15989 - protein, 698 aa, synthetic construct
MNQTAATPIVSSHKIQGRHFERLAVVYVRQSSLHQVQHNQESTQLQYGLANTAERLGWPRERILVIDDDLGISGASAEGRSGFQRLLSEVALDHVGLILGVEMSRLARSCKDWYQLLELCALFGTLIGDLDGLYDPSSYNDRLLLGLKGTMSEAELHILQQRMHQGVMQKARRGELVNLVPVGYIRRPSGEVTLDPDEQVQAIVRTIFEQFARQGSVGAVLRYLIANRMQLPVRMHSGPDKGSLQWRRPNKTALRIMLRHPMYAGAYSYGRSCLDKQRGPKKRRRGWLPPDQWQVLLRDRYPAYITWEQYERNVAQIQENQAYVQRRGPIRPGRALLTGLVVCGRCGARMMTHQSGKSALPRYACSSARANFGEAECQSLAARPVDDEVVRLALRALEPSALEVSLQVAADWKKERDEIEAQWHYRLQRADYEADRARRQYDAVEPENRLVCRTLEAAWEQKLRAARELHEEYERFVQGQPKLLTAEEQEAIRRLAADLPALWHAPTTTDADRKAILRQILDKVVLQVEGKTEWVEAWLHWAGGHQTYTRFRRPVASLTQLSDWPQLRQRIVTLKNKGLTAKQIAQQLNREGRTSPHHKGFTAATIRAALSRCGLTEVRRGASNDQLTLKEDEWFVPDLARAVGVRPQVVYAWIRQGKLTARQVDGPQGRWIVHADAATLESLRAAATEAGAQGSNRA

SEQ ID NO: 15990 - protein, 530 aa, synthetic construct
MNRNIKNPKPATLPVVRCAVYTRKSTEEGLEQEFNSLDAQREAGEAFVASQRQEGWTCLPERYDDGGFTGGNMERPALQRLLADIEAGKIDCVVVYKVDRLSRSLLDFAQMMQTFDKHRVSFVSVTQQFNTATSMGRLVLNVLLSFAQFEREIISERTRDKIAATRRKGKWAGGHPLLGYDVDPRGFRLVVNEAEAVRVRAIFNLYLEHEALLPVVQELERRGWVNKRWTTRKGRERGGQPFERTSLYRLLTNVAYVGKVRYKDEVHDGEHPGIVDPADFQRVQTLLQRNGQTRGAPVRNKFGALLKGIIRCVPCDCAMTPSHTTRNGSKRYRYYVCSSAQKRGWNTCPSKSIPAAQIEEFVVGQIKCIGQDRALLAEVLAQARQQDGARTSELEAEQRSLEKDLTRWHAELRKLSCQLRPGDDNGSIISRLADLQERIGLVEGRMRKVREQIQTVQQQLLDEEETAVAMSVFDPVWEALTPREQARVIGLLVERVDYDGASGKVSITFHPTGIKALAQQLADQRREKTA

SEQ ID NO: 15991 - protein, 549 aa, synthetic construct
MKAAIYARYSSDNQHERSIEDQVRICRQHAERHGGTIVDVYPDYAISGSHLKTRPQAQKLLEDAKAGLFDTVITEGLDRLSRDQEDIAAIFKRLKHHGIVIDTVQEGVISELHIGVKGTMNALFLRDLATKVRRGQEGRAKAGSVPAGLSYGYDVVREFDEKGEPVRGKRRVNEQQAAVIREIFDKVALGFSPRAIAKDLNSRGIPSPEGKTWNASTINGNAARRNGILYNEAYIGFLIYNRLRMDKDPDTGKHVPRLNKPESWTITEVPGLRIVTDEQWDRVQAVKAGFANRRGAEHARRPKHLLSGLVRCGCCGGSYTVKSKDQLACSTYRESGTCTNNRTIRVGDLQERVIVGIKSRLLSSASVALFVKVYGEERRRLEKEGQRGREDIAARLGKLTRQIDNIVNAIADGVASATMRQKLASLEEEKGAAEAELATIVRMEAKAGGVVEFPTATIDSYRQQVESLGEDAFVNDDARQEAMNAVRALIARIDVHPGERRGQTQVKAFGLIEKLISPAQDYLGGASSAVGRTATMVAAEGFEPPTKGL

SEQ ID NO: 15992 - protein, 584 aa, synthetic construct
MNKTVIYARYSSDNQREASIEDQIRVCRDYATRQGWTITNVYTDYAISGASMMRSGIQQLMQDAAVGKFDILLAEDLDRISRDQEDIAGIYKRIQFADARIVTLADGNISDLHIGLKGTMSARFLKDLAQKTHRGQRGRVEAGKSGGGNSYGYDVVQKFDARGEPIRGDRTINTDQARIVERIFREFARGVSPKAIAATLNREKIAGPAGEGWGPSTIYGNRRRGTGILNNELYIGKLVWNRLRYMKDPDTGKRVSRLNPESEWIITEVPEQRIIDQELWEQVKARQGDLNEAVKVPFHQKARPKNLLSYLLKCGECGGGFSMVSHTHLGCSSARNKGTCGNRLTIGRVKLEEAVLGALRDHLMDPNLCAIFCEEYTRHVNRLRMEHNAALGSYKRELESATRELDKLIDAIVAGVPASRVKDRMHVLEARRAELAVMVESTNEAPTLLHPSMAQHYRDEIQNLIECLNGGDQRIEAAELMRSLIDKIVLTPNGMRTALTVDLLGDLAGILAFANKKSAANKEKPLTRSGFQDLAQTWQVKMVEGTRSDLKLPVASEYKDKMVAGARNQRFLRLVEAKIPKLVA

SEQ ID NO: 15993 - protein, 508 aa, synthetic construct
MIAKWLLDHQDYELSKLNYSDLGKSGFHGEHVKEGGNFGKLLKAVMDGYIKRDDVVLVEAIDRTGRLPALQMLSDVIAPILRAGVSIITLDDNTTYTEASVGGPHLFMLVAKIQAAHEYSRTLSRRVEDSYKKRRKDAKEKGVAPKRMTPVWLNSDGTIREDVAPWIKTAFELYVSGVGKSTIAKRLRESGVERLAKASGPGVEGWLRNKAVIGKWETLIGTPEHHVIDDVYPLIIEPSLFYKAQVHAEKMKTQRPIKTAKHFLVGLVHCGECGKNYIMQNLHGKPHSMRCRTRQSQNNCSNSYVVPKPVLDAIYRYTSVTAALEAVQLQQLGVNEKEIVTREAELLTITKRVEGFVQAVNEAGPMPELLTALKQARIERESAENALVILRATVVTPPANQWREMGKVWSLEAEDAQRLSAMLRQVGYNITVGKGAIIKSSHSDVVYQYLGVDRVKDMYRVLADGEMKLIHKSQVDDYPYHEPFHEVVGEATMDETDKENLLLQYQSS

SEQ ID NO: 15994 - protein, 575 aa, synthetic construct
METLKIDRSKPVAIAYVRWSSTVQGGDDKDSYDRQTSPLEFFTSSTGVPVVETIIDPGRSAFTGENSKVGKLKGILDRIESGEIRKGDFLVVESIDRITRMRVLDGVALIQDGILKKGVKLYTTTDNKIYSYEDPDKDFENLLMISLIAKRANEESEIKSKRRRSAWSKAKTKATDGVPFNAHNPPYGLRYETEENCFEIVEDEAIEIKQIFEGLKYEGVSNTLKKVNLTSKRKWSRKTVHLMLTSRYPIGSLMSQKREGKKKVFERYIENYYPAILTHKEFQDALQAMKLRGKVKDYGRNTEGYLNIFKHCVKCAACGQSLMFEKSINQKGVKYGYFHCYTRKETLSHCDLPRFRFDFAFGTLLQLVRQLTGEDVDYDVHPWAMEMPADYNNNMANDEIDIDNFGDHFLSLFSKSTATESIKSEFYGKENELAKAKSLYENLTASFSQFSDGRIPSFFIKQMSDAEQAYENAKADVDALSAQIDNAESSLEIYSYKDIIDLYSTDEGRLKLNHFFKSNGFKFVFNYEAKTRTVFMVVRDKAGAELYRVGKIFTLHNPLKEFGINNLNEHMNAVI

SEQ ID NO: 15995 - protein, 539 aa, synthetic construct
MAKIGARVYSYLRFSDPRQGSGGSADRQLLYAQRWAADKGLELDESLSMRDEGLSAYHQRHVTQGALGVFLRAIEDGRIASGSVLVVEGLDRLSRAEPIQAQAQLAQIINAGITVVTASDGKEYNRAGLKAQPMDLVYSLLVMIRAHEESDTKSKRVKASILRLCQAWQSGTYRGLIRNGKDPQWLRWTGSAWEMIPERVLAVRRALALYQEGMGAARATKILHAEGLDYSASGISKQQIYRLIKLQALRGAKCLSVDGEDFILEDYYPRLLSESEWADLQHLAGQRLRRRGHGEIPGIITGIGLTYCGYCGTALVGQNMMTRQRADGTIADGHRRLHCVSYGVNGGCTAGGSCSVVPVERALLTFCSDQLNLQRLLKVGDDGQGIRQQLAVARSTAEKLSVQLGRITDALLADDSGTAPTAFIRRARELEAEQAEAHKKVQQLEYELATVSGSGKPAQAERWVELAELVRSGDYSAREKVRQLVMDTFERIVVFMRGMSAEDRAGRFIDVQLLSRTGQQRLLQINRKTGAWVASEDWD

SEQ ID NO: 15996 - protein, 547 aa, synthetic construct
MPVAFSYVRYSSLRQAHGDSLRRQTAMVAEWLKHHPEYVLSADDAYQDLGRSGFSGAHLDNAFGRLRAAVSTGIIKPGDCILIEAIDRAGRLAPSIMLNLLTEIVNAGVSLISLDDGTSYSADPYKSNNLFLLVAKVQQAYQYSDALSRRVKSAYERKREAARSGEAAGRRAPIWIKTEYPNGKKAQPVVSLREDLAPLVAQAFQDYADGLGERRIHHRLRDQHPELAKLSTTSLKRWMRNPTAIGNWNDIPDVYPAVVSKELWYRVQKRLNQKSKPKSAASNHLLVGLVKCAKCRANFHVHITPDNAAMKCGKRHRLGDQGCSNKKSLPMAVLDFIRSQTTFKALQRASLSRNLTASEKRALEIEGELAELNRQAATAAEGAVKYGMTAFGPALDRITAQIGVLEDENLTLVTKAAPSTEGEMIDLQEELLDVDEMRLNALLQEAEYVMWCDDRTITVEEPSIEFSADRQVIAYLGKDRVKGVFRITWNGARIDLPDLLSAPQRAELEQHMVQEARYKSGELERTVMRFNSETGDMDHVSGPPPKS

SEQ ID NO: 15997 - protein, 490 aa, synthetic construct
MPVAFSYVRYSSLRQAHGDSLRRQTAMVAEWLKHHPEYVLSADDAYQDLGRSGFSGAHLDNAFGRLRAAVSTGIIKPGDCILIEAIDRAGRLAPSIMLNLLTEIVNAGVSLISLDDGITYDSDPYKSNNLFLLVAKVQQAYQYSDALSRRVKSAYERKREAARSGEATGRRAPIWIKTEYPNGKKAQPVVSLREDLAPLVAQAFQDYADGLGERRIHHRLRDQHPELAKLSTTSLKRWMRNPTAIGNWNDIPDVYPAVVSKELWYRVQKRLNQKSKPKSAASNHLLVGLVKCAKCRANFHVHITPDNAAMKCGKRHRLGDQGCSNKKSLPMAVLDFIRSQTTFKALQRASLSRNLTASEKRALEIEGELAELNRQAATAAEGAVKYGMSAFGPALDRITAQIGVLEDEKLTLVSKSAPSTEGEMIDLQEELLDVDEMRLNALLQEAEYVMWCDDRTITVEEPSIEFSADRQVITYLGKCQRQLKSDPLPC

SEQ ID NO: 15998 - protein, 559 aa, synthetic construct
MKTKLYSYIRFSSMRQNDGSSYERQIRMAREIAAKYDLELVNDYQDLGVSAFKGANSKTGALSRFLDAIGRSVPVGSWLFIENLDRLSRADIVSAQELFLSIIRRGITIVTGMDNKIYSLDTVTANPMDLMFSILLFIRGNEESQTKRNRTNSSALIKIKAHQENPQNPAVAIEEVGKNMWWTDTTSGYVLPHPTYFPVVQEIVELRKNGRSTAEILDHLNETYAPPPAVSNKKHSKWSRAMVERLFHTRALIGIKEISVDGVNYELKDYYPRVIDDPTFYHLKKNIGARAWNFGDKEEVKPIPLLSGIGLLKCDHCGCAMVKVKGTNKRSDQYRYTCDATRSRRLDCEHPNWSFRGDQLEKAVLQLLADKIWIAEDKANPVPALKVQVDEISRKIDNLIALSAMTGATKELADQITTLNSERETLYNQIKMAEEEMYSVDSQGWEKLAEFDLEDVYNEERLKVRFKIKQALKRIGCSRIDRNKNLFVLEYIDGKTQRVVIENSRGTRKGQIFVDLKTINDRQILESNGLVLHPCLDMLTDKNWKPEEEIPGLLQEFGI

SEQ ID NO: 15999 - protein, 520 aa, synthetic construct
MRVAIYARYSSDKQAETSIADQVAICQARALREGWQVVFSHSDNAVSGSTAVGSRPGGAALLADALAGRFDVLLLEGLDRLSRDQVEQERIVRRLEHRDIRIVGLADGYDSQHAGRKVMRGVRGLINELYLDDLRHKTQRGMHGQVDRGYIAGGKCYGYRIMREEGGSRYEIDEAQAHWVRWIFEQAASGRAFRGIVYELNERAVPSPRDSSWTLSAIYGSPVKGSGLLNNCLYVGRYIWNRSQWLKDPDTGRRQRVDRPRSEWRETAVPELRIVPDELWLRVRDRIDEGRDEFGRKRSQRPPGTLLGGLMRCPYCGGPMIALNQLYYGCNVGHDRGPTVCRGFRIRRDLAERRLVTAVREDLLSSAAAEEFERAFLEQVAMLAGQDSAMTAMQRRVDELAAEVGRLVEAIAVVGVSSALAARLQAAEREQAGLMREIELMSKANADSPDIRGVFRRLLINLGDALRRDAVQGRAALAEIIERVDIELRGDEVWGHIATGPALQIAVGASCYNDGCGGWI

SEQ ID NO: 16000 - protein, 521 aa, synthetic construct
MKVPVWCYARISTLKQIDGFGIQRQINTINQFLQCVELDHRLPFTLDVDNVTQMVAEGKSAFRDKNWNEKTKLGQYRKMVMDGVISDSVLIVENIDRLTRLDPYMAIEIISGLVNRGTTILEIETGMTYSRYIPESITVLVMQCNRANGESKRKSIMMQKSHANRYGKVSKVRPRWFDVVEIDGIKQYRPNETAKAIQRMYNDYINGIGAAHIVRTYGNTDNGKPWTLVTVLRALSDKRVADDARYPPIIDKELYDRVQALKAATNKKGNTHQKNMLNIFSGMSRCPVCNQSIIVKRNSHGNLFTVCLGKRTNKTCEARSISYFALERPLLTAIRGLDFSEVYKHEDKNVLTLRDQWIQNERDIAAFRERLNKASRHEKFAILDELEIMNREQEELTIRLKSVDVPKDIQLTFDDDKLDLDTNYRIELNNRIKKLIQYINIVREDVTKSSYTIYCTIKYWTDVISHLVIIDVNIKRTGTGGTNTLTTTLRSVSSLNMDGTVSGNPDSDAWEYWKSFLDNLK

SEQ ID NO: 16001 - protein, 547 aa, synthetic construct
MTKAYSYIRFSTPEQAQGDSLRRQTAKAEAWAQQRNLVLDSTLRDLGVSAFHGANRTTGALRSFLEMVEDGRIQRGSYLIVESLDRLSREAVMDATSRLLDLIRAGITVVTLSDGQEYSEDRLLTDWTPLMFSLIVMARAHEESRIKSERVGEAWRQKKEKAREQGKPLTPRCPEWLEVRDGAFVERPERVTLVRRVFQETIDGFGRREIVRRLNSEGVPTFRGGKGWHTSSIAKIVQSRAVLGEYQPHTGTHRNRNRRPDGDPISNYYPPIVDNGIFLRAQGATQGRRQNAAGRKGKSGSHLFQGIAKCAHCSGPMHIINKGKPPKGGIYLACSANIRNAGCDNDRRWRIDMLEPLLLAAIDMLDQTAFSGQDNDLTQLRAQTEALRTQIADFEKRQRTLIELVEFGDETATARSLELAKHIKRSRKELKVTEDQVAATVAEPDLAARVAAAATISQRLGESVDIEERRELRTRLREIIGAIVDRIECHQKFGATAFFHPREWFRINNKRSEHNFTFLTKEGIPRILLDQNVPDDIIDEWIGPWPF

SEQ ID NO: 16002 - protein, 547 aa, synthetic construct
MKLLVTYIRWSTREQDSGDSLRRQTNLIDAFYSKHKNDYYLLPAHRYVDKGKSGFHQQHKAQGSDFRRMFENVMSGAIPEGSLIVVENFDRFSRADIDTAIDDVRQILRKGVSILTLGDGELYDKSALTDPVKLIKHIIIAERAHQESLVKQKRIAQVWNHKTQLARELKKPMGKQAPGWLELSEDGSHYIVDEDKASLVNIIYDKRLSGMSMFAICKWLNEQGYPTINQRKVRISKTKKPDGNWSALSVKHILTSRSVLGYLPAKISTEDRKTVLREEIEGFYPQIVTDSKFYAVQQLLEETGKGKTSSGDHWLYVNILKGLIRCKCGLVMTPTGIRKPVYQGTYRCNGNKESRCNYGTVSRKLLDTQLCSRLFSKLSQLHDEATDTAKLDELQRRLNTVDSELEKLTETLIQLPNITQIQEALRVKQEEKDELIVQLSREKARVKSVSSLDLSGLDMESVEGRTEAQIIIKRLVKEIVVSGNEKLVDIYLHNGNMIRGFPLDGKDDHTLTLEEATDEMQSLDDMLIFGEPVTRIYPAGDMEEVDA

SEQ ID NO: 16003 - protein, 618 aa, synthetic construct
MAGIRTENKIYEVGIYCRLSKDDGTDNESASIATQKSILTDYVKRQGWHLAKTYVDDGYSGTNFQRPSFQNMIKDIENGLINCVITKDLSRLGRNYLDCGLYLEVFFPEHNVRYIAVNDGVDTLNKSAMDITPFRNILNEMYSADVSVKIKSAYRARFQQGKFMGTTAPYGYVKDPADHNHLLIDDKVAHVVREIFDLALAGNGIAKIRKHINKQHILRPAAYAVEQGATGYERYFEDNEENRYIWSENSVRGILRSPIYAGNLAGYKRIAANMKSKKRPSKLPEEWEVIPDTHEGIVTQEEFDTVQQLMTSRRREQNAGGFENIFSGVIKCADCGYAMRAASANRRKRPDIIDCVQYTCNNYGRYGNVMCTAHSIEARDLFNAVLADINRFADMAVNDEKAVRAIERRLTETDQSRAKSLEKEKKKLNKRLAELDRLFSSLYEDKVMERITERNFEMMSGKYQKEQLEIEARLKEVTETLNDSYEKSQGVRDFLSLIRNYQGLKELDATIINALIDKILVSEREKLADGTVRQEIKIYYKFIGFVDELHIIPTKRWAAMPAKNCTVCGVEYVPGSGASRYCPACAKKIRREKSNESKRRSREQKRIACMNCPQKMTD

SEQ ID NO: 16004 - protein, 449 aa, synthetic construct
MKQAIGYLRQSTTKQQSLAAQKQTIEALAKKHNIQYITFYSDKQSGRTDKRNGYQQITELIQQGQCDVLCCYRLNRLHRNLKNALKLMKLCQKYHVHILSVHDGYFDMDKAFDRLKLNIFISLAELESDNIGEQVKNGIKEKAKQGKMITTHAPFGYHYHNGTFTIDTVKAPTVKAVFNYYLQGYGYKKIAQYLEADDKFINRKPYQVRNIILNPNYCGRVINQYGQYENMFPAIVSTTIYEEAQVTRTQKPVKRKPSENQLKQKIKCPYCDSTLTNMTIRKKHHTLRYYVCPQNMNASRFVCEFKGINAQELETSVLATCQDFFQNQQLYSKINHTIQQRLKRQRDIETKTTLNHEQLIEKLAQDKIDAETFREQTQSLRQQSKPISSISTYQIRKAFQNIIQQRFTLNMLYPYIDEINISKNKSLAGIYFKNEPLNIVKQTMELSIV

SEQ ID NO: 16005 - protein, 424 aa, synthetic construct
MSKEKIKVYLYTRVSTSIQIEGYSLEAQKSRMKAFAIYNDYEIVGEYEDAGKSGKSIEGRIQFNRMMEDIKSGKDGVSFVLVFKLSRFARNAADVLSTLHIMQDYGVNLICVEDGIDSSKDAGKLMISVLSAVAEIERENISIQTMEGRIQKAREGKWNGGFAPYGYKLEDGKLFINEEEAVAIRTIFDQYVNTTIGANGISKYLENHGIRKIPRQNGKNPLFDAGLIRKILKNPVYNGKIAFGRRTLEKVHGTRNEYKQVEQDEYLISEGIHEAIVSDEVWQAAQVKLKSQAKKYEHVNKGKDTRTHLLSGIVKCPICGVGMFGNKCIKKKKDGTKYKDFYYYGCNHRQMIRGHKCTFSKQIREELLDDAVAEVIVKIVSNPKFASMMQEKINMKVDTSEIEKEIDNYQKELRKSHSTKFKLI

SEQ ID NO: 16006 - protein, 481 aa, synthetic construct
MITTNKVAIYVRVSTTSQVEEGYSIDEQKAKLSSYCDIKDWNVYKVYTDGGFSGSNTDRPALESLIKDAKKRKFDTVLVYKLDRLSRSQKDTLHLIEDVFIKNGIEFLSLQENFDTSTPFGKAMIGLLSVFAQLEREQIKERMQLGKIGRAKAGKSMMWAKTSYGYNYHKETGTVTINPAQALAVKFIFESYLRGRSITKLRDDLNEKYPKHVPWSYRAVRTILDNPVYCGFNQYKGEIYPGNHEPIISKEEYDKTQSELKIRQRTAAENVNPRPFQAKYILSGIAQCGYCGAPLKIMLGVKRKDGSRLKKYECHQRHPRTLRGVTTYNDNKKCDSGFYYKDKLEASVLKEISKLQDDADYLDKIFSGDNAETIDRESYKKQIEELSKKLSRLNDLYIDDRITLEELQSKSAEFISMRATLETELENDSALRKNKRKADMRKLLNAEKVFSMDYEKQKVLVRGLINKVQVTAEDIVIKWKI

SEQ ID NO: 16007 - protein, 481 aa, synthetic construct
MITTNKVAIYVRVSTTNQVEEGYSIDEQKDKLSSYCDIKDWNVYKVYTDGGFSGSNTDRPALESLIKDAKKRKFDTVLVYKLDRLSRSQKDTLHLIEDVFIKNGIEFLSLQENFDTSTPFGKAMIGLLSVFAQLEREQIKERMQLGKIGRAKAGKSMMWAKTSYGYDYHRETGTITINPAQALAIKFIFESYLRGRSITKLRDDLNEKYPKHVPWSYRAVRTILDNPVYCGFNQYKGEIYPGNHESIISKEEYDKTQSELKIRQRTAAENVNPRPFQAKYILSGIAQCGYCGAPLKIMLGVKRKDGSRLKKYECHQRHPRTLRGVTTYNDNKKCDSGFYYKDKLEAYVLTEISKLQDNAGYLDKIFSGDNAETIDRESYKKQIEELSKKLSRLNDLYIDDRITLEELQSKSAEFISMRGTLETELENDPALRKNKRKADMRKLLNAEKVFSMDYENQKVLVRRLINKVKVTAEDIVINWKI

SEQ ID NO: 16008 - protein, 557 aa, synthetic construct
MKRKKAYIYTRVSTTMQVEGFSLDAQEAKIQQYANAFDIEIVKTYQDAGKSGKTMLGRTEFMNMISDIEAEKDKVDYVLVFKLSRFGRNAADTLKSLAIMESHGVNLICVDDGLDSSKDSGKLVITILSAVAEMERENIISQAMEGRRQKARAGQWNGGFAPVGYSLVNGQLQVNHEEAESVKMIFDLFANSDMGTIAIAKHLANLDIKKPIRHNSTLPYFSSSGIARILDNPVYNGKIAFGRRESTRDKISGETKVTQSENYILTDGIHEAIIDDETWKKVRKKREANAHKYKRENPNKGDSIYILSGLIKCPLCNAGLYGNKSIKRNKNKKDEYYKNYYYYACKHRKHVDGHKCTFNKQLKTGNLDHEVLSIISKLVSRPDFARKLQEKINIQVDTSRIDSEIEQYKSLFRQLSATKMNLIQQIDSLNFEDPHFQQKSIDLDMRLNTIYDKLADVEMLIETSESKREVILKDKMTADNIYKILVNFASFMDVMEDIDKKRLCQMLIEKVEIYDDKNKAGRWVKAIHFKLPIIEEDLEISLDNSTPVEAVVKLNKK

SEQ ID NO: 16009 - protein, 557 aa, synthetic construct
MKRKKAYIYTRVSTTMQVEGFSLDAQEAKIQQYANAFDIEIVKTYQDAGKSGKTMLGRTEFMNMISDIEAEKDKVDYVLVFKLSRFGRNAADTLKSLAIMESHGVNLICVDDGLDSSKDSGKLVITILSAVAEMERENIISQAMEGRRQKARAGQWNGGFAPVGYSLVNGQLQVNHEEAESVKMIFDLFANSDMGTIAIAKHLANLDIKKPIRHNSTLPYFSSSGIARILDNPVYNGKIAFGRRESTRDKISGETKVTQSENYILTDGIHEAIIDDETWKKVRKKREANAHKYKRENPNKGDSIYILSGLIKCPLCHAGLYGNKSIKRNKNKKDEYYKNYYYYACKHRKHVDGHKCTFNKQLKTGNLDHEVLSIISKLVSRPDFARKLQEKINIQVDTSRIDSEIEQYKSLFRQLSATKMNLIQQIDSLNFEDPHFQQKSIDLDMRLNTIYDKLADVERLIETSESKREVILKDKMTADNIYKILVNFASFMDVMEDIDKKRLCQMLIEKVEIYDDKNKAGRWVKAIHFKLPIIEEDLEISLDNSTPVEAVVKLSKK

SEQ ID NO: 16010 - protein, 481 aa, synthetic construct
MITTNKVAIYVRVSTTNQVEEGYSIDEQKDKLSSYCDIKDWNVYKVYTDGGFSGSNTDRPALESLIKDAKKRKFDTVLVYKLDRLSRSQKDTLHLIEDVFIKNGIEFLSLQENFDTSTPFGKAMIGLLSVFAQLEREQIKERMQLGKLGRAKSGKSMMWAKTSYGYDYHKETGTVTINPAQALTIKFIFESYLRGRSITKLRDDLNEKYPKHVPWSYRAVRTILDNPVYCGFNQYKGEIYPGNHEPIISKEEYDKTQSELKIRQRTAAENVNPRPFQAKYILSGIAQCGYCGAPLKIMLGVKRKDGSRLKKYECHQRHPRTLRGVTTYNDNKKCDSGFYYKDMLEASVLKEISKLQDDADYLDKIFSGDNAETIDRESYKKQIEELSKKLSRLNDLYIDDRITLEELQSKSAEFISMRGTLETELENDPALRKNKRKADMRKLLNAEKVFSMDYENQKVLVRRLINKVKVTAEDIVINWKI

SEQ ID NO: 16011 - protein, 557 aa, synthetic construct
MKRKKAYIYTRVSTNMQVEGFSLDAQETRIHQYANAFDIEIVKAYQDAGKSGKTMLGRTEFMAMISDIEAEKDKVDYVLVFKLSRFGRNAADTLKSLAIMESHGVNLICVDDGLDSSKDSGKLVITILSAVAEMERENIISQAMEGRRQKARAGQWNGGFAPVGYSLVNGQLQVNQEEAESVKMIFDLFANSDMGTIAIAKHLANLDIKKPIRHNSTLPYFSSSGIARILDNPVYSGKIAFGRRESTRDKITGETKVTQSENYILADGVHEAIIDDETWNKVRKKREANAHKYKRENPNKGDSIYILSGLIKCPLCHAGLYGNKSIKRNKNKKDEYYKNYYYYACKHRKHVDGHKCTFNKQLKTVNLDHEVLSIISKLVSRPDFARKLQEKINLQVDTSRIDSEIEQYKSLFRQLSATKMNLIQQIDSLNFEDPHFQQKLIDLDMRLNTIYDKLADVERLIETSESKREVILKDKMTADNIYKILVNFASFMDVMEDIDKKRLCQILIEKVEIYDDKNKAGRWVKAIHFKLPIIEEDLEISLDNSTSVEAVVKLNKK

SEQ ID NO: 16012 - protein, 557 aa, synthetic construct
MKRKKAYIYTRVSTTMQVEGFSLDAQEAKIQQYANAFDIEIVKTYQDAGKSGKTMLGRTEFMNMISDIEAEKDKVDYVLVFKLSRFGRNAADTLKSLAIMESHGVNLICVDDGLDSSKDSGKLVITILSAVAEMERENIISQAMEGRRQKARAGQWNGGFAPVGYSLVNGQLQVNHEEAESVKMIFDLFANSDMGTIAIAKHLANLDIKKPIRHNSTLPYFSSSGIARILDNPVYNGKIAFGRRESTRDKISGETKVTQSENYILTDGIHEAIIDDETWKKVRKKREANAHKYKRENPNKGDSIYILSGLIKCPLCNAGLYGNKSIKRNKNKKDEYYKNYYYYACKHRKHVDGHKCTFNKQLKTGNLDHEVLSIISKLVSRPDFARKLQEKINIQVDTSRIDSEIEQYKSLFRQLSATKMNLIQQIDSLNFEDPHFQQKSIDLDMRLNTIYDKLADVEMLIETSESKREVILKDKMTADNIYKILVNFASFMDVMEDIDKKRLCQMLIEKVEIYDDKNKAGRWVKAIHFKLPIIEEDLEISLDNSTPVEAVVKLSKK

SEQ ID NO: 16013 - protein, 413 aa, synthetic construct
MSVKKIRVNKQKHKQRICAYIRVSTTNGSQLESLENQKQYFENLYSNRDDIDFVGVYHDRGISGSKDYRPNFQAMIEDCRKGMIDVIHTKSIARFARNTVTVLEISRELKAIGVDIFFEEQNIHTLSSEGEVMLSVLASIAEDELRSMSGNQRWAFQKKFQRGELVINTKRFLGYDIDENGELIINPEEALIVRQIFALYLEGYGTHRIAKLLNEKGVATVTGAKWHDTTIRQMLSNEKYKGSVLLQKYFHDGVNGPKKLNQGELEQYFIEDNHEAIISMEEWQAVQDKLNSRRWQQGRNKTYKFTGLLKCQHCGSTLKRQVSYKKKIVWCCSKYIKEGKVACQGMRVPEVDISNWEITSPVTVIERDRNGEKYYSYTGQESADQCSSSGQEENQSSRILPSVHRPRRAAIKL

SEQ ID NO: 16014 - protein, 430 aa, synthetic construct
MSTDQEEQLSSYENQVNYYREFISKHEDYELVDIYADEGISATNTKKRDAFNRLIQDCRVGKVDRILVKSISRFARNTLDCIKYVRELKELGVGVTFEKENIDSLDSKGEVLLTILSSLAQDESRSISENATWGIRKKFERGEVRVNTTKFMGYDKDESGRLIINPQQAETVKFIYEKFLEGYSPESIAKYLNDNEIPGWTGKANWYPSAIQKMLQNEKYKGDALLQKTFTVDFLTKKRVQNDGQVNQYYVENSHEAIIDKDTWELVQLELARRKVYREEHQLKSYIMQNDDNPFTTKVFCVECGSAFGRKNWTTSRGKRKVWQCNNRYRVKGQIGCQNNHIDEETLEKAVVMAVELLSENVDLLHGKWNKIQEENHPLEKYYSMKLAGIINKPSWEFDSYEMCQVLDSITISEDEQISVNFLEGTEVDL

SEQ ID NO: 16015 - protein, 413 aa, synthetic construct
MSVKKIRVNKQKHKQRICAYIRVSTTNGSQLESLENQKQYFENLYSNRDDIDFVGVYHDRGISGSKDNRPNFQAMIEDCRKGMIDVIHTKSIARFARNTVTVLEISRELKAIGVDIFFEEQNIHTHSSEGEVMLSVLASIAEDELRSMSGNQRWAFQKKFQRGELVINTKRFLGYDVDEDGELIINPEEALIVREIFSLYLAGNGTHRIAKHLNEEGVATVTGAKWHDTTIRQMLSNEKYKGSVLLQKYFHDGVNGPKKLNQGELEQYLIEDNHEAIISKEDWQRVQDKLNSRRWQQGRNKTYKFTGLLKCQHCGSTLKRQVSYKKKIVWCCSKYIKEGKVACQGMRVPEVDISNWVITSPITVIERDRNGEKYYSYSGQESADQRSTSGQEENQSSRILSSVHRPRRTAIKL

SEQ ID NO: 16016 - protein, 430 aa, synthetic construct
MSTDQEEQLSSYENQVNYYREYISKHEDYELVDIYADEGISATNTKKRDAFNRLIQDCRAGMVDRILVKSISRFARNTLDCIKYVRELKELGVGVTFEKENIDSLDSKGEVLLTILSSLAQDESRSISENATWGIRKKFERGEVRVNTTKFMGYDKDENGRLIINPQQAETVKSIYEKFLEGYSPESIAKYLNDNEIPGWTGKANWYPSAIQKMLQNEKYKGDALLQKTFTVDFLTKKRVQNDGQVNQYYVENSHEAIIDKDTWELVQLELARRKAYREEHQLKSYIMQNDDNPFTTKVFCAECGSAFGRKNWTTSRGKRKVWQCNNRYRVKGQIGCQNNHIDEETLEKAVVMAVELLSENVDLLHGKWNKILEENRPLEKHYCTKLAEMINKPYWEFDSYEMCQVVDSITIAEDGQITVRYLEGTEVDL

SEQ ID NO: 16017 - protein, 481 aa, synthetic construct
MKTMNKVAIYVRVSTTNQVEEGYSIDEQKDKLSSYCDIKDWNVYKVYTDGGFSGSNTDRPALESLIKDAKKRKFDTVLVYKLDRLSRSQKDTLHLIEDVFIKNGIEFLSLQENFDTSTPFGKAMIGLLSVFAQLEREQIKERMQLGKIGRAKAGKSMMWAKTSYGYDYHRDTGTITINPAQALAIKFIFESYLRGRSITKLRDDLNEKYPKHVPWSYRAVRTILDNPVYCGFNQYKGEIYPGNHESIISKEEYDKTQSELKIRQRTAAENVNPRPFQAKYILSGIAQCGYCGAPLKIMLGVKRKDGSRLKKYECHQRHPRTLRGVTTYNDNKKCDSGFYYKDKLEAYVLTEISKLQDNAGYLDKIFSGDNAETIDRESYKKQIEELSKKLSRLNDLYIDDRITLEELQSKSAEFISMRGTLETELENDPALRKNKRKADMRKLLNAEKIFSMDYEGQKVLVRGLINKVQVTAEDIVINWKI

SEQ ID NO: 16018 - protein, 584 aa, synthetic construct
MKNNNVEIIKADSLVRRRGDNFERDSKRVAAYCRVSSDSEDQKNSYESQVRHYKDYISQRSDWELAGIYADEGISGTQVGKRQDFQRLINDCVNGEIDYIVTKAIARFARNTLDTLKYVRMLKDMQIGVYFEEENIDTLTMDGELLLTILSSVAQQEVENTSAHVKKGLKMKMQRGELVGFQGCLGYDYDVETKQLSINKKEAKIVRYIFERYLEGIGGKVIARELDELGYKSPRGLEHWNDTTVLGIIKNEKYKGDILMGKTFTVDPISKRRLSNFGEEDKYYIKDNHEPIISKEDFEKAQEIRLRRAGNKKTAANVNGKRERYSKMYAFSSMLECGFCGSILSRRSWHCRSDYRKVVWHCVTSIKKGKKFCKHSKGLEELAIEGAFMEAYRQLYHSNENLMTDLLETIESELNDNSLNKELKRITNKLRTLLKKEENLVNLRLEGKISDTIYNEKYNEISSEKVFLAEEKVNIETTLKSEIDVKKRLTEFKHLLSSQKMLTEFDRAVFESIVEKIIVGGVNSDGEIDPAMLTIIFKTGETENKDGKQFKSKRKNAKLETDKLCPQNSDGDKKLYSQEPDNTC

SEQ ID NO: 16019 - protein, 520 aa, synthetic construct
MKKVITIEATPSIIRSSSDEFSLKKRRVAGYARVSTDHEVQATSYESQMRYYSEYINGRDDWEFVKMYSDEGISGTNTKLRTGFKSMVEDALDGKIDLIITKSVSRFARNTVDSLTTVRQLKEVGVEIYFEKENIWTLDSKGELLITIMSSLAQEESRSISENVTWGLRKQFAEGKVHFPYTNVLGFKAGEDGAIVVDQDEAKTVRYIFQQALIGKSPYHIAKDLTEQVIPSPSGKSHWNATTIKRMLRNEKYKGDALLQKTYTTDFLTKKKNINRGELPQYYVENNHEAIVDRETFDAVQQVLENKGRKSSTTIFSSKLVCGDCGHFFGSKVWHSTSKYRRVIYQCNEKYKGISKCSTPHVTEEEVIQWFISAVNQVLDNRIEVIDNLYVLLSIGNLEVIDEQIKVLETEAEVVSQLVANLVSENAIIRQDQDKYLKKYNQLTSKYEGIVQDIESLELQRMQKSKRNKELQDFIGTLEKLGKVLTDFDELLWESLVESVMINEDKRAKFKFKNGAVVAI

SEQ ID NO: 16020 - protein, 618 aa, synthetic construct
MAGIRTENKIYEVGIYCRLSKDDGTDNESASIATQKSILTDYVKRQGWHLAKTYVDDGYSGTNFQRPSFQNMIKDIENGLINRVITKDLSRLGRNYLDCGLYLEVFFPEHNVRYIAVNDGVDTLNKSAMDITPFRNILNEMYSADVSVKIKSAYRARFQQGKFMGTTAPYGYVKDPADHNHLLIDDKVAHVVREIFDLALAGNGIAKIRKHINKQHILRPAAYAVEQGATGYERYFEDNEENRYIWSENSVRGILRSPIYAGNLAGYKRIAANMKSKKRPSKLPEEWEVIPNTHEGIVTQEEFDIVQQLITSRRLPQNKGGFVNIFAGVIKCVDCGCALRAMNVHRRKRPEIIDCVQYSCNNYARNGRSECSAHNIEARDLFNAVLADINCFADMAVNDEKAVRAIEKRLTETDQSRAKALEKERKKLNKRLAELDRLFSSLYEDKVMERITERNFEMMSGKYQKEQLEIEARLKEVTETLNESYEKSRGIRDFLALIRNYQGLKELDATVINALIDKILVSEREKMADGTVKQEIKIYYKFIGFVDELHIIPTKRWAAMPAKNCTVCGVEYVPGSGASRYCPACAKKIRREKSNESKRRSREQKRIACMNCPQKMTD

SEQ ID NO: 16021 - protein, 498 aa, synthetic construct
MKCAIYIRVSTNKEDQKISLENQRSLFYDYVGQREWEIYDFYIDVESGTSGQRKNLKRMIRDAEEQKFDIIMAKELSRLARNSELSHSIKRMADENNIEIITLDNAINTLNGNRQLFGLYAWLYEQESQRTSERIKVALRSGAMKGKFKGSIPPYGYRVENRNLIIREDDTPHTIKRIFREYLKGHGTDSIARGLYNDNIPTPSQIAGKQSPNHLWHGSTIKLILNNPHYTGDLVQCRETTKDVTVKGRKKVPSKDQIIIKDCHEPIISRADFEAVQSQMKVRKKNFTAPKKHLFTNVAVCADCGTGMWYRQNRKGYICGGYGRHGTKRCSHHAIKEIDLKLLIINDLQQLSREVNSEGMIINLKEKASKVEKQVRTNLSRLEKETKQLGERKSKFLNLLADGIINKTDYQQAIEKTNKELLKLTSKKVELQKSLVGKEIHNDINKLKAELDTFLLFNELTEEVIHRFINRIEIKKDGTPKIFYRFSAPIQYLTFSQN

SEQ ID NO: 16022 - protein, 558 aa, synthetic construct
MTTFEKNTNSPDISELGLSKKVAIYARVSTIEQAEEGYSIDEQIRVLTEYCEREGYRVYEEYVDRGISGKNIKGRPAVQRLLIDAEQKKFDVVLVWKMNRLARKSLDLMNIVEKLNHKNIAFRSYTEKYETETPTGKLQFQMMAAIAEYERNNIAENVKMGMIARAKEGRWNGGQVLGYDVIEIPNDNKKRRDTKLMINETEAVIIRVIFQMYTSGHGYKSIANCINKKGYRTKKGKTFSLNAIKTIVTNPVYAGYIRYNVRRDWNEKRRNNINPDPVIQKGKHEAIITEEEWQVAKNVFKSRTRKPNRIHDGEFPLTGIMRCPACGAGMVICRTTNRRKDGTKHVLEYYVCGAWKNKGTLVCRSNGVRTNYADKFVLEKLQRLMNSDSLIKELVKSVNERNKKMFAPLQKEYDIYEKQLKELEQKRSKIFDAYIDEMISKAMYNDRVEKIEEEIKHLKNLMEPLKQQIHGNTTEDVSYKIVKEVLVNFSRAFQSALTREQRKRLLHLLIHKITIGEDREIESIQVKLNNEILKELKVGADDLSVDELSAPFSVLVAI

SEQ ID NO: 16023 - protein, 522 aa, synthetic construct
MAVSKNVTVIPARKHTRKSKDEEKPKLRVAAYCRVSTDSEEQATSYDTQIEHYTAYIQGHPDWMLAGIFADDGISGTNTKKREEFNRMIDECMAGNIDMIITKSISRFARNTLDCLKYIRQLKDKNIPVYFEKENINTMDSKGEVMLTIMASLAQQESQSLSQNVKLGLQYRYQQGEIQVNCARFLGYTKDENKRLVVVPEEAEIVKRIYREYLEGASMLKIARGLEADGILNGAGNERWHTSNINNILRNEKYIGDALLQKTYTVDFLTKKRVKNNGIVPQYYVENSHEAIIPREVFMQVQEELIRRRIVHTSPNGKTRTFSSNHVFAQIIICGKCGEVFRRVHWNNRGKKSIVWRCVSRLENTGLFCDARTVLESTIEQVLVTAINQTLCDKDSFLTTLRDNIATIINRESDKALADIDKRLEELQTELLKLATSNADYEKVGDEIHSLRDQKQKLQVENANRDELKKQIADMSTFLKKQSTALAEYDKQLVRRLIDKVTVFEDKFTVEFKSGVTVDVDE

SEQ ID NO: 16024 - protein, 442 aa, synthetic construct
MGAYCRVSTDQLEQLSSYEAQVAYYTSYITNHPDYEFGGIYADEGISGTNTKKREQFNKMIEDCKAGKIDMIITKSISRFARNTLDTLNYVRQLKELGIGVIFEKENINTLDSKGEVLLTILSSLAQDESRSISENSTWGIRRRFEQGKLHINHTKFLGYDKDEEGNLVINEKQAKIVRRIYKDYLDGKGANRIARELEEEGVPNWNGKPKWYESSIRKILSNEKYKGDALLQKTYTVDFLTKKRAVNNGEVPMYYVEESHPAIIDKEIWEAVQLEMERRRAFAEKYNISKLDYATVDNPFAGRVICGHCGSAFGRKVWNSTDERLRRVVWRCNKKYEVKGKKSCENKHIDDKVLYHAFVNTFNAMVENKEYFMEKWKEGLKSDNLLKRYKARQFIEILKDAKIVEEFDVDMYFRIIEKMTVFDGKKIIVSLLDSTEIEVAI

SEQ ID NO: 16025 - protein, 429 aa, synthetic construct
MRVRIIEPVKKKENKKKRVCAYARVSTGSDAQGESLENQIQYYENLISNNPDYEYAGVFADRGITGTTDNRPEFQRMLNLAKEGKIDLIITKSISRFARNTAIMLQVVRELKDIGVEIIFEKENIRTLSGDGELMLTVLSSFAQEESKNISDNLKWRVKKKFERGELIINTTRFLGYDKDEYGDLVINPKEAEIVKRIFEDYLKGKGTFTIAKELNEDKVPTVAGGRWQESTILNILKNEKYKGDAILQKYYTPDHLRKVSVRNEGVIDSYYIEDNHSPIVSREMWEQVQIEIARRAKAKGNKAGDTKKYTNRYPLTGMLFCSKCGSTLRRRTWNSKLNCRKIVWQCSNYIKNGKDACSGTSIDDEVISRLNIEEPIIVREEVKDGKKYYTYTCKSKQKQSGRANTDAEKENGSLLQSINRPIRTVIKL

SEQ ID NO: 16026 - protein, 582 aa, synthetic construct
MRAAIYSRKSKFTEKGESIENQINLCIQYAKNIGIYEYDIYEDEGFSGGNTNRPEFQKLMKDLKSKKFTHLICYRLDRISRNVADFAGTIEILNKYNVAFISIREQFDTSSAMGRAMMNVSATFAQLERETIAERIKDNLRELSKTGRWLGGPPPLGYKSIEVKNNDSNGKSRKKHILEINKNEINIPKMVFDLFIKHKSFQKVSRLLESQGIYSRKGTVFSRELVKQTINNPVYCIADKVLLNYFRNLGSEVYEIGNINGSNGIMPYNRRKDNGSFAPIEDWIISIGEHPGVINSSTWIKCQEINKEIKDHASNRQCTSQESLLSGLIVCAECGSGMAPRQNKSSKYHYRYYSCNLRNKAASRCNNDALNAYDAEEYVVNTLKCLTRDDMIKNYKELQKKNSSKLANKNLVVDYSKDIEINKKSISKLVMKMAYLDDDPILLEPFKLEIKKLTEKNDELKRTIEKLNFANEEISNTHETLDEILAILDNFKQFYDFTEDFEEKKRLIKSLVKYAIWNSRTRTLELILIGSDKERPKQGYLPLSDSNRRNGPCRNNCYNGISTYGKCNYRRDKKSRTCWALC

SEQ ID NO: 16027 - protein, 515 aa, synthetic construct
MKTAIYLRKSRADLEAEARGEGETLAKHRSTLLKIAKEMNLNVLAVHEEIVSGESLVKRPEMLALLEEIEDNKYDVVLCMDMDRLGRGGMKEQGIILETFKRSNTKIMTPRKTYDLNDEWDEEYSEFEAFMARKELKIITRRMQRGRVASVEAGNYLGTHAPFGYDIHRLNKRERTLTINSEEASVVRMIFDWYANEDMGASAIRNKLNDLGYKSKLGNDWNPYSILDILKNNIYIGKVTWQKRKEVKRPDAVKRSCARQDKSDWIIADGKHEPIIPESLFEQVQEKLNSRYHVPYNTNGIKNPLAGIIKCSKCGYSMVQRYPKNRKETMDCKHRGCENKSSYTELIEKRLLEALKEWYINYKADFEKHKQDDKLKETQVIQMNEVALRKLEKELVDVQKQKNNLHDLLERGVYTVDMFLERSKVISNRINEITSTMENLQKEIKTEIKKEKVKKDTIPQVEHVLDLYFKTDDPKKKNSLLKSVLEKAVYKKEKWQRLDDFELVLYPKLPQDGDI

SEQ ID NO: 16028 - protein, 525 aa, synthetic construct
MKTIRDVLEKGKKGAFYARVSSDRQTIDAQRHHVYEFIKNYECEIVKEYVDHGESAFKKKLIKRPQVMALLRDVEQGKYDFVITYADDRLARSEIEHVQIRVIMKEAKTDVILTSTGELYTERDIITQLIREGGTRYEVERISARTKDAYGQRTDYGQWMGGPVPFGYVQDENTKNFSIVEDEKEIVLNIYRLYQNGEGFAGIAKKLNEQKVKTNTIHWKKERVKHILTNPIYAGYVTFGRLKPGSGNSIEDLSKWKMAKCEEIPAIMTKEEWLATFQMFEKKRNKELPPKQLKTEYVLRDLVYCKSCDALLLPKNQETRGKNGKKYGMKKYMCSNKLCTVWFSTDELHALVFDSVIKEITDKVISKSQTELMYEMEQILEKDIKQITKEIGRLKKQVDNCLVWIKDAEREIDELYNQKKKLVEVDSKIDPLLDVMLDYRLHLLHEIRETEELIAKKEAEMKHIEEVDSNQSMLQKNVLQAFRIEFTNLQKDMKRVRQFLVYLIDKIIIDQNGKTEYILKINLEQ

SEQ ID NO: 16029 - protein, 488 aa, synthetic construct
MQSYGVYVRISTDRDEQVSSVENQVDICRNWLERNGFDWEEQCVYKDEGISGTLFVNRPAIQLLLKKAKAKEINMVVFKSISRLARDLKDSLEIREVFFAHNVRIISVEEGYDSIKAGKNDMAFELWSLFSAQYSRTLSSSITAALAVKVRRGEHIGKVPYGYDRINQKLVINEEESDVVQRMYKWYAEGWGYKKITNELNRLGIRSKTKKKWQMTSVQRILQNQIYKGTFILNQYTSVKVSGKKKQIRNPKEKWFVFPNHHPAIIDQEVWSRVNEKNITHNKTKITAWNEFRNLAKCAVCGSNMVIVQSHFKKKSGERTEWKYLKCSQYRRAGKHGCVNHVPIQYRDFRQFIIDLLVKKGEFITLKLQSNVEKDREKKIKKLNQILAGNVQKKKALLDLYLEKLINKEEFEEKRNDLEIEIAKVGNELLSIQNSDAVQVDIKTIKQALEQLQNQEQDLIHVFQTLIQKISIRKDGIVDVIYKFKKTE

SEQ ID NO: 16030 - protein, 515 aa, synthetic construct
MKTAIYLRKSRADLEAEARGEGETLAKHRTTLLKIAKEMNLNVLSVREEIVSGESLVKRPEMLALLEEIEDNKYDVVLCMDMDRLGRGGMKEQGIILETFKRSNTKIMTPRKTYDLNDEWDEEYSEFEAFMARKELKIITRRMQRGRVASVEAGNYLGTHAPFGYDIHRLNKRERTLTINPEEASVVRMIFDWYANEDMGASAIRNKLNDLGYKSKLGNEWNPYSILDILKNNVYIGKVTWQKRKEVKRPDAVKRSCARQDKSDWIIADGKHEPIIPESLFEQAQEKLNSRYHVPYNTNGIKNPLAGIIKCSKCGYSMVQRYPKNRKETMDCKHRGCENKSSYTELIEKRLLEALKEWYINYKADFEAHKQGDKLKETQVIQMNEAALRKLEKELVDVQKQKNNLHDLLERGVYTVDMFLERSQVISDRINEITSTMENLKKEIKTEIKKEKVKKDTIPQVEHVLDLYFKTDDPKKKNSLLKSILEKAVYKKEKWQRLDDFELVLYPKLPQDGDI

SEQ ID NO: 16031 - protein, 474 aa, synthetic construct
MKHAAIYIRVSTDEQAEQGYSIDAQKEKLTAYCVSQGLDHFKLYIDDGYTGTNMERPAFRRMVRHIQEGKISAVIVRKLDRLSRKQKDVMTIIEDIFEKNNVSFTSTTELFDTSTPFGKAMIGVLAVFAQLDRDMIVERTTMGRRQRVNTGRWYGGRVPFGYKWNKELQELEIVPEEARIVKRIFQMYSEGHSRLEIAEWAASRTNERMIDHSVIRDMLERVVYIGKLRNAGQIVDGLQEPIISQKLWDAVRAEAVKRKDGALPKGDFLLTGVMKCGVCEGNIVHVKRCTKVKDKEYNYELYACKKQHVRIKDRVGKCNLGYFRRENIEQFVVDQIKFLATYPEKITELMNEEKEMPDDEISYEQLQAELKKVNTNLENLYDAIESGDLKASSVSDRIRKLEEKRELLENDIDELTDNKLPTADEKTVRAVISDIGSAWDYFTEEEQKTAIRKLIKHVVLEKDGRHHIEWIFSF

SEQ ID NO: 16032 - protein, 509 aa, synthetic construct
MKKMYGMYLRKSRSDDPNEDINDTLAKHEKILFDLADSLNINRKEIMQFKEVVSGENIQNRPEMKKLLEYVMEGVLEGVLVVDSQRLARGDTVDQGTIIRAFSINNTKIITPMKTIDPQNEYDQEYFEFDLFMGRREYKMITRRMQRGRHIAAQEGYYVGSIAPYSFSRIKLEKGYSLEIYEEENIVFNIMKKKALEDEGSTNISNHLNELGYKPRKGEYWTKSAVEAILLNETNLGLIKWNSRKEVKVFKDGKIVKTRPRNPNYELYPGKHPAIMTQDEYDRIKFLMKKRSHPVKKDRTLQNPLAGLIVCGFCNHKMARRPYKNGRVETILCTTSRCKNVASDIHVVEQRIIDTLKDTLKNYTNYINNYSVSVNKTYDDNKKLQLEECDKELEKLNKQIIKACEMLELGAYTVELFKERKNTLENKINTVNKRKDILAKETEAMKIEQYKKAIPQLQNAIDLYWKSSTEEKNKILKSIIDKCIYKKEKGGRWDPDAIKQFKLEIYLKV

SEQ ID NO: 16033 - protein, 527 aa, synthetic construct
MKPARAVTVIPPTINRFAPETIGVAARKRVAAYARVSTDSEEQLTSYEAQVDYYTKYINERADWIFAGIYTDEGISATNTKKRDGFKQMVADALNGKIDLIVTKSVSRFARNTVDSLVTVRQLKEKGVEVYFEKENIYTLDSKGELLITIMSSLAQEESRSISENVTWGQRKRMADGKVSMPYRHFLGYEKGEDGLPKIVEKEAETVRLIYRMFLEGKTPSAIAKHLGNLGIPSPAGKKTWQVATVISILTNEKYKGDALLQKSFTVDFLTKTTKVNEGEVPQYYVQNSHPAIIEPDEFDAVQLEMERRKKLGRPVSCHSPFSAKIVCGDCGGFYGSKVWGSNTKYRRTVWRCNDKYKNDKPCSTPHLTEDEIKQRFLKAFNILMGDRDEVLSNCHLAQEVLCDCSAIEMELAELHREIEVVSELTRKSIYENARFAINQDEFNERHQGYMERHRIATDRIAELEDQRRNRQNKSLVLDGFIQEIETRPLVIDEFDEKLWLAVIDKVIIHDANAIHFTFRDGTVIKV

SEQ ID NO: 16034 - protein, 436 aa, synthetic construct
MEKIVTKISPSVPPIPARLRVAAYARVSSGKDAMLQSLAAQVSYYSNLIQQRLYWEYAGVYADEALTGTKDTRPEFQCLIADCKDGKIDLIITKSISRFARNTVTLLETVRELKLLGVDVYFEEQNIHSMSGDGELMLTILASYAQEESRSVSENCKWRIRKRFQQGEIVNLRFMYGYRINHGQIEIDQEQAEIVRMIYADYINGLGCDRIAARLREMGARTFSGRQWTAKRVLAILNNEKYSGNALLQKKYVADHLSKKLVYNRGILPKYYAEGTHPPIIDPLTFQKAQEIMALRRENRNVRQNPVNRYPFSGLIFCPRCGKNYRRVTYKGHAAWNCSTFVNYGKDVCPAKQIPEPILLSLTAEVLGLPEFDEGVFLSKIKQMQVPQANKVIYIFQDGHEVEATWQDRSRKSSWDDKKKQQARERALAYQRGDLK

SEQ ID NO: 16035 - protein, 452 aa, synthetic construct
MKAAIYIRVSTQEQIENYSIQAQTEKLTALCRSKDWDVYDIFIDGGYSGSNMKRPALNEMLSKLHEIDAVVVYRLDRLSRSQRDTITLIEEYFLKNNVEFVSLSETLDTSSPFGRAMIGILSVFAQLERETIRDRMVMGKIKRIEAGLPLTTAKGRTFGYDVIDTKLYINEEEAKQLQLIYDIFEEEQSITFLQKRLKKLGFKVRTYNRYNNWLTNDLYCGYVSYKDKVHVKGIHEPIISEEQFYRVQEIFTRMGKNPNMNRDSASLLNNLVVCSKCGLGFVHRRKDTMSRGKKYHYRYYSCKTYKHTHELEKCGNKIWRADKLEELIIDRVNNYSFASRNIDKEDELDSLNEKLKIEHTKKKRLFDLYISGSYEVSELDAMMSDIDAQINYYEAQIEANEELKKNKKIQENLADLATVDFNSLEFREKQLYLKSLINKIYIDDEQVTIEWL

SEQ ID NO: 16036 - protein, 452 aa, synthetic construct
MKAAIYIRVSTQEQIENYSIQAQTEKLTALCRSKDWDVYDIFIDGGYSGSNMNRPALNEMLSKLHEIDAVVVYRLDRLSRSQRDTITLIEEYFLKNNVEFVSLSETLDTSSPFGRAMIGILSVFAQLERETIRDRMVMGKIKRIEAGLPLTTAKGRTFGYDVIDTKLYINEEEAKQLQMIYDIFEEEKSITTLQKRLKKIGFKVKSYSSYNNWLTNDLYCGYVSYADKVHTKGVHEPIISEEQFYRVQEIFSRMGKNPNMNRDSASLLNNLVVCGKCGLGFVHRRKDTVSRGKKYHYRYYSCKTYKHTHELEKCGNKIWRADKLEELIIDRVNNYSFASRNVDKEDELDSLNEKLKIEHTKKKRLFDLYISGSYEVSELDGMMADIDAQINYYEAQIEANEELKKNKKIQENLADLATVDFDSLEFREKQLYLKSLINKIYIDGEQVTIEWL

SEQ ID NO: 16037 - protein, 566 aa, synthetic construct
MLILKGDQKLSTDNIMHLIGKINALIYARVSTTDQANKGFSIESQIERCKERAISKFGYKESEIIALVEPGGMGDDPNRPALNHALYLLEKGLGKKFIVLHPDRLTRDNTLQGVVSRRIWGMGVDIEFIEFEVNPHDPESMLMYNIQGSIAQYNKAKIHANSKRGRLAKAKKGEFPSFKRLYGYKFNTVTDLPEYNEEEKEILLEMKDMLLNKKMSSNEIAKELSRRGVAAPNGKTWYQATVSRMLQNEDYTGDFYYGKSKVVQINGKKKQVPTNKDEWILIKIPPMWDKATREQIIERLKSNFKGRSRATKDYLLKNKAKCGRCGGACGSGITSKTKSGVYKYYSCRAKTAKGYQNGKKVVSCEGKNWRVDIVDEVFWNWFIKLLKNPEKFLESFLEEASDQKKIDELKAKASRLEKQLGEIDEEIANYVILFGKGKIKESMFDQLSQPLEQNKEHIENEIKIINSQLAANKQTEDKKQKMIEYIGSFSKMIKNEITIEEKRQFLDFFIEKVTLFDDDHMEVVWKSSSLNNENSHVDFLNGEQGGEFINSHKRLNHIQAYGRQTA

SEQ ID NO: 16038 - protein, 507 aa, synthetic construct
MFFKETETQEIIKYEDYPYAVYARVSSEKDEQVTSIANQIDICHHWIEKNNYEWKDEAIQLDDGISGTVLLDRKAMQLILDKAQNRKLKMVVFKSISRLARDLKDALEIREVLLAHGVRVVTLEEGYDSLYEGKNSMKFEMFSMFAAQYPQTISVAASGALAAKARRGEHSGRVPFGFKKEGKFLAINEEEAKVVRFIFDLHNNHGYGHKRIVLKLNEELALGNIVKPQKTEFWQLSTVQTILKNPIYCGVFIANRHTQVKIGGRKKFIRNPKEKWTVYKDWCPKIISEEEYEKANNKEHKMRKKRFNPRNELRGMMKCGVCGCNMVVLPSYKYNQKREKKEFNYLKCSAYRRGGTALCVNHAPMQYKDLRAFVIKTLKQKGKKLKLDVKSDFEEQKKNRIKRTKIEIENAENKKKRLIELYLEDQLITKTEFQAKRKELEEQIEKLNDKLFMLEREEEETIDISNIKNAFAQLERTDQDLFEAFSALIDKLVIYEDGTVDFHYKFK

SEQ ID NO: 16039 - protein, 452 aa, synthetic construct
MKAAIYIRVSTQEQIENYSIQAQTEKLTALCRSKDWDVYDIFIDGGYSGSNMNRPALNEMLSKLHEIDAVVVYRLDRLSRSQRDTITLIEEYFLKNNVEFVSLSETLDTSSPFGRAMIGILSVFAQLERETIRDRMVMGKIKRIEAGLPLTTAKGRTFGYDVIDTKLYINEEEAKQLQMIYDIFEEEKSITTLQKRLKKLGFKVKSYSSYNNWLTNDLYCGYVSYADKVHTKGVHEPIISEEQFYRVQEIFSRMGKNPNMNRDSASLLNNLVVCGKCGLGYVHRRKDTVSRGKKYHYRYYSCKTYKHTHELEKCGNKIWRADKLEELIIDRVNNYSFASRNVDKEDELDSLNEKLKTEHTKKKRLFDLYISGSYEVSELDAMMSDIDAQINYYEAQIEANEELKKNKKIQENLADLATVDFDSLEFREKQLYLKSLINKIYIDDEQVTIEWL

SEQ ID NO: 16040 - protein, 452 aa, synthetic construct
MKAAIYIRVSTQEQIENYSIQAQTEKLTALCRSKDWDVYDIFIDGGYSGSNMNRPALNEMLSKLHEIDAVVVYRLDRLSRSQKDTITLIEEYFLKNNVEFVSLSETLDTSSPFGRAMIGILSVFAQLERETIRDRMVMGKIKRIEAGLPLTTAKGRTFGYDVIDTKLYINEEEAKQLRLIYDIFEEEQSITFLQKRLKKLGFKVRTYNRYNNWLTNDLYCGYVSYKDKVHVKGIHEPIISEEQFYRVQEIFSRMGKNPNMNKESASLLNNLVVCSKCGLGFVHRRKDTVSRGKKYHYRYYSCKTYKHTHELEKCGNKIWRADKLEELIIDRVNNYSFASRNVDKEDELDYLNEKLKIEHAKKKRLFDLYINGSYEVSELDSMMNDIDAQINYYESQIEANEELKKNKKIQENLADLATVDFDSLEFREKQLYLKSLINKIYIDDEQVTIEWL

SEQ ID NO: 16041 - protein, 544 aa, synthetic construct
MELKNIVNSYNITNILGYLRRSRQDMEREKRTGEDTLTEQKELMNKILTAIEIPYELKMEIGSGESIEGRPVFKECLKDLEEGKYQAIAVKEITRLSRGSYSDAGQIVNLLQSKRLIIITPYKVYDPRNPVDMRQIRFELFMAREEFEMTRERMTGAKYTYAAQGKWISGLAPYGYQLNKKTSKLDPVEDEAKVVELIFDLFLNGLNGKDYSYNAIATHLTNLQIPSPAGKKKWNRFTVKAILENEAYIGTVKYKVREKEKDGKRTIRPENEQIIVPDAHTPIIDKDQFQEANKKIENKIPLLPNRSDYKLNELAGVCICADCGGPLSKYEAKRKRQNKNGTESLYHVKVLRCLNNKCMNVRYNDVEEAILDYLKYLQALNDNDLTKHLGSVIQSHENKNNIRSKKQMNEQFEQREKELKNKLNFIFDKYESGIYSDEIFLQRKSVLDKELQELKKAKDEINGLVDFKGGLDINQLKENIKNAIELYESSENREEKNKLLRIMLQKVIVKMTAKRKGPIPAQFEITPILRYNFLIGETVSSYES

SEQ ID NO: 16042 - protein, 452 aa, synthetic construct
MKAAIYIRVSTQEQIENYSIQAQTEKLTALCRSKDWDVYDIFIDGGYSGSNMNRPALNEMLSKLHEIDAVVVYRLDRLSRSQRDTITLIEEYFLKNNVEFVSLSETLDTSSPFGRAMIGILSVFAQLERETIRDRMVMGKIKRIEAGLPLTTAKGRTFGYDVIDTKLYINEEEAKQLQMIYDIFEEEKSITSLQKRLKKLGFKVKSYSSYNNWLTNDLYCGYVSYADKVHTKGVHEPIISEEQFYRVQEIFSRMGKNPNMNRDSASLLNNLVVCGKCGLGFVHRRKDTVSRGKKYHYRYYSCKTYKHTHELEKCGNKIWRADKLEELIIDRVNNYSFASRNVDKEDKLDSLNEKLKTEHVKKKRLFDLYISGSYEVSELDAMMADIDAQINYYEAQIEANEELKKNKKIQENLADLATVDFDSLEFREKQLYLKSLINKIYIDGEQVTIEWL

SEQ ID NO: 16043 - protein, 520 aa, synthetic construct
MGQLRAVVAVRLSDFTDTSTSPERQTDAGNEAARDLGARVVGYPVDLDVSASKTTPWERPQLAEWLNKPDEFDVLIWWRMDRAVRSMADMSALGHWAREHNKRLVFAEGPTGGRLELDMGSATGELMAILMAFAAQMEAQAIRERVTGSRAQLRRTGRWGGGQPPYGTQPIPNPDGPGVVLGEDADAVQVLRYGQKLLHAGMRPHPIAEHLNGMAIPNATRHFALKAGTSTDKAGNWTGFAFKKIMRNPALLGYAVHGGTIVRDERGEPVIVGPEIFTREEFDAVGVILDEMENPNADKRPRKDSGSRMLNVGFCGGCGGKLYPTKPTKKAARRYMCRKASAGVKCARPVSIRADWLEDYAEREFLKRFGRMDVVRVVSHGGYDPGPEMDEVTRELRVMIARLTEAKTRTTQAVWQERVDALEARAATLEATPVTEPYEEQIPTGEKYAAMWHNADDMGKRRMMQDAGVRIVVQRKAPAEGKTRTGRVTRLDESLLSFDVATNRDPVADAEAEALYQATS

SEQ ID NO: 16044 - protein, 476 aa, synthetic construct
MKASIYIRVSTAEQAAEGFSLAAQQQRCTDFIKSQGWELGEVYKDDGYSAKDLNRPSMQRLIQDVKSKKFDVLVVYRLDRLVRSVLDLHQLLNIFDEHNIMFKSVTEVFDTTTAMGRLFISIVGAMAQWERENLSERVKMGLERKFLEGKRIGGPAFGYRIDEDGKMVIDKEKAQIVRWIFNSAKKMGINKIAKILNKQGIDSPKGGNWTGSKVAYLLRNPTYTGKIRYLVNRNGYGEKETIDSNHPALISEEEYNEVQEILKKRHGGRKKAHTSDYPFSTILFCTRCGSPYSGARQENKSGVTYYYRCNGTARGICQASTVLEERLVDELLNKINLIIEESEVTLESEKGETDNEFRLKQIEAELQRIKKRRRKWQEAFANDAISLEELKERMNEEKKKEEALMEELEAFNTVPNETDVSKDEIIVALKNLKEIWYHLSRKEQKEILNMIFSRIYIKTEGERPHIKPIITDYELL

SEQ ID NO: 16045 - protein, 558 aa, synthetic construct
MTKLYSYIRFSSMRQSDGSSYERQIRMAKEIADRYNLELVNDYQDLGVSAFKGANSKTGALSRFLDEIGRSIPVGSWLFIENLDRLSRQDIISAQELFLSIIRRGITIVTGMDNKIYSIETVTANPMDLMFSILLFIRGNEESQTKRNRTNSSALLKIKAHQQNPQSPAVAIEEIGKNMWWTDTTSGRVLPHPVYFPVLQKIVQLRQEGHSAGAILDYLNEHHEPPAPTSNKKHGKWSRAMVSRLFATKALIGVKTVNVDGVEYELRDYYPRVLSDSEFYFLRKNIIKKAWDYNRDKEKVIPLLSGIGVLRCVHCGATMVKQTAANGKREQYRYCCDGRKSGRTDCPYPNWGFRAVTLEGAVLQLLADKIWIAEDKTNPIPEIQVKIDEISRKIDNLINLSAMMGATKELANQITDLNSQREALHEEIRLFEREMYSVDSQGWDKLAQFDLSDVQNEERLKVRMKIKGALHEIECSRIDSKKNLFVLVYLDGLRQRLVIENNRGLKKGQIFVDLKTINDRQILESAGMVLHPCIEMIIDSDWKAPEEIPGLLSEEFGI

SEQ ID NO: 16046 - protein, 529 aa, synthetic construct
MSLARAITVIQPTTGRLAPVTTTAATIKRVAAYARVSTDNDEQISSFDAQMDYYTRQIKANHRWTFIEVYTDEGISATSTKKRDGFKRMIADALLGKIDLILTKSVSRFARNTVDTLTNVRQLKAKGVEVYFEKENIYTMDSKGELLITIMSSLAQEESRSISENVTWGQRKRFADGKVSLPYKHFLGYEKGEDSLPKIIEKEAVVVRLIYKKFLEGKTPSGIAKHLTINKIPSPAGKEVWQPSTVLSILKNEKYKGDAMLQKSFTVDFLTKKKKINEGEIPQYYVEKSHPAIITPEVFDLVQHEFKKRKDAKGYKTGGSCFSGKIVCGKCGSFYGSKVWHSTSKYRKVIWQCNSKFKNEEKCSTPHLYEEKLKEAFLGAFNSILNNKDEILKGYEAIIQELTDTSKIDKESDKIQSEMEIVTEMIHKCVEENAHSTLDQAEYEERYKALVERYESIKKGIEGINEKRLESSAKHESIEAFIKELEKREGLVTEFDEDLWNATIEKIMVHSENEITFVFKDGMELDWNI

SEQ ID NO: 16047 - protein, 434 aa, synthetic construct
MSRNIRKINPSVQKVPTKKRVAAYARVSSGKEAMLHSLSAQVSYYSDLIQKHKGWEYMGVYSDEAITGTKEIRPEFQRLLEDCRNGKIDMIITKSISRLARNTVTMLETIRELKDINVNVYFEKENIYSMSGDGELMLTILASFAQEESRSVSENCKWRIRKGFADGELVNLRFIYGYKIKKGKIEIEEEDAEIVRMIFKDYIDGRGCTKIAKKLSEMGVKKLRGGKWNSERVVEIIKNEKYTGNALLQKKYVKDHLTKTLVWNKGNLPQYFAEGTHPPIVDSDTFQKAQEILSKNRERYSRVKESRKYPFTSKIVCGICGKNYKHKNKKGRVSWDCSTYSKYGKDSCPSKQIPEETLYMVTTEVLGISKFDEEYFAKKIKEIQVPEGKHLIFVFYDGSIIKKEWSYKSRTESWSEKVRQDVRAESLKKLEGRN

SEQ ID NO: 16048 - protein, 688 aa, synthetic construct
MDAASTPKTAVLYLRVSTTSQVNTDYDPEGLSIPTQRKVCLAKAKQLGIAIIDEYVELGRSGTNTVNRPEFQAMLERLHTRRDVDCVMVYKLSRLNRSRFDDAVTMMELRKANVTLISATENIDETPEGQLVHGMLAAVNEYRSAADGADIRIKLLRKIEQGGTIGPARLGYLNVIDTVEGRRINTIGLDPERAPLIRKAFELYATGDYSCEHLQQKLTDLGLTTRPSAKRPTPRPLAVSTIHRLLADPYYTGIVTFKGKQYPGRHKPLVSQELFDRVQEMRALRSNNTRDRVHFHYLKGGFLHCERCHKAGRRSRFVYTEAKGKGGTYAYYLCRGRQDGHCDMPYLPVSLVEDYVERHICTLSLGSDFTQRTEAEMTQALDDQQALIRQSNQAITRKLKDITAKEGRLIDLVADGSLDTAAARRRLAELTQERQRLEQTKQTFDQRLAIGRDVLTTSLHLLQDIGTLYRQSPDPVRGMLCQALFDTIYLDDTTVTTSTLREPYSSLQAAAARDSRRSHRRAPSPADNGNAHQKQGTASSRAPRRRKPQKPRRTPVADTIPLPDDEHKQTPGSHTATEGSSKNKMAEEEGFEPPVREAHSGFQDRHIRPLCHSSMARRHRRAGPTLQHRALPDASRAPVTPRRTPCSRRPSPGSPHPRPKSPRRRGPLSRSPAEGAEEVSSRRPSAMA

SEQ ID NO: 16049 - protein, 529 aa, synthetic construct
MRVAIYSRYSSDLQDPRSIADQIAAARDHAQRQGWTVCAEFQDAAISGSTTHNRPGLAELMRAAGAGRFDAVLTESLDRLSRDLEDIAGIHKRLEYAGVKIITLADGTVGKMHVGLKGMIASMFLDDLALKTRRGQVGRVKAGRIPGGKSYGYDLVPSLDERGQRTINEAEAAIVQRIFEEYVRGRKPIDIVSDLNRERAPSPRGGPWNVSTIIGSRKRANGLINNQLYIGKIVYNRQRFVKDPATGKRQARPNSPDQWIVNDALDLRIVSDALFAEAAARRDEKGGAKPTHHRRPKHLLSGLVRCGSCGASMIVIHRDYLGCSASRNRGTCDNRRTISTHEIESRILDVLRKYLLAPEVVAAAVDAYREHRTKLAKETERTKRDVQRDLAAVERKIAGVIAMVEAGGDPRTLAARLNEFVAEKDALEQRLPSKAADVIALHPNAAKFYADTVAQIHEALAKGDAAGLKAVALVRELVNEVVAIPTPGRDPMKLELVGNLAALLMEPSANQSPISMVAGAGFEPTTFRL

SEQ ID NO: 16050 - protein, 539 aa, synthetic construct
MKVALYARVSSEAQDVELSIAAQLRALRDYAAKNEQQIVYEFIDEAESGRTASRPEFKKMIALAKSNTSPFEAILVWKLNRFARNRVDSITYKTLLQKKGIKVISINEPLDDTPTGKLMEGIIESLDEFYSANLGQDIKRGMKENALRGFFNGSQPPLGYRIIKVKDGPKQRNRLEPESDTSSGIKTVRHIFGLADKGQGCKEIAVTLNREGYRTRAGERWGRTTVHKILTNEAYIGTLVWGARAGRPASKNGEGVKLGNAFPGIIDKEVFQRVQQNMTARQPGNIHPRTIPSQYLLSGLAFCGCGASLTGHSAKSGRHFYYQCNRKFKQGNEVCNGQAIPKSKLESAVITQIKSRILTEENLENLVSLVNKDLELASVQYNERLAVIDTELEDIRQRLNRLYEAIESGKLDYSDLSPRIKDLRSRQSDLEKSRIVAEAELLASGSESIKIEQVKAYAGDLKQLLAEAEISECKAFLKTFVKKIEINGNEATLKYRLPLPGLKNGKEVLPIETLGGAEETISRTDTVSCLMLVGGKGKV

SEQ ID NO: 16051 - protein, 528 aa, synthetic construct
MYLLPPGKYCFYLRKSRVDIQAEARGEEDTYARHEKMLLDLASRLGVTLSEVYREKPATSGERISERPEMIRLLGDVEEGKWDGVFVIEVERLARGDTMDQGIVAQAFKYSETLIITPMRTYNPNNPNDEEYFEFGLFMSRREFKTITRRLQGGRVRSVEDGKYVGNKPPYGYIRKKLPGKGYTLEPHPEQAPIVKLIFSLYTDTDPEKRMGTSRIARYLNVDLKVPTANVSKTGWIVATVNGILRNPIYIGKVRWSSRPQIKKKNSKSRPRKPREEWIEVQGLHEPLVDEITFNRAQKIMQEHSHPPAPKGKISNPLAGLIRCDMCGGAVVLKPDKKTHSFLLCQTTGCKNVSSYFYVVEERLLQSLNELLFKIRRELDTTPLSEENDQTELRTSLLRDQLKNLMKKRDELSLQKGNLHDLVERGIYSTEDYLERSKVLTKKLSEINESLRTAEKELQEEQRRADHRAELVPVIEKVLQEYTAAASAAEKNALLRSIISQVSYRKERGGRWSGAQDSFVLKVFPKTY

SEQ ID NO: 16052 - protein, 546 aa, synthetic construct
MKNLTKVYLYQRFSSPKQELGSSLYRQGNEQRAWLERNKDWAVEAGLYEDKGLSGHTGAHLDKGSLGRLVNDIEIGRVRHGSIILVERFSRLSRMKVSETQELLRKIWKAGVTIVTAKDDARYGPEGEDDLGIQVKLLVEIHGAFSESQNRKERVLGSYNKRRDEARKGITPNIRKPFWLNSDGTVNDKHVVIKDMFELYLSGNGQRNILNQLKDKYPDLLEVQRMNPSTVIKWITSDVVLGYWRINEFECYKVYKAAVDESIYYKAQTVHEKRLHKNVNPNREWHLSGLVQCGHCGNGCSIQKSKHSWPVLRCSYKQRLARNACSSKGIFPYLLPLYFFRSNLEHFFLARLMELSQNEKANLTVSKLDIEIIKCNEKLQVLENKLLSSENEMINSLLKVMEKITAQLNELKGQREEAYSIATGNSILNWVDLKDITSDSKRLNLLFQRLDSKMVIKDDEVSFDHGDLRKTIKYLGYSRKDEAYRIEKNYADMGDLEDEHAVIFIDDQIVAYDELANMLEKMGEVTQLEANIKVLTNLHPKQVIID

SEQ ID NO: 16053 - protein, 515 aa, synthetic construct
MYRPQELDVFIYLRKSRKDLEEEKKAMEHGQHYDTLERHRTQLLELAHKEHHNIIDIFEEVVSGEYISERPMMQKLLREVESGIADAVLVMDLDRLGRGDMVDQGTIYRVFRYSETFIITPTEIIDPNDENQELTFSIKSLIAREELKTIVKRMQRGRSVSAKEGKSISRVPAYGYLRDNNLKLYPDPEKNWIIPRIFELMANGMGRQAIAQELDRLGISPPEGEYWNPSTISSITKNEVYLGHIIWGKIRYTKQNGKYIRKKVPKERWQRHNHAHPPLVSEDLFQKANMAHSKRWRPPTIKTKKLSNPLAGILLCELCSHSMLYQPRKDRPNPQVRCVQPSCKGVQKGASLLLVEQRILNGLKQIIESFEIQKNMVQKKNSKNNILLQQRALEKKEQQINDLQKQKNRLHDLLENGVYDIETFLERQKSIVVRLKTTQEEIEQLKHEIKHVLEKEKHIHEFVPKIKNVLEAYYATEDIEKKNRLLKSVLEKVTYLRKKSWQRKDEFVIELYTKI

SEQ ID NO: 16054 - protein, 515 aa, synthetic construct
MKTAIYLRKSRADLEAEARGEGETLAKHRTTLLKIAKELNLDVLSVREEIVSGESLVKRPEMLALLEEIEDNKYDVVLCMDMDRLGRGGMKEQGIILETFKRSNTKIMTPRKTYDLNDEWDEEYSEFEAFMARKELKIITRRMQRGRIASVEAGNYLGTHAPYGYDILRLNKRERTLTINSEEASVVRMIFEWYANEDMGASVITNKLNQLGYKSKLGNGWNPYSVLDMLKNNIYIGKVTWQKRKEVKRPDATKRSCARQDKSEWIIADGKHDPIISESLFEKAQEKLNTRYHVPYNTNGLKNPLAGIIRCGKCGYSMVQRYPKNRKKTMDCKHRGCENKSSYTELIERRLLEALKEWYINYKADFAKNNQDSLSKEKQVIKINQAALRKLEKELLDVQKQKNNLHDLLERGVYTVDMFLERSNVVSNRINEITETMENLRKEIKTEITKEKVKKDTIPQVEHVLDLYFKTDDPQKKNSLLKSVLEKAVYTKEKWQRLDDFKLVLYPKLPQDDDK

SEQ ID NO: 16055 - protein, 515 aa, synthetic construct
MYHPQELDVFIYLRKSRKDLEEEKKAMEHGQHYDTLERHRTQLLELAHKEHHNIIDIFEEVVSGEYISERPMMQKLLREVETGIADAVLVMDLDRLGRGDMVDQGTIYRVFRYSETFIITPTEVINPNDENQELTFSIKSLIAREELKTIVKRMQRGRRASAKEGKSISRVPPYGYSRDNNLKLYPDSEKSWVIPKIFELMANGIGRQAIAQELDRLSVAPPEGEYWNPSTISSIIKNEVYLGHIIWGKIRYTKQNGKYIRKKVPKERWQRHDHAHPSLVSGELFQKANMAHSKRWRPPTIKTKKLSNPLAGILLCELCGHSMLYQPRKDRPNPQVRCVQPSCKGIQKGASLALVEQRILDGLKQIIESFEIQENMVQKKNSSNNIDLQQKALEKNEQQINDLQKQKSNLHDFLEKGVYDVETFLERQKSIAVRLKTTQKAIEELKHEIKKILEKEKHIHEFVPRIKNVLEAYYATNDIEKKNRLLKSVLEKVTYLRKKEWKRKDEFVVELYTKI

SEQ ID NO: 16056 - protein, 522 aa, synthetic construct
MKLSHILQPNMKAAFYGRHSTDKQDMDMQLNSVMEVIRKYDCSHTHSFLDKAVSARKNKITSRKELENMFEAAKRKEFDFVIVYKSDRLARDPLEYQTIRIVMKTLDIPIIISSTESVYNTDTDLIVQLMEDGFTKYEVDTIIARTRSGLENKAKQGKWLGGKPPFGYTYDKNSGQFVEHPEELCYVKEIFNLYVNGHGFQYIANILPNDSRRGKDLGKENVKAIVLNPFYCGLLSWRRQTDGKQNARDIWIEAPNHYVKPIISRTTWESCWRIYSEKRNGNMVPKHYKTSFLLQGLLSCEKCQELMKTKNQQTVSSTNKQYGGKIYFCTNCKLRIDAELLHDKVVNQTLTDVKISGFHNVYHAIEQKIQYEIQELNNNIQKHQRLFENYTIKLHNITEELKQRMKNNDDKRFLKSLAIYRLDVQRKLDGVTQQINDFKQQINLKEKIEKSKETWLHTLNEVFQDDVKLQEISDMDKRRFLLPLIQSVSIKENKKHNEYDISLQLRTDFSKRDVKNQISLIL

SEQ ID NO: 16057 - protein, 522 aa, synthetic construct
MKLSHILQPNRKAAFYGRHSTDKQDMDMQLNSVMEVIRKYDCIHTHSFLDKAVSARKNKITSRKELENMFEGAKRKEFDFVIVYKSDRLARDPLEHQTIRIVMKTLDIPIIISSTESVYNTDNDLIVQLMEDGFTKYEVDTIIARTRSGLENKAKQGKWLGGKPPFGYTYDKNSEQFIEHTEELCYVKEIFNLYVNGHGFQYIANTLPNGSRRGKDWGKENVKAIVLNPFYCGLLSWRRQTDGKRNARDIWIEAPNHYVKPIISRTTWESCWRIYSEKRNGNMVPKHYKTSFLLQGLLSCEKCQELMKTKNQQTISSTNKQYGGKIYFCTNCKLRIDADLLHDKVVNQTLTDVKISGFHNVYHAIEQKIQYEIQGLNNNIQKHQRLFENYTIKLHNITEELKQRMKNNDDKRFLKSLAIYRLDVQRKLDGVTQQINDFKQQITLKEKVEKSKETWLHTLNEVFQDDVKLQEISDMDKRRFLLPLIQSVSIKENKKRNEYDISLQLRTDFSKRDMKNQISLIL

SEQ ID NO: 16058 - protein, 620 aa, synthetic construct
MKKNNVEIIKADSLVRRRGVNVERHLKRVAAYCRVSSDSDDQKNSYESQVRHYKDYISQRSDWELADIYADEGISGTQVGKRQDFQRLINDCVNGEIDYIVTKAIARFARNTLDTLKYVRMLKDMQIGVYFEEENIDTLTMDGELLLTILSSVAQQEVENTSAHVKKGLKMKMQRGELIGFQGCLGYDYDVETKQLSINKKEAKIVRYIFERYLEGIGGKVIARELDELGYKSPRGLDHWNDTTVLGIIKNEKYKGDILMGKTFTVDPISKRRLSNFGEEDKYYIKDNHEPIISKEDFEKAQEIRLRRAGNKKTVANVNGKRERYSKMYAFSSMLECGFCGSLLSRRSWHCRSDYRKIVWHCVTSIKKGKKYCKHSKGLEELAIEGAFMEAYRQLYHSNENIVSDLLETIESELNDNSLNKELKKITNKLRTLLKKEENLVNLKLEGKISDSIYNEKYNELSLEKEYLAEEKVNVETTLKSEIDVKERLTEFKQLLSSQKMLTEFDRTVFESIVEKIIVGGVNSDGEIDPAMLTIISKTGETQNKDGKQFKSKRKNAKLEPDKLCPQNCDEDKKLCSQGIDNTCGDGSTAVTEKVRINYKNLIDKALRIIEIFRLVVISV

SEQ ID NO: 16059 - protein, 514 aa, synthetic construct
MKTAYPYIRYSSDKQSHGDSVRRQQSLITSWLQSNPDYLLSQHTYKDEGLSAFTGKHATGELGQLMQDIGNGSIAAGDMVLIESLDRLSREDISTATDRLKAILIHHVDVVTLSDGKHYTHESLNNPMDLIMSILTAQRAHQESEEKSRRMRQVWANKRAEAESQGKVISKSCPRWLTVKDDRTGFDIVPEHAQTIRQVFSLRIKGESLSSIAKTLNEEGRLTFTGRVGKWNQSTVQQLVSNKALIGYKVQSRKSVVNHPDIPDYYPVVVDLQTFQAVQQLKSDQFGKKQTSNIPALVNLFKSIIRCKKCGNIFILNSVTVNRDGYYVCSMRRQGRCDAKPIKRKDTDDMLVKGLFHNLDRLLLSKPEENPVSALEAQKQDLTERLTKLVSALEIAPDITEITSRMSVIQGELQSIEAQIKGHRQRVQSHVSDTVKCLNLLNKADRVEFQLIMKRHVKAIMVDTLKRTADIYFHSGLRLFNYPLDRLVDGEHFLEVLPVIDADEFDFNTYRVIG

SEQ ID NO: 16060 - protein, 532 aa, synthetic construct
MKPIHKRAAPKAKPGSFVKALLYARVSSKEQEKEGFSIPAQCKLLREYALQRQFGIVEEYVDVETAKNTGRTNFGEMVKYLRKHPGVRVILVEKTDRLYRNLKDWVTLDELDVEIHLAKEGVVLSRDSRSSEKFMHGIKVLMAKNYIDNLSEEARKGQMEKAEQGIWPSKAPLGYLNVTAKDGKKVIEPDPVVASVITKLFERYATGQYSLKALTKAAHCDGLIHPKSGNPAPVSTVHTILRNRLYTGLFQWNGRLHHGKHEPLVSIDLWERVQGVLAGRHATPIHSYGYEFAFSGLMTCAGCGCAVVAEVKKGKYIYYHCTGHADKGRGGYADCRRKYVREEVLDKTFAGLLDQLHFDEEVLKWVRDALKASHADERREQEQAIERCQTQYKRLEDRLNAMYLDKLDGRIDNAFYDRMSAQWRVEQARLLREIERHGEAQESYMDDGIQLLELARNAGQMFTRQAPNEKKRLLNLVLSNCEWNRGEVRAVFRQPFDLLAETAASAAAAQARGDVSLTRHPIWLGNLDSNQD

SEQ ID NO: 16061 - protein, 549 aa, synthetic construct
MGKVFSYIRFSSAKQSAGDSYTRQVRAAKAFCDEYDLEMAAARDYLFFDSGRSAYKGRHLDDTGELARFLTYVEDGTIPAGSYLVVESLDRLSRERVRDALPRFLDLLAKGINVYTSTDKRLYTRDYNEIDLIISIITMSRAHEESATKGKRVSSAWRNKQKDARESGKPLGKLRPLWLDMSADGEAYVLNSEKAAVVRRIFDLSTKGHGSRIIAATLNQEGIPSFSAGRKNTSGLWGFSTVRHILDSRTTLGEYQPHIFIDGKRKPDGDPIKGQFPAVVSEDEFYLAHAARTSRKRHTVTRTTANFNVLAGILNCYKCGSAMHLQGQHGRKYYKCSKTTKGMCDAGIISAPRSEAVFKELLAKVDSLSLVQDSSGSLRKSLQVIEGRISELKARQDEAEDSHAEFPSRITAKLLSELESSITALEDERATLSEQLVADRVISKDDFFEKLDLVTFEGRAAANNLIKRLGLFIFVSKFGRTNEVYWVSADNAIPAPFSEGSSLLFYLRHKGVSIRLGALTDDILDLQVIQGEITDMEADLAKRNAGGRK

SEQ ID NO: 16062 - protein, 522 aa, synthetic construct
MRKVTRIDGNNALQAFKPKVRVAAYCRVSTDSDEQMASLEAQKDHYESYIKANPDWEFAGIYYDEGISGTKKENRTGLLRLLADCENKKIDFIITKSVSRFARNTTDCIEMVRKLTDLGVFIYFEKENINTQRMEGELVLTILSSLAQNESLSIAENSKWSIRRRFQNGTYKIAYPPYGYDYMDGKLFINKEQAEIVKRIFSEVLAGKGTQKIADGLNLDKIPTKRGSHWTATTIRGILSNEKYTGDVLLQKTYTDENFKRHYNHGEKDQYMIKAHHEAIISHEEFEAAQEILRQRGKEKGVIKGSSKYQNRYPFSGKIKCAECGSSFKRRIHGSGDCKYIAWCCTKHIKDTSSCSMKFVREDAIHQAFVVMINKLIYGHKFILRPLLQSLKKTNYSDNITKIQELETKIKENTERVQVIMGLMAKGYLEPALFNTQKNELLKEAAILKEQKEAIKRAIDGSQTILVEVEKLLKFATKAEKQIDTFDREIFENFIEEIIVFSQEEIGFKMKCGLNLRERLMK

SEQ ID NO: 16063 - protein, 522 aa, synthetic construct
MTTRNVTVIPARKRIGNSAKAEELPKLRVAAYCRVSTDSEEQATSYEAQIEHYTNYIKSNPEWELAGIFADEGITGTNTKKREEFNRMIEECMQGKIDMIITKSISRFARNTLDCLKYIRQLKEKNIPVYFEKENINTLDSKGEILLTIMASLAQQESQSLSQNVKLGIQYRYQQGKIHINHNRFLGYTKDKDGNLVIVPEEAEIVKRIYREYLEGSSMLQIARGLEADGILTGAGNPRWHTSTINKILRNEKYIGDALLQKTYTVDFLSKKRVPNNGIVPQYYVENSHEPIIPREIYMRVQEELVRRRCVHISKNGKKRNYSNNHPLSQMVFCGKCHEVFRRVHWNNRGKKSIVWRCVSRLENTGLFCTASTILEDTLKEKIVEAINIAVSGKNSFLAILKKNIETVLSEDLDESTADIDKRLEELQTELIQKANSKESYDNIVNEIYRLRDLRQETLSRNALRQDKRDRIAEMTDFLNTLTDDITEFDDKLVRKLVEKATVYDDRLVVEFKSGLEIEANL

SEQ ID NO: 16064 - protein, 513 aa, synthetic construct
MSAAYGIIRTVTRRLMLLDTASPRLTMTRMTKQHAPRRVIGYARISKATDESTSIERQRSIIADTCRARGWALAEIVEDIDVSATKTGLDRPGLARVRDAVAAKRADTVLVWRIDRVARSMSNLSNLVDEWAGHGAALVSATEPFDMTTSAGKMLMQMLGVFAEFEAATIRDRVTAARAALVKARRYPGGAAPFGYRVVDNPNGPGKALAVDPVEAAYVRKAADMILGGASTYAATAALNAAGSTPRKAAKWSLTSLRIVLTQDASLGYMTHHGKVVRDDDGAPVQAWEPILPEEDMARLRVLLAPTKTPGGERKRRARLLSGGLLRCSSCGGSLRVNQTGGKNPTTRYSCQGKSDGTGCERGVSIVADRIEEHIESVFLGTVGRYEVVEVRETVREVADLAAVEAELQAVSAELREVDDDDREAVLWSNMKTLKARKRELLAAPSEPVVEMIPTGQTFKEAWESRDTDGRRGLLESALRHIVIKPGVRGRRGVDASRVDIHWRDGDGVELAD

SEQ ID NO: 16065 - protein, 512 aa, synthetic construct
MRRADLYIRVSTDEQADKGYSQRDQEERLKRYCTTKKITVGQVIYEDHSAKTFNRPQWTNLLNNLKKKSSKTNLILFTKWDRFSRNAGDAYQMINTLNKLGIEPQAVEQPLDLSIPENKMMLAIYLAAPEVENDRRALNTFYGMRRARKEGRLMGKAPFGYINRSKEDGRKYVALKDPEASAMQWAFNEIAKGMLAADQVRQKMNTLCTTKLSRSAFHVAIRNPLYCGKIFIAKFQDEEAHLVQGQHEPLISKELFNKVQLILDGNKRTELPNTKILSDVNLPLRGFLVCPDCGRNLTGSASKGRSNRYYYYHCLSSCGFRHKAEVANDIFEKGIRQFELNDGVKSILKKLLLDNYKKFIQSPINEKKRMAQEIDRLNAKLSIARNKLLSETIDDDEYLEIKKECRAKIEHLEEQLSKDGSDNKDINIDKALERALQSIVNIPKLYSEGTIQTRRAIIGSIFPEKLEFDGKTYRTTRMNVIANHIFQINNGLLQKKNRTNENIFHLSCLVAP

SEQ ID NO: 16066 - protein, 446 aa, synthetic construct
MARNIRRIKASNIKQLERKKVAAYVRVSSGKDAMLHSLSAQISYYNDYIQKRSEWEFVGIYVDEGITGTKDNRKEFQRMLQDARDGKIDLIITKSISRFARNTVTMLEVVRELKDINVDVYFEKENIHSISGDGELMLTILASFAQEESRSVSENCKWRIRKGFLEGELVNLRFIYGYDIDDGEITINEEEAEIVRMIFNDYLNGMGTTSIAKKLSQMKVERPRGGKWNSERVAEILRNEKYAGVALLQKKYVEDHLTKTLVRNKGDLPQYYVENSHPAIIDKDTFEKVQYIMEERRNKFAGKKVSYPFTSKLICDNCGKKYRRKISHGKVYWVCSTYTRYGKDYCNSRQIPEEILLEITSEVLEVENFDETLFNEKIEHIEIFDFNILKFVFRDGEIIQKTWEHKPRSESWDEEARQGARERALKQWEERNHGGSKNGNGNTCQE

SEQ ID NO: 16067 - protein, 528 aa, synthetic construct
MEVARMVTVIPAKNNSYESFKENRPNKKKVAAYARVSTNFDEQVSSFEAQRDYYTNHIKSKPEWQFVGVYTDEGISATSTKNREGFNQMIEDALDGKIDLIITKSVSRFARNTVDTLTTVRKLKENGVEVYFEKENIYTMDSKGELLITIMSSLAQEESRSISENVTWGHRKRFSDGKVSLPYGQFLGYEKGEDGLPKIVEKEAEIVRKIYRLFLKGKTPSGIAKELTEENIPTPGGKKVWCSSTVQSILQNEKYKGDALLQKSYTVDFLTKKKKVNEGEVPQYYVENSHPAIIEPETFDLVQLEMKKRKEAKGYKTGGNCFSGKIVCGECGSFYGSKVWHSNSKYKRTIWQCNYKFKNEKKCKTPHIYEDQIKEAFIKAFNSLIEDKEEIITGYEVILEELLDTTKLEKKVANIQNEMEVVEELFRKIVDENSRKAMNQKEYSKRYNELVGRYKKAQDELNEVEEKQQENKVRKDSIDTFIDRLKSQETILTEFDEALWTSTIDKVVIEDDITFYFRDGTKIKEEMI

SEQ ID NO: 16068 - protein, 568 aa, synthetic construct
MKPKAYSYARFSTPEQGKGDSYRRQRAAAEEYCAANGLELADTKEYRFFDNGRSAYKAKHLNDTGDFGRFLSYVDEGRIAPGSYLLVESLDRLSREEVKDALPRFLDLLKKGIRIRTSIDNHLYTENYNLTDLIISVISMSRAHEESSTKGIRVAAAWREKRGLARSDKKVPLGAACPYWLKLMDGAYVEVEERVQVVRRIFDMTIAGYGQAVISRRLNEEGVPVFGSTRSTKEKPRNKSGLWGTSSVQKILHNRALLGEYQPTHLVDRIRQNDGDPIQGYYPEIISPDVFLQAKAARAQRQTSGSTKQSKNFNIWQGIAKCQLCGDAMHLINKGRPPKGYTYLQCYSAKKGQCCNGSIRIEQTEAVFKEILTNVDSMSLINGKSAEIRKSLEIAEGHFGVVADKLQQATEVYTAVATIAGAKRIQELESEYAQCLATRDELRGQLASHRVINKKDYLKQLDLVSYERRAAANSLLKRLGIQVQFKRDNPNRFQCRVLDKSDEAVSDDLQQMLFGILYEDDHATTQPLDPDIYDRQVEQGLITAAVAIREQEQDGIGWQWFGGKLKRS

SEQ ID NO: 16069 - protein, 500 aa, synthetic construct
MKSDPHQKVQASHLKRNAYLYIRQSTLRQVFENTESTKRQYALRQRAVALGWSEDRIIVIDSDLGQSGASSADREGFQRLVAEVGVGHAGIVLGLEVSRLARNSTDWHRLLEICAITDTLILDEDGIYDPAHFNDRLLLGLKGTMSEAELHVLRARLQGGILSKARRGELQMRLPVGFVYNAAGAVVLDPDQQVQHCLRWLFDTFRGTGSAMATARAAHHLELAFPRRCCKGPHKGELLWGSLGHSQVVRILHNPRYAGAFVYGRTHTRKTVDGRTRVIRAPRDQWDTLIPGAHAGYLSWEEYEQNQTRLHESAQAIGADRRRGAPREGPALLQGVVVCGRCGNRMTVRYHSRQGCLCPEYICQREGIEQAEPVCQRIHGAAIDEAIGELLVEALNPLAIEVSLAVQRELQSRIEEADCLRHKQVERAQYESDLAQRRYMRCDPENRLVADSLEADWNHKLRALTEANEEYQRRREQDARILTDGTCQEFRVLRSVKNLN

SEQ ID NO: 16070 - protein, 496 aa, synthetic construct
MKTAYLYVRVSTDEQKRKGYSLPEQEDRLLKYCKYNNIEVKGIYREDYSAKNFNRPEWKELFSEIKKKSSGEDKNILFIKWDRFSRNVEYAYEMIGKLRKYKTIAMAIDQPIDFSVPESTVMLAVYLAVPEAENTRRAQNTANGIRRAKLMGRYPNKAPIGFINLTLMDGKKTIAPKEPESDIIKWSFHQVAQNDHKISEIMRMANEKGLICSRSHFFRILRNPVYCGLISVKLKSNEEQMIKGLHEPLISESLFYQVQSVINTKRKTTAKRDDLKAMFFLRGFLICPVCDRKLTGSIAQGSSKKYPYYHCHNRCRTRINAVFLNDCYQNKLQQLILSNNTIDLFKCILQDQNIKTLQASYLYNQNLIERKIKEEGQVLSQGRKLFLAGVLKIDDYNELKKENQVNIRHLKKEARDIFLKLKAIDKKNQIEDKELVEVFRKFSEFDISDKKSLVSLIPPVDIDYKTGDLSLDLNQAFSKILLKKSNRKTNKKNEFH

SEQ ID NO: 16071 - protein, 508 aa, synthetic construct
MKKAIAYMRFSSPGQMSGDSLNRQRRLITEWLKVNSDYYLDTVTYEDLGLSAFNGKHAQSGAFSEFLDAIEHGYILPGTTLLVESLDRLSREKVGEAIERLKLILNHGIDVITLCDNTVYNIDSLNEPYSLIKAILIAQRANEESEIKSSRVKLSWKKKRQDALESGTIMTASCPRWLSLDDNRTAFVPDPDRVKTIELIFKLRMERRSLNAIAKYLNDHAVKNFSGKESAWGPSVIEKLLANKALIGICVPSYRARGKGISEIAGYYPRVISDDLFYAVQEIRLAPFGISNSSKNPMLINLLRTVMKCEACGNTMIVHAVSGSLHGYYVCPMRRLHRCDRPSIKRDLVDYNIINELLFNCSKIQPVENKKDANETLELKIIELQMKINNLIAALSVAPEVTAIAEKIRVLDKELRRASVSLKTLKSKAVSSLGDFHAIDLTSKNGRELCRTLAYKTFEKIIINTDNKTCDIYFMNGIVFKHYPLMKTISAQQAISTLKYMVDGEVYF

SEQ ID NO: 16072 - protein, 547 aa, synthetic construct
MKLLVPYIRWSTKEQDSGDSLRRQTNLIDAFYSKHKEEYYLLPAHRYVDKGKSGFHQQHKAQGSDFRRMFENVMSGAIPEGSLIVVENFDRFSRADIDTAIDDVRQILRKGVSILTLGDGELYDKSALTDPVKLIKHIIIAERAHQESLVKQKRIAQVWNHKTQLARELKKPMGKQAPGWLELSEDGSHYIVDEDKASLVNIIYDKRLSGMSMFAICKWLNEQGYPTINQRKVRISKTKKPDGNWSALSVKHILTSRSVLGYLPAKVSSEDRKTVLREEIEGFYPQIVTDSKFYAVQQLLEETGKGKTSSGEHWLYVNILKGLIRCKCGLVMTPTGIRKPVYQGTYRCNGNKESRCSYGTVSRKLLDTQLCSRLFSKLSQLHDEATDTAKLDELQRRLNTVDSELEKLTETLIQLPNITQIQEALRAKQEEKDELIVQLSREKARVKSVSSLDLSGLDMESVEGRTEAQIIIKRLVKEIVVSGNEKLVDIYLHNGNMIRGFPLDGKDDHTLTLEEATDEMQSLDDMLIFGEPVTRIYPAGDMEEVDA

SEQ ID NO: 16073 - protein, 507 aa, synthetic construct
MKRAISYIRFSSEKQSRGDSLRRQSKMVNDWLKAHPEYYLDQDLSFRDLGVSGFTGKHLKGGLGDFLTAIEKGLVKAGDTLLIESLDRLSRQNVDRASELLRNILRSGVDVVTLSDGEHYTRESLKDPLALIKSILIMQRSHEESLRKSERIQAAWNRKKELISEGIKISKRCPAWLKLNDDRKSFSVIPEKVETVKRCFQLRLEGKSIWEIVRTLNAEGHQTLNQYKAGSFGQTSVQDLLKNRSVIGYFTPKGCEEISGYFPPIIPETDFYKVQQLSYSRYGRKPASDKPLSVNLFKGVIRCSECGHALIITGFSDTRNGIYRCPLRNENRCSAKGLSRKQTDGTLLALLSRLDRFDSDMTNTIDTLKLHREHISSNIEKLVQLSLEIEDLSAITSKLKQLKNELSQVDADIEKETQRLKSIDVGCLSDCDLTTKAGRIEAQLIIKSAVKEVILNTAKRRCKVTFHNGKVIDLPITETPSEDVTEAIQSLSEVTERGLIDVDEVII

SEQ ID NO: 16074 - protein, 507 aa, synthetic construct
MKRVISYIRFSSEKQAKGDSLRRQSKMVTDWLKAHPEYYLDQDLSFRDLGVSGFTGKHLKGGLGDFLTAIEKGLVKAGDTLLIESLDRLSRQDVDQASELLRNILRSGVDVVTLSDGEHYTRESLRDPLALIKSILIMQRAHEESLRKAERIQAAWDAKKEAAKAGIKISKRCPAWLRLNDDRKSFSVIPEKVETVKRCFQLRLEGKSIWEIVRTLNDEGHQTLNQYKAGKFGQTSVQDLLKNRSVIGYFTPKGREEIAGYFPPIIPETDFYKVQQLSHYRYGRKPVSDKPLSVNLFKGVIRCSECGHALIITGFSDTRNGIYRCPLRNENRCNAKGLSRKQTDGTLLALLSRLDRFDSDMTNVIDALKLHREHISNNIEKLVQLSLEIEDLSAITSKLKQLKGELSQVDADIEKETQRLKSIDVGCLSDCDLTTKAGRIEAQLIIKSAVKEVVLNTAKRRCKVTFHNGRAITLPITENPSEDVTEAIQSLSEVTERGLIDVDVVEI

SEQ ID NO: 16075 - protein, 507 aa, synthetic construct
MKRVISYIRFSSEKQAKGDSLRRQSKMVTDWLKAHPEYYLDQDLSFRDLGVSGFTGKHLKGGLGDFLTAIEKGLVKAGDTLLIESLDRLSRQAVDRASELLRNILRSGVDVVTLSDGEHYTKESLRDPLALIKSILIMQRSHEESLRKSERIQAAWNRKKELISEGIKISKRCPAWLRLNDDRKTFSVIPEKVETVKRCFQLRLEGKSIWEIVRTLNDECHQSMNQYKPGKFGQTSVQDLLKNRSVIGYFTPKGCEEISGYYPAIIDETTFYKVQQLSHYRYGRKPVSDKPLSVNLFKGVIRCSECGHALIITGFSDTRSGIYRCPLRNENRCSAKGLSRKQTDGTLLTLLSRLDRFDSDTTNIINTLKLHREHISSNIEKLVQLSLEIEDLSAITSKLKQLKNELSQVDADIEKETQRLKSIDVGCLSDCDLTTKAGRIEAQLIIKSAVKEVVLNTAKRRCKVTFHNGKSITLPITENPSEDVTEAIQSLSEVTERGLLDVDTFQL

SEQ ID NO: 16076 - protein, 514 aa, synthetic construct
MRKVYSYIRFSSTKQAFGDSHRRQSKAIQDWLASHPDHILDESLSFEDLGRSAFHGDHLKEGGALRAFLEAVKQGLIPPDSVLLVESLDRVSRQSISHAQETIRAILEQGITVVTLSDGETYNRQSLDDSLALIRMIILQERSHNESVIKSDRIKKVWSHKRQQFEQDGTKITGNCPGWLKLNSDGKSFSLIPHHVETIHRIFDEKLSGKSLHAIARDLNLENIPTITNKKVDTGWTPTRVRDLLLKESLIGVAYGVSDYFPPAISKEKFHAVQMIRGQGKGKKPTSRQPSSIDIFKGICKCAECGSTLRQRNTKKTPEGRYPRGYLECRNRQLGRCNSKAFNRSLIEDILIQKVFPTLQYLSLKSNGDNISVTTLKADITSLEKGINNLISLAERGLGDLDALAQRITNNRVELESKKKDLRQAEAIQSLRSDNDIQDSDRKTVEGRIKLQLAIKSFIKEMIFDYYKQEITIRLLNGKSFSGISVARENKDFDHSSVFEVLQKSLLDIDEVHL

SEQ ID NO: 16077 - protein, 531 aa, synthetic construct
MAIAYSYIRFSSSQQSQGDSLRRQTQLAEKYCIENNLTLSDTTFRDLGVSAFHSTNSQEDSGLGQFLSALNQGRINEGSYLLVESLDRLSRAKVQTALRQMLNIIELGVKIVTLMDNRIYDQESDTTDLIISLTIMERAHNESKTKSERIKAAWVHKRQNPTTTNRHSSTPFWLSLNPDKKTYKLKEKYVEIVRKIYQLSIDGWGVIKIVRHLNESNIKAPKGGSWATTTVSRVLTSKAVLGHYEPMQNRKSLNLTIEDYYPSIIDEATYYLSRQRQNERSKPEAAGRKTNYPNPLSQIAKCKLCGSSMYYENKSKSLKYLTCREFKKGSCTNKPIRIELIYRFVCEVFNSPMYYQYQAKLVEKSNKKDNNKLEELEAKQTEQENALRALLSMSNDFSNTIIQEEIKVRSERIESFKKHIENVKAEQAVEHTRSTHINFTEALQLAVNAFRFPLEKVQVEELSREELFNTRVRLNRILKHAFNSLSIYHCGESERITIETEVMEGFSEGLKYETTRQSIKEPLSSRVWSVC

SEQ ID NO: 16078 - protein, 678 aa, synthetic construct
MRTTPKIYNYARVSTTKQTKGVGLETQQQRSVLENLSQEHNLPIHDENFVDQGLSAYHGKHKDGAFGVVLSRIESGEIASGSILVVFSLDRLSRETVNVAMEQFLSIINRGVRVYTHIDCKMFDSESQNQTADLIGSLITMQRANEESETKSKRIIAAQKIALKRWKDTGKPQGALGRSPFWIDQPTNTLNINAEGVKKAVEMKLAGYGDLKIKQYLDANFEYKQTRTKGTVKQSNTWDYTAISQLWANRSLIGEKNFHIEGVSHVFENYYPPIIDEATFRKLKMCKSEKRGRNTSSGKIPLLKGIARCGICGGAMVFVDKGDNRVNYVCNLAMKGEHDREVYNVNMLDLLTLEICKDAYLAESDKANNTFVENEKIKIETELVEEREVLDELVARFKAKKSNTILDLIGDSENQIDVLEAKLDAINNADVVLNADELVSLPEIFTDDVRTDYLHPERYTIRNNLYRFISSITLNRVVEHCSDAKIKSANCIDITWHFKNGQKRRLAMLPYQYLKADDGRKSLYLPFVYMYGSKSNIKVDDGGQFLPSIFEKLHAFDLTRCLYPSRGCYQWSKLSLECGKTYWAPLDKAMFMEKGMEVIADTVRDNGGINKVDGVTTNYLSLMFNYPSSEEFSYDYPDSTFVELACKFGFVADRDFSLFLQDNNFNRELYSSLDFLMS

SEQ ID NO: 16079 - protein, 542 aa, synthetic construct
MQQLKQKRVGIYVRVSTEMQSAEGYSIDGQINQIREYCDFNNFAVVDVYADRGISGKSMNRPALQRLLKDANEGHIDSVMVYKTNRLARNTSDLLKIVEDLHKQNVEFFSLSERMEVNTSSGKLMLQILASFSEFERNTILENIYTGQHQRALEGYYQGNIPLGYSNIPDNKKELMINQHEANIVNYIFESYAKGHGYRKIANALNHKGYVTKKGNPFSISAVTYILSNPFYIGKIQFAKYKDWNDKRRKGLNDKPVIAEGKHSPIIGKDLWDKVQARKKQVSKKPQVHGKGTNLLTGIIFCEKCGAAYAASNTTNTLKDGTKKRIRYYSCSNFRNKGSKVCSANSVRADVIEKYVMDQILEIVKSDKVIKQVVERVNQENQVDVAALNHDIAYKQQQFDEINTKLKNLIQTIEDNPDLTSALKPTIHQYETQLNDITNQINQLKHQQNQEKPSYDTKQIAVLLQRIFQNIESMDKSQLKTLYLTVIDRIDIRKDGSHKKQFFVTLKLNNEIIKQLFNNTSLDEVLLSTSSLFLPQTLFLQI

SEQ ID NO: 16080 - protein, 449 aa, synthetic construct
MKQAIGYLRQSTLKQQSLSAQKQTIKALAEKHNIQHITFYSDKQSGRTDKRNGYQQITELIQQGQCDVLCCYRLNRLHRNLKNALKLIKLCQQYNVDILSVNDGYFDLNKSFDRLKLNIFISLAELESNNIGEQVSNGIKEKARQGKLITTHAPFGYHYYKGTFVINPVEAQTVTAVFKYYLQGYGYKKIAQYLEKDNKLINRKPYQVRNIIMNPNYCGRVNNKYGTFDNMFPFIISKSVYKDAQAIRVNKQVQRTPSANLLKQKIKCPCCDSTLTNMTIRKKEHTLRYYVCPKNMNESRFVCSFKGINAQELEVQVLATCQNFFQNQQLYSKINNTIHQRLKKQRVIEAKSMLTQEQLIDKLAKGMIDAETFRNQSQSVLQKRKIISSISDTQLQTSLQNVIQQSFTLNMLYPYIDEIRITKNKVLVGIYFKNEPLNIVNQTTQSSIA

SEQ ID NO: 16081 - protein, 558 aa, synthetic construct
MKGKIALYSRVSTSEQSEHGYSIHEQEQVLIKEVVNNYPGYDYETYIDSGISGKNIEGRPAMKRLLQDVKDNKIEMVLSWKLNRISRSMRDVFNIIHEFKEHGVGYKSISENIDTSNASGEVLVTMFGLIGSIERQTLISNVKLSMNAKARSGEAITGRVLGYKLSLNPLTQKNDLVIDENEANIVREIFDLYLNHNKGLKAITTVLNQKGYRTINQKPFSVYGVKYILNNPVYKGYVRFNNHQNWAVQRRSGKSDKNDVILVKGKHKAIISEEVFDQVHEKLASKSFKPGRPIGGDFYLRSLIKCPECGNNMVCRRTYYKTKKSKERTIKRYYICSLFNRSGSSACHSNAINAEVVERVINVHLNRILSQPDIIKQIASNVIEELKQKHSNQTEIKYDIDSLEKQKAKLKTQQERLLELFLDDQMDSEMLKAKQSQMNGQLKMLDKQIKEAQQATESQDEVPNFDKLKSRLTMMISRFSVYLREATPEAKNQLMKMLIDSIEITTDKQVKLVRYKIDESLIPQSLKKDWGSFFMPKFQFEIDGRNNYFIDQITTFTT

SEQ ID NO: 16082 - protein, 529 aa, synthetic construct
MKKVYSYMRFSRPEQAKGSSIDRQSQYAEQYALEHGLELDESLTMMDRGLSAFHGVHKTKGAFGQFLSAVTAGKVPSGSVLVVESLDRLSREDPLIAQAALTDLILSGITVVTAADNQVYSREEIQQNPFKLIMSLVVMIRANEESETKQRRSNAFLKSALNQYQTNGNIRRLGADPSWLDFNKDDNTYSFNARVDVIRRILSLYNQGIGSLKIARQLTEESIPTLSGKRNAWGQTTVANIVKSHALYGMKRINVQGVDYDLDDFYPALITKSKWLALQQHRSKRSKTMHGRGEVVHLITGHGKGFTTCGYCGGGLGAQTQKQYKRSGEYSKTVTRLHCLTHKETSSCCSSVFLEPIESAVLFAACIGVEPQSLVPTVNNVNYSALIDEIDNKVKHIVEQVTAGAPWELFKDAHDKLKLEKQKLIKERDSQKPDVNQSDVQKWVNKLVELADKARANDKEARLKCRTLINSICKGIVIKLRGHDLKSEPVATITFVTDEQFEFKVGKNGAVQFVDNGMAVNRRLKPLLT

SEQ ID NO: 16083 - protein, 613 aa, synthetic construct
MRTTPKIYNYARVSTTKQLKGVGLETQQQRSVLENLSQKYNLPIHDENFVDQGLSAYHGKHKDGAFGVVLSQIESGEIASGSILVVFSLDRISRETTNLAMAQLLSIINRGVRVYTHIDDKMYDTSNDNFSTDLMFSMFTMERANEESRTKSRRIIAAQKEALKKWHIDKKPQGALGRVPCWIDQPTNKLNQNATGIKVAIDLYLQGWSSIKIKKHLDKSYPYKRTRKTKVKTSSTWDLGVIDQLWKKRALIGEKHLRIEDKTHVLKDYYPKLVDLNTYLRLKALREPKKGRATTTGSIHLLKGLARCGVCGGAMVFIDKGASRQNYVCNLATKGEHQREVVSTRMLEFLTLEVCKDFYLVNKVGATSNTNIEAEIQERILEEKAELSDLIERYKKKARGSLAELIEDQEDKIELLEKELDTFNINTFDEVLERLTEDLYTEEVRNNISDPQRADLHEILCRILKAVNVYRRTEDTNFTKTKKVNCIEIEWVFKSGQVRKLVMNPFEYIITENKKSLYIPYEYKHDIPFEEYRRNKSVISNALKKLHDWNLLRGLYPTKGRYEWNEIDLELGYVHSITSPNFDAILDGSYMKKSTMYIQSDKNSLEDKDDIFC

SEQ ID NO: 16084 - protein, 669 aa, synthetic construct
MRLSAIAQATEDLRPVVITYTRFSTNIQKEGLSEYRQDELTQRYVLDFCEEHGVPVEDIISLKDRGISAYRGKNMTKGSLSEIISKFNSGELPKVYNEKGEINTFLFIESLDRLSRADLHTANKLFLDLVEYCNIVVVAENEKKIYSLNSLKTDMGMLDLFSALLTLSRSHNESRMKEMRHRANWSKKRQVVIDYFELPEDEREGVEYPLNPTKTCPWWLRPKADNRGFEFIEEHKEAMLYFLNRMMEGHGLTSCIRRLNEKIENGDFKVEFTERQKKAQGFQTHTFYQLLSGDDNESIIGNLIFHQDYYPTEKDVQQGLYEKKSLGKKVRIPVFTAKGFYPALLNEVEYMRLKQQMKQRKQSQTKPTKKVQNIAQGLLKCPLCGYSYVYVADNRKGRHHNLVCGLSRSKKCKSYTFRYKWFEKNLLNYCRNLDMNRILGIKIDNKLKERISELEVNALTYEQEIGVKNKELEQLVENLSKITIPTLLEKAQDQYVKIENSIKVITYEKEQNELELVDLKKRSIKSDIVSKEVYELIDSVQLQENVSLRERLNIELKKVISELYIYHKDNPNNYFGRNMIVVKFRDDYIRFIPLDRELEREELYNILPTINTKKAVDYSKYEILPFDYLEGLEEGRYPEHQFITKFYQENPDVLAEILSELDEADDVYV

SEQ ID NO: 16085 - protein, 548 aa, synthetic construct
MDKVIYPYVRFSTKKQEHGHSLSRQITRIKEYAIENGYKVNDSLELRDLGKSGFRGLNAKEGALSVFLRLLEEDKIPKDGSSYLCIEQFDRLSRMPAGDAYEVFRKILKQNVNIITLMDRKVYRKEDLNNMVSILSSLLIMEQAHIESQRKSDLISAVFKDKVKTLKSGGKVQFTYILPGWIDNNGTKKDPDFVLNEKVETVKMIIDMYLGGETMGHIARILNEKQVPQIARKKTKNRTNSWNSAKISHLLTNQTLLGKLYIRTTGDVIEDYYPAVITKDEWDLIQAKKRTQNSTKVAGRRSINIFQGRLFCADCGNKYYFETDDKKGKGGKRYIYHMLKCSGRRFHSCNSESLKYDDFTNPDLFFFRDIGEVDSDDILLVKKEIRDYEKEVESLKLEQSEIEDMFENDEINLRAYSLSISKVTDKIDDIEAKIVLNKQHLSFSSNEYRMEEFDKNNPESVSKAKNFIRKNYAGIIISSEYNIIIALMHSGEMSIRPLPRPYKYPDPIKGYPLLQKIKDNIQEQDRKGLLDGKFKELLDAFNFSDRYV

SEQ ID NO: 16086 - protein, 654 aa, synthetic construct
MFTFDKSKYIGICVPYARFSTEIQDDVGRKSLERQLGEAERFSNENNLYYSNELVFIDKGVSGYALQGEYAATFKKGQMQLMLEQLSTVPMNEREHVYITFHAFDRFSRMSPDEAQTEFRNILKQGFNIVTTIDDCIYTRHDKDLDQMIISIIQMSTAHYESQVKSIYRKDAYKRKRDVIEYLYNDPSQKGKHKHLGMKVSSPPRWLYSEDVLYSYVDEKGNQKQEPLCRYGVDEDKAAVVNLIYDLKCQGLGFTKICKILNQSNIPTFDIGKYRTSEKWHIFAVNNLFKNEHVLGNVFLKSIEDEEVFDHETGVFKNERTIKIATEKLLKYYPQIVSQEKYDLAQEKIKEQTIKRSNDYNDMTHMFSKIIKCSCGSKINYKSTKKQTKKKPVDYYEYLKCDRSFLGDGCNAENINYKDFESKFIRFITHIDINKIENQLLDAVESEISSYDEEIALKLGQLNKMKLEVDGLEKTFKSLVSQGENAIWVIQKMEDSKAKVKSLEYELQILKSQQKMTESLEKPLNEFDVLNSKKGLKASNFDEKLKSRKILNQYLREKIRWFEVCSDAHHKFVIVCFIDNVIRTFSYRDEFASDLMFNTIKINTDDLNKENTDKLIIELINAIRLSLTGKTNVISNNDLIQYILKIKSDFIETI

SEQ ID NO: 16087 - protein, 554 aa, synthetic construct
MKQPLAYSYVRFSSPEQAKGDSFRRQTEAARKYCNKHGLELADLRFHDLGVSGYKGNHFTQGALGDFVEAIEQGKVQGGSYLIVESLDRLSREEVDIAFSRFASILRADVNIVTLQDGKVFTKTSLKNTTDILTSILVMLRAFEESETKANRIREARDEKHRQARENKTPTGYRPPDWIRTVKDADSGKPKYELIPERAEVIKRIYHLNNSGMGAIVIARLLNEEQTPPWGRSKTGWQTSYIKKILKARTVLGEYQPHVVINKVREAVGEPVFGFYPAVIDPNTFKLAQMTMTARDKRSGGVRKDKVNNLFTGLAKCKHCGNTMHFVDKGKPPKGNQYLLCSLAKTGAVHNGVSCKRASIRYQQTEDAILTVAATLNLKFESPTNKGEVERLQNQLSEIHADLGTAEEAIVRITNAIAELPDSSGLIAKLAELELQKREKKSEYQAIEKRIDELNLVPQASNVWNDLQQALKMFREDASDRTNVKLRTKINNQLLNSIDRIEFDNHAKIVTIHIDSKRIVEIRFEEKMKGYTVKPSWDNREFLPHTFVVKSLLR

SEQ ID NO: 16088 - protein, 547 aa, synthetic construct
MRTAYSYVRLSSKKQIQGYGQERQWQAIQAAALAHGWELSEKTFSDLGVSGWKGANIETGALSQFLQCVEDGYIEKGSVLIVENVDRLSRAGVQRAVSLLMQLLASGISIYTFTDSKLYEPDSHNPLMDLMAWALSAQRAFEESERKSQMILNAKAKAREKARLTGEIITRRCPSWLRVNQDKTAFELIPERVETVRKIFDLYVNGYGTPRIGRLLTEEGRKPLTGRAWYPRSISRILQYRAVLGEYQPTLNGKPEGDAIKNYYPAIIDEDRFNEVQAVLKEGGAGKGRRGKEMRNYFAGLLRCSCGEGMHIVSSCVKGKRYYQLRCLQYRISCFGSSWNFYKLSSFVLFALRRLPILEVMGSQDNNNIKELNAKERELTFLLEDTRRQLDNTINAIATLGLNDQLQSKFRELKTSVTNIEKQLSNVKTELETSQGKLVIQKQDSEMLTGRFLELIDSTKDIDGRIKLNQVLRRYLSKIEMHADKKEEYRYIKIYRKDGDELVSIQCDHSLKGALFESKDGLETFELLPATDAKRNEISNTLLCTPK

SEQ ID NO: 16089 - protein, 575 aa, synthetic construct
MTKIAYSYTRLSTEKQIKGHGFTRQREAIEKVCCQHGWQLSDQTFNDLGVSAWKGANATTGALSQFIDLAKKGAIRPNSVLIVESVDRLSRQQVDKSLRLMLELLEVGVSIFTLSDSKLYTTNSDSVMLDLMMWLMTAQRAHEESEIKSLRVRAAKKKNKELIRKGIIVTRKCPEWLTVSDDKSCFLVNNERAEIVRKIFTWYSQGFSTKPIALKLNELGIPYWGKSSTWSYRHIRSLLKHRGVIGEIQLLKRIDGRDVADGDPVEDYYPAIIDRGLWATCQQIKSSKTTAKGRVVERGMANLFRGLLKCECGSGLAINSSTVKGRTYRFLRCSQLKTTGCQAKNWHYEKTERILLIALRHSLSSFSEEDHAVSLRECQHYLARISEELKEKERQAENAINYLLDKPSKLLEARLQTLEDDIARLKAIQEQAEHRLEAVHYEKSTALDKVEELQRVLEDIANDDDSRHKANGLLRRLIDTITLGSISNPRSKEFMEVSGNDYHGLIIIKRRDGLELRIEVLKDYGLSISWEGDDFTVIECSPTQQLNSQHVSQRLINLGGQTVDLWDDEGWVASS

SEQ ID NO: 16090 - protein, 621 aa, synthetic construct
MRTTPKIYNYARVSTTKQTKGVGLETQQQRSVLEELAHKYELPIHDENFVDEGLSAYHGKHKDGTLGRVLSLIESGKISSGSILVVFSLDRLSRETVNIAMEQLLSIINREVRVYTHIDDKMFDAASSNLTADLIVSLITMERANEESAVKSKRIIAAQKQALKGWKKDGKPRGALGRVPLWIDQTTNSFNEHAEGIKAAVDLFLEGRSTIKVKQHLDENYPFKRTRKTSIKKAQTWDYGVIDQLWRKTSLIGEKRLTIEGQEHVLSNYYPPLISLEKFNKLTRLKKPKLGRSTSTGSIHLLKGLARCGTCGSAMVFVDKAQHSKNYVCSLAVKGEPLHNREVFSAELLELLTLEVCRDQYLINSFNAQLDVEKKAKAEYELAEEKKQLEDLKSRYKQKSRASLLDLIEDTEDKIEVLEQQLASFKTFDLSDNLHLLNSDIFTEEVRTNFQHSSRAEIIDNLKSVLSDVTLNRVVEASEFTKTGTVNCVSITWRFKNDQTRSISVKPFRYIGTGSNKKLFVPVRYEYTVPVIEEENRRGEKFVPDMIKKLHEKKLLNKLYPSKGRYQWNKLEFLLGEFQTGLHNFLPNFVADPDPDAFWGDMVDKARAKGVRYTVLSKNVI

SEQ ID NO: 16091 - protein, 529 aa, synthetic construct
MRKVYSYMRFSRPEQAKGTSIERQSSFAEQYALAHGLELDKSLTMMDKGLSAFHGMHRTKGAFGQFLAAVAAGKVPSGSVLVVESLDRLSREDPLIAQAALTDLILSGITVVTAADNQVYSREEIQQNPFKLIMSLVVMIRANEESETKQRRSNAFLKSALNQYQANGNIRRLGADPSWLDFNKDDNTYSFNARVDVIRRILSLYNQGIGSLKIARQLTEESIPTLSGKRNAWGQTTVANIVKSHALYGMKRINVQGVDYDLEDFYPALITKSKWLALQQHRSKRSKTMHGRGEVVHLITGHGKGFTTCGYCGGGLGAQTQKQYKRSGEYSRTVTRLHCLTHKETSSCCSSVFLQPIESAVLFAVCIGVEPQSLVPTVNNVNYSALIDEVENKVKHIVEQVTAGAPWDLFKDVHDRLKLEKQKLIKERDSQKPDVNQSDVQKWVNKLVELADKARANDKEARLKCRTLINSICKSIVIKLRGHDLKSEPVVTITFVTDEQFEFKVGKNGAVQFVDNGMAVNRRLKPLLA

SEQ ID NO: 16092 - protein, 399 aa, synthetic construct
MNVVLYIRVSSVRQVNEGHSLEGQLKDLRAYCSANSHTIVKEYIESGNSAYKGSRPIFNQMLNEVTSRVFNVDAVVVYSLSRFARDLLYQLSTIKRLEDSGIRLFSATENLPEDDTTFKYLTVMLGLVNEMNSKQNGINVQSRLTQTAKDGYFTGARVPLGYRSVKCEEGKKNTRKKLVIVEEEAAVVRKIFELSLTGTSGKGLGIKAIADFLNRHGFKYRGSSWSNNTVHKILTSTTYYGEFVFRKKTDSPIVISVPAIIDKNKFIEVRKSLKERDAQQLWVKAIRSNNLLTGLLKCGICGGGMTVCSGKSGRYKYYACTKKLKKSVDLCQSKWVPKQELDQLVESTIIEHVINVTNIQAIIDEVKTELLSGRERHKRQSLKTYSKAKSYRAKVGKHL

SEQ ID NO: 16093 - protein, 481 aa, synthetic construct
MITTNKVAIYVRVSTTNQVEEGYSIDEQKDKLSSYCDIKDWNVYKVYTDGGFSGSNTDRPALESLIKDAKKRKFDTVLVYKLDRLSRSQKDTLHLIEDVFIKNGIEFLSLQENFDTSTPFGKAMIGLLSVFAQLEREQIKERMQLGKIGRAKAGKSMMWAKTSYGYDYHRETGTITINPAQALAIKFIFESYLRGRSITKLRDDLNEKYPKHVPWSYRAVRTILDNPVYCGFNQYKGEIYPGNHESIISKEEYDKTQSELKIRQRTAAENVNPRPFQAKYILSGITQCGYCGAPLKIMLGVKRKDGSRLKKYECHQRHPRTLRGVTTYNDNKKCDSGFYYKDKLEAYVLTEISKLQDNAGYLDKIFSGDNAETIDRESYKKQIEELSKKLSRLNDLYIDDRITLEELQSKSAEFISMRGTLETELENDPALRKNKRKADMRKLLNAEKIFSMDYEGQKVLVRGLINKVQVTAEDIVINWKI

SEQ ID NO: 16094 - protein, 532 aa, synthetic construct
MKAAIYSRKSRFTGKGDSIENQIQLCIDYAKSIGVKDFLIYEDEGFSGSNIDRPQFKKMMQDAKDKKFSYLVCYRLDRISRNVSDFSTLIEKLNELNISFISIKEQFDTSTPMGRAMMFISSVFAQLERETIAERIKDNMYELARSGRWLGGNTPHGFNSEKITFLDENLKERSMYKLQVNDEQMEIVKLIYNKYLELRSLSKLYKYVYNNGIRGPRGGKFDPSSLSRILRNPAYVKANDEILDYLKNSGMDVVGTPDRKCGILTYAKNTSNSIAAIAKHHGVIEPEIWLEVQNQLDKNRDKTPRISTGKTALLSGLIKCGKCGSNMRITYKGKKTDKDLKYYYICGTKKTLGYDSCNCKNLNGPLVESLVIDKIKNCKEESIISAFNSNNIKTDNVFNIFKSETNLLKNQILDKERLIKNLVIELAKNTGSTASDYIVSQIESLNNEISILKDKINTLESSNINISSDSINIDIIVSNLKRFNDEVDNASLDDKRLLLSTIINSIVWDSSLGDLNIVYMGAEVDNSVSLSN

SEQ ID NO: 16095 - protein, 567 aa, synthetic construct
MNREGKKCVLYPRVSTEMQVDGYSLEGQKNGLKRFADREEMEIVGIYEDAGKSGKSIEGRPAFKKMLSDIKNGLEIDYILVYKLSRFGRNAADILNSLEFVQSYGINLICIEEGIDSSQTSGKLLISVLSAVAEIERENIIEQTMNGRREKARQGGWNGGFAPYGYYLKDNQLLIEETEAEAIRIIFDKFANSDIGLGGVAKYLNLQGIKKIPRQNGTLETWSSHFIRLILDNPVYCGKIAYGRRTREKVKGTKNEYKQVHAEDYILEDGQHEGIISEELWQKVHAKRMATGIKQPSKIGKDRSHLLTGILKCPLCGSSMYTNKHAWTNKDGTYKEVYYYICGRNKQERGHHCDYKASLRKTDIEPLVIEAVKELVSDKYFAKEIEKRIGVQTDTTAIDKELANYESKLKEVDLNKARLEREIDNLPIDARFRERKIHDMTLRLDALYDTIVELEERIEDAKLRKSSIEMETITLDNIYKLMLNFGKLYDIISDEEKKSLITYLIKEIQIYPNGESEQPLKSIEFNFPIYRDGQEVRRLLWEKGNTVETAVPLHVTISMPLSLPNTS

SEQ ID NO: 16096 - protein, 481 aa, synthetic construct
MITTNKVAIYVRVSTTNQVEEGYSIDEQKDKLSSYCDIKDWNVYKVYTDGGFSGSNTDRPALESLIKDAKKRKFDTVLVYKLDRLSRSQKDTLHLIEDVFIKNGIEFLSLQENFDTSTPFGKAMIGLLSVFAQLEREQIKERMQLGKLGRAKSGKSMMWAKTSYGYDYHKETGTVTINPAQALTIKFIFESYLRGRSITKLRDDLNEKYPKHVPWSYRAVRTILDNPVYCGFNQYKGEIYPGNHEPIISKEEYDKTQSELKIRQRTAAENVNPRPFQAKYILSGIAQCGYCGAPLKIMLGVKRKDGSRLKKYECHQRHPRTLRGVTTYNDNKKCDSGFYYKDKLEASVLKEISKLQDDADYLDKIFSGDNAETIDRESYKKQIEELSKKLSRLNDLYIDDRITLEELQSKSAEFISMRATLETELENDPALRKNKRKADMRKLLNAEKVFSMDYENQKVLVRRLINKVKVTAEDIVINWKI

SEQ ID NO: 16097 - protein, 481 aa, synthetic construct
MITTNKVAIYVRVSTTNQVEEGYSIDEQKDKLSSYCDIKDWNVYKVYTDGGFSGSNTDRPALESLIKDAKKRKFDTVLVYKLDRLSRSQKDTLHLIEDVFIKNGIEFLSLQENFDTSTPFGKAMIGLLSVFAQLEREQIKERMQLGKIGRAKAGKSMMWAKTSYGYDYHRETGTITINPAQALAIKFIFESYLRGRSITKLRDDLNEKYPKHVPWSYRAVRTILDNPVYCGFNQYKGEIYPGNHESIISKEEYDKTQSELKIRQRTAAENVNPRPFQAKYILSGIAQCGYCGTPLKIMLGVKRKDGSRLKKYECHQRHPRTLRGVTTYNDNKKCDSGFYYKDKLEAYVLTEISKLQDNAGYLDKIFSGDNAETIDRESYKKQIEELSKKLSRLNDLYIDDRITLEELQSKSAEFISMRGTLETELENDPALRKNKRKADMRKLLNAEKIFSMDYEGQKVLVRGLINKVQVTAEDIVINWKI

SEQ ID NO: 16098 - protein, 457 aa, synthetic construct
MRVACYDRTSVYEEAKISNDAQYDAVKEYVLEKYEQFPQRFSDKGESGGKAERPAFRQLRAWVCASEEEGVIYVWRYDRLARQAKIALEFIELCQQHQVQVYSISEPLPASFSHASTNKLFVQLLFTFAEQQRNVIIENVRAGLAYKKQQRQYLSSAVPYGYRLVNGKIQQEAHEAKVVRHIFQLYLTKKYGYKKLCQRLTQQKFFFRERPFQPYHIYSILKNPLYYGEIKGGSLGKYLGTFEPILSKTTFLQAQEIRQSRRTAKKDTYPYLLRQKIRCPFCGRHLSSKYQWNTKKTKTIHYYHCTDRSCQGVFLRAERVESEVLEKVQAFFQHEGVYQALIAQLTQQLAEKRKDDKHKIIQQKKQEAQWFKAFEEGNCSLEELKQQLQALQKPRSTSSFLSLQQCEAKVKEWLQLKDLSSRQLLCDHVCRIEVTKEKTVCGIYFRQLTQNILEGNE

SEQ ID NO: 16099 - protein, 457 aa, synthetic construct
MRVACYDRTSVYEEAKISNDAQYDAVKEYVLEKYEQIPQRFSDKGESGGKADRPAFRQLRAWVCASEEEGVIYVWRYDRLARQAKIALEFIELCQQHQVQVYSISEPLPASFSHASTNKLFVQLLFTFAEQQRNVIIENVRAGLAYKKQQRQYLSSAVPYGYRLVNGKIQQEAHEAKVVRHIFQLYLTKKYGYKKLCQRLTQQKFFFRERPFQPYHIYSILKNPLYYGEIKGGSLGKYLGTFEPILSKTIFLQAQEIRQSRCTAKKDTYPYLLRQKIRCPFCGRHLSSKYQWNTKKTKTLHYYHCTDRSCQGIFLRAERVESEVLEKIQAFFQYEGVYQALIAQLMQQLAEKRKDEKRKVIQQKKQEAQWIKAFEEGNCSLEELKQQLQALQKPMSTSSFLSLQQCEAKMKEWLQLKDLSSRQLLCDHVCRIEVTKEKTVCGIYFRQLTQNILEGNE

SEQ ID NO: 16100 - protein, 545 aa, synthetic construct
METTQTKRVALYIRVSTQEQALEGHSIQAQEQNGRQFAERMGYEVVEVYADEGISGKSTKNRFAYQRMMKDARNHRFDLLVIWKLTRLGRNMLDVLQTVEELLRYDVGLHSISEQFDVTTSTGKLMLQLLGSFGEFERNQIAENVQMSMQSLVKDKKRYAGGRRLGYVSGIDTNGQKQLVIEPEEAKIVRLIYAKYLGGAGYRAIANFLNRQGYQTVKKNAFSTTAVKDILRNKIYAGYLEYARYINWETKRRKGKNPKPILVKGTHEPIISEEDYQKVQERLALEGKQPKWNHTGENVLTGLLRCPECGAPMAASNVTNTLKDGTKKRIRYYSCSVFRNKGASVCHANSIRAEQAETFVADRLKEIVQLPEVLPRLVAALNEEIVRQSQPLEQELVVLLERKEELKTKIEKWEAALEDSPELFPMLKDRLDELTEKRRQLHIRENEILGIFQQQGEPIQVKDVQRILTSLDRFLTQSEKKQVKALYRTFIEKITFDPKQKEILEITMKFTPAVVQQLNEQYQIAVSKTKDTAIFVLKTPFTLTI

SEQ ID NO: 16101 - protein, 457 aa, synthetic construct
MRVACYDRTSVYEEAKISNDAQYDAVKEYVLEKYEQVPQRFSDKGESGGKADRPAFRQLRAWVCASEEEGVIYVWRYDRLARQAKIALEFIELCQQHQVQVYSISEPLPAAFSHASTNKLFVQLLFTFAEQQRNVIIENVRAGLAYKKQQRQYLSSAVPYGYRLVNGKIQQEAHEAKVVCHIFQLYLTKKYGYKKLCQQLTQQKFFFRERPFQPYHIYSILKNPLYYGEIKGGSLGKYLGTFEPILSKTIFLQAQEIRQSRCTAKKDTYPYLLRQKIRCPFCGRHLSSKYQWNTKKTKTLHYYHCTDRSCQGIFLRAERVESEVLEKIQAFFQHEGVYQALIAQLTQQLAEKRKDEKRKVIQQKKQEAQWIKAFEEGNCSLEELKQQLQALQKPRSTSSFLSLQQCEAKVKEWLQLKDLSSRQLLCDHVCRIEVTKEKTVCGIYFRQLTQNILEGNE

SEQ ID NO: 16102 - protein, 545 aa, synthetic construct
METTPTKRVALYIRVSTQEQALEGHSIQAQEQNGRQFAERMGYEVVEVYADEGISGKSIKNRFAYQRMMNDARNHCFDLLVIWKLTRLGRNMLDVLQTVEELLRYDVGLHSISEQFDVTTSTGKLMLQLLGSFGEFERNQIAENVQMSMQSLVKDKKRYAGGRRLGYVSGIDANGQKQLVIEPEEAKIVRLIYAKYLGGAGYRAIANFLNRQGYQTVKQNAFSTTAVKDILRNKIYAGYLEYARYINWETKRRKGKNPKPILVKGTHEPIISEEDYQKVQERLSLEGKHPKWNHTGENVLTGLLRCPECGAPMAASNVTNTLKDGTKKRIRYYSCSVFRNKGASVCHANSIRAEQAETFVADRLKEIVQLPEVLPRLVAALNEEIVRQSQPLEQELVVLLERKEELKTKIEKWEAALEDSPELFPMLKDRLDELTEKRRQLHIRENEILGIFQQQGEPIQVKDVQRILTSLDRFLTQSEKKQVKALYRTFIEKITFDPKQREILEITMKFTPAVVQQLNEQYQIAVSKTKDTAIFVLKTPFTLTI

SEQ ID NO: 16103 - protein, 457 aa, synthetic construct
MRVACYDRTSVYEEAKISNDAQYDSVKEYVLEKYEQIPQRFSDKGESGGKADRPAFRQLRAWVCASEEEGVIYVWRYDRLARQAKIALEFIELCQQHQVQVYSISEPLPASFSHASTNKLFVQLLFTFAEQQRNVIIENVRAGLAYKKQQRQYLSSAVPYGYRLVNGKIQQEVHEARTVRYIFQLYLTKKYGYKKLCQRLTQQKLFFRERPFQPYHIYSILKNPLYYGEIKGGSLGKYLGTFEPILSKTTFLQVQEIRQSRRTAKKDTYPYLLRQKIKCPFCGRHLSSKYQWNTKKTKTLHYYHCTDRSCQGIFLRAERVESEVLEKIQAFFQHEGVYQALIAQLTQQLAEKRKDEKHKVIQQKKQEAQWLKAFEEGNCSLEELKQQLQALQKPRSTSSFLSLQQCEAKVKEWLQLKDLSSRQLLCDHVCRIEVTKEKTVCGIYFRQLTQNILEGNE

SEQ ID NO: 16104 - protein, 545 aa, synthetic construct
METIQTKRVALYIRVSTQEQAIDGHSIQAQEQNGRQFAERMGYEVVEVYADEGISGKSTKNRFAYQRMMNDARNHRFDLLVIWKLTRLGRNMLDVLQTVEELLRYDVGLHSISEQFDVTTSTGKLMLQLLGSFGEFERNQIAENVQMSMQSLVKDKKRYAGGRRLGYVSGIDANGQKQLVIEPEEAKIVRLIYAKYLGGAGYRAIANFLNRQGYQTVKKNAFSTTAVKDILRNKIYAGYLEYARYINWETKRRKGKNPKPILVKGTHEPIISEEDYQKVQERLALEGKQPKWNHTGENVLTGLLRCPECGSPMAASNVTNTLKDGTKKRIRYYSCSVFRNKGASVCHANSIRAEQAETFVADRLKEIVQLPEVLPRLVAALNEEIVRQSQPLEQELVVLLERKEELKTKIEKWEVALEDSPELFPMLKDRLDELTEKRRQLHIRENEILGIFQQQGEPIQVKDVQRILTSLDRFLAQSEKKQIKALYRTFIEKITFDPNHKEMLEITMKFTPAVVQQLNEQYQIAVSKTKDTAIFVLKTPFTLTI

SEQ ID NO: 16105 - protein, 545 aa, synthetic construct
METRPTKRVALYIRVSTQEQALEGHSIQAQEQNGRQFAERMGYEVVEVYADEGISGKSTKNRFAYQRMMNDARNHRFDLLVIWKLTRLGRNMLDVLQTVEELLRYDVGLHSISEQFDVTTSTGKLMLQLLGSFGEFERNQIAENVQMSMQSLVKDKKRYAGGRRLGYVSGIDTNGQKQLVIEPEEAKIVRLIYAKYLGGAGYRAIANFLNRQGYQTVKKNAFSTTAVKDILRNKIYAGYLEYARYINWETKRRKGKNPKPILVKGTHEPIISEEDYQKVQERLALEGKQPKWNHTGENVLTGLLRCPECGAPMAASNVTNTLKDGTKKRIRYYSCSVFRNKGASVCHANSIRAEQAETFVADRLKEIVQLPEVLPRLVAALNEEIARQSQPLEQELVVLLERKEELKTKIEKWEVALEDSPELFPMLKDRLDELTEKRRQLHIRENEILGIFQQQGEPIQVKDVQRILTSLDRFLAQSEKKQVKALYRTFIEKITFDPKQKEILEITMKFTPAVVQQLNEQYQIAVSKTKDTAIFVLKTPFTLTI

SEQ ID NO: 16106 - protein, 456 aa, synthetic construct
MGKVRIIPAHQQKGNSVHHQRNSQPFEKLRVAAYCRVSTDYDEQASSYETQVAHYKELIQKEPTWEFAGIYADDGISGTNTKKREQFNKMIAACKAGKIDLIVTKSISRFARNTIDCLKYIRDLKAINVAIFFEKENINTMDAKGEVLITIMASLAQQESESLSQNVKMGIQYRYQQGKVFVNHNHFLGYTKDAQGNLVIEPEEAKVIKRIFYSYLNGMTMKQIADSLKADGILTGGKTKNWRSSSVAKILKNEKYMGDALLQKTYTVDFLNKKRVKNEGIMPQYYVENDHPAIIPKSVFMQVQQIIKQRRNGITTKNGKHRRLNGKYCFSQKLFCGKCGDILQRNMWYRPEKVAVWRCASRIRRSKIGRRCMIRNVKEPLLKEATIEAFNQLIEGHELANKQIKANIMKVIVNSKGPTLDQIDQQLEEVQMKLIQAANQHQDCDALTQQIMDLRK

SEQ ID NO: 16107 - protein, 553 aa, synthetic construct
MSTITKIQSYHRDAKQLRVAAYCRVSTDNVEQLESLENQREHYQKYISNQPNWQLAKIYYDEGISGTKLTKRDALKELLADCHNHRIDLVITKSISRLSRNTTDCLRIVRELQQLNIPIIFEKEHINTGAMASELFLSILSSIAQDESHSTAGNLRWSIRQRFASGEFRVSSAPYGYSIEDGNLVIDSVEAGVVREIFQQFLSGMSASQIARKLNHCYVATKRGGQWRSNTVINILRNCNYTGDMLCQKTYRDDQYHRHFNQGELTQYLIEDHHPSLVNHETFNRVQGLLTEAVQKRHIETGSHKYQQHYLFSGKITCGNCGTIFKRQTRPNKIYWACQKHLKSTKQCPIKAISETSLETAFCNMMNKLIYSRKFLLQPLLENLRVQANSDTNGQLSLLVAQIKANDHKAETLTELMQSGFLDKAIYVNQTAKLEQDTCQCREKIKQFNSNNTDSANNFENVRALLHWCQQGQKLSSFNKAPFQDFVQQIVVNGPNNVVFKLKCGLRLTEKLTKAAGLDENFYRGVIRQRFNEPIRQAEYLYSIIESEGDLIG

SEQ ID NO: 16108 - protein, 586 aa, synthetic construct
MQEVEVIKAKNVLARQARGKAIERLRVAAYCRVSTDSEDQLNSYKSQVQYYTDMIKKNKEWVLADIYADEAITGTQVTKREDFQRMINDCMNGEIDMVFTKSISRFARNTLDTLKYVRMLKERNIAVYFEDEKINTLTMDGELLLVVLSSVAQQEVENISANVKKGLKMKMKRGELVGFQGCIGYDYHPEDKTITVNQEEAEIVRYIFNRYVDGAGGSVIGQELESLGYKTKYGSSTWAPSTVIGIIKNEKYKGDILLGKTFTVDPISKRRLENMGEEDKFYMKDHHEPIISEEVFEKAQEILNRRNKNRTTVGSGKREKYSRKYAFSCMLECGFCGGTLTRRNWHSGSKYSKVIWQCVTATKKGKKFCKHSKGIPETAIEEAFVESYRLLCDDNKDVLEEFLQRMDDTLSSSVVSKQLAKAEKEIDALEKKKSKLVDMRLEEIIDKETYESKYADLVSKQEQLVEERQKLQETSDNEKDIKKRLKEFKKTLEQNEVLDKFDRYVFESIVEKVIVGGLDENGNVDPAQLTFVYKTGLKNSVDGAKFKTQRKNARGRHRTNELCSHDSNEVDKMCSDSSNDTCGNCS

SEQ ID NO: 16109 - protein, 452 aa, synthetic construct
MKAAIYIRVSTQEQVENYSIQAQTEKLTALCRSKDWDVYDIFIDGGYSGSNMNRPALNEMLSKLHEIDAVVVYRLDRLSRSQRDTITLIEEYFLKNNVEFVSLSETLDTSSPFGRAMIGILSVFAQLERETIRDRMVMGKIKRIEAGLPLTTAKGRTFGYDVIDTKLYINEEEAKQLRLIYDIFEEEQSITFLQKRLKKLGFKVRTYNRYNNWLTNDLYCGYVSYKDKVHVKGIHEPIISEEQFYRVQEIFTRMGKNPNMNRDSASLLNNLVVCGKCGLGFVHRRKDTVSRGKKYHYRYYSCKTYKHTHELEKCGNKIWRADKLEELIIDRVNNYSFASRNVDKEDELDYLNEKLKIEHAKKKRLFDLYINGSYEVSELDSMMNDIDAQINYYEAQIEANEELKKNKEIQENLADLATVDFDSLEFREKQLYLKSLINKIYIDDEQVTIEWL

SEQ ID NO: 16110 - protein, 452 aa, synthetic construct
MKAAIYIRVSTQEQVENYSIQAQTEKLTALCRSKDWDVYDTFIDGGYSGSNMNRPALNEMLSKLHEIDAVVVYRLDRLSRSQKDTITLIEEYFLKNNVEFVSLSETLDTSSPFGRAMIGILSVFAQLERETIRDRMVMGKIKRIEAGLPLTTAKGRTFGYDVIDTKLYINEEEAKQLRLIYDIFEEEQSITFLQKRLKKLGFKVRTYNRYNNWLTNDLYCGYVSYKDKVHVKGIHEPIISEEQFYRVQEIFSRMGKNPNMNKESASLLNNLVVCSKCGLGFVHRRKDTVSRGKKYHYRYYSCKTYKHTHELEKCGNKIWRADKLEELIIDRVNNYSFASRNVDKEDELDYLNEKLKIEHAKKKRLFDLYINGSYEVSELDAMMADIDAQINYYEAQIEANEELKKNKKIQENLADLATVDFDSLEFREKQLYLKSLINKIYIDDEQVTIEWL

SEQ ID NO: 16111 - protein, 521 aa, synthetic construct
MKKITKIEELPKSQLSENKLRVAAYARVSTDSDDQLVSLKAQREHYENYIKSNPEWEFAGLYYDEGISGTKKEKRPELLRMIRDCESNRIDFIITKSISRFARNTTDCLELVRHLMDIGVYIYFEKENLNTGDMESELMLSILSGFAAEESASISQNTTWSISKKFQNGSYIIGTPPYGYANINGEMVIVPEEAEIIKRIFAECLSGKGGSVIAKGLNRDKIPARRGNHWSSGTVIDMLRNEKYKGDVLFQKTYTDSNFNRHINNGEKDQFYCKDHHEPIINREVFSKAQKLITQRAKSMSKTANKKAYQNRYVLSGRILCGECGSKFKRRTNYSVGRSYIAWSCKGHIEDKDSCSMLFIRDGEIKATFSTMMNKLAFSKKLILKPLYNSINKIDEECDLARIDAIDKRMEQLTEERNTLIGLMTKGFLEPALFNKERNVLDKEIKNLTAEKTNLVMSFTSGSSQVDEVKALLDYVSADKFDGNYTDEAFEKFVENIIANSRDELTFKMKCGLSLIEKVVR

SEQ ID NO: 16112 - protein, 520 aa, synthetic construct
MAEKNITVIPARKRVGSTAAKEKVKKLRVAAYCRVSTETEEQNSSYEVQVAHYTEFIKKNAEWEFAGIFADDGISGTNTKKREEFNRMIDECMEGNIDLVITKSISRFARNTLDCLKYIRQLKDKNIAVFFEKENINTMDAKGEVLLTIMASLAQQESQSLSQNVKLGLQYRYQQGKVQVNHNRFMGYTKDEEGNLIIVPEEAEIIKRIYREYLEGKSLAGIGRDLEKDGILTAAGKPRWRPETIKKILMNEKYIGDALLQKTFTVDFLTKKRVKNEGHVPQYYVENSHEAIIPKELFLQAQEELHRRNNIYTGADKNKRLYSSKYALSTITFCGDCGDIYRRVYWNVHGRKEFVWRCVTRIEQGPETCKNRTVKEGDLYDAVMTAINKLLAGGDNMIRTLEENIHAVIGDTTEYKISEINTLLEEKQKEVINLANKGKDYEFLADEIDKLREERQSLLVEDASLSGENERINELIEIIRKNKYRTLLYDDTLVRKLIQNVTVYEDHFVISFKSGIEIEV

SEQ ID NO: 16113 - protein, 540 aa, synthetic construct
MKQPYNTTIYNTALYMRLSRDDESYGDSVSIETQRTILQQYAREQGLHVVGEYVDDGWSGTNFERPSFQRMMDDVEAGKVNCIVTKDLSRFGREHVMMDYYLEFLFPEKRVRYIAVAENEDTEKGLSDFVPFKNLFNEWFAKDTSRKVKTAFKAKFAAGQRISAYAPLGYKKHPEIKNKLIIDEETRWIVEKIFDLAIHGKGAASITRILIAEKVPTPGFINFQRDGTFANIYAGAPEEKGYAWTIAQVKSIMKDETYIGHTIHYRETNISFKNKRRIRKPQSEWVRVENTQEPIISEQVFRQVQEQIASRRRERKNGTTQIFAGLIKCADCGWSLAYGENRQNSKPYGYYHCSKNGQGTRQCSMHYIRYDVLYAYVLSRLQYWSALVQHDEEQLLKRLLNANDKGQAAARKKQAAELKKAEKRKAEVDTLFARMYEDWAAGRITEYNFNMLSGKYQSEQAELEEKIEQLQSAIAAESQSAADAEKWIALMKECVNPTELTAELLNTLIEKILVHEAVKNEDGSREQEVEIFYRFIGKID

SEQ ID NO: 16114 - protein, 520 aa, synthetic construct
MKNKSVTMIPATKRVGTLKVDAEEKPKLRVAAYCRVSTDSDEQASSYEVQVEHYANFINSNSEWELAGIYADDGISGTSTKNREEFNRLIQDCMENKVDRIITKSISRFARNTLDCLKYIRQLKEKNIPVFFEKENIDTMDSKGEIMLTIMASLAQQESQSLSQNVKLGLQYRYQQGEITINHNRFLGYTKDEDGHLIIEPTEAEVVKRIFKEYLEGSSLIQIARNLEADRILTGAGNKNWAGTTVKGILVNEKYMGDALLAKTHTVDFLTKKRVKNNGIVPQYYVENSHEPIIPKTLFLQVQEEITRRANLKNKKGSITYSSKYALSGITYCGKCGEIYRRLHWNNRGKKSIVWRCYSRLDKTKDCDARTILEEDLKQVVVDGINRVFGDEGRIKDILNSNIQKMLKVDNTLEVETIDSQLQVLQQQLLEQSSKNQDVTDIGEQIIQLKEQKQNILIGKAVNDNSKQRMDEMLEFIDQNGHGGLEYDEVLVRRLVEQVQVYDEHITIKFKSGIEIEVQN

SEQ ID NO: 16115 - protein, 558 aa, synthetic construct
MTKLYSYIRFSSMRQSDGSSYERQIRMAKEIADRYNLELVNDYQDLGVSAFKGANSKTGALSRFLDEIGRSIPVGSWLFIENLDRLSRQDIISAQELFLSIIRRGITIVTGMDNKIYSIETVTANPMDLMFSILLFIRGNEESQTKRNRTNSSALLKIKAHQQNPQNPAVAIEEIGKNMWWTDTTSGRVLPHPVYFPVLQKIVQLRQEGHSAGVILDYLNEHHEPPAPTSNKKHGKWSRAMVSRLFATKALIGVKTVNVDGVEYELRDYYPRVLSDSEFYFLRKNIVKKAWDYSHDKEKVIPLLSGIGVLRCVHCGATMVKQTAANGKREQYRYCCDGRKSGRTDCPYPNWGFRAVTLEGAVLQLLADKIWIAEDKTNPIPEIQVKIDEISRKIDNLINLSAMMGATKELANQITDLNSQREALHEEIRLFEREMYSVDSQGWDKLAQFDLSDVQNEERLKVRMKIKGALHEIECSRIDSKKNLFVLVYLDGLRQRLVIENNRGLKKGQIFVDLKTINDRQILESAGMVLHPCIEMIIDADWKAPEEIHGLLSEEFGI

SEQ ID NO: 16116 - protein, 547 aa, synthetic construct
MKLLATYIRWSTKEQDSGDSLRRQTNLIDAFYSKHKNDYYLLPAHRYVDKGKSGFHQQHKAQGSDFRRMFENVMSGVIPEGSLIVVENFDRFSRADIDTAIDDVRQILRKGVSILTLGDGELYDKSALTDPVKLIKHIIIAERAHQESLVKQKRIAQVWNHKTQLARELKKPMGKQAPGWLELSEDCSHYIVDEDKASLVNIIYDKRLSGMSMFAICKWLNEQGYPTINQRKVRISKTKKPDGNWSALSVKHILTSRSVLGYLPAKISTEDRKTVLREEIEGFYPQIVTDSKFYAVQQLLEETGKGKTSSGEHWLYVNILKGLIRCKCGLVMTPTGIRKPVYQGTYRCNGNKESRCSYGTVSRKLLDTQLCSRLFSKLSQLHDEATDTAKLDELQRRLNTVDSELEKLTETLIQLPNITQIQEALRVKQGEKDELIVQLSREKARVKSVSSLNLSGLDMESVEGRTEAQIIIKRLVKEIVVSGNEKLVDIYLHNGNMIRGFPLDGKDDHTLTLEEATDEMQSLDDMLIFGEPVTRIYPAGDMEEVDA

SEQ ID NO: 16117 - protein, 561 aa, synthetic construct
MKKKKAYVYTRVSTSMQIDGYSLDAQEERIKQYAKAYDIEIIKTYKDAGKSGTSISGRNEFIAMLNDIEAEKDKVDYVMVFKLSRFGRNAADVLQSLQIMENHNVNLICVDDSLDSSKDSGKLVITILSAVAEMERENILSQTMEGRKQKAREGKWNGGFAPIGYSLDNGELFVNEDEAKAVRMIFDLYANSDMGANGVSKYLVSLGINKPIRQNGKNPYFSASLIRQILDNPVYNGKIAYGRRKTNKDKNTGKIKLEKSDHYIIAQGNHEPLIDDELWNTVQEKRKSQAKKYEKINRGKDERVHILSNLIKCPYCSAGLYGNKSRKRNKNKEGEHYKDYYYYGCKHRQMMNGHKCTFNKQIRAELIEKEVETIITQIVSNPTFAKKIEEKINIQIDTKEIDEVINKHLAKIRQLTGTKASLINQIDSLNFEDKHYDRKYTDLNLRLDAIYDQLEYAEMQLNDSRKRKEAILEEKITSDNIYKILVNFNSLYTVLSDIDKKRLLNELIEEIQIYDEKPKNGTWIKSVVFKLPLIDYDIDFSLDNKDNVESVVLMTRVAPTK

SEQ ID NO: 16118 - protein, 455 aa, synthetic construct
MEMVRAALYIRVSTEEQVREGYSVDAQKENLIRYAKFKGYTVVDIYADEGITARKKYTNRKEFMRLLDDVEADKIDIILFIKLDRWFRNVGDYYKVQEILERNGVGWTATTENYDTTTANGRLYVNIRLAVAQDESDRTSERIKFVFDKKIKDGEAIWGKPPFGYKIKNKILVKDEEVEGFINECFESYKVLRSINAVAKTMNQKHNKKISYTTYSRFLRKNLDFYKGKYKDNENYFPPYLSEEDYEEILAINKARSGRFGGKTYNYIFVGLLACACCGYNMGSAGYTTNRRTNQKYRYYKCGRSTVKVCENNLRIQEKKIENYLLENIEDEIRKYKVVYKIEKSEPISRPVAAKNNIKNKINRLRKLYLEEVIELEDYKKEYEVLQKQLDQVEEEIKTHKRFQKKDFSALDKLLQSDFEEMYNNLDNLQKRALWQSVISKIYVKGSEIVKIEFK

SEQ ID NO: 16119 - protein, 556 aa, synthetic construct
MAMMNEMEYRTIGSALAGGYRAAVYCRLSKDDDLQGESASIANQRDMLKKYCEKQGWEVVAVYQDDGFTGLNMERPDLQRMLRAIERRQINLVITKDLSRLGRNYLQTGHLIEDFFPRNGVRYIAMNDGIDTLRDNNDIAPFKNILNEMYSKDISKKVHSSYLLKAQKGQFTGCLAPFGYRKDPEDKNHLLIDEETAPIVRLIFGYALNGHGPNYIRRRLEEEKIPCPTWWNRERGLRNTRTKWEKKDPENGRYMWDFSVIKDLLMNPVYTGAIASQKKDYRFKIGTIGEKKPEDWIVVEGQHEPLIDRMSFDIVQNKLKSRQRPGQTNEISLFAGLIKCGECGKSLTVRYTNAKHPQQIYSCKTYNAFGKNHCTQHRIDYDTLYSHVLRKIRECARAALMDGEAVADRLTNTCEAEQREQREAMERSLTRDEERIEVLDKMVMRLYEDMIAGRISEQNFNTMLERTQTEQTELKTKVSEGRKRLSDEVQLANDAKQWVEAIQEYANITELDAATLNRLIKEIVVHERIDEDKTRHISIEIHFNLKPIPEVEQVTA

SEQ ID NO: 16120 - protein, 570 aa, synthetic construct
MRVSSEQQLSGDGLDRQESMLIRYFDDNASCYDFDPNYELIVDRGVSAFKGHHQRESAGLGGFFKKVRNGEVEKGSVLCVESLDRFSRENPFKCVEYISILDSYQIELHDVDKKLKIGRKYPNSLSFAVMIAERSYEESRLKSVRIQKGWDKRRKMAKEEGQYMIKNCPKWIDVVNDRYVLNENHIVIREIFDLYLSGIGSYTIAVMLNRDNKTIDGMKWNSTKICHVLRNRRCKGEYTSNRVIRNFDDDTVTSTFEILNIYPRIVSDDEFHEVSTRLEKFNYTGRIRHDLKRTVFNSLLKCELCGSALGVSSTSGYTYIKCDNARANSGCTGVLMAYMPFEKAILSHIKDIDISRVINIDSTISNIDILKTEIVELESYIQSFTAGIENLKQQGRLPTFDMLDGKAQAEERLQDVKKKLAAERDTANVSNLEFSSDIHKLENIIERSRLEVELRKVIKRIAVKANKTYITADISYYNDDNIKHVLLINKKKTTIEVMGEIVQQDGWRTYSFSEGGSLVFRVKSNGDIWTLSAAKNKSISEIQKYMTMMVGREPIDFDFYINEDFIEWVE

SEQ ID NO: 16121 - protein, 615 aa, synthetic construct
MTFTPLLASPTLSPQPVAPDPLSVIGEMLTPKVAVLYLRVSTARQAQRGDEKEGFSIPAQREANRKKAQSMGAMVAKEFVDRGESAKTANRPALQEMLEYIREHSVDYVVVHKVDRLARNREDDVEIMKQLTAANVALISATESIDQSPSGALLHGIMSSIAEFYSRNLAHEVTKGMTQKVQKGGTPGRAPLGYLNVREFDSDGRESRTVRPDADRAPLITWAFHRYTEPSISLSQLALELTQRGLTTRRTPQVPSRALTDTDLHKILTNSYYLGLVSFSGATYAGKHEPLIDQETWDKVQDALQSRRSGERRRRHDHYLKSTVYCGNCHNRLIVQMTRSKSGEIYPYFYCSARQANRNDCTQKAVLIHVVEEKIVEEYKKSLRLNRIARADLERLFHDELVATRGDAERQRAQIKTDLERLEREQLRLLQAHYADAISLDLFKKEQDRIRAERTIAERDEARLTQDVADVEHAIGLTLDVSAECASAYGWAPDRVKRLFNQVFLARVLVHADETITVELDEPFATIASTTMQLATHEKSTTRKSGALTLTSFLEAEVGAVPAFFSGQGFSNDTLVPLEGLEPPTCSLGRSRSSIELQRLAEPVYPPPAAARRRP

SEQ ID NO: 16122 - protein, 579 aa, synthetic construct
MIHLAIPYRRFSSDKQTGNTSLTRQQDLVTKWLSKNPEYKTLPQFDYVDEAVSGYHGDNIKFGQLGEFISEVEKGTFTRYKSPILLIENFDRFGRLKPRKALGYITDILEAGVSICLLDRGEVITPDKVDDDFFLMQLVMTASRAHGESKRKSDNVTKAWQIKAEGIADGATLTRNVPFWINPDNRQLVIPERAKLVERIFKMRLESMSCYAIGKILNQEGIPVYTHRKVTPGKEYKKRRVAPCWHSANVSGLLSNKAVLGILPAQQVNKHNKHRQDTLRTDTPGYYPAVISATLFAAVQSLKDEKHGKKRVLSNINSIQIFKKMLRCVCGAYLDVTGCRSTYAGVFKCASARAGSTLCTKPSINRQKVEESLLTRLLPSLTRLDVNHELSNQIETLKSEIEGLDILIRKGWEDYENSDHPFYLSDGQALRISQNEKKREEKRSELAALNVTEQSSVYENISHLDLSDYTQRCEARVIIKRMISSITIDTDKGLLDVHLVNGNTITGFCIDSTSNKKAVFTEATDEEKQAELTAIIGERLPLVIPAGDPVGVAYEPMYLAPYWVQEEMEKEGQRPPAED

SEQ ID NO: 16123 - protein, 627 aa, synthetic construct
MLTFSSRPQIYSYQRFSNVEQAKGTSLDRQKELIEEVAKRYDLDLNHNFVMTDKGLSAYHGDHKKKGELGLFIKAVDTGMIAPGSVLIVESLDRLSREDVMTALGCFSELLKADITIITAMDEKTYTKDSLKDTGEILMSVLIMARANEESKAKEKRSVGFINKQLQNFYDGKKADVAGAIPFWISRIQSEDPKIKKGFYINDKREVIDLIIDLYFVKNKGLRSISKELLKRNISTPKGGEVWGVSTISSILNNEALFGRKRFILREKSKEKEEEIVLDDYFPAVMSKDDFESMQAIKKRKSGAGKGDKSKRGGLVYLLTDYGKKAVCAKCGRGIGSQPQRQKGHIRRRLHCYTHKEKGTCCKSIIQDYIEDAFLMSVARHIDYNLINKTVDPNQAILVSEKLEDIESQMDNIQELYIITKEKKRKASLLKRLEDLTQEKEHLKNKESSINQYSVSKEDINNFVQKVNDARNYENNEARLFIKDILLKSIKLLTVHMEKKKLEDFGYPNLFENSIVNVIDVEFYSGKTISIFVCCETNKTLFTRVSNDMTNLPFGSFRQQDLEYWNDNGGGELESLLRLTHNENQDSQEKYDELSIVDKAWLTSDFSESLLESMFDVLDSASAPQRK

SEQ ID NO: 16124 - protein, 650 aa, synthetic construct
MLHPYLRVSSDKQVESLSLTIQGDEALFEELAKKFNTTAGPKTYRDEGKSAYKGEHLKGALGELLVDIENNVIKDGDIIVLRHLDRLSRLDFDSSMTLFTNIINKGVQIYTVMDGRHYHNKKPNMERAIDNALVGFAFSTANEESLRKSWYTNKNASYRIKQFQDSDIPENGTAYDIGVGRTPFFVQVIDKVVQKSEHFDLMREIIELSLDGVGIGRCQAHLKKSGFDMSFSALGKLLRSEALFGTLKITLDGQVFELKNYYPAVCTEAEFYQIQGQKKNNTHERKRNKISNLAGIKRMFCGCGRAMSAGRDVQRNVEYYKCTKGTQLNNGMCYTPLRQDIVDKIVLGLIEHHLFEPAPVDTSTLLSLESEYEEKHKKFIVKQQFVFDNIDLFTDEIKQQLRDMESEIKNLRERISSERQKVLSADKEVQLSDYEEWQSNITNFVNGDNEEKQACRELIQRLVKRIEIDDRHMFTVTLIDDKQERAMLLNSRSKDKQRTRYFLPIRIVDVEYRAQIEEHQPELLAKYITEEMIDTYDIKTEDVDGNLKRLIHQPVYAVRDYEKEFFNLLQGHGILEWKRAYILKHTKATTTQWQAFKESDVSKYGWTKRDIEITTKSYTKQRKTIAYQQSLEEHDICNTLQCRSFTLLPD

SEQ ID NO: 16125 - protein, 544 aa, synthetic construct
MKTAYSYIRFSSSRQADGDSIRRQTELARSYADKNGLDLQDVSISDFGVSAFRGSNATEGALGAFLRLVDEQKIDSDCHLLVESFDRLSRQAVEDALALLMQVVNRGITLVTLSDSHEYKRGELDMTKLILSIVTMSRANEESEMKSQRTSAAWNKARLDAIEGKKAKNSRLPDWLSWNDDKTDFVVNQSAKEIIQRVFELSAGGSGIEIIARTLNDEGCRTFKKSKEWRSSGVSKLLRNRAVIGEFQFYKKDTQGKRSPIGEPIVDYYPRVITKPLFLAVQQGMDLRNKRGSGNRSGQFTNLFTGLIRCGECGAAVVTSSQTSKTPQGYLKCTLRCESQARMNYKYTEPQVLSALSSLQSVIEKYRSPISDETASLELDIRALSDKLSSLESLLDNAFTPRIAERLQEAELQLADAKALLSAEQLRVSSQQNREQIVLGLEPLESISDRRAFNSKLRTVIDRIEMIEHPHRKGSALVYFISDRPVMEQHFTKLKGAHGSGSEAYELHVDDVPTYLGRTSSKKPLEFIIDETEDILSFMPTQLV

SEQ ID NO: 16126 - protein, 506 aa, synthetic construct
MRSVITYLRYSSTIQGVEGADSTRRQNDLFKQWLKKNSDARIIASFSDEGLSGYKGKHLTGQFGDMLTRIEAGEFPEGTILLVEAIDRIGRLEHLETEALMNRILGNGIEIHTLQDGLIYTKDALADDLGISIIQRVKAYIAHQESKQKSFRVSQKWEQRAKLALAGEQRLTKMVPGWIDPETFKCNEHAETVRLIFKLLLDGESLHNIARHLQSKGIKSFSRRKDANGFSVHAVRTILRSETTIGTLPASQRNDRPAIPNYYEAAIDALTFSKAQEILDKNRKGRTPASNNPRTINIFKGLFRCECGATVHPTGVKNTYEGVYRCCRRFDGRCDIPQLKRKPFDKWMIENLLSMIVVGDDGESERKIAALQHEVEVVTARIKKATALLLEMDDITELKTQVKELNQKRTELQTTIDSMRRKASLTDKKLPQLKDIDLTTKAGRVECQLILSKHLESLTLGRGQVTVKLSNGTEIVVPTDPLPLTDGTAIFEIAEKDLLDIDVFQL

SEQ ID NO: 16127 - protein, 547 aa, synthetic construct
MKLLVTYIRWSTKEQDSGDSLRRQTNLIDAFYAKHKDEYYLLPAHRYVDKGKSGFHQQHKTQGSDFRRMFDNVMSGAIPAGSLIVVENFDRFSRADIDTAIDDVRQMLRKGVSILTLGDGELYDKSALTDPVKLIKHIIIAERAHQESLVKQKRIAQVWNHKTQLARELKKPMGKQAPGWLELSEDGSHYIVDEDKAALVNLIYDKRLSGMSMFAITKWLNEQGYPTINQRKVRISKTKRPDGNWSSLSVKHILTSRSVLGYLPAKISTEDRKTVLREEIEGFYPQIVTDSKFYAVQQLLKDTGKGKTSSGEHWLYVNILRGLVRCRCGLVMIPSGIRKPVYQGVYRCNARHEGRCNYGTVSRKLLDTQLCSRLFSKLSQLHDDATDTVKLDEIQRRINTVDSELEKLTETLIQLPNITQIQEALRVKQEEKDELIVQLSREKARVKSVSSLDLSGLDMASVEGRTEAQIIIKRLVKEIVVSGNEKLVDIYLHNGNMIRGFPLDGKDDHTLTLEEATDEMQSLDDMLIFGEPVTRIYPAGDMEEVDA

SEQ ID NO: 16128 - protein, 509 aa, synthetic construct
MKRVISYIRFSSEKQSRGDSLRRQTRMVNDWLSKNPEYYLDQDLSFRDLGKSAFSGKHLKGGLGDFLTAIEKGLVRAGDTLLIESLDRLSRQDVDRASELLRNILRSGVDVVTLSDNEHYTKESLKDPLALIKSILIMQRAYEESLRKSERVSAAWNRKKELISEGIKVSKRCPAWLRLNDDRRTFTIIPEKVEVVKRAFDLRLQGLSFWAITRALNDEGHLSLNQYNPKPQGWSDTAVKNLLRNRAVIGCFKPAGREEVRDYYPSIISESLFYRVQQLNTGQYGRASVSSNPLSVNLFRGIIKCSKCGATVVIGGYDSKRFGMYRCPNRSANRCSAKAISRKQTDATILYMLALCDRFEAENTDTIDSLKLQREDLQRKISKMAELAVELDDMTVITDKLREMKNALSKLDHDIEEETKRLKSITTGNLKDIDRTTKEGMVETQLLIKGVLKEIVLDTSKRRCKVTFHNGKAITLPITENPAQDITEAIQSLSEIAEKDLLDVDVFQL

SEQ ID NO: 16129 - protein, 508 aa, synthetic construct
MKKAIAYMRFSSPGQMSGDSLNRQRRLIAEWLKVNSDYYLDTITYEDLGLSAFKGKHAQSGAFSEFLDAIEHGYILPGTTLLVESLDRLSREKVGEAIERLKLILNHGIDVITLCDNTVYNIDSLNEPYSLIKAILIAQRANEESEIKSSRVKLSWKKKRQDALESGTIMTASCPRWLSLDDKRTAFVPDPDRVKTIELIFKLRMERRSLNAIAKYLNDHAVKNFSGKESAWGPSVIEKLLANKALIGICVPSYRARGKGISEIAGYYPRVISDDLFYAVQETRLAPFGISNSSKNPMLINLLRTVMKCEACGNTMIVHAVSGSLHGYYVCPMRRLHRCDKPSIKRDLVDYNIINELLFNCSKIQPVENKKDANETLELKIIELQMKINNLIVALSVAPEVTAIAEKIRLLDKELRRASVSLKTLKSKGVNSFSDFYAIDLTSKNGRELCRTLAYKTFEKIIINTDNKTCDIYFMNGIVFKHYPLMKVISAQQAISALKYMVDGEIYF

SEQ ID NO: 16130 - protein, 475 aa, synthetic construct
MKKVGIYIRVSTQEQAEEGYSIQAQKDRLISYCKAKDWNIVDIYVDGGYSGSNLDRPGIQKLIEDVNNGKLEVVLVYKLDRLSRAQKDTLYLIEDVFLKNNVDFVSMNESFDTSTPFGRAMIGILSVFAQLERETIKERSLMGRIERAKEGLFHGGGYAPIGYDYIDGKLLINEYEAMQVRKVYDLYLAGNGADKIAKIMHDKGYKHKYGDWSYTSSVRNVLDNPIYIGKITYCGLVCDGLHEPIISQEVFERVQAMRERKRRSYKRVYESNSLLAGLIFCGNCGARYFVRYISGKYKYYACYSRAKNHRHMIKDPNCKNKSWHIPELDKMVQDEVLKLAFDRKHLEKLLKRKQEQNSPATENTEMIQKQITSINKQIGRLMDLYQIESMPVEEISKRIEDLYNKKKALEKQLPDSKLNPKVVDQFTLDGVNAILDNIKLAWEYAGMEERRNILRSLIDRILIYDDKIKIEWSFI

SEQ ID NO: 16131 - protein, 526 aa, synthetic construct
MAKVTVIPSKINPITLTPVGQVSKRRVAAYARVSTDSDEQYSSYEAQVGYYTNFIKGKPNWEFVKVYADEGISGTSTKRGDAFNEMINSALNGNIDLIITKSISRFARNTLDTISITRQLKAKGIEVYFEKENLWSLDDKTEFLLTIMASIAQEESRSISQNITIGKRWGMKEGRVSFAYKNFLGYKKVDGKIVIDEEQAEIVRLIYRMFLKEGRTCSGIAEFLKNNGIPTPSGKNTNWTKNNIYSILTNEKYKGDALLQKTYTADYLEHRLVRNNGELPQYYVENNHPAIIEREIWEMVQTELLRRSLIGAAYSGGSVFVSKLICGDCGKPYGKKKWHSTDKYAREIYRCNAKYNKGQPQCQTPNLTEEDVKAKFITAYNLVMCDKKQVIEDTLAVIELLTGTDELDLEIAERQARIEEISKAVALMVRENARTVQDQLAFAKRYEELTQQYELEKDALDKAVKEKAYKTGKATKMRAYLEAMKQADDYLEEWSVEAWVLMVETATVNRDKTITFKFVNGKEVRV

SEQ ID NO: 16132 - protein, 623 aa, synthetic construct
MKEVLRVAIYVRVSTEEQATEGYSITAQLRTLRQYASLYEYEIVNEYVDEGLSGKNIQGRPALQRLIADAEKELFDIVLVWKISRLSRNMLDTLVLLDKFENHNIKFVSYSENFDTSTPIGRLVVQLMASIAEMERNTLSENVKLGMKQRALEGSWNGGIVYGYDSNDKELIVNEDEANVVQLIFKLYAEGKGLKAVTNYLNKAGYRTKRGKHFSINGIATILDNPLYRGKIRWLQVENWDKKRRKGKNPNYILTDGNHEAIISEELWNIVQNRRKSRSFKQRQSHEPFLLSSILRCPSCGQGMVPSITTSTRKNGTKVKHRYYVCSNFHNKGSSACKANSIKAFDAEDTVIKRIEGFINNHDGFIQAIQKINSYSIESLNNLRTELDKVEYELNETNKLQEKYLEAFEQNLFPATILQERLQKVANDKAKLEQKKNELSTKLNSSDSKVIQPELVRILLEQFLDCYKSSTREKKKQLLQLLLAEIQIKQRTDSRSRTIDTIKIEFDFSVYNQTKTFTLIHMLNYKTNNDYSQTLPASDNKVPPYLQLFLPLFVVRFPPINPKRPIHLLQQDQPHELMREGHLRKGELFVRSLEDGVAEAEGAADDEGYLALSISGESIHCIG

SEQ ID NO: 16133 - protein, 490 aa, synthetic construct
MPKAVGYVRVSTDKQLDNTSIEKQIEEIEKYCEREGLTLVQIYNEGAKSAENIRYRSVFKQMYADVLDKESNIDYVIVFKADRISRDNLESLYIFKRLTQAKKHLICLADNIDTRDPKAKLLYQIMSLVSELERDMIKLRTTSGMERRATEGKHNGGKVFGYTTKNKELKVVPEEAKVVKFIFKKYAIDQWGYRKIASHLNVLGKTTKNNKHWSITAVKTILTNRIYIGDIKWRNEYRKGKHSAIIDMELWEQTQKMLKVNSHIQEKVHPGNYPLSGLIKCPECGAPMVQGNSSPKYKYYQCSKNKNSGKKACSSNLVKKEYAEHYVYEQVFYSLKSINIVEPLLKMLHSFAMSEIEPLEEKIKAYQLELRQLKEKRKELISWKLKDIITEVILKEEMHDIQIQENLTLKHIDNLQQQIRLRDKTHLSSIIKNSFQDFKTFFDLIEDEDKKKILRSLIKEIHVNPGEKTKDRTIKEIIYAFDLEYLSQVI

SEQ ID NO: 16134 - protein, 502 aa, synthetic construct
MSKIAVIYARYSSDRQREESIEGQIRECKAYAKKNGITVIRVYCDRAMTGKTDKRPEFQAMIKDAKKQDFDYVLVYKLNRFARSRYDSARYKNVLKQHGIRVISAMENIAEDSSGILLESVIEGLAEYYSAELAENVLRGMTENALECKWPGGIVPLGFKLDKDKHLVIDDDKAFIVREIFQSIIDGKRTSTIIDELNARHLKTAAGKPFRKNSLEKILKNERYTGTFVWKDIHKENAIPAIITNDMFNAVQKILKNRKKTRSRVCSDNYLISGRLFCGLCHEKMIGMSGRSVTGLPYYYYACSNRRNRIGKCHTKNIRADKLEELVVDTTINILSDDTAIEYIAKQAIAAQEENRAQSSIPAIKEEIKELSKKLKNCVQAVENGIMSQTIAENIPMYEKRLVELNSELSDELEKDNDLKVDEDMIRFFFERLVQRTKKETKFKSLLLSTMVRCVVIYDDYIEIQYNYKKELPILTNPVRINSSILFAVVGDDRIELPTSCL

SEQ ID NO: 16135 - protein, 614 aa, synthetic construct
MPQATTPKAYSYIRFSTPEQQFGDSERRQTELSQKYAEAHGLTLDENLKYRDLGVSAFDKSNVTSGQLGAFLSAVDSGAVEPGSYLLVESLDRLSRAKITDAFEIFMRIINRGVRIVTLADGMEYSKEKANQQFTDLIISIAVMSRAHEESQTKSKRLKEAWQAKRGRIGDTKLTEMAPAWLKLNKDRTAYSLMPDRVELVQRMFQWSKDGVGSETIARRLNQQGLPTWGTRKADQWHASYIKKVLDNRAVLGEFQPHVLVNGKRVPEGDPAPDYFPRIISDEDFVLAKTARQSRRTNSVGRKGQTFSNVFSGILRCGYCNGSMVYVNKGHSGPRAKLLVCARAKAGKGCHYVPWEYPQFERSVLTYCKGLDFDAFLQTRDTVKSELAALSARIAVLESSITDNEQKQANILEAIESGAKFQQFEARMVELEQNRMKFNAELDETRQKYDVRANAKVDVTAVRASIDELLQRLSELEGGELYDVRARLSQHIKRLIVRIVMYPGGYIEKPFFVERLRAHLVSKGTDTKAADEYIASRLKLTPNVSERFFTMISRSDAVRTIRPELDNPEILHLQPGEGGQGLAAFAETIGSMLEKLSEIAPKSSGSAEALPDNR

SEQ ID NO: 16136 - protein, 632 aa, synthetic construct
MIVDLYIRVSTDDQADKGYSQRDQNERLRKYCELNNFTVGQVIYEDHSAKNFERPEWIKYLNYLKKRSTKTNIVLFTKWDRFSRNAGDAYQMIGLLAKLGVEPQAIEQPLDLSVPENKMMLAIYLATPEIENDRRALNTYNGMRRAKKEGRLMGKAPYGYLNKSREDGSKYIALKEPEASNMRWAFNEIAKGVMAISQIREKMNERGGKRLEKTAFYMALRNPMYCGRIFIEKNKEEEAYFVQGQHEALITTTVFDQVQFILDGKKEKKITNTKFISDENLPLRGFLICPNCGGNITGSASKGRRERYYYYHCQPPCRFRHRADAANLIFLNGLKDLEIKESLREYVKKKFLENYKASLVNPVSEKKRISKEIDTLNNKISIARDKLFSEIIDDDEYLEIKKDCREQIEKLEDKLSKDYEQTDLKNISKDKLLEKAFHGLINIGFLYDSGDIETKREIIGSIFPEKLVFDGKNYRTTKMDILARHIFQIKSDLDKNKKRKSEQISCFSCFVPSAGIEPARLAALEFESSASTNSANWATRNCECKYRHIFVSEKSFFKKLKNNFLPVKSQLDVRWKFPIHFIVKTNMMAQVGEVCLLRLKLLDKFQNLGQNKMCRMGAILSQAVNDKIIQIS

SEQ ID NO: 16137 - protein, 555 aa, synthetic construct
MLTTADKVRRVALYVRVSTEEQAEHGYSIDAQLKTLTDYCKLYNHEIYREYVDRGISGKSMDNRFELQQMLQDAKNNLFDTVLVWKFNRLARNAEHLSQIVNILNKSNVAFMSMTEQFDTSTSHGKFMLHIMGAVGQLERDTIVDNVKMGHKQRARTGKHNGKLPLGYRSVEDIVNGVRSRESKVEIVPEEEVIILKIFERFATGRGFKSIANELNHEGYVTRSGGAFSISGVKEILDNPFFFGRIRYGRYENWSEKRRKGLNAKLETFDGIHPAIVSEELWNKVQYLRKKKSVVSLKRFDGEFLLTWLIRCPKCGAPMVANRTQNRKKDGSKVMRLYYSCSNFRNKGSKVCSANSIRKLEAENYVIERLKEVLAKPQILKAIVKNINERKTKRVKPLQQELEHLLVKITELEGKRRKYFDMYEMNGLDKTMFSKRLDDIGEELEGLHVKKAELAAEMKDDHADPVSYEVVRALLNKFDKLLDSSSLDQRKTLMHLVIKQITIKDSKTIDQIDMNFDENTVHHFLNADPSVTHAEGSFAVQMKREIQGRSISISI

SEQ ID NO: 16138 - protein, 516 aa, synthetic construct
MESTVALYIRVSTDEQVDGYSIDGQMDMLKAYCRQHNLTIYKSYIDAGKSAKSIQGRPLLQQLLVDAQQGCFQNVLVWKLNRLSRNHSDLLQMVKIFNKSNVGIKSVTEDINTDTTMGSFVVQVLSAIAELEREQICDNVRLAVQERNRQGCWNSGNMVLGYRWHKNPDPGQQQLEVVEPEAELVRTIFTMYADGLGYKAITNRLNAAGYRTKKGLAFGIAAVRGILTNPNYIGKIRIGTSQRHTGIEVQLMEGEQEPIIALELWEQVQAKLRSRSNPPSKTIKRHFPLSGLLKCPGCGCSMVAAHTKSYNKNGTIRKNYYYVCSIYRSKGSAACSLNAIRADDMDCWFSQQMQELVTKPPLLNQIIAAVNDKRDLSRKPLEDEKRGLTKELAAFDQRQQRCFELFEEEHIPQEVLVTRLKELEEQKAVKQEALRGVEEKLANQQIQLVDSNKILTALKNLWAMVQTSPHEQQKKMFKSLFDKITLPADRDISKAVLHGSASLNHILLTNDMEELQ

SEQ ID NO: 16139 - protein, 505 aa, synthetic construct
MVAKADETPIGKIKVAIYIRVSTDMQVEDGFSIEGQRTRLNSYADSQDWKVFDTYIDDGYSAKDLKRPAMMRMMEDMEEKKFEVILVYKLDRLTRSVGDLHGLLNTFDRYGVKFKSATEIFETTTAMGRFFITLVGAMAEWERGTISERIRFGVEQMVAEGRRPGGILPYGYTQEGVLIPEEAEQIREIRDLYMSGMGYKTIAVRMSREGKLRRESEWTSATVGYTLENPFYAGIIRMGSKTPEGLYVNTRKSERVKCVYGKGSHVPIFTDEEYEETKQFMKRKTHSGYSKIKIYWFSGVLRCGRCGGAMFGHLSTRRTTSRGVVRTPHYICSNKHHSNKCDLPMFRQSHVEHLIMEYINKVQEDTDKLKSASLEMIADEGKKTTEIDKAKRDLLKVADRREKWQYMFVEGLISKEDIRRKMAEEDVAEQEARQRIANNQKSLSGIPRVTELAGLAEAWEYIDDEEKKEYIYTIFNKIEVNTDLTKPKGTKDKFFDAYIQDVTFN

SEQ ID NO: 16140 - protein, 557 aa, synthetic construct
MNRSGKKCVLYPRVSTEMQVDGFSLDGQKSNLRRFADREEMEIVNIYEDAGKSGKSIEGRPAFKQMLLDIENGLEIDYVLVYKLSRFGRNAADILNSLEHIQAFGVNLICIEEGIDSSQTSGKLLISVLSAVAEIERENIIEQTMNGRKEKARQGGWNGGFAPYGYFLKDKQLFIQEDEAEAVRIIFDKYLNGNMGFHKIANYLNLQGIQKVQRNNGTLSLWGTHFIRMIIDNPVYCGKISYGRRAREKVKGSKNEYKQVPQEDYIIAEGQHEAIISEELWNAAHEKRELTGVKSPSKIGRDRAHLLSGILKCPKCGGPMYTNKHAWTNKDGTYKEVYYYVCSKARAARGKTCEYTTMLKKTDIEPLVIEAIRELIQNQDFAGEIKSRIGKEIDTSNLNRELKNYESKLKETELNKTRLENEIDSLPEDVRFRERKIHDMTLRLDGLYDIIVELEEKIEDVLLRRKAVEQDAITLENIYTLLANFDKVYDKISDEEKKSLISSLIKEIEIFPCDEAELPLKSILFNFPVYKDGEDACDFLWDKSTHVSTCVLALKRY

SEQ ID NO: 16141 - protein, 539 aa, synthetic construct
MTKKCYPYVRFSSTRQEDGSTRNRQNELIDAFVSKHGLEVDRHLEDAGTSAYHGKNAGSEGVLGKFLKEVRMGEIDKGSYLLIENFDRLSRDKIVRTNKIFTDLIFSGIKIVILDKNKIYEEENLDFADWVNALLEFERANAESKRKSDFSSKAWRINRGRMREGEIVTKKVPTWLKVENNAFVIDHEKVERINTLFKLSLSKGLQEATREYNDLYSEKLAIHQTQYLLSNRKLIGEHSPQKIHYDESGQLKRKDEGDSIPNYYPAVVDEQLFYQVQELIKSRRPFAGRYSNQRYNVFRDLIYCKWCGGTIRYMNKGERDYFICTNSMTGKCDLNSHFGQQSIRGKKLFGMFFAFTDGLNVSALLEENTNAKEIKTEVLKLEAKRNQIANRLQDFKVEVKTMILDGKTIPSTYNEVIAELESNRNHIDSEIDTRTKELDQIYISEKSFMGLKDIDVSGIIYDRTNEAVEKRVQYNNELKKIIKHIRIDFLNTAIEIEFANKLCRLVNSDGDVIDYVIDHVPEDFTTIYNYDKDYINPDA

SEQ ID NO: 16142 - protein, 550 aa, synthetic construct
MMQTATAKKKSISFIPPQPEYDRSIKPQFKALRVAAYCRVSTTLEQQETSYEAQVSYYTEKIKSNPNWKLAGIFADDGKSATNTKKRDDFNAMIEDCMAGKIDMVITKSVSRFARNTVDSLQNIRKLKEKNVAVFFEKEGVNTLDGTGELLITILSSQAQEESRNLSENTRWGLVRRFENGIVSVNHNKFLGYTKDKNNELVIVPEEAELVRRIFRLYLEGSSIVQITKILESEGITTVTGLDKWCPGTINKMLSNEKYMGDVLQQKTYTIDFLTKKRVLNKGIVPQYYIEDDHEAIIPKELYYQVQEEKARRASLHKPSVARKEKKEKSKYSSKFALTDIMVCKECGQPYRRQIWSKYGQKTAVWRCDNRLKNGTKNCKHSPTFKEDVLHEAIMTAINSVVENRGEFVGAFRENVIRVIGNYSTKNVPTEYDGQIEKLQAEMLALIEENAKQGSITEDFDEQYHRIAERINDLKQKKLELVREQKMAANFQQRVEDMDACLKKTTCEVGEFDNDLVRRLLQSIKAVKDDLIEIQFKSGIVMNQRVSYFD

SEQ ID NO: 16143 - protein, 543 aa, synthetic construct
MAKKITKIDPVKQQVVRQLQPKKRVCAYCRVSTDSREQQNSFTAQLEYYTALIENQEDWQFAGIYADEARSGTKLQKRYDFLRMLKDCEDGKIDMIITKSLTRFARNTVDSIEAIRRLKGLGVAVYFEKEHIDSLSEKSELMLTILSSLAQGESESISTNSKWAVIKRFQDGTFILGTPAYGYTKDESGELIIQEGEAAVVRRIFREYLNGKGTYAIAKDLSEEGISTIRSAEKWNDGVIKEILLNPIYTGNLLHQKTMTTEVLPFRRQRNKGQLPQYLVEDNHEPIISHKQAQAVREIFEYRRKQMGVDDTSKYQSRYAFSSKILCGECGGMFRRQKIYIGKPYEKTQWCCRQHILDYIKCSQKAIREDDIQWAFTVMWNKLVSNYAEILTPLLDTLKKLRMDEQQEREIGEYSNRIMELTEQGHILSRLVSKGYIDPAVFIERQNALTIELVAVKKKRGQLLDNNGFDIEIAGTEHLMELIINNPHVIEEYREDLFLQAIDKVTVQKNGQITFQLINRLELSEPCRKEAIEDDAKAHAHRI

SEQ ID NO: 16144 - protein, 522 aa, synthetic construct
MKRAIIYVRVSTTRQADEGISIDAQTDQCKKKAKELGASVLQIFRDEGITGTSAVKRQAFQRAIHYCAVNDVDYFIVWSTSRFARNKLDAASYKLLLRESGTRLVYASMNIDSDTDEGWFTDSIMEIMDEQVSRQISRDTRRAMLKNAEEGWFNGGRAPFGYQITSQGKRRKLVPNDAEKTLVQEAFRRFAAGEGAIAIARSFTGRGYTRRGAEWQAASLSHMLKNRVYLGQTVYNKRSGNKPNPPEEWIIRQTHEPLVSEKDFEAVQKRYRPDYKQTGSPSSRFLFTGLLRCGHCGKAMSIETATSKTKRRYNYYNCSGFKKGCDCISRRISAEKLDDYLLNIVVDKLLTQEVVSDFIGEAYRKYVEKRTNNAEQHKLLQQELTELRRRRNTLFELVESGLSGSDSRSLLERVAGYDEREQTLLIELDKLAGAPDVDAIPEIDVDSALRTLKTILLNTANEKKLRILLQSFIRKIDINPTEVVIHYNPERIINDSIGVHSTESWHAQGESNPRYRRERAMS

SEQ ID NO: 16145 - protein, 537 aa, synthetic construct
MKQQIYNTALYLRLSRDDELQGESSSITTQRSMLRLYAKEHHLNVIDEYIDDGWSGTNFERPSFQRMIEDIEAGKINCVVTKDLSRLGRNYIMTGQYTELYFPSHNVRYIAIDDGVDSEKGESEIAPFKNIINEWVARDTSRKVKSAFKTKFAEGAYYGAYAPLGYKKHPDIKGKLLVDEETKWIVEKIFSLAYQGYGSAKITKVLREEKVPTASWLNFTRYGTFAHIFEGKPDSKRYEWTIAHVKAILKNEVYIGNSVHNRQSTVSFKSKKKVRKPESEWFRVENTHEPIIDKEVFYRVKEQIKSRRRQTKEKATPIFAGLVKCADCGWSMRFATNKANKTPYSYYACSYYGQFGKGTCSMHYIRYDVLYQAVLERLQYWTKAVQQDEEKVLNKIQKAGNAERIRAKKKKASALKKAESRQNEIDRLFAKMYEDRACEKITERNFIMLSGKYQKEQIELEQQITNLREELSKMEQDMIGAEKWIELIKEYSVPKELTAPLLNAMIEKILIHEATTNEDNERIQEIEIYYRFIGKVD

SEQ ID NO: 16146 - protein, 612 aa, synthetic construct
MIEYHNKITALYSRLSVGDEDRDGGESNSIVNQKAFLERYARDKKLINIRHYIDDDESGRFFDRSAYTQMINDVEQGKIGIVIMKDMTRWGRDYLQVGNAMEIFRRNNVRFIAINNGIDSIDQNTLEFAPFINIMSEWYARDISKKVKTGIKTKGADGKPVATEAPYGYIKDPENKDYWIVDKEAAEVVKLIFRLFMEGKNRNQIAVYLKEKEILTPTFYMKQQNRGTAKNKPLNEENRYNWNKATLTRILKRQEYCGDVVNFKTEKHYRDKRNHYVDKSKWQITENVHEPIIDRTTFENVERMLKNAPVKRPNGDGEIHALSGLMYCKDCGTKMHIRTIHKNGRVQHVTYCSEYAKGKAKHPKCNSPHRIDVDEVMENIAEVLRKIAQYSLENKAEFEKLVKGSLYKEQTEEFKKNQKRMPQITDRMEQIERVMNKLYEDNALGNMDTERYEQLSRKYAEEYYTLKAEKEEIKERLSECENANQRAKKFIRLAESYSNFEELTPTIINEFISKIVVHERDVKRAKYVVQRIEVYFNYIGKFENELTKQIEPTEQEMLQMREEIEEAKKEKSRAYHRAYSKAYRAKNLEKCREYEKLKAREYRAKKKLQATT

SEQ ID NO: 16147 - protein, 388 aa, synthetic construct
MHEKIRPHHLERKAILYVRQSSAHQVLHNRESRALQYAMRDRLVALGWSCIETVDDDLGRSAAGARAGFDRMVAAVCLGKVGAVAAREVLRFARNSRDWQQLIEMCRVVDTVLIDQETVYAPRQGNDRLPLGLKGSLNEYELDLLRQRSLSARYEKARRGELVLAAPVGFVKVGDRLEKDPDRRMQEAITLVFDKVAGLGSARQALLCFLEHGLNLPAKRNNGDVVWRSPSYATIHRMIENPIYGGAYAFGKTRAASGYDATAIRSRSRRKARDEWLALIPGAHEGYVGWERAEAIRKMVSDNVPTSRHHGAPKHGDALLAGLVRCRRCGRKLTVRYTGTKHNIPRYSCWRGLLDNGEPRCIAFGGLRVDLRRSSSAGRSMGLQPINA

SEQ ID NO: 16148 - protein, 586 aa, synthetic construct
MQKESIIALGYRRVSGAKQVKEGDGLGSQEARIREFAERRGYPPLSAMFTDDESGGSENRPGFREMLAFLKKNRAHTCVVIIDDITRLARGVTVHHKLRAAIAATGARLECPSFEFGESSDEQLVENLLASVSQHHRQKNGEQVYNRMRGRLLNGYWCFHAPPGYTHARVSGQTILVKKEPVASIVEEALEGYANGRLQSQAEVQRFLEACPDFPRYSGRVKFDRVTTMLKCVLYSGYLEYPKWDVSLRKAHHEPLISFETYQRIQSRLNGAAKTPARADISEHFPLRGFIRCAKCGKSISGSFSRGRPKEYPYYFCIGKGCQIYRKSLSKQAVETRFDDLLRSLEPTSDLIELAETTFRDIWQQRAASSKERKAALQRVLGNIERSINQIIDRIAATSDQGLIAVYEKRLSELQRDKVAQAEKAETAANSLPDFDDTLRTALQFLSSPWKLWDTGRLEDRRAVLKLVFSKHLHYDEDEGFRTAETTLPFKVLATLRDEVGNLVPLAGIEPALLAELDFESSASTNSAIGAQAGRPGWARTIRADGLSSTGLLPICKRLLHPAMPFSLVNVPPLCGAENLSRQGMR

SEQ ID NO: 16149 - protein, 607 aa, synthetic construct
MKNQSNTSPAVAYVRMSSKKQDKSPEQQRAEIKKHARNRNYHIIRWYEDSGKSGGKETEKRVQFLRLIEDAEKKGDFVAILSWSKARLDRLDSLEGAEYKLRLRDCGVILETVTDGVFDWATEEGQLLDTFHSMKGHRDLIQISREAIRGKTEAILERKRLHGGQPPYGMARLITDSKGKKHNIARGERFRTPKEWNVIYVEGDADELAVLRWLFTTFDSKDVSCHWLAKDLNERGVSSPNGSQWRDTTVRRLLTDEAYIGNFVLGKKRTKESFYRITNEGAKKNVGPRGRLAKTSTGDPSEEIRLDGLWDAVVDPSLFLRVNRKLNSNKKSGRKPRATDGGHALSGILHCGHCGSRLLAMKKVKKAGPVTRYHCGTYLNTPGNCIGAKIDEGEVIDKALLKLGEMLSGDRISEFGRAVREEEPSRSESIQREIEKVELQIERGSARVCMVDSEKVAQSIQRQLANLHSEKERLEGELACVLKPEEVPALVDRWATKHRSLLRLYNVPLLDTFKLSDQKTWYGTNVGVVETQPLEALALRGAFNEIGLRLDVFWKKREKRTREGIYELDRIEISVNIGELENHFSTGRRRSAPPESTGSAPASLRPW

SEQ ID NO: 16150 - protein, 493 aa, synthetic construct
MAKAETAKRVGIWIRVSTEDQVRGESPETHERRARAYAESRDWNVVEMYRLDATSGKTVKDLPEAKRMLEDIRSGHITGLIFSKLARLARNTRELLDFADHFREAGADLVSLGEAIDTSTPAGRLFYTMIAAMATWEREEISARVAASVPIRAQMGKPTGGAATFGYEWKDGKLAVNPQEAPVRKLMYELFLEHRRKKVVARILNERGYRTRNDSPFTDTTVDRLLRDPTAKGTRRANYTQTANSKGSWTLKKEDDWVLVPVEPIVSVELWSEVNVILDEKRAQGKRQTKPAVHLFAGVAACVCGARMYVPSNSPKYTCSKCRTKIPTKDLEAIFKEELRAFVFSPDEIFGHIQAGNEKVKSFDALITSLDAEQKKLLGEADKLIELFQANALDKKGFGARYEKLRVRLEQIDEELPALLAKRDVLKIALASQEEVLSGSKDLVERWDTLPHPERRQVVETILDRVVVGSGEVEFNFLYNPGFASSSNSQSIG

SEQ ID NO: 16151 - protein, 505 aa, synthetic construct
MPKNYYAYIRVSTIKQGEKGSSLQEQRTSIEHYAARFGLAIGEWFEELETAAKRGRPQFNRLISLLRKGKGHGVVIHKIDRSARNLKDWSDIGELIDAGIEIHFAHESLDLQSRGGRLAADIQAVVASDFIRNLRDEVRKGIRGRLNQGLFPGRAPVGYLDCGKGLPKIPDPVRAPLIRRAFELCATGNYNLVMLQNELYVLGLRNLAGKKISHTGLSIVLRNPFYYGLIYIKRTGESFAGIHEPIVSKSLFDDVQARINGRKKNAGLKRSYLYQKQLRCYECHSLLIPEVQKGWIYYRCHSGGCATKCIREDLVTTQLFAYLDAFTVPESWLAKLEVIVNEKALRSENLANQDRRNLHLARTSLDDRLRRVTDAYLDEAIDRDTFEFRKRDLLAQKLVTEEKLKAIDSSGSTKVREVHEYIELLKRIKTKAIRENPIDAVFMVKRITSNFFIFRKRLVPEWNLPSEMAAPEAECADGVPYRGTSRTLNLAKFIKWIESSDIGGE

SEQ ID NO: 16152 - protein, 536 aa, synthetic construct
MTKKCFPYVRFSSTRQEDGSTRTRQNGLIEAFVAKHGLEVDRHLEDAGTSAFHSKHAGSEGVLGQFLKEVRKGEIEKGSYLLIENFDRLSRDKIVRSNKIFTDLLFSGIKIVILDKNKVYDADNLDFGDWITALVEFERANAESQRKSDFSSKAWKLNRDKMHNGEIVTKKVPTWLKVENNTFIIDEVKIDRIRTLFRLSLSKGLQEATKEYNTLYGEKLAIHQAQYLLSNRKLIGEHQPQKIHYNENGRLIRKDEGNPIPDYYPQVIDEDLFLKVQSVITSRKPFSGRYSAQRYNVFRDLIFCRFCGGTIRYMNKGERDYFICTNSMTGKCGLKGQQSIRGKKVFSRFFKFTNGINIGTLLEENTNADEIKNELMKLENQKTKISNRLDDFKSQIKKMIMEGETIPETYNEIIVDLENSIIKYDDEIEIKNKELDKIISSFRSFYDLKEIDIETIIYDKSQEAIEKRVQYNNELKNIIKKIQIDYLNDILHVEFSNGVNRHILNDELANEYNKDEIESSWASVVKSIANKANPQS

SEQ ID NO: 16153 - protein, 512 aa, synthetic construct
MKLCALYTRVSTEEQVERYSLEAQQEVLTRWAEALGYEVVKTYTDPGYSGAQEDRPALTRLLADAQEKRFMVVLVYRLDRLARKVRLAYDLIERLERCGVGLMSYSEPNINTTTPIGKAVLGIMAVFAEWERDTFAERSRLGMHKAARMGKYLGGIVPYGYTVEDGRLAPLPEEAAVVQQMFAWVAERGWSTERVAQELNRLGIPPKYRRDGRGVRGKRTAGVWRGGGVLRILKNRTYIGEYTYGKRTTKPQPELVKVAVPPIVEPTLFEAVQEQLTRNALFATRNARSVYLLKGLIRCGMCGRAYVGSADYYACVGRTNRQASPIPEMRCTAPHVRRADLEERIWHDIRSFLLNPGEALQAFINEESPESHEVSLLERRLQALFEARARLLDLYLEGGMEKETYYARLEDLDARVREVQASVESARQRSIVERQRKVALHSLESLSAHLHDRLDRLTLEEKQAVARELVERVTVRPGKGEVEVEVHYRFGQIAPHTGRGSWPQSTKTARDR

SEQ ID NO: 16154 - protein, 524 aa, synthetic construct
MKNKSIELTRTPKAIVYCRVSSTRQKTEGSGLESQEHRCRQYADQKGYEVEAVFPDDASGGGDFMKRPGMVALLSYLAAQPKKSYVVIFDDLKRFARDVEFHMKLRREFEKLGAQIECLNLMLEDTPEGKFLETIVAATGELERSANRRQVIQKMIARLEMGFAVFAPPLGYKYAAERGRGKILVRVEPVASIVCEALEGFASKRFLSHGEVKRFLEAQPSFPKNARGEVYFSRVERMLSHLVYTGYVEFPEWGVSRRKGHHEPIISLETFERIQMRLHEGTTAAVRKDLNEDFPLRGFVLCDDCGQPMTAGWSKGRSKHYPYYLCDTRGCECCRKSVRRDEIEDGFAELLRTLQPTQELYGLAKAMFTDAWKMRASEAIRDKSELENQVRGVEKQIQTLLERIIETASDTVIKAYEGKIEKLERQKLLLEEKVDRISPPTRKLDDFIEPALALLSSPWNIYENGNLPFKRAVLRLVFADPIRYSLKYGYRTANTTIPFKMLASISSVNGEMVRPRGVEPLFPE

SEQ ID NO: 16155 - protein, 539 aa, synthetic construct
MTKKCYPYVRFSSTRQEDGSTRNRQNELIDAFVSKHGLEVDRHLEDAGTSAYHGKNAGSEGVLGKFLKEVRMGEIDKGSYLLIENFDRLSRDKIVRTNKIFTDLIFSGIKIVILDKNKIYEEENLDFADWVNALLEFERANAESKRKSDFSSKAWRINRGRMREGEIVTKKVPTWLKVENNAFVIDHEKVERINTLFKLSLSKGLQEATREYNDLYSEKLAIHQTQYLLSNRKLIGEHSPQKIHYDESGQLKRKDEGDSIPNYYPAVVDEQLFYQVQELIKSRRPFAGRYSNQRYNVFRDLIYCKWCGGTIRYMNKGERDYFICTNSMTGKCDLNSHFGQQSIRGKKLFGMFFAFTDGLNVSALLEENTNAKEIKTELLKLEAKRNQIANRLQDFKVEVKTMILDGKTIPSTYNEVIAELESNRNHIDSEIDTKTKELDQIYISEKSFMGLKDIDVSGIIYDRTNEAIEKRVQYNNELKKIIKHIRIDFLNTAIEIEFANKLCRLVDSDGNVIDYEIDHVPEDFTTIYNYDKDYINPDA

SEQ ID NO: 16156 - protein, 559 aa, synthetic construct
MSKEKIKVYLYTRVSTSIQIEGYSLEAQKSRMKAFAIYNDYEIVGEYEDAGKSGKSIEGRIQFNRMMEDIKSGKDGVSFVLVFKLSRFARNAADVLSTLQIMQDYGVNLICVEDGIDSSKDAGKLMISVLSAVAEIERENIRIQTMEGRIQKAREGKWNGGFAPYGYKLEDGKLFINEEEAVAIRTIFDQYVNTTIGANGISKYLENHGIRKIPRQNGKNPLFDAGLIRKILKNPVYNGKIAFGRRTLEKVHGTRNEYKQVEQDEYLISEGIHEAIVSDEVWQAAQVKLKSQAKKYEHVNKGKDTRTHLLSGIVKCPICGVGMFGNKCIKKKKDGTKYKDFYYYGYKHRQMIRGHKCTFSKQIREEFLDDAVAEVIVKIVSNPKFASMMQEKINMKVDTSEIEKEIDNYQKELRKSHSTKFKLIEEIDNLDVEDKHYKRRKQDLDDRLYRMYDKIDELESSLIDAKAKKQTIEAEKLTGDNIYKVLIYFDKLYKVMNDVERRQLISALISEIQVYEEKQSNGQWLKSITFKLPIIEENLNIGLDNDEQVECVSLLEKRS

SEQ ID NO: 16157 - protein, 481 aa, synthetic construct
MITTNKVAIYVRVSTTNQVEEGYSIDEQKDKLSSYCDIKDWNVYKVYTDGGFSGSNTDRPALESLIKDAKKRKFDTVLVYKLDRLSRSQKDTLHLIEDVFIKNGIEFLSLQENFDTSTPFGKAMIGLLSVFAQLEREQIKERMQLGKIGRAKAGKSMMWAKTSYGYDYHRETGTITINPAQALAIKFIFESYLRGRSITKLRDDLNEKYPKHVPWSYRAVRTILDNPVYCGFNQYKGEIYPGNHEPIISKEEYDKTQSELKIRQRTAAENVNPRPFQAKYILSGIAQCGYCGAPLKIMLGVKRKDGSRLKKYECHQRHPRTLRGVTTYNDNKKCDSGFYYKDKLEAYVLTEISKLQDNAGYLDKIFSGDNAETIDRESYKKQIEELSKKLSRLNDLYIDDRITLEELQSKSAEFISMRGTLETELENDPALRKNKRKADMRKLLNAEKIFSMDYEGQKVLVRGLINKVQVTAEDIVINWKI

SEQ ID NO: 16158 - protein, 475 aa, synthetic construct
MITTNKVAIYVRVSTTNQVEEGYSIDEQKDKLSSYCDIKDWNVYKVYTDGGFSGSNTDRPALESLIKDAKKRKFDTVLVYKLDRLSRSQKDTLHLIEDVFIKNGIEFLSLQENFDTSTPFGKASIGMLSVFAQLEREQIKERMILGKEGRAKNGKSMSWTTIPFGYDYSKETGVLSVNPTQALIVNRIFTEYLNGKPVVKIIRDLNAEGHVGRKRPWGETITKYLLKNETYLGKVKYKDKVYEGQHEPIITQELFDLVQLEVERRQISAYEKYNNPRPFRAKYMLSGLMKCGYCGASLGLRYTRKDKNGISHHKYQCRNRHSKDLEKRCESGWYSKEELERGVIKELERIKFDPKYKNETLAKKEETIKVEEIKKQLERINNQVSKLTELYLDEIITRKELDEKNDKIKTERQFLEEQLENQKSNVLSIRKRKLTRLLKDFDVEKLSYEDASKIVKNIIKEIIVTKDGMSITLDF

SEQ ID NO: 16159 - protein, 599 aa, synthetic construct
MKKEVKVIKGDTTLKRTASGCVERSIKRVAAYCRVSTDTEDQINSYNSQVEHYTEFIQKNNEWTLAGIYADEAITGTQVDRRIDFQRLINDCMNGDIDMIITKSISRFARNTLDTLKYVRKLKEFNVAVFFEEENINTLTMDGELLLTILSSVAQQEVENISANVKKGLRMKMERGEMVGFQGCLGYDYDPETKSISINEKEAEIVRYIFRRYIEGVGGMVISRELEEQGYLSPRGNKRWTETTVLGIIKNEKYKGDLMMGKTYTVDPISKRRLDNFGEQDKFYIENHHEPIISEEDFEKAQGIRLRRSKNRNTVANNGGKREKYSRKYAFSSMLECGFCGHNLSRRNWHSSSEYTKVIWQCVNATKNGKKYCPHSKGIEEEAIEKAFMESYRQVCHNNVEITNEFLKTVEEELKDNSLAKDLKKITNQLDKILKKEKDLVELRLNESISMDIYQDKYNEIAISKEKLLAEKRTLEVTLTDEKALKKRLEGFKKLLESNKYLEEFDRAVFESIVDKIIIGGTNDEGEIDPAMITIIYKTGKKDSQDGRLFKSRRKNAKEVNEKADSKLYPQSSDEVNNLCSYPMDNTRRVRSVANQGVR

SEQ ID NO: 16160 - protein, 481 aa, synthetic construct
MKTMNKVAIYVRVSTTNQVEEGYSIDEQKDKLSSYCDIKDWNVYKVYTDGGFSGSNTDRPALESLIKDAKKRKFDTVLVYKLDRLSRSQKDTLHLIEDVFIKNGIEFLSLQENFDTSTPFGKAMIGLLSVFAQLEREQIKERMQLGKIGRAKAGKSMMWAKTSYGYDYHRETGTITINPAQALAIKFIFESYLRGRSITKLRDDLNEKYPKHVPWSYRAVRTILDNPVYCGFNQYKGEIYPGNHESIISKEEYDKTQSELKIRQRTAAENVNPRPFQAKYILSGIAQCGYCGAPLKIMLGVKRKDGSRLKKYECHQRHPRTLRGVTTYNDNKKCDSGFYYKDKLEAYVLTEISKLQDNAGYLDKIFSGDNAETIDRESYKKQIEELSKKLSRLNDLYIDDRITLEELQSKSAEFISMRGTLETELENDPALRKNKRKADMRKLLNAEKIFSMDYEGQKVLVRGLINKVQVTAEDIVINWKI

SEQ ID NO: 16161 - protein, 600 aa, synthetic construct
MKKDVKVIKGDTTLKRTASGCVQRSIKRVAAYCRVSTDTEDQINSYNSQVEHYTEFIQKNKEWTLAGIYADEAITGTQVDRRIDFQRLINDCMNGDIDMIITKSISRFARNTLDTLKYVRKLKEFNVAVFFEEENINTLTMDGELLLTILSSVAQQEVENISANVKKGLRMKMERGEMVGFQGCLGYDYDPETKSISINEKEAEIVRYIFRRYIEGVGGMVISRELEEQGYLSPRGNKRWTETTVLGIIKNEKYKGDLMMGKTYTVDPISKRRLDNFGEQDKFYIENHHEPIISEEDFEKAQGIRLRRSKNRNTVANNGGKREKYSRKYAFSSMLECGFCGHNLSRRNWHSSSEYTKVIWQCVNATKNGKKYCPHSKGIEEEAIEKAFMESYRQVCHNNVEITNEFLKTVEEELKDNSLAKDLKKITNQLDKILKKEKDLVELRLNESISMDIYQDKYNEIAISKEKLLAEKRTLEVTLTDEKALKKRLEGFKKLLESNKYLEEFDRSVFESIVDKIIIGGTNDEGEIDPAMITIIYKTGKKDSQDGRLFKSRRKNAKEVNEETDNKLYPHSSDEVNNLYSYPIDNTRRDGSTFVQTRCR

SEQ ID NO: 16162 - protein, 707 aa, synthetic construct
MSRTSRITALYERLSRDDDLTGESNSITNQKKYLEDYARRNGFENIRHFTDDGFSGVNFNRPGFQSLIKEVEAGNVETLIVKDMSRLGRNYLQVGFYTEVLFPQKNVRFLAINNSIDSNNASDNDFAPFLNIMNEWYAKDTSNKIKAIFDARMKDGKRCSGSIPYGYNRLPSDKQTLVVDPVASEVVKRIFTLANDGKSTRAIAEILTEEKVLTPAAYAKEYHPEQYNGNKFTNPYLWAMSTIRNILGRQEYLGHTVLRKSVSTNFKLHKRKSTDEEEQYVFPNTHEPIISQELWDSVQKRRSRVNRASAWGTHSNRLSGYLYCADCGRRMTLQTHYSKKDGSVQYSYRCGGYASRVNSCTSHSISTDNVEALILSSVKRFSRFVLNDEQAFALELQSLWNEKQEEKPKHNQSELQRCQKRYDELSTLVRGLYENLMSGLLPERQYKQLMKQYDDEQAELETKMETMKTELAEEKVSSVDIKHFISLIRKCKNPTEISDTMFNELVDKIVVYEAEGVGKARTQKVDIYFNYVGQVDIAYTEEELAEIETQKEQEEQQRLARQRKREKAYREKRKAQKIAENGGEIVKTKVCPHCNKEFIPTSNRQVFCSKECCYQARQDKKKTDREAERGNHYYRQRVCAVCGNSYWPTHSQQKFCSEECQRVNHNKKTLEFYHHKKEKEKLQCKDLSQTKERVSDMNLSGTITTPA

SEQ ID NO: 16163 - protein, 612 aa, synthetic construct
MRNFEKITALYERLSRDDELQGESNSIINQKKILEEYASKNNLSNIIHFTDDGISGTQFDRPGFMAMMNGVNQGNIGCIIVKDMSRLGRDYLKVGQCMEILRQKGVRLIAINDNVDSFYREDDFTPFRNIMNEWYARDTSRKIQSTFRSKGESGKHTASTPPYGYIKDEKDKNKWIVDEKAAEIVRRIFNLTMQGNGPYRIAKILESEKVDIPAYHQQKLGYGLYQSKNFEHPYRWCSSTIASILKKQEYLGHTVNFKTRKHFKDKKSKYVSEDNWLIFENTHEPIIDQETFDNVQRIRGNVKRYPDGWGEYHPLTGLMYCADCGSKMYVHRTSNYKNVPYYVCSNYKKVPCGTLCPSAHRIKAEAVLNLIRETLKDIKKNLDEDNEDFIRSIQNEMEEKEKIEIEKKKIRLTESQNRLQELERLMCRIYEDMILNKIPNSRYEILNNQYETEQITLSKEIKALELEISRYEKETDRAKKFISLISRYENFDELTTTMINEFVEKIIVHERDRKGSQTSKQKIEIYFNFIGNYELPQAELSEEKKQKLEEEERKIEERKDKLHQNYLKRKASGKQKEYEDKYKARREQKKQEKIKVLKRVGIPVSEYIKTNI

SEQ ID NO: 16164 - protein, 481 aa, synthetic construct
MITTNKVAIYVRVSTTNQVEEGYSIDEQKDKLSSYCDIKDWNVYKVYTDGGFSGSNTDRPALESLIKDAKKRKFDTVLVYKLDRLSRSQKDTLHLIEDVFIKNGIEFLSLQENFDTSTPFGKAMIGLLSVFAQLEREQIKERMQLGKLGRAKSGKSMMWAKTSYGYDYHKETGTVTINPAQALTIKFIFESYLRGRSITKLRDDLNEKYPKHVPWSYRAVRTILDNPVYCGFNQYKGEIYPGNHEPIISKEEYDKTQSELKIRQRTAAENVNPRPFQAKYILSGIAQCGYCGAPLKIMLGVKRKDGSRLKKYECHQRHPRTLRGVTTYNDNKKCDSGFYYKDKLEAYVLKEISKLQDDADYLDNIFLGDNAETIDRESYKKQIEELSKKLSRLNDLYIDDRITLEELQSKSAEFISMRGTLETELENDPALRKNKRKADMRKLLNAEKVFSMDYENQKVLVRRLINKVKVTAEDIVINWKI

SEQ ID NO: 16165 - protein, 599 aa, synthetic construct
MKKEVKVIKGDTTLKRTASGCVERSIKRVAAYCRVSTDTEDQINSYNSQVEHYTEFIQKNNEWTLAGIYADEAITGTQVDRRIDFQRLINDCMNGDIDMIITKSISRFARNTLDTLKYVRKLKEFNVAVFFEEENINTLTMDGELLLTILSSVAQQEVENISANVKKGLRMKMERGEMVGFQGCLGYDYDPETKSISINEKEAEIVRYIFRRYIEGVGGMVISRELEEQGYLSPRGNKRWTETTVLGIIKNEKYKGDLMMGKTYTVDPISKRRLDNFGEQDKFYIENHHEPIISEEDFEKAQGIRLRRSKNRNTVANNGGKREKYSRKYAFSSMLECGFCGHNLSRRNWHSSSEYTKVIWQCVNATKNGKKYCPHSKGIEEEAIEKAFMESYRQVCHNNVEITNEFLKTVEEELKDNSLAKDLKKITNQLDKILKKEKDLVELRLNESISMDIYQDKYNEIAISKEKLLAEKRTLEVTLTDEKALKKRLEGFKKLLESNKYFEEFDRAVFESIVDKIIIGGTNDEGEIDPAMITIIYKTGKKDSQDGRLFKSRRKNAKEVNEKADSKLYPQSSDEVNNLCSYPMDNTRRVCSVANQGVR

SEQ ID NO: 16166 - protein, 599 aa, synthetic construct
MKKEVKVIKGDTTLKRTASGCVERSIKRVAAYCRVSTDTEDQINSYNSQVEHYTEFIQKNNEWTLAGIYADEAITGTQVDRRIDFQRLINDCMNGDIDMIITKSISRFARNTLDTLKYVRKLKEFNVAVFFEEENINTLTMDGELLLTILSSVAQQEVENISANVKKGLRMKMERGEMVGFQGCLGYDYDPETKSISINEKEAEIVRYIFRRYIEGVGGMVISRELEEQGYLSPRGNKRWTETTVLGIIKNEKYKGDLMMGKTYTVDPISKRRLDNFGEQDKFYIENHHEPIISEEDFEKAQGIRLRRSKNRNTVANNGGKREKYSRKYAFSSMLECGFCGHNLSRRNWHSSSEYTKVIWQCVNATKNGKKYCPHSKGIEEEAIEKAFMESYRQVCHNNVEITNEFLKTVEEELKDNSLAKDLKKITNQLDKILKKEKDLVELRLNESISMDIYQDKYNEIAISKEKLLAEKRTLEVTLTDEKALKKRLEGFKKLLESNKYFEEFDRAVFESIVDKIIIGGTNDEGEIDPAMITIIYKTGKKDSQDGRLFKSRRKNAKEVNEKADSKLYPQSSDEVNNLCSYPMDNTRRVRSVANQGVR

SEQ ID NO: 16167 - protein, 481 aa, synthetic construct
MITTNKVAIYVRVSTTNQVEEGYSIDEQKDKLSSYCDIKDWNVYKVYTDGGFSGSNTDRPALESLIKDAKKRKFDTVLVYKLDRLSRSQKDTLHLIEDVFIKNGIEFLSLQENFDTSTPFGKAMIGLLSVFAQLEREQIKERMQLGKIGRAKAGKSMMWAKTSYGYDYHRDTGTITINPAQALAIKFIFESYLRGRSITKLRDDLNEKYPKHVPWSYRAVRTILDNPVYCGFNQYKGEIYPGNHEPIISKEEYDKTQSELKIRQRTAAENVNPRPFQAKYILSGIAQCGYCGAPLKIMLGVKRKDGSRLKKYECHQRHPRTLRGVTTYNDNKKCDSGFYYKDKLEAYVLKEISKLQDDADYLDKIFSGDNAETIDRESYKKQIEELSKKLSRLNDLYIDDRITLEELQSKSAEFISMRGTLETELENDPALRKNKRKADMRKLLNAEKVFSMDYESQKVLVRRLINKVKVTAEDIVINWKI

SEQ ID NO: 16168 - protein, 600 aa, synthetic construct
MKKDVKVIKGDTTLKRTASGCVQRSIKRVAAYCRVSTDTEDQINSYNSQVEHYTDFIKQNNEWTLAGIYADEAITGTQVDRRIDFQRLINDCMNGDIDMVITKSISRFARNTLDTLKYVRKLKEYNVAVFFEEENINTLTMDGELLLTILSSVAQQEVENISANVKKGLRMKMERGELVGFQGCLGYDYDPETKSISINEKEAEIVRYIFRRYIEGVGGMVISRELEEQGYLSPRGNKKWTETTVLGIIKNEKYKGDLMMGKTYTVDPISKRRLDNYGEQDKFYIENHHEPIISEEDFEKAQGIRLRRSKNRNTVANNGGKREKYSRKYAFSSMLECGFCGHNLSRRNWHSSSEYTKVIWQCVNATKNGKKYCPHSKGIEEEAIEKAFMESYRQVCHNNVEITNEFLKTVEEELKDNSLAKDLKKITNQLDKVLKKEKDLVELRLNESISMDIYQDKYNEIAISKEKLLAEKRTLEVTLTDEKALKKRLEGFKKLLESNKYLEEFDRAVFESIVDKIIIGGTNDEGEIDPAMITIIYKTGKKDSQDGRLFKSRRKNAKEVDEETDNKLYPHSSDEVNNLYSYPIDNTRGDGSTFVQTWCR

SEQ ID NO: 16169 - protein, 521 aa, synthetic construct
MAKITKIEKRQRNNRVKKMRVAAYARVSTESEEQLLSLEVQKEHYENYIKANPYWEYAGLYFDEGISGTKIEKRESLLKLLDDCEKGKIDRVITKSISRFARNTVDCLEMVRKLTGLGVAIYFEKENIDTEHMSSELMLSILSSIAESESRSISENSKWSLKRRFENGTYVISYPPYGYENVDGKMVVVPSEAEIVKEIFRMAISGLGSYLIANELNKRGIATKKNSKWHSSTVQAILKNEKYTGDVIFQKTYTDENFNRHQNRGEKVRYMMKNHHEPIISHEDFELVKTVVGQRKKEKNIDGSDNKYQKRYVFSGRIYCGECGSKVKRCMRYAQSGDYAAWTCVRHIEDKKSCNMKYIREEHIKAAYVQMMNKLIAGKNTMLKPFVDTLRGGNNKDRLRHILELDKKIEKLNEQAQVLTKLLSSGYIELDVFYAENNNISLERDELEKEKASLSSIVSGDLNHLNEAQKLLRFINKIDCIKDFIDDTFSEFVEKITIEDRLKFTFHLKCGLNLTEEVIVK

SEQ ID NO: 16170 - protein, 523 aa, synthetic construct
MLIPARKRPGNSISNQKEKPKLKVVAYCRVSTDSEEQAGSYEMQVQHYTDYISKNSDWEFVGIYADDGISGTNTKKREGFNEMINDCMAGKVDMVITKSISRFARNTIDCLKYVRQLKDSNIPIIFEKENINTMEASGELLLTIMASLAQQESASLSQNVKMGLQFRYQEGKVQINTNWFLGYTKDADGNLIIDEEEAKVVKRIYREYLAGSSLREIATGLQRDKIKNGAGHLKWHVSNIKGILENEKYIGDALLQKTITTDFINKVRIKNDGTEPQYYVKDNHEAIIPRDIFIQVQEEMLRRANMFSGEGKKKKRVYSSKYALSSLCICSKCGDIYRRVAWNNRGERLVVWRCCTRVEHGPKTCDAPTVREEELQEAVVKAMNEVLKTSDDTEKILIKNIEKVVAGSNDEEIEALNRVIEVKQKELLAQVRAKKDYTDIANEVDTLKGEKHKMLVQKALDEDAKRRIKDMKEFLRSQSKDIKEYDEELVRKYIKQIKIYDDKFEITFKSGIEINIERMRVCK

SEQ ID NO: 16171 - protein, 558 aa, synthetic construct
MSKEKIKVYLYTRVSTSIQIDGYSLEAQKSRMKAFALYNDYEIVGEYEDAGKSGKSIEGRVQFTRMMEDIKSGKDGVSFVLVFKLSRFARNAADVLSTLQIMQDFGVNLICVEDGIDSSKDAGKLMISVLSAVAEIERENIRVQTMEGRIQKAREGKWNGGFAPYGYQLIDGKLLINEEEAIAIRTIFDQYVNTSIGANGISKYLENHGIRKIPRQNGKNPLFDAGLIRKILKNPVYNGKIAFGRRTLEKVHGTRNEYKQVEQDEYLISEGIHEAIVSDEVWQAAQVKLKSQAKKYEHVNKGKDTRTHLLSGIVKCPICGVGMFGNKCIKKKKDGTKYKDFYYYGCKHRQMIRGHKCTFSKQIREELLDDAVAEVIIKLVSNPKFASMMQEKINMKVDTSEIEKEIDNYQKELRKSHSTKFKLIEEIDNLDVEDKHYKRRKQDLDDRLYRMYDKIEELESLLIDAKAKKQTIEAEKLTGDNIYKVLIYFDKLYKVMNDVERRQLISALISEIQIYEEKQPNGQWLKSITFKLPIIDENINIGLDNDEHVECVVLLIKE

SEQ ID NO: 16172 - protein, 595 aa, synthetic construct
MNTKVKLIKASNTGARNRNALDLELKRVAAYCRVSTDSKDQLESYKSQVDYYTNLIKNNKNWTLAGIYADEATTGTTATKRADFMRLISDCQNGDIDMIITKSISRFARNTLDTLKYVRLLKENNVGVVFEEENIDTLTMDGELLLTILSSVAQQEVENTSAHVKKGLKMKMEKGELIGFQGCLGYDYDPITKTISINEEEAKIVRYIFKRYLEGNGGSVIGRELEEQGYLTPRGKTKWSDTTVLGIIKNEKYIGDILMGKTFTVDPITKRRLANFGESDKYHIENHHEPIISKEDFEKAQEIRLRRAQNRNTIANKDRKREKLSRQYAFSSMLECGFCGEILSRRTWHTSSIYKKINWQCVRSTKKGKKYCPHSKGIQEAAIEKAFVESYRQLCHADSTVIDDFLKIVEEEINDNTLVKDLKKIESQLNRIISQERKLVDLHLEDSIDEVVYAKKYKKLTKQKEELLDEKKTLELTIKDENSIKERLKQFKKVLENREIIEEFNRTVFESIVDKVVVGRIDKDGTVHPYDLTFYFKTGVKDSQDSNNFKDKRKNAKDNDINKLCSYKNDEDKKLCSQSKDNARRVRSVANQGVR

SEQ ID NO: 16173 - protein, 520 aa, synthetic construct
MTEKNIMVIPARKRVGSTAAKEKIKKLRVAAYCRVSTETEEQNSSYEVQVSHYTEFIKKNNEWEFAGIFADDGISGTNTKKRDEFNRMIAECMDGNIDMVITKSISRFARNTLDCLQYIRQLKDKNISVYFEKENINTTDAKGEVLLTIMASLAQQESQSLSQNVKLGLQYRYQQGKVQVNHKRFMGYTKDEDGNLTIVPEEAEIIKLIYREYLEGQSLVGIGRALEKDGILTAAGKTRWRPESVKKILQNEKYIGDALLQKTVTVDFLTKKRVKNEGHLPQYYVENSHEAIIPKELFLQVQEEIHRRSNIYTGEGKNKRIYSSKYALSAITFCGDCGDIYRRTYWNIHGRKEFVWRCVTRIEQGPGVCKNRTVKEDELYGAVMTAINKLLAGGNNMIKTLEENIHAVIGETTEYQISEINNSLEEKQKELIKLANKGQDYDHLADEIDELRDKRQILLVEDASLSGENERINELIEFIRKNKFRTLEYDDKLVRKIIQSVTVYEGHFVIAFKSGIEMEI

SEQ ID NO: 16174 - protein, 560 aa, synthetic construct
MTKLYSYIRFSSMRQGEGSSYERQIKMAKEIADRYGLELVNDYQDLGVSAFKGANSKTGALSRFLDEIGRSIPVGSWLFIENLDRLSRQDIISAQELFLSIIRRGITIVTGMDNKIYSIETVTANPMDLMFSILLFIRGNEESQTKRNRTNSSALLKIKAHQQNPQSPAVAIEEIGKNMWWTDTTSGYVLPHPVYFPILQKIVKMKQEGHSTGSVLDYLNEHHEPPAPTSNKQHRKWSIAMVSRLFKTKALIGVKEVTVDGVQYELKDYYPRVLSDSEYYFLKNNLIKKAWSFGHAQEKTIPLLSGIGLLKCAHCGSPMVKRKAANGKVEQYRYTCDGEGSGRTDCLYPNWGFRASSLEGAVLQLLADKVWVAEDKANPIPEIQVQIDEISRKIDNLINLSAMTGATKELANQITDLNTQREALHEEIRLFEREMYSVDSQGWEKLAQFDLSDVQNEERLQIRLKIKGALRSIECARIDRNKNLFVLVYLDGLRQRLVIENNRGIRKGQIFVDLKTINDRQILESAGMVLHDHIDILIDEKAFYDGLPKEEDGPLSKFGI

SEQ ID NO: 16175 - protein, 522 aa, synthetic construct
MITRNVTVIPARKRIGNSANAEELPKLRVAAYCRVSTDSEEQATSYEAQIEHYTNYIKSNPEWELAGIFADEGITGTNTKKREEFNRMIEECMQGKIDMIITKSISRFARNTLDCLKYIRQLKEKNIPVYFEKENINTLDSKGEILLTIMASLAQQESQSLSQNVKLGIQYRYQQGKIHINHNRFLGYTKDKDGNLVIVPEEAEIVKRIYREYLEGSSMLQIARGLEADGILTGAGNPRWHTSTINKILRNEKYIGDALLQKTYTVDFLSKKRVPNNGIVPQYYVENSHEPIIPREIFMQVQEQLVKRRCVHISKNGKKRNYSNKHPLSQMVFCGNCHEIFRRVHWNNRGKKSIVWRCVSRLENTGLFCTASTILEDTLKEKIVEAINVAVSGKNSFLAILKKNIETVLSADLDESTADIDKRLEELQTELIQKANSKEAYDNIVNEIYRLRDLRQETLSRNALRQDKRDRIAEMTDFLKTQTGDISEFDDKLVRKLVEKAIVYDDRLMVEFKSGLEIEVKL

SEQ ID NO: 16176 - protein, 522 aa, synthetic construct
MRKVTRIDGNNALQAFKPKVRVAAYCRVSTDSDEQMASLEAQKDHYESYIRANPDWEFAGIYYDEGISGTKKENRTGLLRLLADCENKKIDFIITKSVSRFARNTTDCIEMVRKLTDLGVFIYFEKENINTQRMEGELVLTILSSLAENESLSIAENSKWSIRRRFQNGTYKISYPPYGYDYVDGKLFINKEQAEIVKRIFSEALDGKGTQKIADGLNSDKIPTKRGSHWTATTIRSILSNEKYTGDVLLQKTYTDENFKRHYNRGEKDQYMIKDHHEAIISHEEFEAAQEILKQRGKEKGVIKGSSKYQKRYPFSGKIKCAECGSSLKRRIHGSGDRKYIAWCCTKHIKDASSCSMKFVREDAIHQAFVVMINKLIFGHKFILRPLLQSLKKTNYSDNITKIQEMETKIKENTERVQVIMGLMAKGYLEPALFNTQKNELLKEAAILKEQKEAIKRAIDGSMTDLVEVEKLLKFTSKAEKQIDAFDSDIFENFIEEIIVFSQEEIGFKMKCGLNLRERLVK

SEQ ID NO: 16177 - protein, 475 aa, synthetic construct
MPQLYSYIRWSSERQQKGTTRQRQVIGAKEFAIANGLELVEIEDPGVSAFRGKNTTHGKLGDFIDAVRQGAIPPDSWLYVENLDRLTRQEVTTAQKLFIELLDLGLTLVTGMDKRVYTLESVNKNPTDLMISLLLFSRANEESKTKQARTIGNVESLIERHRQGLPVNIKSCGKHPFWIDDSGSQYESVKRHAIYWEIAREAIELFLSGYGIYKVKRFLDEKYPNGLNGKEWGYQVLKKMRESRALIGERQINIGSHTYTLRDYYPCLCKNEVEFLHLQELKGQNSYKSKKNPLKEQIKLLSGLAILRCSKCGGTMSSFMNKGKPRYICLNGRHLQKGCVGWSLTAPLVDHCVIIALLMGYMDANRKERQDTSDISALIEAKNTSVGELNVSITNLVAVIEAGVNVSELASRLKVLSTERETFLKEIERLKERKALIDSKGSFEVSMMDFINLIHWNVLSDYAHESRDKIRDVAP

SEQ ID NO: 16178 - protein, 528 aa, synthetic construct
MLDNSNVAPGKNKTLRCAIYTRKSHEEGLEQEFNSLDAQRESAEHYIEAQRMRGWTALPDRYDDGGFSGGNMERPGLRRLLADIDAGKIDVIVVYKVDRLSRSLLDFMKMIDLFNEKGVSFVSVTQHFSTTDPTGRMFLGILITFAQYEREVIAERIRDKVAAAKRRGKYCGGVPIIGYDVDRENKKLLINPDEARTVQYIFRRFIQIGSAKKLGQELNEQGYRTKAWTTKKGKVREGSEWNTAHIYRLLNNRIYIGEIAHKDRSYPGEHEGIIDRATWDKVKAILEDNKPVKVSMARTKMVAPLKGVIRCGHCGCSMGPTYARKNGRHYTYYICQKDSKRTVSRCPLKRIPAGDIEQAVIEQLSAVFRTPTLVAKTYFAARDIEQAERERLFKQKAQLEMELSQAREQALELMKPGSDQPGKTEMLTTVNRQAVELSKQLTHVSERCRAYRGNSITEQDVSEAFQNVEGFWEDLFPVERNRLIRLLVDKVEIRETGIDMELRTNGLTTLIAELAGLACEVTERRVSR

SEQ ID NO: 16179 - protein, 545 aa, synthetic construct
MLYSNSSFTKIQAVGYCRFSSDMQREESIDAQKRYISAYAAQGEYQIDHFYCDRARSGKNTKRPAFQQMISDAKQGKFQAIIVHKLDRFSRSTEDTLRIINELKNFDVSVISAYERFENNPMGELMLKFVSGMSEWYIANLANEVLKGQRENAYKGLSNGGRGCLGYNIVNKKYVINEEEAKAVRLIFQMYSDGYGYNSIIDRLNALGYRTKADRPFGKNSLYAILNNEKYTGVYIFNQIAKSDSRGKRNSHKKKPDNEIIRIEGGVPAIISKELWNRVQAIRQINPKGKSHNKYFYLLSGLIYCGECGSKMHGNPRNTGNGGPTYVTYRCNRRDNNHTCGNGEVRKEYVESFVIEELFDHFFNSTAVPEITRQLNKKLKESSNSSDDEYKEYNATLKILKKSRDNLVEAIESTGYNQALGAKLKDLEKQIGDCETFLQKCENRRKNIPVFTEEQVVQNLSKIKEFAKSSHKEEVRAMIQQYVERVTVFHDRVEVIFKVAFNSGSENPTTFNCDSSVSRFNLEHYSKVNLLEKAETDEQENLHTA

SEQ ID NO: 16180 - protein, 514 aa, synthetic construct
MKTVIYARYSEGGNQTEQSIEGQIRECKQYAKAHDLTIVDSYIDRHITGKSDNRPQFQKMIKDSSKHLFDAVIVWKTDRFARNRYDSAIYKNQLKKNGVKVFYAKENIPDGPEGIILESMLEGMAEYYSAELSQKIRRGMRESAHKCHVTGGYLALGYKIGPDKSFEIDEQQASIVQKIFKMYDQGESITEICAELNAIDAKTARGGQFNKNSLRTILKNEKYIGVYDSQGVRVEDGVPAIIDRALFDRIQQRISAVRKAPARKKAKIDYYLSGKLYCGSCGAGMAGEYGTGKHGEKHYYYNCTNKKRLKTCDRKAVRKDWIESLVVGATQEYILQPGKLESIAKRCVEVQAQDTSQNDELRALQKQLSETKTHIKNLMAAIEQGIVTKTTKKRLSELEAAQEQIEYNIEECSIRQPDLAEQDIRFLLSQFRRETHEPLEEYTEKIIKTFVNSVRLFDDHVIVAYNLVNEKNELESSFLKFLSDPENLDKSGIPGCSDLELFGGDDGSRTRVRR

SEQ ID NO: 16181 - protein, 519 aa, synthetic construct
MSKANAEPKRVVRCAIYTRKSSDDGLELDFNSLDAQRESAEAFIASQRGDGWQVITTRYDDGGFSGGTMERPALEALLEDIRAGLVDCVVVYKVDRLSRSLLDFTKIIGTFDAHHVAFVSVTQHFNTTHSMGRLTLNILLSFAQFEREIISERTRDKIAASRKKGIWGGGRPILGYDIERSPGGSRLLANEIEAERVRSIFSMYLELGSMSQVLRQLDELGWQNKQWLGKDGRVMGGRTFNKSQLFCLLTNPGYIGKIRHKDNLFDGLHEAIVPADLFSKVSTALRENRTNDGRGANNSRCALLRGLVRCKACGCAMTHHFTASKGKSSAKREYRYYVCTRAQKRGWNCCPAPSLPAEELEHFVVAQIRAVGSDNATTAAAVRAAQVRLKARSQELREASAVEVARIATFTAEARQLHEAEPTPAQDAALAALRENIRLAKARMARLEAQATAIDARLLDRDELTGVIEAFDPLWEALRFEERERLVRILIKSIEYDASCESVSISFRSSDAPAATEAA

SEQ ID NO: 16182 - protein, 507 aa, synthetic construct
MKRVISYIRFSSEKQAKGDSLRRQSKMVTDWLKAHPEYYLDQDLSFRDLGVSGFTGKHLKGGLGDFLTAIEKGLVKAGDTLLIESLDRLSRQDVDQASELLRNILRSGVDVVTLSDGEHYTRESLRDPLALIKSILIMQRAHEESLRKAERIQAAWDAKKEAAKAGIKVSKRCPAWLKLNDDRKSFSVIPEKVETVKRCFQLRLEGKSIWEIVRTLNDEGHQSMSQYKPGSFGQSSVQDLLKNRSVIGYFTPKGREEIAGYFPPIIPETDFYKVQQLSYSRYGRKPASDKPLSVNLFKGVIRCSECGHALIITGFSDTRNGIYRCPLRNENRCSAKGLSRKQTDGTLLALLSRLDRFDSDTTNIIDMLRLHREHVSSNIEKLVQLSLEIEDLNAITSKLKQLKGELSQVDADIEKETQRLKSIDVGCLSDCDLTTKAGRIEAQLIIKSAVKEVVLNTAKRRCKVTFHNGKTITLSITENPSEDVTEAIQSLSEAIERGLIDVDVVEI

SEQ ID NO: 16183 - protein, 507 aa, synthetic construct
MKRVISYIRFSSEKQAKGDSLRRQSKMVTDWLKAHPEYYLDQDLSFRDLGVSGFTGKHLKGGLGDFLTAIEKGLVKAGDTLLIESLDRLSRQAVDRASELLRNILRSGVDVVTLSDGEHYTRESLKDPLSLIKSILIMQRAHEESLRKSERIQAAWNRKKELISEGIKVSRRCPAWLRLNDDRKSFSVIPDKVETVKRCFQLRLEGKSIWEIVRTLNAEGHQTLNQYKAGSFGQTSVQDLLKNRSVIGYFTPKGCEEIAGYFPPIIPETDFYKVQQLSYSRYGRKPASDKPLSVNLFKGVIRCSECGHALIITGFSDTRSGIYRCPSRNENRCNAKGLSRKQTDGTLLALLSRLDRFDSDMTNTVDTLKLHREHISSNIEKLVQLSLEIEDLNAITSKLKQLKGELSQVDADIEKETQRLKSIDVGCLSDCDLTTKAGRIEAQLIIKSAVKEVVLNTAKRRCKVTFHNGRAITLSITENPSEDVTEAIQSISEVTERGLIDVDVVEI

SEQ ID NO: 16184 - protein, 559 aa, synthetic construct
MKTKLYSYIRFSSMRQNDGSSYERQIRMAREIAAKYDLELVNDYQDLGVSAFKGANSKTGALSRFLDAIGRSVPVGSWLFIENLDRLSRADIVSAQELFLSIIRRGITIVTGMDNKIYSLDTVTANPMDLMFSILLFIRGNEESQTKRNRTNSSALIKIKAHQENPQNPAVAIEEVGKNMWWTDTTSGYVLPHPVYFPVVQEIVELRKNGRSTAEILDHLNETYAPPPAVSNKKHSKWSRAMVERLFHTRALIGIKEVSVDGVNYELKDYYPRVIDDATFYHLKKNIGARAWNFGDKEEAKPIPLLSGIGLLKCDHCGCAMVKVKGTNKRSDQYRYTCDATRSRRLDCEHPNWSFRGDQLEKAVLQLLADKIWIAEDKANPVPALKVQVDEISRKIDNLIALSAMTGATKELADQITTLNSERETLYNQIKMAEEEMYSVDSQGWEKLAEFDLEDVYNEERLKVRFKIKQALKRIGCSRIDRNKNLFVLEYIDGKTQRVVIENSRGTRKGRIFIDLKTINDRQILESNGLVLHPCLDMLTDKNWKPEEEIPGPLQEFGI

SEQ ID NO: 16185 - protein, 506 aa, synthetic construct
MRSVITYLRYSSAIQGAEGADSTRRQNDLFKQWLKKNSDAQVVASFSDEGLSGYKGKHLTGQFGDMLARIESGEFPEGTILLVESIDRIGRLEHLETEALMNRILGNGLEIHTLQDGLIYTKDALADDLGISIIQRVKAYIAHQESKQKSFRVSQKWEQRAKLALAGEQRLTKMVPGWIDPDTFKLNEHAETVRLIFKLLLSGESLHNIARHLQSNGIKSFSRRKDANGFSVHSVRTILRSETTTGTLPASQRNDRPAIPNYYEAAIDASTFNKAQEILGKNRIGRTPASDNPLTINIFKGLFRCQCGASVHPTGTKNKYQGVYRCNNHLDGRCDVPPLKRKPFDKWMIDNFLGMIDVGNDGEAEGKIASLQHEVEIVTTRIKKATALLLEMDDIDELKIQLKELNQKRTELQTTIDNMRRKASLTDKELPQLKDIDLTTKAGRVECQLILSKHLKGLTLGKDSVTVTLQNDTEITIPTNPLPLNDGSPIFEIADKELLDIDAYQL

SEQ ID NO: 16186 - protein, 562 aa, synthetic construct
MQKILYPYVRFSSEQQSGGSSYHRQLGDILKYAKENGYTVNDSLELRDLGLSAYKADHIKKGSLGDFFDAIDSGVIETDGSAYLCVEQIDRLSRQSLDDASDVLRTILRANINVITLMDKMIYTKESLNDLMSVLYSSMLMVQANKESAVKSERILKSFDRRIDKLNNGEPIQYVGIFPGWIDNKGTKQKKDFVVNDKAKIVQRVFKMYIAGTSMGDIARIFNDKGIEQVAKRRHKNFTNSWSSAKINHLLKNRCVLGDLHIKKTGEVFKNYYPQIISIDDWDVVQSMTTTKKTTKYSGRKSINIFTGKIFCSGCGQKYYFETDDKITKKGRTLYYMLKCQGRRILGCKSKSIKYDDFLSSTPNLFGMITKTKKDNSEEIKKIKQKISDISSKTREIEKNINTLENMNDNGSLDYETYLKESSKQRKKIRINDTRVADFKANIARLSSDNKLNHFDKTDPISIIKGKRFVNENFAGFVISSDSKSCTALYLNGQVVHFLLQNSKIEKKESINPVDGFGEFFELKEEIINAYKSGKMDGRFIEILRAANFWGVDTSEKDYSLE

SEQ ID NO: 16187 - protein, 506 aa, synthetic construct
MRTVITYLRFSSATQGAEGADSTRRQNELFKQWLRKNSDAQVVASFSDEGLSGYKGKHLTGQFGDMLARIESGEFPEGTILLVESIDRIGRLEHLETEALMNRILGNGLEIHTLQDGLIYTKDALADDLGISIIQRVKAYIAHQESKQKSFRVSQKWEQRAKLALAGEQRLTKMVPGWIDPDTFKLNEHAETVRLIFKLLLSGESLHNIARHLQSNGIKSFSRRKDANGFSVHSVRTILRSETTIGTLPASQRNDRPAIPNYYEAAIDAATFNKAQEILDKNRKGRTPASDNPLTINIFKGLFRCQCGASVHPTGTKNKYAGVYRCNNHLDGRCDVPPLKRKPFDKWVLENFLGMIDVGNDGESERKIAALQHEVEIVTARIKKATALLLEMDDIDELKIQLKELNQKRTELQTTIDSMRRKASLTDKELPQLKDIDLTTKAGRVECQLILSKHLKGLTLGKDSVTVTLQNDTEITIPTNPLPLNDGTSIFEIAEKELLEIDAYQL

SEQ ID NO: 16188 - protein, 506 aa, synthetic construct
MRHVITYLRYSSAIQGAEGADSTRRQNDLFKQWLKKNSDAQVVASFNDEGLSGYKGKHLSGQFGDMLSRIESGEFSEGTILLVEAIDRIGRLEHLETEALMNRILGNGIEIHTLQDGLVYTKDALADDLGISIIQRVKSYLAHQESKQKSFRVSEKWKQRAKLALAGEQRLTRNVPGWIDPDTFKLNEHAETVRLIFKLLLSGESLHNIARHLQSNGIKSFSRRKDANGFSVHSVRTVLRSESVIGTLPASQRNDRPAIPNYYEAAIDAATFNKAQEILDKNRKGRTPASDNPLTINIFKGLFRCQCGASVHPTGTKNKYAGVYRCNNHLDGRCDVPPLKRKPFDKWMIDNFLGMIDVGNDGESERKIAALQHEVEIVTARIKKATALLLEMDDIDELKIQLKELNQKRTELQTTIDNMRRKASLTDKELPQLKDIDLTTKAGRVECQLILSKHLKGLTLGKDSVTVTLQNDTEITIPTNPLPLNDGSPIFEIADKELLDIDAYQL

SEQ ID NO: 16189 - protein, 507 aa, synthetic construct
MKRVISYIRFSSEKQAKGDSLRRQSKMVTDWLKAHPEYYLDQDLSFRDLGVSGFTGKHLKGGLGDFLTAIEKGLVKAGDTLLIESLDRLSRQAVDRASELLRNILRSGVDVVTLSDGEHYTKESLRDPLSLIKSILIMQRSHEESLRKSERIQAAWDAKKEAAKAGIKVSKRCPAWLKLNDDRKSFSVIPDKVETVKRCFQLRLEGKSIWEIVRTLNAEGHRSMNQYKPGKFGQTSVQDLLKNRSVIGYFTPKGCEEIAGYYPSVIDETTFYKVQQLSHSRHGRKPVSDKPLSVNLFKGVIRCSECGHALIITGFSDTRNGIYRCPLRNENRCSAKGLSRKQTDGTLLTLLSRLDRFDSDTTNTIDMLRLHREHISSNIEKLVQLSLEIEDLNAITNKLKQLKNELSQVDADIEKETQRLKSIDTGSLSDCDLSTKAGRIEAQLIIKSAVKEVVLNTAKRRCKVTFHNGKSIILSITENPSEDVTEAIQSLSEVTERGLIDVDEVII

SEQ ID NO: 16190 - protein, 506 aa, synthetic construct
MRSVITYLRYSSAIQGAEGADSTRRQNDLFKQWLKKNSDAQVVASFSDEGLSGYKGKHLTGQFGDMLARIESGEFSEGTILLVEAIDRIGRLEHLETEALMNRIIAHGIEIHTLQDGLIYTRDALSDDLGISIIQRVKSYVAHQESKQKSFRVSQKWKQRAKLALAGEQRLTKMVPGWIDPDTFKCNEHAETVRLIFKLLLDGESLHNIARHLQANNISSFSRRKDANGFSVHSVRTVLRSESVIGTLPASQRNDRPAIPNYYEAAIDAATFNKAQEILDKNRKGRTPASDNPLTINIFKGLFRCQCGASVHPTGTKNKYAGVYRCNNHLDGRCDVPPLKRKPFDRWMIDNFLGMIDVGNDGESERKIAALQHEVEIVTARIKKATALLLEMDDITELKAQVKELNQKRTELQTTINTMKRKTSLSDKGLPQLKDIDLMTKAGRVECQLILSKHLKGLTLGKDSVTVTLQNDTEITIPTNPLPLNDGSPIFEIADKELLDIDAYQL

SEQ ID NO: 16191 - protein, 501 aa, synthetic construct
MKSKAWLYARFSSSKQIDGDSINRQQKKAEEWCCSNGVELQQTSFHDLGVSGWKSVKRPMFEQLIKAMEEGKIPSGSYVLFESTDRLSRRGWEHTRELIKQITVKHGCKLVIMDKGQVHTRENVNDVVQNTFLMFSADLAEKESQRKSDLVAAAYKSKRQNGDVSRWPFWLDKQGDKFVFNERADIARLILELRLKGIGALGIAAELNRRGYKPIRGKSWGHTSVRIVIANSAMYGTKDFFTTKSKTELDDLCNEVRTSPKELVSSIPNAFPAICDFDTWSKIQINGVKPGRKSTGTAFHNMIFCSCGSAMGIQVGSSGERYRKCSRAKVGACSQKMIRNFDQTLVECLGKITYKSVVNQHQNKLPELTERLTKLEKVKTMLIDSGDVDSLKEVYKDITTVKGEIAAESRIVTVPTTVIKEVFSLSIDEQRLTLRKLISNVVVDRKNNLCKIRVNLTNGHKMVFGVNIGTGVKSGINQIVFETNTEKFLAEIKNLTANELP

SEQ ID NO: 16192 - protein, 497 aa, synthetic construct
MTQAILYSRFSSTQQADGDSLRRQTELAERFCMTHGLELSSMTFEDLGVSGWKEVQRDGLKSLLRAVERGVVPNDSFILVEAADRLSRKGWEDVTKIVSELVSRGCSLVTIENGQIYNSTNFKTLAGVLPLMISADLAKQESDRKSQRIRSVKTSKRTNRVIQGNQPFWIDIIDGVPVLNNKASLARRIVDLSLSGKRPLAIVREFNTERLESPNGGIWQVAVIRSILKNTILYGAKTYFESRDGEYKAVETVAGLYPKICTKQEFDIIKTGSGVKGRKAKGPFSTLLRCSCGRPLVIKGRRKRNKDTSEVDTYRVCSGSIDGVCTLKGYYKNIDEILLGLVSYIEVPTDKPAPINNDDRISELEQRLIDLDIMRKENKGKTRILQMVFEEIEEVENELEELNKEEVIDQTEVDLKTILDIEDSDNQNALLKRIIKKIECKKEGYLTHVHIVFKTRFQRKFIIDQSRKLKGGYEIKKVGVGDERLKQELAQFGQEEE

SEQ ID NO: 16193 - protein, 559 aa, synthetic construct
MSKEKIKVYLYTRVSTSIQIEGYSLEAQKSRMKAFAIYNDYEIVGEYEDAGKSGKSIEGRIQFNRMMEDIKSGKDGVSFVLVFKLSRFARNAADVLSTLQIMQDYGVNLICVEDGIDSSKDAGKLMISVLSAVAEIERENIRIQTMEDRIQKAREGKWNGGFAPYGYKLEDGKLFINEEEAVAIRTIFDQYVNATIGANGISKYLENHGIRKIPRQNGKNPLFDAGLIRKILKNPVYNGKIAFGRRTLEKVHGTRNEYKQVEQDEYLISEGIHEAIVSDEVWQAAQVKLKSQAKKYEHVNKGKDTRTHLLSGIVKCPICGVGMFGNKCIKKKKDGTKYKDFYYYGCNHRQMIRGHKCTFSKQIREELLDDAVAEVIVKIVSNPKFASMMQEKINMKVDTSEIEKEIDNYQKELRKSHSTKFKLIEEIDNLDVEDKHYKRRKQDLDDRLYRMYDKIDELESSLIDAKAKKQTIEAEKLTGDNIYKVLIYFDKLYKVMNDVERRQLISALISEIQVYEEKQSNGQWLKSITFKLPIIEENLNIDLDNDEQVECVSLLEKRS

SEQ ID NO: 16194 - protein, 597 aa, synthetic construct
MKKNNVEIIKADSLVRRRGDNVERHLKRVAAYCRVSSDSEDQKNSYDSQVRHYKEYISQSSDWELADIYADEGISGTQVGKRQDFQRLINDCANGEIDYIVTKAIARFARNTLDTLKYVRMLKDMQIGVYFEEENIDTLTMDGELLLTILSSVAQQEVENTSAHVKKGLKMKMQRGELVGFQGCLGYDYDVETKQISINKKEAKIVRYIFERYLEGIGGKVIARELDELGYKSPRGLEHWNDTTVLGIIKNEKYKGDILMGKTFTVDPISKRRLSNFGEEDKYYIKDNHEPIISKEDFEKAQEIRLRRAGNKKTAANVNGKRERYSKMYAFSSMLECGFCGSILSRRSWHCRSDYRKVVWHCVTSIKKGKKFCKHSKGLEEIAIEGAFLEAYRQVYHSNENLMTDLLETIESELNDNSLNKELKRITNKLRILLKKEENLVNLRLEGKVSDSIYNEKYNEISSEKEFLAEEKVNIETTLKSEIDVKKRLTEFKHLLSSQKMLTEFDRAVFESIVEKIIVGGVNSNGEIDPAMLTIIFKTGEIQNKDGKQFKSKRKNAKLETDKLCPQNSDEDKKLYSQGTDNTRGVCSVAGSILASQ

SEQ ID NO: 16195 - protein, 481 aa, synthetic construct
MKTMNKVAIYVRVSTTNQVEEGYSIDEQKDKLSSYCDIKDWNVYKVYTDGGFSGSNTDRPALESLIKDAKKRKFDTVLVYKLDRLSRSQKDTLHLIEDVFIKNGIEFLSLQENFDTSTPFGKAMIGLLSVFAQLEREQIKERMQLGKLGRAKSGKSMMWAKTSYGYDYHKETGTVTINPAQALTIKFIFESYLRGRSITKLRDDLNEKYPKHVPWSYRAVRTILDNPVYCGFNQYKGEIYPGNHEPIISKEEYDKTQSELKIRQRTAAENVNPRPFQAKYILSGIAQCGYCGAPLKIMLGVKRKDGSRLKKYECHQRHPRTLRGVTTYNDNKKCDSGFYYKDKLEASVLKEISKLQDDADYLDKIFSGDNAETIDRERYKKQIEELSKKLSRLNDLYIDDRITLEELQSKSAEFISMRGTLETELENDPALRKNKRKADMRKLLNAEKVFSMDYESQKVLVRRLINKVKVTAEDIVINWKI

SEQ ID NO: 16196 - protein, 481 aa, synthetic construct
MIATNKVAIYVRVSTTNQVEEGYSIDEQKDKLSSYCDIKDWNVYKVYTDGGFSGSNTDRPALESLIKDAKKRKFDTVLVYKLDRLSRSQKDTLHLIEDVFIKNGIEFLSLQENFDTSTPFGKAMIGLLSVFAQLEREQIKERMQLGKLGRAKSGKSMMWAKTSYGYDYHKETGTVTINPAQALTIKFIFESYLRGRSITKLRDDLNEKYPKHVPWSYRAVRTILDNPVYCGFNQYKGEIYPGNHEPIISKEEYDKTQSELKIRQRTAAENVNPRPFQAKYILSGIAQCGYCGAPLKIMLGVKRKDGSRLKKYECHQRHPRTLRGVTTYNDNKKCDSGFYYKDKLEASVLKEISKLQDDADYLDKIFSGDNAETIDRESYKKQIEELSKKLSRLNDLYIDDRITLEELQSKSAEFISMRGTLETELENDPALRKNKRKADMRKLLNAEKVFSMDYESQKVLVRRLINKVKVTAEDIVINWKI

SEQ ID NO: 16197 - protein, 452 aa, synthetic construct
MKAAIYIRVSTQEQIENYSIQAQTEKLTALCRSKDWDVYDIFIDGGYSGSNMNRPALNEMLSKLHEIDAVVVYRLDRLSRSQRDTITLIEEYFLKNNVEFVSLSETLDTSSPFGRAMIGILSVFAQLERETIRDRMVMGKIKRIEAGLPLTTAKGRTFGYDVIDTKLYINEEEAKQLQMIYDIFEEEKSITTLQKRLKKLGFKVKSYSSYNNWLTNDLYCGYVSYADKVHTKGVHEPIISEEQFYRVQEIFSRMGKNPNMNRDSASLLNNLVVCGKCGLGFVHRRKDTVSRGKKYHYRYYSCKTYKHTHELEKCGNKIWRADKLEELIIDRVNNYSFASRNVDKEDELDNLNEKLKTEHTKKKRLFDLYISGSYEVSELDAMMADIDAQINYYEAQIEANEELKKNKKIQENLADLATVDFDSLEFREKQLYLKSLINKIYIDGEQVTIEWL

SEQ ID NO: 16198 - protein, 533 aa, synthetic construct
MTKKITKIEPVSVQVALQLQPKKRVCAYCRVSTDSREQQNSFSAQVKYYTELIGKKDDWEYAGIYADEARSGTKLQKRDEFLRMMKDCEAGKVDMIITKSVTRFARNTVDSIQAIRKLKALSIAVYFEKEHINTLSEKSEQMLTILSSLAQGESEGISTNTKWAVKKRFQDGSFILGCPAYGYTKDEASELIIKDEEAVVVHRIFKEYLNGKGSYVIAKGLSEDGIPTIRNAEKWQDSVVKEILQNPIYTGDLLLQKTFTTEVVPFKRKTNKGQLPQYFISENHEPIITREQFEAVKEIYEYRREQMGIDDSGKYQNRYAFSSNIICGECGSTFRRQKIYIGKPYEKIQWCCSQHIEDKSKCSLKGIREDVIERAFIVMWNKLTSNYTEILIPMLESLKGLRIDEQQEQEISECNNRIMELTEQSHILSSVVAKGYIDSAVFIERQNTLTLELTAAKKKRSQLLDSNGFDREIARTELLIALIQSNPNILEEYDENLFLQAVDKIILHENHTITFRLKNSLELTEYCGKEVDE

SEQ ID NO: 16199 - protein, 518 aa, synthetic construct
MPKAISYIRFSTKIQSVGDSTKRQSKYINDWLKRNPDYYLDESLRFQDLGISGFSGANAKSGAFGEFLAAVESGYIEAGSVLLVESLDRVSRQDIDTAGEQLRKILRSGVEVVTLVDNEWYTKESLKDSLSMIKAMLVMERAHEESAMKSTRLRSVWAAKRERAAKGEIMSKRCAAWLKVSEDRSRFEFIPENVKAVQRVFQLRLEGLSHVRIAKQMNDEGFSTLNQFKSVTGGWSQSSVTELLSNRAVIGVKVPSKSMVIKGVSEIPNYYPSIITDEQFYAVQQLKQGSGRKPSSDLPLLTNLFKGVLRCSECGFIVVVAGVSAKRSGIYKCSMKSEGRCNSVGFSRLQTDRALVQGLLYNTNRLSLNRGNGSAIGSLQSELEELHKQRERLIKLAMLADDTESMAKDLKALNSQIKEAEKAVSEVHQREQSSQLETISHLDLTVKKNRIEAQIIIKRIVKEIRLNTAGKKCDVFLHNGLKLLNFPLDRVVDGEIFLEVLPVLDCDEFDFDTYRMIE

SEQ ID NO: 16200 - protein, 560 aa, synthetic construct
MTKLYSYIRFSSMRQGEGSSYERQIKMAKEIADRYGLELVNDYQDLGVSAFKGANSKTGALSRFLDEIGRSIPVGSWLFIENLDRLSRQDIISAQELFLSIIRRGITIVTGMDNKIYSIETVTANPMDLMFSILLFIRGNEESQTKRNRTNSSALLKIKAHQQNPQSPAVAIEEIGKNMWWTDTTSGYVLPHPVYFPILQKIVKMKQEGHSTGSVLDYLNEHHEPPAPTSNKQHRKWSIAMVSRLFKTKALIGVKEVTVDGVQYELKDYYPRVLSDSEYYFLKNNLIKKAWSFGHAQEKTIPLLSGIGLLKCAHCGSPMVKRKAANGKVEQYRYTCDGEGSGRTDCLYPNWGFRASSLEGAVLQLLADKVWIAEDKANPIPEIQVQIDEISRKIDNLINLSAMTGATKELANQITDLNTQREALHEEIRLFEREMYSVDSQGWEKLAQFDLSDVQNEERLQIRLKIKGALRSIECARVDRNKNLFVLVYLDGLRQRIVIENNRGIRKGQIFVDLKTINDRQILESAGMVLHDHIDILIDEKAFYDGLPKEEDGPLSKFGI

SEQ ID NO: 16201 - protein, 514 aa, synthetic construct
MNREKEICAIYVRVSTDEQESSFNNQVSILKEYIQQMGLGVVSEAHIYRDFGISGYLGSIYDRPQVKRLRHAVSQGLIKAVVFKGISRFARDTQDALDLLSRFKSQGLRVLSYEESYDSNKPDSDFMFTVQAALAEQESVKTSLKVRMGKKQRAKDGKWNGPPPYGYLVEKSTGKLVPHPEESIVVKKIFELCTKHNYGALRISRHLSSQGILYRNSNNWSSKNVLGMLKNEVYLGRILYNKTSITTYRDYSNSENGQKKSKRVKNDKKSWTIIDDCHPAIIDKETFEEARRLLAQRKDAIPYIKPRYAKHLLSSIIKCPNCGSSYIVLKRKERKTNRVYVCSLKHKQGASYCDSARIPADELENYVLDVVRKDLKSIVSREALSKLIVGVDTPTGELEAKLEIITMKLQKLNEDMYDLFQNRDQLTPNQYEFMQSKIKEDTERLEKEHAQVGGELDNIGNTDYLVDSVWGKIEEFISLKVTDTMRLRSILETLIEKIHVLPGNHVKIYYKFKI

SEQ ID NO: 16202 - protein, 482 aa, synthetic construct
MSATACGVYLRISQDRDGEGLGVARQEEACRALADKLGWVVAEIYEDNDVSAYGSKVRPAYQRLLKDIEDGKIAGLLAWHPDRLFRRPIELEHFIDIVAKAGLQIHTVESGTYDLSSDSGQAIARTLGAWARYESAHKGKRIAAARKQAAIAGKHHGGVRPFGYEKDGMTLRKAEAAEIFRAAEEILAGASLRSLVQDLNSRKVSTALGAPRWTSQTLRDILLSPRTAGLSTWRGEVVGKALWPAMIDEDKWRAVGAILNNPARRTRPAVGGAVKWLGSGLYICGVCGERTLRVGGGGSVGRRTYRCANRNHEKTTGHVTREAKSLDSFVEHSVVTRLSVPGVIEGLLAPVDTTVDVDALRVEKVELEERLDEQAVLHAQRVITARQMAIGSEVMVRRLTEIDAVLARQVGSGPFAELAGVEDLRLGWFGSEEGEVDVVSPLSLAIRRMIVDAVVDVTVKKVPDDQRTRDFDPRHIAMDWKV

SEQ ID NO: 16203 - protein, 550 aa, synthetic construct
MKRQPDKKIYLYGRLSHEDELQGDSNSIINQRKILTKYAEENGFTPYEFIYDDGFSGADFDRPAFSQMIEEVEAGNVSTIIVKDMSRFGRDYLKVGFFTEVLFSEKDVRLIAVNDNIDTQRGENDFAPMMNIFNEWFVRSTSKKIRAVWQAKGKSGERLAVIPPYGYRKDPDNPKQLAIDEESAALVRRIFRLSVEGYGPAQIARLFNGEHILNPSAYKYEHGIVKKARPCKDPYYWNTTTVHKILDAPEYLGQTINFKTWSKSYKDNRPRLNAAENQLVFENTHPAIIDPETWDIVRSMRQHKRRSPRYGKPGLFSGVAYCSDCGSKLYFHTRSIKNKWGTRLEGSYSCAEYRKDVQYQGKRKCTCHFIRESQLEQLVLEELRDLLRYIPKHEKQFARVVMDRSAQEYKRETAAKKRAAEKHRRRIAELDTLIERLYVDNVSGKITDERYEKMSGKFEAEQEELTKALASMETKIAAEESQAVNVDRFLSVVRRYTEIEELTPAIVHEFIDRIIVHEPEQARGDRRQKVEIIYNNIGAVDRLALKGLGA

SEQ ID NO: 16204 - protein, 571 aa, synthetic construct
MTDKPRVAIYARYSSDMQNPKSVDDQFSECRKHAERNGYEVVKEYADAKMSGALRDRPGFQALLDAVHARSFDIVLFEHVDRLGRDLERASNFYKAATFADIELHQLGKGKLGLLDIGIMSTMAQIFLEDLALKTRRGLRGKFERGQSAGGKSYGYALRIGQDGLVQKGHVDIDDNEAAIVRRIFTEYASGVSPLKIAAQLNADGIPSPAANTKRATSGHWKQNTINGNPTRGTGILNNELYVGRRVWNRLRYSKHPDTGERVSRLNAVEDWEIQDAPDLRIIDQDLWDAVKAVQAGHRKVRSAKPATDKKGLSVGQSFRRRKYLLSGLMSCGQCGGNLTVAGSGKARRYYCANAKEKGASVCTGMRGLKEHDAATSILSGLKFGLMQDEAYADFREKFLARKKAEDEENGKVLKLHDRNIHQMETKIANIVRSVEDGDGLASFKQRLKELEADLQATRAKREAIKPEPVTLPADLPALYRAHIDDLAATLSNEAVTGRASDELHQMIDTVVVNWNAEAKHHELELRGKLLEMLNKAKPAGEAGLGKVESSLKLVAGGRNRRNLPALRCGI

SEQ ID NO: 16205 - protein, 572 aa, synthetic construct
MTKCYSYLRISSDQQKRGDGIRRQLEASKRYAQEHNYQLIEELQDIGVSAFRGKNSKEGALGVFIAAIDAGTVEPGSVLLVESLDRLSRDNVLIAFAQFTAILSKDITIVTLVDNQIYTTESVAQNVGQLFTSMGIMLRAHDESATKSKRLAATWERKRTTIATKKMGANTSAWLEFGEDRNSFVIDEAKADIIRYIFQLSIDGWGVYSIVRHLNENPQKYPPIATSAKWGSSYVGLLLRSPSVYGEFQAKQKINGERVPVGEVIPDYFPAIVSRDTFNLSQARMKDRKTTGAGRKGVSVANLFMGIAKCGACGGNIIMRNKGKIRYLRCSNSLVSAGCNAPSWKYQDLEQAFIKFVREVNFAEIMADDLGGNKRKILEGERASAQAKMDANKVSYDALVARFDNPELSDALLSSLIARAKVIETELNEGTKILSALDEKLAELLVDNIDAEQNAFLSAYDATTDEDVIYEIRMSMAGLLKRVLDKIVLHNNMTIFPPEADDLINDKLRAELGNRNLETYFSKDYGVRKYVESERFLVVQFKTGTKRVVVPYLGTTYLSVNERLVQLRARLQ

SEQ ID NO: 16206 - protein, 556 aa, synthetic construct
MTQPLRAVIYARFSTDMQRDASIDDQIRSCREHAKRQGLNVIEVYSDKAISGASLMRSGIQKLLRDAQGNVFDVVSSEALDRLSRNQADIAAIFQKLQFRGIMIETVSEAMISEMHIGLKGTMNSLFIKDLAIKTHRGLKGRALAGKSAGGKAFGYQNVIHYDASGEPIRGDRKIDPIEADVVRRIFTDYAAGLSPRKIAEKLNEGGITGPTGRGWGTSTLHGNRERGTGILNNELYIGRQIWNRLAYVKDPDTGKRVSRLNPEADWVITDVPDLRIIDDALWDAVRARQGAMKVKNSDVPIWDRRRPRTLFSGLMACGCCGGGFSKVNKNSFGCSIARNKGKAYCTNMAMISQVELEELVLKALQDNLMDEDALKVFCEEYAKERNRLQATASQNRSALEKELAKTKADHAKLVDAIIAGVPAEQVKDKMIALDARRIELEAQMERDPAPSPIRLHPKLAETYRDKVATLIRQLQEPDGMLEAKGALRGLIDRIVLQPTKPDGKLAIHLEGALAQLLILSLGSKGNQGPRSKSQAIDNIDELVLVAGRPQPPQST

SEQ ID NO: 16207 - protein, 556 aa, synthetic construct
MTKAYAYIRYSRALQATGDSENRQLTALELFETSTGTKIVEVVYDKGKSAFRGDNARSGNFKEMLDRMQSGAIRPGDYLVVESIDRITRQRVLDGVELLQGILKKGINIYTTVDKKTYSYNDPSRDFENLLMISLIAKRANEESETKSGRLLSAWKARKAKAENGEVIIKKGKSIPYGLRVEEGQFVIHKEEQEEIKQLFELLLQFGINTAITKINETSLKKWNNGTLNKIIKHKTVIGCMATHRIEYTADGKAKKILTGFIENYYPNLIEPGLFYKAVDVMANRKQKNWTGRRTEQDFNVFKHCIFCAECGGKLYYDHRGSRYKGKIYPFFKCDNARVQKHVCTADNIRFEYVLGSLLESIKIINRIATEFKRDFKGISTQARFINPKINSLLKADNENNNLVLEEKQKQLISRRTKLDNMNTQMVEADYNVPTKFIQEISKTEKEIEVLNKEILLIHSAFADEGTINVQDTKTVIDLFMTDEGRAKLNYFFKTNDIIFIVSHKKSTRETRFSMRRKNDLIDERICNNFIKFPLKDILGVFGLGDLQTMFDLTVN

SEQ ID NO: 16208 - protein, 629 aa, synthetic construct
MPQLYSYIRWSTDRQDKRTTRTRQVAAAKAYAEEAGLEMVEIIEPGVSAFRGKNRAGKLGDFIDAVKNAAIPSDSWLYCENLDRLSRDQVDEALRLFLELIGLGLTIVTGMDRKVYNRDTIRQNPTDLMISILMFIRGNEESETKSNRTVGNVVALVERHKEGLPVNIKSVGRHPFWIDDTGSQYEAVKKHPFYWNIAREIIDMFLSGNGVYSVKKYLDEKYPNGLKGREWDYQVLKKMRDNRALIGERTINLRGVPYKLENYYPWLCKDEAEFFLLEKRKQQNNYKSKKDGADTIKLLSGLSILRCSKCGGTMHSFMNHGKARYICTNGVHLQKNCSGWSITAQLVEHCTMIALLIGYMDKSRKNGSDTTLIEEELNEKEKLIKSLDSKISNLVTAIAIAPDVNSLAHSLNEINSKRKELVLSVEKLKERLVSLQGKGSFEVDIMEFLILIQWAVFTNMEDNDRDKIRKIIDAIIEYIVVDKTNDCITIKIKYYGNDEVLVFGGVDRKPHWRFSIDFDTGKEGALTVLENDLINMPEIQKAVGYLHKLKESYVAMYDAAVTMLSEVGYPEIKGSQFWPNTGKHEKVTVAFEGIVYTISFNGRLPKAITSALETTGLTRQQFIENFKVQ

SEQ ID NO: 16209 - protein, 616 aa, synthetic construct
MPTAYSYIRFSTPEQKKGDSLRRQKELSERYAREHGLTLDTSLHLHDLGVSAFDGSNVTRGALGGFLKAVDDGRVVPGSYLLVESLDRLSRDRVKEALNLFLSIQNRGITIVTLSDGRVYDPETDNTADLIVSITIMARAHEESLTKSRRLKAAWTNKRTRLHEKKLTARCPLWMKLNDDRTHFQFIPERASIVREIIALAKNGMGQTIIAKTLNSRSVPSFSGNPKGWHPSYIQKILTSTALYGEYQPGIFESGRVIPHGEPVADYYPALITRVEFYSLQAYRSQNAVGGGKARKGETIPNLLSGLLRCGYCGNPMVIAGAAAKRIRSADGKEVKRPPKKVLVCDGGRRGLGCYAVQWGHKDFETSFLSFCRGIEFERILADVRSGSQESRDLTLDERIRGIEVEISAKDARIKNLMVAIEEGNAPASLVERIRSLEEEVVELARTKTQLSTELNLHRAARQELTSTAETARSMIDTMESMAGDELFRVRAALAAQFRRTIASVTLYPAGRLFTHEQVERQRAALIDAGWLADQVHRYVAETHPTEPRRQGRGNRGRYASRKDIGRFFNIETVNGGFRVVYPDFDDPATARIVAGVDETPVFAVNPEGQPLLATR

SEQ ID NO: 16210 - protein, 467 aa, synthetic construct
MRSAAVYARISADVEGAGLGVARQLEDCRKLAADRGWLVGDEYVDNDVSAFSGKPRREYVRMLADLKSGARDGVIVYNLDRLHRRPVELEEFVALCELVGVRDVATVTADIDLGNDDGLFMARIFAAFAAKESGRKSARIRRKMLQNAERGLPHGSVRPFGYEPDKVAVRCDEAAVVCEMVDRYLAGASIRSLTMWLNDSGVPPAASKAWRTSTVRQILCSGRIAGLREHHGQVIGAAAWPAIITPAQRDQVLARMTARALTKTRAPRTYLLSGLLRCGRCGNRLYSQARHVNPDNRVRRYVCLSGPDQGGCGRLTVVARPVEELLTDAVLTRLDSPQLADALAGKASVDADVAALSAQLDADTTRLDELAALYANATVTAREWIAARDPITARIAETRRAIAAATDTTDVQELVGTGRLLREQWDSLDIDRQQAVIKSVLDHAVIAPGTAGSRSLDIDRVRPLWRV

SEQ ID NO: 16211 - protein, 631 aa, synthetic construct
MKPKDTPKQYVIYSRKSKFTGKGESIENQIELCRQYIAMHFGEDASENVLVYEDEGFSGGNLERPQFKKMMKDSQKIAFAAIVVYRFDRISRNIGDFAKLIEDLGDRHIDFISIREQFDTSSPMGRAMMYIASVFSQLERETIAERIRDNMHELSKTGRWLGGTTPTGYASESLSSVTVDGKVKKACRLNPIPEEIQLVRTIFSVFMETGSLSKTDQYLLEHRCVTKRGKQFTRFAIRGILTNPVYMIADETAYQYLKENNVDLFAERSEFDGEHGIMAYNRTIQRPGKANQIRPMEEWIVAVGKHPGIVAGSDWGRVQAMLDVNKSKSYRRPRSNVALLSGLLRCGECGDYMRPKLTNRKNADDELIYTYMCSTKERSHGTVCSMKNCNGNTLDAKIIEEIRKLSADKETLTRLLAQTKKVISGSKEGYDAELALLREKHAETEERLKRLVESLSVASDTSAKYVMEQIDELHRESETQQARLSDLEALTEQSRMLHQEFAFHQEMIESFASAVDSATLEEKRRLLRTIVKKVVWDGKNAYVYLFAEDGEADLPPVEQPMYPLGEDSEWKMNVIFNGMRTVTDRSLRLHDCRCLRERHSYLINTPIFPSPAFPILNYSTFPLSTPQNMVH

SEQ ID NO: 16212 - protein, 487 aa, synthetic construct
MKIVGYVRLSRASREESTSIVRQREVIAKHCELRGLELVEIVEDDNTSATKTRLDRPGLTRVRELVRGGDADAVMVWRLDRLVRSVVDVGVLLDEGLQIVSATESLDTTSPMGRAMVEILQVFASMEAKTTGLRVSASQEHLRQVGRFPGGVVPYGYRAVPHPSGVGRALEPHPEEAAVVRRVADEVLAGSSVYAACVRMNAAGIKPRRAAEWGSTALQRVLRSDAVLGRVRTGSVRAPHPVTGKPHIVKPAELIRDDKGLPVVYWEPILPVEDVERLRALTDWTTTPGRAEATQRGRREKASRLLSGLISCPGCGGNLVRKTRRSSTGQDIYACHAAGQGRACPRGVAIECHRVEEEVERQFLAIVGRFFVVEQRVTVRDVPGLAAVDEALRHTTAALSRPGANLAPLMERLQRLHSERDRLDAAPAAPTVELVETGETFAESWKRLDMLGRRALLLSSGAEVAIAPAKQRGKWDPSRVTLTLTAG

SEQ ID NO: 16213 - protein, 651 aa, synthetic construct
MTSDDNRSDFYNSAAPPGETREEGRSAAKGLDFEAKQSVNPEDLTEGEPPMSLSYPPAPTTGSRLTSTVGLEHLFAKTNDVPVDPIHTGGDAVLYLRVSTTRQLNTAADLDEDGNSIATQREWGLKKTRQLKARIVREFVEPGQSAQTIDKRPEFKKLLQFIDENPNVRYVVIYMRSRAFRSFADATITKRRLEEKGVRLVSAKEEFGDGYMGDAMEAITDIMNEVQVRMSGEDIRAKLAHKVERGGSVGRAKLGYLNVRKDFDGRLVNTIDVDPVRAPLIAWAFEQYATNQYSVWQLASMLEDQGLVTRPSQKRPAKPLSPSALAKLLRDPYYTGIIRFKGDIYPGRHEPIISKETFIACQEILSRRNRKGDRDLIHFHYMKGMLTCGECARQGRQRRLVYSQSTGHGGTYEYWVCSGKQREGCRLGSIRMDDLEAAVARAVAAERFSPESLDAIRAEVDKTVAEFQASDREVKKTLRAEFVKLEAQEDRLIELAADGSLATSKLRERLEQVSLKKGAIQEKLAHTEERLHYGAELVLSHVDLLANPIDLFNRVPDHVRKDLLGALFTHLVVQVDDDKITISSERAEVNDALHHWDAQRHLAAEEHTPAKKKAPRISARGSLSTSETVHLSKGWNILNMVGLTGFEPATP

SEQ ID NO: 16214 - protein, 493 aa, synthetic construct
MRCAIYARVSTDLDVQKTSIDNQIEIFRKYASEHSWEIVNIYTDKKSGTKHNRPGLKALIEDGKLGKYDVILAKELSRLARNGRLSYELRDICLEHQIHIICLDNSVNTLEGNIQNFGLFAWLYENESSISSRRNKQAKLIKAENGKYIGSNPPYGYDVENGKLVVRTDYTPLIVQRIYNEYLSGIGMDTIAKKLSNEEIPSPSQVANKSNATPMWHGSTIKLILNNRHYCGDLVQLKSQTISVTSTKRKSNSEDQIVIENTHEPIISKSTYLSVQKLLSTRTRTTTAPKRHLFTNLLYCAECKRGMWFKANQKGYRCGGNIKHGNVFCENHKALKESHLYESIVKDLALLFKELQVNNVDTVLLKQFESKKKLIKNEISNIETEIQKLNKKKIQYYDLFLEKEITKIELEELRELVLLKIGDYQNRILNLNSQIEEIVQVDYLNDLKDSLNEFLSLSELTPQILHTFVKRIDYRIDGSIDIHYNFANPFIEE

SEQ ID NO: 16215 - protein, 489 aa, synthetic construct
MEQKRIGIWIRVSTDFQVRDESPEHHEQRARYYAKSRDWNIVEVYRLDAISGKTVMDHPETQRMLADIRSGHITGLVFSKLARLARNTKELLEFAEIFRNEKADLVSLAEQIDTSTPAGRLFFTIISAMAQWEREEISSRVAASVPIRAEMGKPLGGQASFGYRWENKQLVIDEREAPVRRLVYEIFKECQRKKTTADKLNMLGYRTRNGSRFSDTTVDRLLRDTTAKGIRLANYTKSMGEGKTWKVKPKEEWVQLPCPAVISEELWLECNAVLDEQKRRRVKIGRLSENLLAGIVKCQCGIPMYVYANSKKFTCKACKNGILETDINEIYQDNIKQYINSLSPQMLVDELETEIRKEEELLAGSAKRLSKIQKKMDELVELRLSNELDREHFAKLYKPLEQQFSELNSSIPELEAKIDYRKIQLKSTDYVLNEAKSLVDKWDNMDFQQKRAIVETVTDYVTIREKTIDIALAYLPGSMHTSQRNLRDS

SEQ ID NO: 16216 - protein, 500 aa, synthetic construct
MKTADLYIRVSTDEQADKGYSQRDQAERLEKYCQDKGIMVRKVIFEDHSAKTFDRPAWTNLLLTLRKQRGQTDLILFTKWDRFSRNAPDAYNMIRTLKSLGVEPQAIEQPLDMDVPENKMMLAIYLTAPEIENDRRGLNTFHGLRRARKEGRWIGLAPTGYINRTAENGKKYIALHGNQADLMAWAFKELSKGKYSIEQVFKKAVEMGLVCSKNNFLRQIRNTMYCGIIQIPSYKDEQAYTVRGLHEPIISPSLFYQVQDVISGKKNDFKTKILSDENVPLKGFLTCSRCTRTLCGSASKGRNAYYYYYHCSSACGCRLKAEMVNKEFLNFLKDYTLDQKTAELFKLVILDEFSNDSENNREYKARLVKQLTKSNNKLTRARELLLLGDLESSDYKIVKTECDENIIRTEAKLQDFSRKKYNKAQLELILNDAMDTICDLYTIYTKSGVEDQRRLIGSMFKEKFNFDNVQHRTAEMTETFSRIYLIKNQVRRKKEGAKSC

SEQ ID NO: 16217 - protein, 561 aa, synthetic construct
MSTSEQLRGFSLERQRKLIADFAAKNGLSVEEENTLEDIGRSSFSDDAQQKELTRFFENLNAGKYEPGDVFALENIDRLTRRGPVDAILKVNQIISKGLKLAIISGNEQRIIEDVNDVFTIINLSIDASRANKESKNKSDKGLSNWQEKRNLASTYKIAMTAQAPAWLDTEIFYIFDEEKKKNTKRRKYVLNEEKAEAVRLIFDLYSNGNGALKIKNILNERNIPTFKGAPYWEPSIITKILKNPATFGLYQPKKQGTGKRDLIAAGEPINDYFPPVITRDLFEQCEHIREGNSTRKGRKGKLFTNLFTGLLTCSKCGGPVHLINPGIDKRNKVQKSIYYLVCKRAKFTKECTTKRVRYDDFEIALLKAIQEINLADILNENNPLEILVKKQRSKETEINKKRKLIENFQRQFLENDGDLPSFMISQAKDAEISIKELEEDQREIASEIAQLNIYNSNVDNAIEELKENADYGTRSKINLLFHEIIKNISLDTENQFYTVRFKNGVMRVITAAGFIATTEEQTQADINAILQSIEGPRIPREIATDAEKLIEYLKAREVIE

SEQ ID NO: 16218 - protein, 501 aa, synthetic construct
MAKHGLEVDRHLEDAGTSAFHGKHAGSDGVLGQFLKEVRKGEIEKGSYLLIENFDRLSRDKIVRSNKIFTDLLFSGIKIVILDKNKIYDADNLDFGDWITALVEFERANAESQRKSDFSSKAWKLNRDKMHNGEIVTKKVPTWLKVENNTFIIDEVKIDRIRTLFRLSLSKGLQEATKEYNALYGEKLAIHQAQYLLGNRKLIGEHQPQKIHYNENGRLIRKDEGNPIPDYYPQVIDEELFLKVQSVITSRKPFSGRYSAQRYNVFRDLIFCRFCGGTIRYMNKGERDYFICTNSMTGKCGLKGQQSIRGKKVFGRFFKFTNGINIGTLLEENTNADEIKNELMKLENQKTKISNRLDDFKSQIKKMILDGEAIPETYNEIIVDLENSIIKLDDEIEIKNKELNKIISSFKSFYDLKEIDIEKIIYDKSQEAIEKRVQYNNELKNIIKKIQIDYLNDILHVEFSNGVNRHILNDELANEYNKDEIENSWASVVKSIAQKTN

SEQ ID NO: 16219 - protein, 547 aa, synthetic construct
MPIAVPYVRFSSERQSYGSSLERQETLIVKWLAHNPEYTRYERKFEDLGVSGSSGKHVEAGEMGKLLTAIDDGHFPAGTVVLVEAMDRFSRLPPMDTLNHLRSIVEAGIDLVTLDDGQRYDARSLKSNSLLYLAMKAQAAHEFAVRLSDFTVGSYEKRAARAKLKEQIKRRNPFWLTSEGELKEAEAAALAQVFTAFSNGVPLRALAIQYAQYFGNRQSLKHALRNPAAIGHWQRTTTTVIGGKKERVPDELIKGVFKPAVTEELFYQAQKLLDDLADQPVTVARKFPLAGLLQCGDCGANMVLLRQNSRQQTDTVRCYRRMQSNDKCTNQKTIPVPVVGWFYHETRKPHALRAYQRTKLPENTRQRIKLEGQIDQLKQRQKRLRQLVMLDDSDKDALEDYQKLVDEKQGLEQELASLPVVAETAVVGLGEFYGFLRSDPFAISNLLQQDGYRIICHRDGGLEVNFTTDDNPVSKAQYLGYARKYKMWEIKPNDAPPVFVDHHGQEQFPQHTVITTPQQWKEHIKGTDLSAYLDYNDLEDYHAASDS

SEQ ID NO: 16220 - protein, 543 aa, synthetic construct
MSKARVYSYLRFSDPKQAAGSSADRQIEYARRWAAERNLELDDTLSLRDEGLSAYHQRHVKQGALGVFLSAAEGGRIAPGSVLIVEGLDRLSRAEPIQAQAQLAQIVNAGITVVTASDGKEYNRERLRSQPMDLVYSLLVMIRAHEESDTKSKRVKAALRRQCQQWIDGKWRGIIRSGRDPHWVEIRDGQFALVPERVAAVREALALFSRGHGKTKILRTLTERGLSMSNAGNHGTFIYRLVRNPMLMGTRVFEIDKEEFRLQGYYPALLSPEEFAVLQHLADERKGTRVKGEIPGLLTGLGITHCGYCGAAMVAQNYMGRARKADGTPQDGHRRLHCVSDSQNSGCVVAGSVSIVPIERAIMTFCADQMNLTKLIEGDDGSAAVAGRLALARQKASGLQAQLERLTTALLADDGNAPPATFLRRARELEEQLSAERRVIESLEREVLASASTTAPAAADVWAKLTHGVLALDYESRVRARQLVADTFSRIVIYHAGFRPGEGTEKRIGIQLVAKHGNVRMLDVDRKSGGWRAAEDFDLRALT

SEQ ID NO: 16221 - protein, 556 aa, synthetic construct
MPTAYAYIRYSSKAQGEAGRDSVDRQMASIQAIVKARNLHLPPENIFSDTGISAFTGSNKTKGKLKDLIDMIGDLRVKSGDYIFVESIDRLSRQRLLQAKELVNGILEKGIVLITTIDGQRYEKPNDHNGIDDLQQDILLSVIAKRAYEESKTKSVRRKSAWNRAKKLAEEEQQIFNGHNPPYGIRYDKENNRFEIVEEEAKEIRDIFESLKYVGVSLSIKKVNAYAKRRWTNRNIKMMLDTKYVLGSYMAQRRDENRKKVFERYIEGYYPQIVSHELFNEAVSAMKSRAHRKHYGNQTVGSLNIFRHSVKCSNCNASMLFEKQKNPKGVIYPYFQCFTRKELKSGCDQPRFRFDLAFGVFLELVHFATTSSETINHSDWEKEAESVGSFQKTLFKLLTSTVKDKALEQKISQVKNLLLEQKNYQDNINKSFEAFKDGIIPSAFIKKASETESKIESLEKELAELNAEHSTRSISLNVHSYNDIIDLYRTETGRQKINKFFISNNITFNFSFEQKARMLRCKIYYKGIHVDVVNKKFPLHNPLKEFGIDNLNEYFN

SEQ ID NO: 16222 - protein, 559 aa, synthetic construct
MKASRVYSYLRFSNAKQADGSSIERQLEYATRWAAERGMTLDASLTLRDEGLSAYHQKHVKKGALGTFLRAIEDGRIPAGSVLIVEGLDRLSRAEPVLAQAQLAQIINAGITVVTASDGREYNFKSLKAQPMDLVYSLLVMIRAHEESETKSTRVKAAIRRQCEGWLAGTYRGPISVGHDPRWLTRDVNRNFVIVDAHAATIRMVIDHFKQGLGGVHIMRLPGAQEMLAAAGISVSSRVYEILRNPALIGDKVVRLDDHAYTLKGYYPALLTDSEFAELQHLLTQRGRRPGKGAAPGIITGMRLAVCGYCGSPMVSQNNLTRNGRGNGRPYDGHRRILCSGSLAAKRCEAGGCSIVPIERAVMNFCSDEMHLDRLLKGRVPTAPLEAKLALARQRIETTRKQLARVTEALMTDETTAPAAFMQKARELEAQLARQQTEVDTLERELETMRGKGNPATAKAWARLAKGVEAFEPAARLQARQLIADTFSRIVVYRHGFQPEEQSGTIDLILVAKNGNARLLHIDRQTGEWRAGSAANLRAIQDAGIPKIDAKASTSRRAA

SEQ ID NO: 16223 - protein, 558 aa, synthetic construct
MASIQAITKQQGIELPPENIYSDTGISAHDGSNKRKGKLKELIDMISDMHIKEGDYIFVESIDRLSRQRLLQAKELVNGILEKGVILITTIDGQRYEKPNETNRIDDLQQDILLSVIAKRAYEESKTKSVRRKSAWNRAKKLAEEEKVIFNAHNPPYGIRYNTELNCFEIEEEEAQEIRDFFESLKYVGVSLSIKKLNAYSKRKWSSRNIKHLIDTKYVLGAYMAQRRDENKKKVFERYIENYYPQIVSYELFNEAIAAMKNRAQRKNYGNQSVGSLNIFRHSIKCEYCQASMLFEKQTNPKGIVYPYFQCYTRKELKNGCDQPRFRFDLAFGLFLELIYQSTTGEDFDVHPWQNEIENTEIQYEWITRESGMRYRLPTQEDIDEEERVENFKELLIKLLSNRENQTKDNKKIVELNNLLLEQKSYRENLMKSFAGFTSGVIPKEFLEVVSKTEASINDIEQNLAELQTQINIKKTTINIYSENDIIDLYKTEDGRLKINQFFVANDITFKFNFDKTTRTLFAKIFQNGFEIDRIAKQFSLHNPLKEFGINNLNQYFN

SEQ ID NO: 16224 - protein, 561 aa, synthetic construct
MATVCYPYVRFSTGKQADGDSVRRQSEKIEAFIKAHGFDVDTRYEDHAVSSFRGKNATKGQLSIFLQKVRDGEIAKGSVLLIENWDRLSRQVVDASIDLFSDIIRAGMKIAVLDESCIYEDLTSTNYIRAIVQFERAHKESERKSDFSKNNWKGLHQKMASGEVVTKKCPSWLRVEDGKFVEIPEMTSLIRDLFEYSLSFGLSEACRKLNEKHGSSLKLHQAQYFLKNRRLTGEHMPVTYCSIKKKNVKTGQVIPDYYPQIISPSVFENVAEVIKGRRPFAGRQDKQYFNILRDLVVCSECGGSVRYMHKGAKQYYYCTASMSDQCVTEGIRSIRGEELRQVLFYHKQWTNITSYLSKSNKQFKDHRDSIAELRRKLALVSKKTSDLEEKWSAEEDQASSDTILHLLTVKREEQKAIKSQIELVEQQIRTMESAFSLGSETDGKDFVSILNAKTEEAAAERGKLNNYLKSIFEKIIIDFKSATLTTVVRPAFEGIVTPVTASIPVPADKRFTKGQAEGEFKRIGGGVTKRNPDKKPKLLEIPAELEGVVWKSERFVKPSAQ

SEQ ID NO: 16225 - protein, 562 aa, synthetic construct
MGKVFSYIRFSSAKQSAGDSYARQVRAAKTFCDDNDLELADPREYLFFDAGRSAFKGKHLDDTGELARFLSFVEDGTIPPGSYLVVESLDRLSRERVRDALPRFLDLLAKGINVYTSVDKRLYTRDYNELDLIISIISMSRAHEESATKGGRVSSAWRAKQKDARTTGKPLGKLRPLWLDVTPDRYVLNPDKAAIVRRIFDLSTKGHGSRIIAATLNQEGIPAFSTGRKNFSGLWGFSTVRHILDSRTTLGEYQPHIFIDGKRTPDGEPIKGYFPAVVTEDEFYLAHAARSSRKTHTVTKTTTNFNVLTGILNCYKCGAAMHLQGQRGRKYYKCSKATRGLCDAGIISAPRTEEVFKEMLPKVDSLSLVQDSSGRLQKSLQVVEGRIASLKARQNDAEASHAEFPSRITAKLLHELEAEIGALESERATISEQLASDKVMNKDDFFQKLDLVSFEGRVAANNLIKRLGLYIFVNKNGRTDETYWISKNNAIPLPFSSESPNLLFYLMHRGKEIRFEAMYDEYVDLQVAQDELSEVEAIFAKTESWDELPPELLALWKARHGV

SEQ ID NO: 16226 - protein, 562 aa, synthetic construct
MDKIIYPYVRFSSEQQSGGSSYKRQMDDILKYAKENGYTVNNSLELKDLGLSAYTAKHIEKGSLGDFLDALDAGVIEADGSAYLCIEQIDRLSRQSIDEAYQVFRKILKANVNVITLMDKKTYTKDSLNDLMSIMYSSMLMGQANEESAKKSERILKSFDKKIDQLNNNEPIQYVGIFPGWIDNRGTKQKRDFIINKKAKIVQNVFKMYIEGTSMGDIARIFNEKGIEQVAKRRHKNFTNSWSSAKINHLLKNRCVLGELYIKKTGEVYKNYYPQIISIDDWDVVQSMTSTKKITKTSGRKSINIFTGKIFCSGCGQKYYFETDDKVTKKGRTLYYMLKCQGRRVLGCKSKSIKYDDFLSSTPNMFGMITKTKKDNSEEIKKIKQKISEISSETKEVEKNINTLESMNDNGSLDYETYLKESSKQRKKIRVNDTRIADFKANIARLSSDNKLAYFDKTDPVSIIKGKRFVNENFAGFVISSDSKVCTALYLNGQVINFVLKNSKIEKQENVKAVDGFGEFFELKQEILDAYGSGKMDGRFIEILRATNFWGVDTPEKDYSFE

SEQ ID NO: 16227 - protein, 570 aa, synthetic construct
MRVSSEQQLSGDGLDRQESMLTRYFDDNASCYDFDPNYELIVDRGVSAFKGHHQRESAGLGGFFKKVRNGEVEKGSVLCVESLDRFSRENPFKCVEYISILDSYQIELHDVDKKLKIGRKYPNSLSFAVMIAERSYEESRLKSVRIQKGWDKRRKMAKEEGQYMIKNCPKWIDVVNDRYVLNENHIVIREIFDLYLSGIGSYTIAVMLNRDNKTIDGMKWNSTKICHVLRNRRCKGEYTSNRVIRNFDDDTVTSTFEILNIYPRIVSDDEFHEVSTRLEKFNYTGRIRHDLKRTVFNSLLKCELCGSALGVSSTSGYTYIKCDNARANGGCTGVLMAYMPFEKAILSHIKDIDISRVINIDSTISNIDILKTEIVELESYIQSFTAGIENLKKQGRLPTFDMLDGKAQAEERLQDVKKTLAAERDTANVSNLEFSSDIHKLENIIERSRLEVELRKVIKRIAVKANKTYITADISYYNDDNIKHILLIHKKKATIEAMGEISQQGRWRTYSFVESGVQVFRVESNGDVWTLSATRNKSINEIKKYMTMMVGREPIDFDFYINEDFIEWVE

SEQ ID NO: 16228 - protein, 471 aa, synthetic construct
MESGYIEAGSVLLVESLDRVSRQDIDTAGEQLRKILRSGVEVVTLVDNEWYTKESLKDSLSMIKAMLVMERAHEESAMKSTRLRSMWAAKRERAVNGEIMSKRCAAWLKVSDDRSHFEFIPENVKAVQRVFQLRLEGLSHVKIAKQMNDEGFSTLNQFKSVTGGWSQSSVTELLSNRSVIGFKVPSKSMAVKGVSEIPDYYPAIISEQQFYAVQQLKQGSGRKPSSDLPLLTNLFKGVLRCSECGFIVVVAGVSAKRSGIYKCSMKSEGRCNSVGFSRLQTDRALVQGLLYNTNRLSLNRRNGSAIGSLQSELEQLQKQRERLIKLAMLADDTESMAKDLKALNSQIKDAEKAVSEVHQREQSSQLETISHLDLTVKKDRIEAQIIIKRIVKEIRLNTAGKKCDVFLHNGLKLLNFPLDRVVDGAQWLEILPLIDGDEFDFEGFTTKPRHLVLEEAPEWVKEIEAQPNQPQ

SEQ ID NO: 16229 - protein, 523 aa, synthetic construct
MRQVITYLRFSSKPQERGDSIRRQKGLFERWLKDNPDAKVVDEFSDEGASAYHGHHLKGDFGRMLQNIQDGKYLSGQTVLLVESETRLNRQKARNTENLVDLITGKGVDVICLESGKIYTSTNIDDLDTSIQLKIAAHIAHQQSKEKSIKVSAAWEHRAQLALEGKQQLTKNVPGWIDPDTRKLNEHSSTVVTIFDLLLSGESLHNIARYLQANNIKSFSRREKANGFSVHSVRTILRSESTVGTLAASKRNDRPAIPNYYEPAIDVATFNKAQEILSKNRVGRAPASDNPITINLFKGIIRCQCGASVHPTGVKATYQGVYRCNNVPDGRCNVPTIKRKPFDKWMLDNIISFLERSDGNNTDKRKAEIEYQISLVTSKLKKAATLLLELDDVTELKEQVKELNIQRINMQSELDDLNQRETLSDKPLHHLSEIDLTTKAGRVEAQLILSKFVQSIELQREMIIITLRNGAVIGKSRDLSPALSQDLMKQVVSSSSPRDIDMFSVITSDEEFRKSGKPVTKRS

SEQ ID NO: 16230 - protein, 587 aa, synthetic construct
MPQLYSYIRWSSERQQKGTTRQRQVIGAKEFAIANGLELVEIEDPGVSAFRGKNTTHGKLGDFIDAVRQGAIPPDSWLYVENLDRLTRQEVTTAQKLFIELLDLGLTLVTGMDKRVYTLESVNKNPTDLMISLLLFSRANEESKTKQARTIGNVESLIERHRQGLPVNIKSCGKHPFWIDDSGSQYESVKRHAIYWEIAREAIELFLSGYGIYKVKRFLDEKYPNGLNGKEWGYQVLKKMRESRALIGERQINIGSHTYTLRDYYPCLCKNEVEFLHLQELKGQNSYKSKKNPLKEQIKLLSGLAILRCSKCGGTMSSFMNKGKPRYICLNGRHLQKGCVGWSLTAPLVDHCVIIALLIGYMDANRKERQDTSDISALIEAKNTSVGELNVSITNLVAVIEAGVNVSELASRLKVLSTERETFLKEIERLKERKALIDSKGSFEVSMMDFINLIHWNVLSDYAHESRDKIRSTINKIIEHVIIDKTDGCITIKIKCRGSDEQLIFCGIGRKPHWKFDIALYVEQDTDGDTTFEEKSILPMANQLMEEATKQFALIREGYISYFDKICKILAAIGYPDIDGSAFWPNR

SEQ ID NO: 16231 - protein, 481 aa, synthetic construct
MITTNKVAIYVRVSTTSQVEEGYSIDEQKAKLSSYCDIKDWSVYKIYTDGGFSGSNTDRPALEGLIKDAKKRKFDTVLVYKLDRLSRSQKDTLYLIEDIFIKNNIAFLSLQENFDTSTPFGKAMIGLLSVFAQLEREQIKERMQLGKIGRAKAGKSMMWAKTSYGYDYHRETGTITINPAQALAVKFIFESYLRGRSITKLRDDLNEKYPKHVPWSYRAVRTILDNPVYCGFNQYKGEIYPGNHESIISKEEYDKTQSELKIRQRTAAENVNPRPFQAKYILSGIAQCGYCGAPLKIMLGVKRKDGSRLKKYECHQRHPRTLRGVTTYNDNKKCDSGFYYKDKLEASVLKEISKLQDDADYLDKIFSGDNAETIDRESYKKQIEELSKKLSRLNDLYIDDRITLEELQSKSAEFISMRGTLETELENDPALRKNKRKADMRKLLNAEKVFSMDYENQKVLVRRLINKVKVTAEDIVINWKI

SEQ ID NO: 16232 - protein, 481 aa, synthetic construct
MITTNKVAIYVRVSTTNQVEEGYSIDEQKDKLSSYCDIKDWNVYKVYTDGGFSGSNTDRPALESLIKDAKKRKFDTVLVYKLDRLSRSQKDTLHLIEDVFIKNGIEFLSLQENFDTSTPFGKAMIGLLSVFAQLEREQIKERMQLGKLGRAKSGKSMMWAKTSYGYDYHKETGTVTINPAQALAIKFIFESYLRGRSITKLRDDLNEKYPKHVPWSYRAVRTILDNPVYCGFNQYKGEIYPGNHESIISKEEYDKTQSELKIRQRTAAENVNPRPFQAKYILSGIAQCGYCGAPLKIMLGVKRKDGSRLKKYECHQRHPRTLRGVTTYNDNKKCDSGFYYKDKLEASVLKEISKLQDDADYLDKIFSGDNAETIDRESYKKQIEELSKKLSRLNDLYIDDRITLEELQSKSAEFISMRGTLETELENDPALRKNKRKADMRKLLNAEKVFSMDYENQKVLVRRLINKVKVTAEDIVINWKI

SEQ ID NO: 16233 - protein, 518 aa, synthetic construct
MKKNNVEIIKADSLVRRRGDNVERHLKRVAAYCRVSSDSEDQKNSYDSQVRHYKEYISQRSDWELADIYADEGISGTQVGKRQDFQRLINDCANGEIDYIVTKAIARFARNTLDTLKYVRMLKDMQIGVYFEEENIDTLTMDGELLLTILSSVAQQEVENTSAHVKKGLKMKMQRGELVGFQGCLGYDYDVETKQISINKKEAKIVRYIFERYLEGIGGKVIARELDELGYKSPRGLEHWNDTTVLGIIKNEKYKGDILMGKTFTVDPISKRRLSNFGEEDKYYIKDNHEPIISKEDFEKAQEIRLRRAGNKKTAANVNGKRERYSKMYAFSSMLECGFCGSILSRRSWHCRSDYRKVVWHCVTSIKKGKKFCKHSKGLEEIAIEGAFLEAYRQVYHSNENLMTDLLETIESELNDNSLNKELKRITNKLRILLKKEENLVNLRLEGKVSDSIYNEKYNEISSEKEFLAEEKVNIETTLKSEIDVKKRLTEFKHLLSSQKMLTEFDRESSIMKLATLP

SEQ ID NO: 16234 - protein, 559 aa, synthetic construct
MSKEKIKVYLYTRVSTSIQIEGYSLEAQKSRMKAFAIYNDYEIVGEYEDAGKSGKSIEGRIQFNRMMEDIKSGKDGVSFVLVFKLSRFARNAADVLSTLQIMQDYGVNLICVEDGIDSSKDAGKLMISVLSAVAEIERENIRIQTMEGRSQKAMEGKWNGGFAPYGYKLEDGKLFINEEEAVAIRTIFDQYVNTTIGANGISKYLENHGIRKIPRQNGKNPLFDAGLIRKILKNPVYNGKIAFGRRTLEKVHGTRNEYKQVEQDEYLISEGIHEAIVSDEVWQAAQVKLKSQAKKYEHVNKGKDTRTHLLSGIVKCPICGVGMFGNKCTKKKKDGTKYKDFYYYGCKHRQMIRGHKCTFSKQIREELLDDAVAEVIVKIVSNPKFASMMQEKINMKVDTSEIEKEIDNYQKELRKSHSTKFKLIEEIDNLDVEDKHYKRRKQDLDDRLYRMYDKIDELESSLIDAKAKKQTIEAEKLTGDNIYKVLIYFDKLYKVMNDVERRQLISALISEIQVYEEKQSNGQWLKSITFKLPIIEENLNIDLDNDEQVECVSLLEKRS

SEQ ID NO: 16235 - protein, 548 aa, synthetic construct
MIQTNSNHFSFKAAIYCRLSKDDEQKGESASIQNQKELLENYVKSRGWSIYDVYIDDGYTGLNTNRPSFQRLIRDIENKKVDIVITKDLSRLGRNYLQTGYYTENFFPKNNVRYIALNDGVDTFQENNEIVPFKNVLNEFYSRDVSKKMKSAYMTRARQGKFIGCLAPIGYRKDNDDPHKLVIDDETSWIVEKIFDLAFSGYGVQAIRRRLFEEKIPTPTWWNRKKGLRNKKTKLEMTVDGGEYWWDCTTLKEIIENPVYIGHIASQKVNYKFKVGWLSDKPKEEWIIVENTHEPIISEDIYNIANEKLKSRRRPFKNGEESIFAGIVKCPDCGKSLNLGRNKSKKREKLLTCNTYRRYGKSLCSQHRIYYDTLYEIVLKDIRKNAEIALKDEKEIIKALEKSREIDNEEEQKFIMDKIYEDQIRVEDLTKKIERLYDDWLDNKISESNFQKILEKSQKEQDYLNQRIEDNQKLIVKDDLEDINVKKWIELIKKHKDIKKLDKETLNELISKIYVHEKEVVNGEITQTIDIYYNFIGNTDTLQVFYNL

SEQ ID NO: 16236 - protein, 601 aa, synthetic construct
MKKDVKVIKGDTTLKRTASGCVERSIKRVAAYCRVSTDTEDQINSYNSQVEHYTDFIKQNNEWTLAGIYADEAITGTQVDRRIDFQRLINDCMNGDIDMVITKSISRFARNTLDTLKYVRKLKEYNVAVFFEEENINTLTMDGELLLTILSSVAQQEVENISANVKKGLRMKMERGEMVGFQGCLGYDYDPETKSISVNEKEAEIVRYIFRRYLEGVGGMVISRELEEQGYLSPRGYKRWTETTVLGIIKNEKYKGDLLMGKTFTVDPISKRRLDNFGEQDKFYIENHHEPIISEEDFEKAQGIRLRRAKNRNTVANNGGKREKYSRKYAFSSMLECGFCGHNLSRRNWHSSSEYTKVIWQCVNATKNGKKYCPHSKGIEEEAIEKAFMESYRQVCHNNVEITNEFLKTVEEELKDNSLAKDLKKITNQLDKILKKEKDLVELRLNESISMDIYQDKYNEIAISKEKLLAEKRTLEVTLTDEKALKKRLEGFKKLLESNKYLEEFDRAVFESIVDKIIIGGTNDEGEIDPAMITIIYKTGKKDSQNGRLFKSRRKNAKVVEENDGDKLYSQSSNEVNKLCSYSTDNTCGVCGSARKSLETF

SEQ ID NO: 16237 - protein, 612 aa, synthetic construct
MRNFEKITALYERLSRDDELQGESNSIINQKKILEEYASKNNLSNIIHFTDDGISGTQFDRPGFMAMMNGVNQGNIGCIIVKDMSRLGRDYLKVGQCMEILRQKGVRLIAINDNVDSFYREDDFTPFRNIMNEWYARDTSRKIQSTFRSKGESGKHTASTPPYGYIKDEKDKNKWIVDEKAAEIVRRIFNLTMQGNGPYRIAKILESEKVDIPAYHQQKLGYGLYQSKNFEHPYRWCSSTIASILKKQEYLGHTVNFKTRKHFKDKKSKYVSEDNWLIFENTHEPIIDQETFDNVQRIRGNVKRYPDGWGEYHPLTGLMYCADCGSKMYVHRTSNYKNIPYYTCSAYTKTPCGMLCPSAHRIKAEVVLNLIQDTLKDIKKYLDEDNEAFICSIQNEMEEKEKIEIEKKKVRLTESQNRLRELERLMCRIYEDMILNKIPNSRYEILNNQYETEQITLSKEIKDLEQQVSRYEKETDRARKFISLISRYENFDELTTTMINEFVEKIIVHERDRKGSQTSKQKIEIYFNFIGNYELPQAELSEEKKQKLEKEERKIEERKDKLHQNYLKRKASGKQKEYEDKYKARREQKKQEKIKVLKRVGIPVSEYIKTNI

SEQ ID NO: 16238 - protein, 481 aa, synthetic construct
MKTMNKVAIYVRVSTTNQVEEGYSIDEQKDKLSSYCDIKDWNVYKVYTDGGFSGSNTDRPALESLIKDAKKRKFDTVLVYKLDRLSRSQKDTLHLIEDVFIKNGIEFLSLQENFDTSTPFGKAMIGLLSVFAQLEREQIKERMQLGKIGRAKAGKSMMWAKTSYGYNYHKETGTVTINPAQALTIKFIFESYLRGRSITKLRDDLNEKYPKHVPWSYRAVRTILDNPVYCGFNQYKGEIYPGNHEPIISKEEYDKTQSELKIRQRTAAENVNPRPFQAKYILSGIAQCGYCGAPLKIMLGVKRKDGSRLKKYECHQRHPRTLRGVTTYNDNKKCDSGFYYKDKLEASVLKEISKLQDDADYLDKIFSGDNAETIDRESYKKQIEELSKKLSRLNDLYIDDRITLEELQSKSAEFISMRGTLETELENDPALRKNKRKADMRKLLNAEKVFSMDYESQKVLVRRLINKVKVTAEDIVINWKI

SEQ ID NO: 16239 - protein, 588 aa, synthetic construct
MKEVKVIKARNDLQTRTRGKTIELMRVGAYCRVSTDSADQLNSYKSQVAYYTDMIKKNKEWVLADIYADEAITGTQVAKREDFQRMINDCMNGEIDMVITKSISRFARNTLDTLKYVRMLKERNIAVYFEDEKINTLTMDGELLLVVLSSVAQQEVENISANVKKGLKMKMKRGELVGFQGCLGYDYHKDTKTITVNEEEAEIVRYIFNRYIEGAGGSVIAHELENLGYKTKYGSSTWVQSTVIGIIKNEKYKGDLLLGKTFTVDPISKRRLENFGEEDKFYIRNHHEPIISEEVFEKAQEILARRNVNIGKIGEGNTKREKYSRKYAFSCMLECGFCGGTLTRRNWHSSSQYSKVIWQCVTATKKGKKFCKHSKGIPETAIEEAFVESYRLLCDDNKDVLEEFLQRMDDTLSSSVVSKQLAKAEKEIDALEKKKSKLVDMRLEEIIDKETYESKYADLVSKQEQLVEERKKLQETSDNEKDIKKRLKEFKKTLEQNEVLDKFDRYVFESIVEKVIVGGLDENGNVDPAQLTFVYKTGLKNSVDGAKFKPQRKNARGRHRTDELCSHDSNEVDKMCSDSSNDTCGNCS

SEQ ID NO: 16240 - protein, 450 aa, synthetic construct
MKRVALYMRVSTEQQAKHGDSLREQKETLYEYIEQHKDLKVVNEYVDGGISGQKINRDEFQKLLQDVKENKIDLILFTKLDRWFRNLRHYLNTQEILEKHNVSWNAVSQQYYDTTTAYGRTFIAQVMSFAELEAQIDSERIKAVMANKIAQGEVVSGKTPLGYSIENKKLVINDDAPIVIDIFNYFLSSGSLRKTVYYLGSQYGIVRDYQSVKNMLTNKKYIGELRNNKNYCPPIIDKKLFYAVQKALPKNLKTNAKRDYIFKGLLKCSDCQGSVAGQTIKARYKKKDGTESIYERTCYRCVKRRNNKLRCTNKRAFYEKNLERYIFEATKQKFEQIQINYSKKQPKIIKKKNSKKNIENKLDRLKKAYLNEVIDLEEYKKDREALMKELNEIEVEPAKIDIKNVEFILSKEFDEIYKESSKEEKNALWRSIIDNIIVFPDGNITVNFLL

SEQ ID NO: 16241 - protein, 706 aa, synthetic construct
MSRTSKITALYERLSRDDDLTGESNSIINQKKYLEDYARRNGFGNIRHFTDDGFSGVNFNRPGFQALIKEVEAGNVATIIVKDMSRLGRNYLQVGFYTEVLFPQKDVRFLAINNSIDSENASDNDFAPFLNIMNEWYAKDTSNKIKAVFDARMKDGKRCSGSIPYGYNRLPTDKQTLVVDPVASEVVKHIFLLANDGKSPREIAEILTEEKVLIPAAHAKEYHPEQYNGIKFADPCIWSVSSVRKILDRQEYLGHTVLRKSVSTNFKLHKRKSTDEEEQYVFYNTHEPIISQELWDSVQRRRQRANRTAARGTHTNRLSGYLYCADCGRRLTLQTHYSKKDRSLQYSYRCGGYASRVNSCTAHSISVDNVEALILSTVKRFSRFVLNDEEAFAKELQALWNDKQADKPKQNQSELQRYRKRYDELTTLIRGLYENLISGLLPERQYKQLMKQYDDEQAELETKIEAMEQELAEEKVNKIDVKHFISLIRKYKEPTEISDLMFHELIDKIVVYEAEGVGKSRTQKVDIYFNYVGQVDIAYTEEELAEIKAQEEQKEMERLAKQRKREKAYREKRKAKKIAENGGEIVKKKVCPHCGKEFTPASNRQIFCTKECCNQARQDKVKADRETEKGDHYYRQRQCEVCGSIYWPTHSQQKFCSEKCKKINHNKKTLEFYHKKQKEKAQCKDLSQMKEPVSSTNSSEITTIPA

SEQ ID NO: 16242 - protein, 525 aa, synthetic construct
MKTVRDVLEKGKKGAFYARVSSDRQTIDAQRHHVYEFIKNYECEIVKEYVDHGESAFKKKLIKRSKMMALLRDVEQGKYDFVITYADDRLARSEIEHVQIRLLMKQANTDVILTSTAELYTERDIITQLIREGGTRYEVERISARTKDAYKQRTDYGEWMGGPVPFGYVQDDKTKKFSILEDEKEIVLRIYQLYQSGEGFSDIAKILNEQKEKTNTMIWRKERVKQILTNPIYAGYVTFGRLKSGSGNSIEDLSKWKMAQCKDIPLIMTQEEWFATFQLFEKKRNKELPPKQFKTEYVLRDLIYCKNCDLPLLPKNQETTGTNGKKYGMKKYMCSNKTCKIWFQTDELHTLVFDSVMKEVTDKVISKSQTELMYEIEQNLEKDIKRVRKEIQRLKQQVNDCLVWIKDAEREIDELYNRKKRLVEDDPEIDPLLDVILDYRVHLLHEIKESEELIAKKEAEAKHIEEVDSNRSILEKNVLQAFQIEFSNLQTDVKRIRQFLVYLIDKITIDKNGKTEYVLKINLER

SEQ ID NO: 16243 - protein, 545 aa, synthetic construct
MEREKMNKEITALYCRLSKEDKQSGESMSISTQKEMLMDYARQNGFRNCRYYVDDGYSGTNSDREAFQEMLDDIRDGKVAVVITKDQSRLGRNYIETGTYMEIFFPEHGVRYIAINDGYDSDKDDHLGMMAPIRNIMNEMYARDTSKKIKSALHTRKMQGKYLCTTAPYGYKKDPTDSTHLIIDEEVAPVVRYIYDLAEEGLGLHCICKRLHDEKILKPSCHKKEMFERFVDDGKMYDWDNAYVSQLLHSPTYAGHLAVDCKPTISMKTKKRKYIAFADREIIRNTHEAIIPQAQWDRVQTIISSRSSSFNTEKTEYDNIFRGLLRCADCERTMLVKVEHKRIRDNVLDKTFYCCSTYRKYGRNACGAHNLEARMLHEAVLADIQRHAELAVTDREELVRHIAKSLDIKLSEGKEKHKRAIKQCKARINEIDDLYAQLYEDLSKGLIPERRFKMMTDRLDKEQEELLEKLEQYEREKNSGKEQLANIQDFIDEVSEYAGITELNFKMLHQLIDKILVFPAEEIDGEKVQKIQIHYKFIGALGMIE

SEQ ID NO: 16244 - protein, 479 aa, synthetic construct
MKKVAIYCRVSTLNQAEDGYSIGEQQDKLNKYCDIMGWEVIETYTDAGFSGSNIERPAMKQLLKDAANHRFNTILVYKLDRLSRSTSDNLYLIKEVFKKNNIEFVSLNEKIDTSDAMGEFFFTLLAAVAEMERKTITERMVLGRLGRAKAGKTMSYQLPPFGYIRNKELDILEVVPHEAKIIKYIYSKYISGDSITKICHDLNDKGHIGKNVRWSHSSVKNALTNTVYIAKGKFKGEIYEQEHEKIIDDNTFWIVQDEINKRQIRESQRTNNPRPFQAKYMLSGLMKCGYCGGHIRTVTGNKRIDGSKPVRYVCDRRSDYRKLMEPGEIKCKSGFYRRLDLERYVIDYLADLPNDESELKEALSIGQTSEFDPTMLLTEIETINKKIDKENYLFRNDYIDEVELQRNVKNLVDTKKLLENQLQENNGDKINEQKRKRILDMLNTGNIREMNYEQQKKIVKSCISKILLTSEEITIEFNF

SEQ ID NO: 16245 - protein, 485 aa, synthetic construct
MSKKVAIYTRVSTTNQAEEGYSIDEQIDKLKMYCEAMDWKVSEIYTDAGFSGSKLTRPAMEKMITDIGLKKFDTVIVYKLDRLSRSVRDTLYLVKDVFTKNEIDFISLSESIDTSSAMGSLFLTILSAINEFERENIKERMTMGKIGRAKSGKSMMWAKTAFGYSHNQETGILEINPLEASIVEQIFNEYLKGTSITKLRDKLNEAGHIAKELPWSYRTIRQTLDNPVYCGYIKYKNNTFEGLHKPIISHETYLSVQKELEARQQQTYEKNNNPRPFQAKYLLSGIARCGYCGAPLRIVLGHRRKDGSRTMKYQCVNRFPRKTKGVTTYNDNKKCDSGAYDMQWIEDIVLKTLNGFQKSDKKLRKILNIKEESKVDTSGFQKQLKSINNKIQKNSDLYLNDFITMDDLKKRTEMLQGEKKLIQARINEVDKPSTSEVFDLVKSELGEIPISKISYEDKKKIVNNLISKVDVTADNIDIIFKFQLA

SEQ ID NO: 16246 - protein, 515 aa, synthetic construct
MKTAIYLRKSRADLEAEARGEGETLAKHRTTLLKIAKEMNLNVLAVREEIVSGESLVKRPEMLALLEEIEDNKYDAVLCMDMDRLGRGGMKEQGIILETFKRSDTKIMTPRKTYDLNDEWDEEYSEFEAFMARKELKIITRRMQRGRIASIEAGNYLGTRAPFGYEIHRLNKRERTLTINKEEASVVRMIFDWYANEDMGASTIRNKLNDLGYKSKLGNAWNPYSILDILKNHVYIGKVTWQKRKEVKQPDAVKRSCARQDKSDWIIADGKHEPIIPESLFEQVQEKLNSRYHIPYNTNGIKNPLAGIIKCAKCGYSMVQRYPKNRKETMDCKHRGCENKSSYTELIEKRLLEALKEWYINYKADFEKHKQDDKLKETQVIQINEAALRKLEKELVDVQKQKNNLHDLLERGVYTVDMFLERSNVISDHINEITSTMENLQKEIKTEIKKEKVKKDTIPQVEHVLDLYFKTDDPKKKNSLLKSVLEKAVYKKEKWQRLDDFELVLYPKLPQDGDI

SEQ ID NO: 16247 - protein, 452 aa, synthetic construct
MIRVALYIRVSTEEQVLNGDSIRTQIEALEQYSKENDFNIVGKYIDEGFSATNLKRPSLQRLLRDVEKDKVDLVLMTKIDRLSRGVKNYYKIMETFEKHKCDWKTILENYDSSTAAGRLHINIMLSVAENEAAQTSERIKFVFQDKLRRKEVISGTIPIGYKIENKHLVIDKEKEYIVKSIFDEYEKLCSVRSLIDIINNLCGELYSYNKIKNILKNELYIGIYSKRGVYVENYCEPIISKEQFKRIQRILEKNKKSTPNKNKYYHIFSGILKCKECGRTLKGNSSNVREKLYLSYRCSTFYLNKNCIHNVTHNEKHIENYLLTNLKPQLHKHMVKLETQNEKIRQNKKSNKKDEKKKIMKKLDKIKDLYLEDLIDKETYRKDYEKLQSQLDNITEEQESQIIDTSHIKKFLDIDINEMYNNLSRVECRRFWLSIIDYIEIDKDKNITINFI

SEQ ID NO: 16248 - protein, 519 aa, synthetic construct
MTTSKAVVYARFSSDNQRDESIDAQIRAINEYADKNNIQVVKIFIDRAKSATSDKRPEFQNMIKFCEADTTGISMVIVHKLDRFSRDKYDSAMYKQKLKVKGIRVVSVLENLDNSPESLILESVIEGMAQYYSANLAREVAKGQKENALKALHNGGDAPLGYDVAHDKTYTVNEEEAQAVKIIFDKYIKGYSYSKIIDELNDLGYKTKRGNKFGKNSLHGILNNEKYTGVYVFNKTQRKGVDGKRNGHKQKNEDEIIKVEGGMPQIIDKEVFKQAQEMMQKRKKTPGAHKATTNYLLTGLIKCGECGHAFQGNKRKDAYGNDYISYRCGCRKQKRECNNREIKRDYLEEFILQELEKNILNDEAIPVLSKALNEKMNYKNESKEELLKSLEQKLDKVNKEISNILNAIMKGIVNNMLKDKLDELEQVKLNLDLKMNELKIENKVADDVCVTEDQIRSMFSRFKEFVLERNIPECKKFIGDYIKEVIVYKDHVEVVFNVVFSFVDNEISHNIHITTKRKK

SEQ ID NO: 16249 - protein, 527 aa, synthetic construct
MTLSKAVVYARFSSENQRDESIDAQVRAIKEYCEKNNIQIIKVFADRAKSATSANRPEFQEMIKFCENDTAGISMVIVHKLDRFSRDKYDSAMYKQKLKLKGIRVVSVLENLDNSPESLILESVIEGMAQYYSANLAREVAKGQRENALKSKHNGGDPPLGYDVAYDKTYTVNQEEAKAVKIIFDMYVKGYSYSNIIDELNELGYKTKRGNKFGKNSLHGILSNEKYTGVYVFNKTQRKGVNGKRNGHKQKSEEEIIKIEGGMPQIIDKEMFEQVQEMMQKRKRAPGANRATTFYLLSGLVRCAECNYMYQGNKRYDEYKNEYVSYRCGCRKQKRGCDNKEIRRDELEEFVLTELEKHVLNDDAIPALSKELNRKLQDKNNCNEEMLVSLRNKLTKVNKEIENILNAIMNGIVNNMLKEKLDELEQVKLNLDLKINELSIERIDGEEEFITEEQIRNMFSKFKDFVLTRNLPECKKFIGDYVKEVIVYKDHVEVIFNVVFSFVDNEINHDFNIIKDRKFINTNLENE

SEQ ID NO: 16250 - protein, 493 aa, synthetic construct
MKTCIYLRKSRADIEAEKEGEYETLHRHKTTLLKVAKERKLNIIDIKEELVSGEYVEHRPRMIELLEEVKNKKYDAVLVMDLDRLGRGNMQDQGLILDTFKQSKTKIITPRKIYNLDDEFDEEYSEFEAFMARKELKLINRRLQRGRAKSIEEGKYISPDAPYGYEFKYDDKGKKYLAINDEQAAAVRLIFDMYLQNNGATKIANKLNSLGYETNNHIEFKAKAVRDILSNITYCGYVKWKTIDRKNHSRPRPANEQIITKGKHEPIIDEFTFNRVQEIRKSKYISPTKTKVSNPLAGIVVCKKCGHNLIQKISRGKIYLNCRHCDNKSSSLKYVEDAIIESLEGWLNKYKVKIELKDDTSDIDKLKFEVKKLQRELNETEKQKSKLFDFLERGIYDDNTFLERSTILSSRIDDLKNRIAECNLSIITYKDNLQAKKQIIPTLEKVLQNYSNSNDAKEQNLLLKSVLDKVLYEKAKDAKKDEFNLEVHPKLPK

SEQ ID NO: 16251 - protein, 528 aa, synthetic construct
MRIAIYSRKSVFTGKGDSIENQIQLCKEYVNLHYPGENSIEIYEDEGFSGGNINRPKFQELLKDAREKKFDCLICYRLDRISRNVSDFSTLIEELNDLKISFVSIKEQFDTSTPMGRAMMYISSVFAQLERETIAERVRDNMIELAKHGRWLGGTPPLGFDSEAMVYIDEEMKERKMSKLKVNKEEIELVKTIYRKFLELGSIHQATVFLQQNRLCGKRGKLLSASAVSKIITNPVYVKSNDDVLDYLRSIDIQVFGRKDGYGILTYNKRDSKFNKRDKEEWIAAVSKHKGIIEPNDWLLAQRLLDKNREKSKTFRLGTSSKGLFSGLVRCAKCGSPMRITYGRNNKHYYTCTRRVQSKNALCDNPTASGPDFDKAVLDNIMTVDTSKFLNGLNSNSKIIEDDKEKINKINTEINNKKKQLDKLIENMALFDSEVTDILADKINALSREIKELQLQVNEVACTVEDATLENNNYELVINTLDKFKDNFNSIEEIKTKKALLSMLIDEIRWNGDTTEIEIDFWGSKKKV

SEQ ID NO: 16252 - protein, 510 aa, synthetic construct
MALHENSRIAVYSRKSREDRDSEDTLAKHRNELEYLIKRENFKNVQWFEKVVSGETIDERPMFSLLLPRIENGEFDAVCAVAMDRLSRGSQIDSGRILEAFKQSGTLFITPKKTYDLSIEGDEMLSEFESIIARSEYRAIKRRTINGKKNATREGRLHSGSVPYGYKWDKNLKAAVVVEEKKKIYRMMIKWFLEEEYSCTVIAEMLNELKVPSPSGRSIWYGEVVSEILSNDFHRGYVWFGKYKKSKSNNSIVQNKNLDEVLIAKGHHETMKTDEEHALILNRIEKLRTYKVAGRRLNMNTHRLSGIVRCPYCHKAQAIEQPKGRRKHVRKCLRKSAERTKECEETKGIHEEVLFQSIMKEIKKYNESLFSPTEQDVNDDSYTAQLIGLREKAVKKAKGRIERIKEMYLDGDISKTEYKEKLKISQETLQKAENELAELIASTEFQNALSAETKKEKWSHHKVQEMIESTDGMSNSEINLILKMLISHVTYTVEDLGDGTKNLNIKVYYN

SEQ ID NO: 16253 - protein, 487 aa, synthetic construct
MAYAVYVRVSSDKDEQVSSVENQIDICRYWLENNGFEWDKNAVYFDDGISGTAWLERHAMQLILAKARKKELDTVVFKSIHRLARDLKDALEIKEILLGHGVRLITIEEGYDSHYEGKNDMKFEMYAMFASQLPKTLSVSVTAALAAKVRRGGYTGGFVPYGYEIVDDKYAINEEEAELVREIFELYAQGFGYIKISNIINDQGKRTRKGAPWTYSTLCKMIKNPTYKGDYTMQKYGTVKVNGKKKKVINPEEKWVVFENHHPAIVSRELWDKVNNKDPNKFQKKRRISTTNELRGITFCAHCGTAMSKRNNVRVNKNGTVKEYSYMICDWSRVTARRECVKHVPIHYKDLRALVLSKLKEKESVLDKEFYSDEDQLDVKLKKLNRDIKDLKFKRERLLDLYLEDERIDKDTFTIRDAKLEKEIELKELEMRKANNIELQMKERQEIRDAFALLEESKDLNSAFKKLIKRIEVAQDGAVDIHYRFAE

SEQ ID NO: 16254 - protein, 525 aa, synthetic construct
MKTIYDVLGKGKKGAFYARVSSDKQTIDMQRHNVYKFIENYECEIVKEYIDPGKSAFKKKITQRPQMMKLIEGVEQGKYDFVIVYADDRLARSELEHMQIRLIMKQTNTDVILTSTSEIYTERDSITQLIRDGATRYEVERISHRTKDAYKQRTAYGKRMGGPVPYGYKEDEKTKELSIVEDQKEIVLKIYEMYHKGDGFSAIANMLNEQKEQTHCYHWKKEAVKRILTNPYYAGYVTNKRIKHGAGNSIEDFSKWEMERCEEIPPIMSKAEWLTTIRLFEKKRNGEIPPKKLKTEYILRDLIHCKSCDLPLMPKNQETKGKNGKKYGHKKYICPNKSCKMSHVIGELHDSIFNSIVAEIKDKVISKSHTELIAEIEKSVEDQMRNTQKETKRLTKQIENCLALVKESEREIDALYNHKKRLSEDNPDIDPLLDVMLDYRIHLLHEIKESEEIVKQKQLEIEHIQEVSFNRKALQQNALKELALEFSSLKLDIKRIRHFLVHIVDKITIDKDMNTEYTLKINLGY

SEQ ID NO: 16255 - protein, 491 aa, synthetic construct
MKGLESYAVYVRVSTDRDEQVSSVENQIDICRNWLERNGFIWNEKRVFKDEGISGTLFVDRPAIQLLLQKAKAKEIDMVVFKSISRLARDLKDSLEIREVFLAHNVRIISVEEGYDSVKAGKNDMAFELWSLFSAQYSRTLSSSITAALAVKVRRGEHIGRVPYGYDRINQKLVINEEEANVVKKIYGWYNSGWGFKKITNELNRLGIKPKNKSFWQMTSVQRIVRSSIYKGTFILNQYTSVKVGGKKKQIRNPEEKWFVFPDHHPKIVDEEIWNQANQKNINTNKTKITAWNEFRNLAKCAVCGSNMVIVQTHLKKKNGERTEWKYLKCSQYRRAGKHGCVNHVPIQYGDFRQFIISLLIEKGESLTLNFQNTMEKGKREKIKKIQQILKTNEQKKKSLLDLYLDGLIDKEEFEKKRSDLEIEITEASEELFVVQQDDTVQTDIKTIKEAFEQLQKQEQDLFPIFQTLIQEVAIHQDGTIDISYRFAEGE

SEQ ID NO: 16256 - protein, 467 aa, synthetic construct
MKCVIYRRVSTDMQVEEGISLDMQRLRLEQYAKSQGWVVVNDYCDEGYSAKNTERPAFQQMIKDMKKKQFDIILVYRLDRFTRSVSDLHSILKTMDEYNVKFKSSTEIFDTTTATGRMFITLVATLAQWERETTAERVRDSMQKKAELGLRNGAKAPMGYDLKKGNLYINHTEAEIVKYIFEMFKTKGVISIVKSLNSRGVKTKQGKIFNYDAVRYIINNPIYIGKIRWGEDILTDIAQKDFESFIDKDTWYTVQQIQDSRKIGKVRLHNFFVFSNVLRCSRCGKHFLGNKQVRNHNRIVMSYRCSSRHHKGTCDMPQVPEDVIEKEFLNLLEEAIVDLDDTEEKPIELSNLQEQYNRIQDKKARLKYLFIEGDIPKNEYKKDMLTLTQEENIIQKQLANITDTASSFEIKELLNQLKDEWFNLNNESKKAAVNAIISSITVDVIKPARVGKNPIAPVIKVTDFKIK

SEQ ID NO: 16257 - protein, 522 aa, synthetic construct
MNHSKRKVAIYIRVSTEEQANEGFSLGAQEDYLKQYANIKGYEVYDIYIDDGYSGKNYNRPEIQRLFKDLYQEKFTGILVKSVDRISRRVSDVTKLIDDVLTPRKCYVLVSDNNLDSSTTGGTAFIQLLATFAEYERSMIVQRVKAGMSKRAELGYWNGGHVLGYDVKNKELKVNKEEAEIVRKIFHLRTEGKGYKSIALILNQQGFKTKRGRLFSIGTIKTILENPLYIGYCRWGRHKNWNVERRKGKTDEYKFVKGKHEPIVSEDLWKRVQGVNYAHKKSISKNRNFNGEFVLSGILRCPSCGAGMVMCKTKKRDKSGYHLYYMCQAFHSKGKLACKSNLIRKEDIEEKVLQCINKIILIPSIVDKTFEGIQEKKERGIERIKNDLLYINEELKRKKQFIKKLNKDYFDEKIRVETYTELSEPLREEIDKLESEKGKLDRKIESVEIPITKEMVIKALENFTNLYENATYEQKKSLLRAIIKKIEVQPNRKEIKGITYWFDCDNGQDDALLVSKEGRTVS

SEQ ID NO: 16258 - protein, 488 aa, synthetic construct
MQPYAVYVRVSTDRDEQVSSVENQVDICRNWLERNGFIWDESCVYKDEGISGTLFIDRPAIQLILEKAKQKKIDTVIFKSISRLARDLKDSLEIREVFLAHGVRIISVEEGYDSNKAGKNDMAFELWSLFSAQYSRTLSSSISAALAAKVRRGEHIGKVPYGYDRVEQKLVIKNEEAEVVRQIYKWYNDGWGFKKISNELNELGIKPKNNNVWQLTSVQRLIRNTIYKGTFILNQYTNVKVGGKKKQIRNPPEKWLIFENHHPAIVDKEIWDKANGEQVQSRKVRITPWNEFRYLAKCSECGSNMTIVQSHRKKKSGERTEWKYLKCSQYRRAGRHGCVNHVPIQYGDFREFILNLLMKKGESVLLNLRPNMENEQVRKEKKLRQILKQNEQRKKNLLELYLDGLIKKTEFEKKRKEIEEVIAKTTNELFLINKVETVQTNIQTIKEAFEELKNQNQDLFDVFQTLIEEIVIHPDGTIDIKYTFEEPK

SEQ ID NO: 16259 - protein, 502 aa, synthetic construct
MKKVAIYSRKSVYIEGSVSIETQINMCKEYILKKFTNSTFEVFEDEGFSGGNTNRPAFQKLLRLAELKQIDIVVCYKIDRIARNTLDFLNILEMFKENNVELISITEGFDPNTQMGKVMLTLLASFAEMERSNIQQRVKDNLLSIAKKGKWTGGSPPTGFKNNPNGGIEWDNKDMILDVFNMKYEKSKNTDLIQFIQHKYNHKFLGGTLATTLRKPIYVKSSSSVSLYLKSKGYIVQGTEDNIHSYLTYTDKDTKYAIVSNIVGLIEPSIWISVNKDMDKNISREGNRFSEKFWLTKTIRCKCCGQTYCGQTKTTKTKYYNKKGEEKIYVSTYSYYSCRDAVRGKLKTCTNTKRVKQDVLEAKVSALIYSLKDEKIFNSSYSINKVDNSFKIASLNKKVIEIDKTISNLTDKIALLSNDASLIFIDKIENLIKEKSSIKSNIVELELQELNSKIKTDKALIYNNIKAFNNNLSVDDKRKITMSIFKKIVYDPETNDLDVTFM

SEQ ID NO: 16260 - protein, 338 aa, synthetic construct
MKNKLKSSLNIESPKIAIYMRVSTSKQADNQSLDTQEKTINSYIASRHDWINPICYKYVESHSASLKPKASNNLKESSFDSLKRPKLRELFLDATIGKFDYVLCASHDRLTRNTNEGIILKHLFSRLNITLIYCRPGETISSENEALNKFFENLLVNIAALESNITGGRVALANKHKIQNNFWAGGPPPFGYNLVSQPNNKRNSFLEINFEEARIVKKIFELYNLGCSYNEILTRLNRDFTLPPKRLWTHNTLKEILRNPVYTGFLVWNKRGGARKPNRHSPNDFVKSNLVEKNIIIPENEFLETQKLRNILSKDSKFLSTDFLLRDFLYCNKCNKNF

SEQ ID NO: 16261 - protein, 537 aa, synthetic construct
MKKAAIYTRKSKFTEKGDSIESQIKLCSKYLDNINIKDYCIYTDEGFSGKNTDRPEFQRMLSDAKAKKFDVIICYKFDRISRNVSDFSNLINKLNELNISFISVVEQFDTNSAIGRAMMYLCTVFSQLERETISQRITDNMYSLATKGYWLGGETPTGFRSEKKFFNSNNKQKMYSSLVPIKEELDLVKLIFNKYLEFNSISKIEKYLLSNNIKTKRNKDWSKASISLILRNPAYVKADEETFKYIESTGSKVYGNPDGKHGLLIYKKNKGRKGAKHDISEWIYAVSEHEGIIDSDIWVAIQKQIKKNAILAPALGTSNIALLTGLIRCAKCNSPMRVAYGKRNPKTNKKNYYYVCTLKTKSGKTRCDSKNLPGLDLDNLILDKLKEMSLDKNTLLKELNKYKDTIESNFHNDVLKNIQNNISKNNSMIDNLLNNVALSTDSELTAILLEKISKLKDENKLLTQKIDDLKSELEAQETLLNDCNSLITKLKYFSKFIDNSSIEEQKQLVSSVIEKVIADGDTGSIEIKFRPLLDFKI

SEQ ID NO: 16262 - protein, 549 aa, synthetic construct
MKNKLKSSLNIESPKIAIYMRVSTSKQTDNQSLDTQEKTINSYIASRHDWINPICYKYIESHSASIKPKVSNTLKESSFDSLKRPKLRELFLDATIGKFDYVLCASHDRLTRNTNEGIILKHLFSRLNITLIYCRPGETISSENEALNKFFENLLVNIAALESNITGGRVALANKHKIQNNFWAGGPPPFGYNLVSQPNNKRNSFLEINFEEARIVKKIFELYNLGCSYNEILTRLNKDFTLPPKRLWTHNTLKEILRNPVYTGFLVWNKRGGARKPNRHSPNDFVKSNLVEKNIIIPENEFLETQKLRNILSRDSKFLSTDFLLRDFLYCNKCNKKLLAKNYGNNKRFYYCSSHNNMEINKKCRSIKASKIESTILSNINDLINSSLQSEVQIEKFYDNYIENFNAELLDNKKSLEITINQLKSSTDLLELCVNEINISKDNLTVDYENFNSNSTEFSFINALSEFQVITQTEIKSLKARKEYLTYKINSSPKSFDDFKSNLNKSFKLFKYDEEKQKLISSPRSFRLFLFKVVKKIILSDHEITIIFK

SEQ ID NO: 16263 - protein, 516 aa, synthetic construct
MLEEGQKLKCALYVRTSTTEQKDSLELQARYKNNNFDIDKIYSEEVSGRDILKRPEQIKLLNDCGIEVTSVQKQAVFITNDKKPLYDCIIVSNTSRWGRNVVQVKQIVEALHKKGVKLWFDDLGKFSDSKDLSLTLDMLFVLDENYSQTISHKVKSAMDKRKKEGYILANSRLIGYDRTEEGTLVKNKDSNMVKSIFEDYAYKNLAIRKIAEKYQLSTSTITTLLKNIKYAGFMAYGIKEHGWDFSKLEIVKSDKIEPIISEELFWKVQEVRRSRSRIAEGSRVTRNKIGVNNNTYSLSSKIVCTNCGKNFHRKDRGYWICGTHSKYPKKCTMPTVRENKILRYLKSPYGLKAIRNGLETTLEGELKKLQLESIEPIKNELAELKGKSSKLLDLYMDSLIDKTTFEKRNKLLKDNIEKLENELKIYSNKENYRVKLLELQKEAKSLLDEYEKILESSEPEKIFDRVSKIEVGKIKDVKKGKEVSYIKSVRFKDFKVLEDHQLFDELTKKEEKNKSW

SEQ ID NO: 16264 - protein, 417 aa, synthetic construct
MKNKLKSSLNIESPKIAIYMRVSTSKQADNQSLDTQEKTINSYIASRHDWINPICYKYVESHSASLKPKASNNLKESSFDSLKRPKLRELFLDATIGKFDYVLCASHDRLTRNTNEGIILKHLFSRLNITLIYCRPGETISSENEALNKFFENLLVNIAALESNITGGRVALANKHKIQNNFWAGGPPPFGYNLVSQPNNKRNSFLEINFEEARIVKKIFELYNLGCSYNEILTRLNRDFTLPPKRLWTHNTLKEILRNPVYTGFLVWNKRGGARKPNRHSPNDFVKSNLVEKNIIIPENEFLETQKLRNILSKDSKFLSTDFLLRDFLYCNKCNKKLLAKNYGNNKRFYYCHSNNNMEINKKCRSIKASKIESTILSNINDLINSSLQSEVQIEKFYDNYIENFNAELLDNKKVLK

SEQ ID NO: 16265 - protein, 524 aa, synthetic construct
MTAKKAVVYARFSSDNQRDESIDAQLRAINEYADKNNIKIVNQFIDRAKSATSDKRPEFQNMIKLCEADTTGISMVIVHKLDRFSRDKYDSAMYKQKLKVKGIRVVSVLENLDNSPESLILESVIEGMAQYYSANLAREVAKGQKENALRCLHNGGDAPLGYDVAHDKTYTVNEEEAQAVKIIFDRYIKGYSYSKIIDELNDLGYKTKRGNKFGKNSLHGILNNEKYTGVYVFNKTQRKGVDGKRNGHKQKSEDEIIKIEGGMPQIIDKEVFKQAQEMIQKRKKTPGAHKATTTYLLTGLIKCGECGHSFQGNKRKDSYGNEYVSYRCGCRKQKRECNNREIKRDHLEEFILQELENNILNDEAIPVLSKALNEKMNDKNESNDELLKSLQQKLDKVNKEISNILNAIMNGIVNNMLKDKLDELEQVKLNLDLKMNELKIENKVVDGVAVTEEQIRSMFSRFKEFVLERNIPECKKFIGDYIKEVIVYKDHVEVIFNVVFSFINNGIAYNSNITRLRKKIIDIT

SEQ ID NO: 16266 - protein, 502 aa, synthetic construct
MKKVAIYSRKSVLVEGSVSIETQINMCKDYINNKFHNAKFRVFEDEGFSGGNTNRPAFQKMLRMAQLNEIDIVVCYKVDRIARNTLDFLKILELFKENNVELISISEGFDPNTQMGKVMLTLLASFAEMERTNIQQRVKDNLLSIAKKGKWTGGSPPTGFKNGLNGGLEWNKQDMILDVFNMKYEKEKNSNIIKYIKEKYNHNFLGGTLATTLRKPIYVKSSPSVSLYLKTKGYIVQGDEDNIHSYLTYTDKETKYAIVSDIVGLIEPSIWISINKDMDKNISREGNRFSEKFWLTKTVRCKYCGQTFCGQTKTTKTKYYNKYGEEKIYISTYSYYSCRDAVRGKLKTCKNTKRVKQEILESKVSELIHLLKDKKTFNSSYFSNKIDNSSKIDTIKKQIKSIDKTINNLTDKIALLSNEASLIFISKLEELVKEKSILKDNLLQLELQELNSNTKKDSSLVYNNILAFNDDLSVDDKRKIAMSLFKEIIYDPETDSLDVTFM

SEQ ID NO: 16267 - protein, 530 aa, synthetic construct
MIAAIYSRKSKFTGKGESIENQIQLCMDYAKNLGVNEFLVYEDEGFSGKSMDRPKFKKMLKDAKDKKFDYLICYRLDRISRNVSDFSTLIEDLNKLNISFISIKEQFDTSTPMGRAMMYISSVFAQLERETIAERVRDNMYELARTGRWLGGMPPYGFISTQINYYDENMNQRKMYKLKVDEDTIEIVKLIFDKYLELRSLSKLYKYMYENGIKGTRGGNLDPSALSLILKNPAYVKADKSVVDYLRKSNIDVMGDIDNIHGILTYAKNTDSPIAAVAKHKGVIDSDKWIEVQRLLNANKYKAPRTGTGSKALLSGLLKCSKCGSNMRITYKNSKSGTIYYYICGTKKSLGVSACDCRNIRSDKAESKVIDELKNKSIKSIMSSYKDSKLENSKNSKNIKTEITSINNQIKEKETYIDNLVMQLAKVTESSASTFIINKLESLNNDLSNLKSQLESLNTMSMENNQVDININMLIDNLNKFNKEIDTSDINKKRLLLSTVVDYMTWDSDTDTIKVNLIGINSSNTIASGK

SEQ ID NO: 16268 - protein, 487 aa, synthetic construct
MESYAIYVRVSTDRDEQVSSVENQIDICRNWLERNGFDWDEKRVFKDEGISGTLFVDRPSIQLLLQKAKAKEINMVVFKSISRLARDLKDSLEIREVFLAHNVRIISVEEGYDSVKAGKNDMAFELWSLFSAQYSRTLSSSITAALAVKVRRGEHIGKIPYGYNREEQKLVVNEEEAQVVQMMYKWYCEGWGYKKITNELNQLGVKSKTKKNWQMTSVQRILQSSIYKGTFILNQYTSVKVGGRKKQIRNPKEKWFVFPNHHPKIVDEETWEQANQKKVIANKTKITAWNEFRDLTKCGVCGSNMTIVQSHLLKKNGERTEWKYLKCSKYRRAGKHGCVNHVPIQYRDFRQFIIDLLIKKGESVTLKLQSNVEQGQEKKIKKLKQLMNVNEQKKKSLLDLYLEELINKEEFEKKRVDLETEITKASHELFILQQNDVVQTDIKTIKEAFEQLQQREHDLYHVFRTLIQKIIIHQDGTVDITYAFEYT

SEQ ID NO: 16269 - protein, 515 aa, synthetic construct
MKTAIYLRKSRADLEAEARGEGETLAKHRTTLLKIAKEMNLNVLSVREEIVSGESLVKRPEMLALLEEIEDNKYDVVLCMDMDRLGRGGMKEQGIILETFKRSNTKIMTPRKTYDLNDEWDEEYSEFEAFMARKELKIITRRMQRGRVASVEAGNYLGTHAPFGYDIHRLNKRERTLTINPEEASVVRMIFDWYAHEDMGANAIRSKLNDLGYKSKLGNEWNPYSILDILKNNVYIGKVTWQKRKEVKRPDAVKRSCARQDKSDWIIADGKHKPIIPESLFEQVQEKLNSRYHIPYNTNGIKNPLAGIIKCAKCGYSMVQRYPKNRKETMDCKHRGCENKSSYTELIEKRLLEALKEWYINYKADFEKHKQDDKLKETQVIQMNEAALRKLEKELVDVQKQKNNLHDLLERGVYTVDMFLERSNVVSNRITEITSTMENLKKEIKTEIKKEKVKKDTIPQVENVLDLYFKTDNPKKKNSLLKSVLEKAVYKKEKWQRLDDFELVLYPKLPQDGDI

SEQ ID NO: 16270 - protein, 630 aa, synthetic construct
MPQLYSYIRWSTDRQDKGTTRNRQLAAAKVYAAEAGLEMVEIEDPGVSAFRGKNTNTGKLGDFIDAVKQGAIASDSWLYVENLDRITRQNVTTAQKLFIELLELGLTLVTGMDKRVYTLDSVNKNPTELMISLLLFSRANEESETKSNRTIGNVVALVERHQAGLPVNIKSVGRHPFWIDDSGSQYEAVKEHPVYWSIAREAIDMFLDGNGIYTVKRYLDEKYPNGLKGKEWDYQVLKKMRDNRALIGERTINVGGATYKLDNYYPWLCKDEAEFLTLAERKQQNNYKAKKDKTEEIKLLSGLQVLRCSKCGGTMHSFMNHGSARYICTNGVHLQKNCSGWSISAQLVEHCTIISLLIGYMDKSRKDGIDTTAIEEEISRKEILITDLESRIANMAQAIAIAPDVSALAVQLNTFDLERKKTVLEVDKLKERLHSLKGKGSLEVDITDFLMLIQWSVFTNMEDADRNKIRKIISSIIESIIVEKADGCITIKIKCHHKDEWLVFGGVNRKPFWAFTIEYSTNDAKEIEGGDSSNFVSNTLFQKAVEQLDSIKQSYLKLFETANTMLGVVGYSDIRGASFWPNTGQYERANVEYEGIAYSIAMNGRVSKAITAALEATGLSRKDFIERYKV

SEQ ID NO: 16271 - protein, 528 aa, synthetic construct
MTYQEGGEAMKKITKIEGNKVASIIKPKLRVAAYCRVSTGSDEQLVSLQAQKSHYETYIKANPEWEYVGLYYDEGISGTKKENRTELLRMLSDCENKKIDLIITKSISRFARNTTDCLEMVRKLLDLGIYIYFEKENINTQSMESELMLSILSGLAESESISISENNKWAIQRRFQNGTFKISYPPYGYDNIDGQMVVNPEQAEIVKYIFAEVLSGKGTQKIADDLNQKGIPSKRGGRWTATTIRGILKNEKYTGDVILQKTYTDSRFNKRTNYGEKNRYLIENHHEAIISHEVFEAVEAALNQRAKEKGIEKRNDKYQNRYSFSGKIICSECGSTFKRRIHSSGTRKYVAWCCSKHLKQITECSMQFIRDEDIKTAFVTMINKLIFGRKLILQPLLDALRGMSNSDNLSRIQELEKQIEKNAEQRELLVKLMAKGYLEPALFNRENNELQMEADNYMGQKEALIHALNGELSKVQEVSNLIKFTNKAEMINTFSEQIFNDYVEKIIVFSRVEIGFVLKCGITLRERM

SEQ ID NO: 16272 - protein, 521 aa, synthetic construct
MAVNKNVMIIPAIKRVGNNRKEDETPKLRVAAYCRVSTDSDEQASSYEVQIEHYTEFIKKNSEWEFAGIFADDGISGTNTKNRDEFNRMIDECMAGKIDMVITKSISRFARNTLDCLQYIRKLKDKNVAVYFEKENINTLDAKGEIMLTIMASLAQQESQSLSQNVKLGYQYRYQQGEVMVNCSRFLGYTKDENKRLVIVPEEAEIVKRIYREYLEGSSMDKIKKGLEADGILTGAGKKRWHTSTIRKILSNEKYIGDALLQKTYTVDFLTKKRVVNNGIVPQYYVENNHEAIIPREIFMQVQEELVRRSRGHISTSGKKRNFSSNHVFSQIIFCGECGEIYRRVHWNNRGKKSIVWRCVSRLENTGLTCHSRTVLEDMIGLATVDAINKLIGQKDGFLTILKENIETVISETDNNIVSEIDKKLEELQKDLLRLANSKEDYNDIADEIYRLREERHKALAEEAGKKGSKQRLEEMEKFLNEQSSLLEEYDEQLVRRLIEKITVYDDKLTIEFKSGVEVDV

SEQ ID NO: 16273 - protein, 522 aa, synthetic construct
MAQSKVMVIPARRQVGNTIKAAEKPKLRVAAYCRVSTDSDEQATSYDAQIEHYTEYISKNPEWQLAGIFADDGISGTNTKKRTEFNRMIDECMAGNIDMMITKSISRFARNTLDCLKFIRQLKDKNIPVYFEKESINTMDAKGEVLLTIMASLAQQESQSMSQNIKLGLQYRYQQGHVQVNHNHFLGYTKDADGNLVIDPEQAETVKRIYREYMEGYSMDKIAAGLMADGILTGAGKTKWWTSTINKILRNEKYIGDALLQKTYTTDFLSKTRIKNNGTVPQYYVEGNHEAIIPKEIFMQVQEELVRRRVVHTSANGRKRSYSSNHCFSQLIFCGECNEMFRRIHWNNRGCKSIVWRCESRLQNTGVACRARTVNEELLQDIILKAINEMILDKSGYMQMLQKNIAAVIRNDASASTDDIDAKLLKLQKELLQKANNRDDYDSIAEEIFQLRELKTKSETDIGIRDKRLARITELCDFLKDQPQKITGFDENLVRRLLQKITVFDDHFTVEFKSGVSVDINE

SEQ ID NO: 16274 - protein, 518 aa, synthetic construct
MKTITKLQQVKAPAEKKKLRVAAYCRVSTGSDAQLESLDTQKTYFENYINSRKDWELAGIYYDEGITGTKKEKRTALLQLMSDCESHQIDMVITKSLSRFSRNTTDCLELVRRLLAVNVPIFFEKENLNTGSMESELMLAILSSMAEGESTSTSENTKWAVQKRFQNGTFKISYPPYGYEWNGEEMKVNPEQADVVKHIFSAFLSGTGIQDIAKDLNARQVPTKKGGKWSHGTIKGILANEKYTGDTIFQKTYTDAQFNRHQNNGEKDQYFCAEHHEAIISHEDFELAARLLEQHSIEKGIVKGCDRYQQRYAFSGNIICGECGATFRRRIHTCKGHKYVAWLCNTHLADVKACSMLYIRNDDLEHAFITMMNKLIFSRKTILAPLLEQLKNTNEDGGIRRIRELERQLLQITEQRQTLQRLMAQGYLDQIIFTQQKNELMTQTEACKTEIEMLQNCSGQASTRIVELQKLLHFTEHADMLQAFEEELFTEYANRIIVYSREKVGFELKCGLTLRERM

SEQ ID NO: 16275 - protein, 532 aa, synthetic construct
MKAVIYCRVSTEEEAQVNALKDQVQEAIAVVRKQKWKLADQYIDEGKSGTTTNKRNEYNRLVSDLEELEDKFDVIVVKSQDRLMRNTKEWYLFVDKLVQAQKKLFFYLDNKFYTPDDALITGIKAILAEEFSRDLSKKINNAHKHRQEKGTNVSITSNTWGYDKINKKVVINEEEAEIVRLIYNLCCEGYGSRIIAKQLEGRGIKSRSGGKFQETTIRRIIRNPLFKGTAVMNKHHLDFNTKKTVHMKESEWIYHENIIPAIVSEEIWQKANEMMDNRAVQEKTEAFVKKQRGRNIGKHFLSSKIICGDCGSVYWLRFRKKANGEQILEWSCSEYVQRGRKTASTRSVATDRVGGCDNIHMKDNDLQEVLFKIGQKIFSQEGLDQMQKALVAVIQKAISSGDDWNAEVLKRNQANIMKKRELLLDKMLDGILSDELFQSKDKGLKQEYDEITEKISNIEQVKKEKEFSQKRIAEIASEIRDINDKALIVSKINDHITKITIFHDYGLVSLDFWEDVKFYIKKINYRKVEITL

SEQ ID NO: 16276 - protein, 429 aa, synthetic construct
MRTRKVEKREPKEKKKRVCVYARVSTNHLNQEDSLEMQKSYYEELIIANKEWDYVGIYYDRGKTGTKETRPGFQKMIADVRAGKIDFILVKSISRFARNTITVLKFARELKEIGVGIFFEKENLNTLTGEGEMLLSVLASIAQEESRSISKNIKWRIKKKFEQGEAISSVYWLLGYQRDEYGDLVIVPEEAEAVRTIFDWYLSGMGIKAICIKLDMLGIQTVKGGLWAEKTIQGMLKNEKYKGDFHLQKKYTPEGNVNCPQYNHGEVDSFYITGNHPAIIESKKWDRVQEMIEERQKKYGYKAEEKKKYQNRYPLSGMLFCSKCGAPLYRKKSMAKGEEFIYWVCANRLKHGETECNGVWMNEKELREHKITEPTIVKEEIINGKKCYHYTSKEKFSERKQQKEGRRKNGQNSGILQGINRPRRTVIQL

SEQ ID NO: 16277 - protein, 558 aa, synthetic construct
MTKLYSYIRFSSMRQSEGSSYERQIRMAKEIADRHGLELVNDYQDLGVSAFKGANSKTGALSRFLDEIGRSIPVGSWLFIENLDRLSRQDIISAQELFLSIIRRGITIVTGMDNKIYSIETVTANPMDLMFSILLFIRGNEESQTKRNRTNSSALLKIKAHQQNPQSPAVAIEEIGKNMWWTDTTSGRVLPHPVYFPVLQKIVKMRQDGHSAGSILDYLNEHHEPPAPTSNKRHGKWSRAMVSRLFNTKALIGVKTVRVDGVEYELRDYYPRVLSDSEFYFLRKNIIKKAWDYGHDKEKVIPLLSGIGVLRCVHCGATMVKQTAANGKREQYRYCCDGRKSGRTDCPYPNWGFRAATLERAVLQLLADKIWIAEDKTNPIPEIQVKIDDISRKIDNLINLSAMMGATKELANQITDLNMQREALHEEIRLFEREMYSVDSQGWEKLAEFDLSDVQNEERLKVRMKIKGALHEIECSRLDSKKNLFVLVYLDGLRQRLVIENNRGLKKGQIIVDLKTINDRQILESAGMVLHPCIDMIVDKNWKAPEEISGLLSEEFGI

SEQ ID NO: 16278 - protein, 473 aa, synthetic construct
MAKKIPAVRSAAVYARISADVEGKSLGVQRQLEDCRKLAAERGWVVGREYVDNDVSAYSGKARAGYEAMCTDLAAGVRDAVIVYNLDRLHRRPAELEEFVALCEAAGVNQVATVTADIDLGNDDGLFMARIFAAFAAKESGRKSARMRRKYEQKAAQGLPHGPNRPFGYEEDKITIREAEAEVIRELVTRVIAGESLNSLTVWLNETGVAPVRGTRWASTAVRNIVSSPRIAGLRAYKGEVVGDAAWPAIISVAERDQVLAALAVRAWSRKRSPRKYLLSGLCRCGRCQARMFSAARLEAGAHKRRYVCSSSPDHGGCGRMTVVAEPLEKLITDAVLTRLDSKALADALAGKARANPDTAALSTQVEQAQARLDELTGLYSTGAISAREWIMARDPITDTITRLRREIAETLDTGPLAELAGQGSKLRAQWDELGLDRCHAIIRTVVDHVIIKPGQPGARGLDMGRVDPIWRT

SEQ ID NO: 16279 - protein, 612 aa, synthetic construct
MLRAVFYARCSTEEESQKDALVQQVKEAEVCIKEQGWTLVDRYIESKSGTTTKGRQEYTRLYEDLLKDKFDIIVIKSQDRLMRNTKDWYLFVDRLVTEQKQLYIYIERKFYTADDALITGIKAILAEDYSRELSKKINNAHRNRQKSGGKVIMTSRVYGFRKLPDKSIALIEEEAAVKRRMYELCAANFGTRTIATILENDGVRKRDGQPFGANDILRIIKNPLNKGCAVMGRLHYDFDTKKTIRTSSDEWYVYDHKVPETVSEELWERANENIRKRRSDKKAENEADVSGKNGGKYHLSGKLQCGLCGSPYYRRIRRRYKTGEIIHEWKCRTYLETGRNTGRLDRPQLRRVQLEHVEGCDNVHLDEERLYQLLEKNCLSSYQVDKEKLTRKMIGLLKTVLKEQDLQPEIDRVKMQKKQIKEQTKKLVDKLLDGVLSDQVYTEKQKELDERLENIQAQLNRLEKQNNQKSVLKYRILNIEESLKNGDIIEKASVAGMLEEIDRIVVFPTYLELHFNFSKMIGVTDMNLLPESEQDCIRIEYDNLFNYRQGMAEEREQIVQLLIENPDYKAKDIARELDYGLSKTQYRMKVLQEEGRIQYRREGMTGYWEVLK

SEQ ID NO: 16280 - protein, 608 aa, synthetic construct
MNTAVNEYNYRFKLTDYAQFDRNRARNVAIYGRVSTEHEAQLSALENQLQWYDDQVKYHPNWTVCERYIDEGITGTQAKKRPAFLKMIEDAKQGKFDLIVTREVCRFARNVVDTLVVTRELKGIGVEVFFIDDNIWTMDGDGELRLSLMATLAQEESRKTSERVKAGQKISRDNGVLYGNGNILGYDRVGDTYVINEEQAETVRMIYDLYLQGYGSMKIAKILTERKRKTASGLIKWSVSNIMRAIKNATYTGTKCYNKSRSNNFLEQKRINNLDMSTYEYVEGDFPAIISQEIWDKAQAIRESRIKPVCVSAGKNTHSKRDSRDIWVNKLRCSCGSSYRKNKWHTKLDGKTSYGYQCYNQLNNGIKRKRAEIGLDTEGYCDSRMITDWKLDFMAKALLEHLWTERKESVLIALDLIKCYYKEEKSNETQSDTVTIQAKLDKANSRLTNLIAMRADGEISKDEYQAMRSPVDEEIKKLQKALDEIPQEKSNPKGLDIEGIRSTLNSLVDFSGSTISHDVVNQFVYLITPTSDTTFDWYVNLNGTADVKATFTAEGRKKNCIIKLEEIEKISSVHRGENEDNAHFIKNPHIFTYLHRLLLQSRQNRQRF

SEQ ID NO: 16281 - protein, 706 aa, synthetic construct
MSRTSKITALYERLSRDDDLNGESNSITNQKQYLEDYARRNGFTNIRHFTDDGFSGVNFNRPSFQELIKEVEAGNVATIIVKDMSRLGRNYLQVGFYTEVLFPQKDVRFLAINNSIDSDNASDNDFAPFLNIMNEWYAKDTSNKIKAVFDARMKDGKRCSGSIPYGYNRLATDKQTLVVDPVASEVVKRIFLLANEGKSPRAIAELLTEEKVLIPAAHAKEYHPEQYNGIKFTDPYLWGMSTIRAILSRQEYLGHTVLRKSVSTNFKLHKRKNTDEDEQYVFYNTHEPIISQELWDSVQKRKKRANRTATKGTHSNRLSGYLYCADCGRRMTLQTHYSKKDRSVQYSYRCGGDASRVNACTAHSISADNVEALILSAVKRLSKFVLNDEEAFAKELQALWNEKQTEKPKHNKSELHRFQKRYDELSKLIRGLYENLVSGLLPERQYKQLMKQYDDEQAELETKIEEMEKELTEEKANTVDIKHFISLIRKCKEPTEISDLMFAELIDKIVVYEAAGMGKARTQKVDIYFNYVGQVDIAYTEEELAEIKAQEEQIEMERLAKQREREKAYREKRKAKKLAENGGEIVKTKICPHCQKEFVPTSNRQIFCSKDCCYQARQDKTKADREAEKGNHYYRQRVCAVCGSTYWPTHSQQKFCSEECQKQNHNEKSLEFYHKKQKEKSGCNDLLQTKELVSSTNSSEIITIPA

SEQ ID NO: 16282 - protein, 532 aa, synthetic construct
MNQQRRAGVYARFSSDKQDGRSIEDQAALCAAYAERQGWTVAEVYSDFAVSGASVHGRFAFERLVQDARRGAFDVILTEDLDRLSRNQADIAALYERMTFAGVEIWTVADGRVSEMHVGLKGTMSALFLRNLALKTHRGLQGRIREGKSAGGLCFGYRVAGTGLREIHEGEAEVVRRIFTEFADGSSPREIVARLNAEGVTGPRGGQWNASTINGSRERANGIIRNELYAGRLVWNRQRFVKDPDTGKRVSRPNAAGARHVVEVPELRIVPPELWDQVQRRLTGRGPNAPMQRKPRHLLSGLCRCGTCGGSFIVAAPNKLGCSTRREKGTCDNRRLISLKMLEQRILGALEEHLLHPDVLERVTAAYLAERRRLRADSTRAEAQRLKRLGEIERETTRIVDTIAKTDLPDPTALVARLNTLTAEAKTLQVKAEGTEPDVIEFHPAIVSRYSEIVRKLRAEIESRPAEERAPVMEMARRLIERVVIFPNDNVGERDLELHGTLAALLGATEGNRDSMGRMVAGAGFEPATFRL

SEQ ID NO: 16283 - protein, 466 aa, synthetic construct
MTARLYSRVSSRTQVTDGFSLPAQRAKLQAWADYQGLTPVQHYEDAGLSGKRDDRPGLAALLLDLQPGDVVATYSLSRLARGGAVQLLGIVRDIRDRGARLVFLAESIDTDTPTGRLMLTILAALAELEIEQTRERTEMGRTEAASQGIYPHGRVGLPTGWTKDEAGRLVEEPAESAVVRLALAQGQQAYHLTATQFNDQGIKTRWGGKWSATQIRRIVQFEGYWTGELVYRAASRPDEPEQHVTIPAPALVSREVWEAAQRDRTHNHPHRQPDQFPLTGHLRCGCGARLTGKSNQAAGYQRRPIYLCHPTLRKTPKCGTNSKASRHYGPAEELNHNARAALAAHLCSPNDPARIADLYRAAPAADPHAAERQDITRKLEALVDLYLEQMIDRATYEARRATLTARLAQLQPVPPAPPAEMPDLAAVAEAILTVPNAELAELLDIYQVEFLALGGTEVRVVGLTPP

SEQ ID NO: 16284 - protein, 523 aa, synthetic construct
MRQVITYLRFSSKPQERGDSIRRQKGLFERWLKDNPDAKVVDEFSDEGASAYHGHHLKGDFGRMLQNIQDGKYLSGQTVLLVESETRLNRQKARNTENLVDLITGKGVDVICLESGKIYTSTNIDDLDTSIQLKIAAHIAHQQSKEKSIKVSAAWEHRAQLALEGKQQLTKNVPGWIDPDTRKLNEHSSTVVTIFDLLLSGESLHNIARYLQANNIKSFSRREKANGFSVHSVRTILRSESTVGTLAASKRNDRPAIPNYYEPAIDVATFNKAQEILSKNRVGRAPASDNPITINLFKGIIRCQCGASVHPTGVKATYQGVYRCNNVPDGRCNVPTIKRKPFDKWMLDNIVGFLERDDGNNTDKRKAEIEYQISLVTSKLKKATTLLLELDDVTELKEQVKELNIQRSNLQSELDELNQRETLSDKPLHHLSEIDLTTKAGRVEAQLILSKFVQSIELQREMIIITLRNGTVIGKSRDLSPVLSRDLMKQVVSSPSPTDIDMFSVITSDEEFRKSGKQVTKRS

SEQ ID NO: 16285 - protein, 532 aa, synthetic construct
MKRAVIYARYSTDLQNDKSVEDQFRLCQDFAGRLGAKVIKQFSDKAKSGASMFGRPGLADLMTAAERGEFDILITESTDRVSRDIADLAHVHKVLKFRNIEMQCVNGGLMDTVQIGMYGIVGQMQREEGARKVKRGMTGVVRSGRNPGGRAYGYRPISGKKGELEIVEEEATVIRRIFDMYAAGISARTIAKSLNEDGVPAPRGKQWNASTINGNSNRGNGILRNPIYAGQIVWNRVHMVKDPSTGKRVSRINEDSAVETIDAPHLRIVDDKLFQLVRDSKKERTGTAARTAPKNKRLLSGLLRCECGGSLSIIGADRSGPRVQCTVNKESGSCSNDARYYVEKIERDVIDRLRVMFADTSIIDAYVEEYKAESKRIAAERRNSRGNTERALADVQERIGRLLDQVARGTIEEEDVLSMLPPMKAERERLKGELAAQEPPSNVIEIKPKAVTRFREDVESLAEILKERGAEPTVEMARAFRDVISGIIVSRRKPGEAYHYEIKGWLEGITGPALSSVLLVAEEGFEPPTQGL

SEQ ID NO: 16286 - protein, 517 aa, synthetic construct
MKNIPVAIYARVSTGKVEQSESTEHQISQLTAHLKSMGEEYYTEPALHYVDEALSGYYTKMEERPAFKRMMEDAKEGKFKVLLLREISRVGRDDEENLRFVNRFASLSIRIKSLHDGFDSSVPGSELGFKVKNMIAQIESERISARVSAGMREKSKKGVWVSSMVPIGYVRDKETKKLIIDEAYAPIIRDIFHWYVIEKRGTPTICELLNQRGDRTKNGKLFVRSHIRQIIQNPVYIGCVVYGSKRAKLNREYDEKGNLIRKNQKFVKTNDPIVVEDAHSSIIDKSIFYKAQEIMKTRGSIIDRTTPRRATYPLIGIVKCGKCGIGMVTSKALKSKKSDVYLRYYRCGNYHKGGKAACTGVAIRADKLENELFTRLFHHLSALDMQHMKSQGKAEIRTLESKVKRMETDKKKLEKKQTDIALRADLFAGEVFENTMLALKRQIENLDQRILAVRGQLNEMCSKGENTLLLSQLLERMKQASLDDLQALRAIFDELIEKVVVADSQTIALVNYKYRFE

SEQ ID NO: 16287 - protein, 568 aa, synthetic construct
MPQALKAAIYCRVSTDDQEREGTSLQTQQAACETYCQQKGFNVTHRFIETFSGLTLDRLKLRDLQGKARAREFDVIVIYCLDRLTRNPTHGVILGEDFNKLGIKLEAVTETIESSELGKLISYVKGYASNLEAERIKERTMRGKMAHAKAGKLPQGTGIGIYGYQWNKDTGCRTIIEHEAKVVLRIFADIVAGKSVNSIALSLNKDEIPTKSGSLWFPLTVRRIALNQTYTGNTYYGQTKRVGKNKVIGQPKESWILLPDVTPPIITQEMFDKAQDAIKNRLTVRPLKPNAAYLLTGFMKCPKCGSTIGGTMLSGKYRYYQCRGSKPTATRGKICDAGYIKADEIEAKIWDRIVGVASDPLQTLAFGNSDKDQRELLPMLEKQITELRTKLKAYPQKEKNLYGLLNHEQVTPEYVLEAVSKLKEKKAEEEQQLKGLIETRNRAGKAASIHLSDEQIANMVDKKLSATSSLEDRRKWLEALRVKIIAQPGSFKLICFYDANIDYTDFLEEMPYVDTSAGELCPNTDDPMYSDYAKGVKDLVTIERTSASQHGHSCQFRLVLTHRVKKDR

SEQ ID NO: 16288 - protein, 525 aa, synthetic construct
MDVVLYARVSSEKQDVDLSLSAQLKALRAFALSKGYTIVREYVDEAETGRTTSRPAFKEMIAAARRPGKTFQAILVWKFSRFARSREDSIVFKTLLRRNGVQVISINEPSENTPVGHLMEAIVESLDEFYSENLGEEVVRGMREAASRGFYQSYRAPYGYQKVRVSDGAKVRTKLELNTSQSKVVEGIFNAVLSGQGSIDIVRDLNSKGIPSSKGKAWTKGTIYSMLGNEIYTGTVVWGRVSKRGLKPIRVEGACPKIVERETFDNVQKLLGERAPKKVHPRVVSSKFLLSGLARCGYCGRALTGADAKSGKFSYYVCGSLTKKGAGSCHSKYLNASKFEDAVIAEIKKAILTTENLTDLAKIASEEWNETLSQLRQEIDTVQDSLKDTGYRLSNIYDAIETGKFDLPDLSLRIKELKMQQEKLLERKHQIELEYAEHRYELLDPKQMEAYVEDLKSLLDEGQVFERKAFIKGFVKEIRVKGDEVILEYTPPLPEGVGETVLSIGGHGGQQRIRTSDFLRVKQAF

SEQ ID NO: 16289 - protein, 482 aa, synthetic construct
MRTAIYVRVSTQEQAEEGYSIKAQLERLEAYAASQDWKVVKTYVDDGQSAKDMKRTDLTRMLNDMKEDIFDCVLVYKLDRLTRSVLDLYTMLNTFEKYNVKFKSATEVYDTTNAMGRLFLTLVAALAQWERENLGERVRMGMNQKAKEGKWTVSKPPFGFDKVNDHLVINEHEAITVREIFNLYLSGKHGVGKIAKMLNLRGMKTKGNSNWNFGTIHYVLTNMIYIGTMRYNYRVNTEQYFEIENVVPAIIEKGDFDEVKRVLALRSNHHPRRATSPYIFTSVLKCARCNGGMAGKQGGNTRNSNLSYNYYCINARFGTCDQPIINQGYLEIQFLELIKNWDFKNIAAHEVAFSEIPEVDIEEKIKLLNKELKAIEERRGKWQYAWMNNLITDKDLLNRKEEESENEERVKGELDLLSKSVNIDNENDALAKALHELIQNWIELELHEKKRFVELLIDNMSVDKAYKARKPESVVITDIVFL

SEQ ID NO: 16290 - protein, 515 aa, synthetic construct
MKTAIYLRKSRADLEAEARGEGETLAKHRTTLLKIAKEMNLNVLAVREEIVSGESLVKRPEMLALLEEIEDNKYDVVLCMDMDRLGRGGMKEQGIILETFKRSNTKIMTPRKTYDLNDEWDEEYSEFEAFMARKELKIITRRMQRGRVASVEAGNYLGTHAPFGYDIHRLNKRERTLTINPEEASVVRMIFDWYANEDMGANAIRSKLNDLGYKSKLGNEWNPYSILDILKNNVYIGKVTWQKRKEVKQPDAVKRSCARQDKSDWIIADGKHEPIIPESLFEQVQEKLNSRYHVPYNTNGIKNPLAGIIKCSKCGYSMVQRYPKNRKETMDCKHRGCENKSSYTELIEKRLLEALKEWYINYKADFEKHKQDDKLKETQVIQMNEAALRKLEKELVDVQKQKSNLHDLLERGVYTVDMFLERSNVVSNRITEITSTMENLKKEIKTEIKKEKVKKDTIPQVEHVLDLYFKTDDPKKKNSLLKSVLEKAVYKKEKWQRLDDFELVLYPKLPQDGDI

SEQ ID NO: 16291 - protein, 515 aa, synthetic construct
MKTAIYLRKSRADLEAEARGEGETLAKHRTTLLKIAKEMNLNVLSVREEIVSGESLVKRPEMLALLEEIEDNKYDVVLCMDMDRLGRGGMKEQGIILETFKRSNTKIMTPRKTYDLNDEWDEEYSEFEAFMARKELKIITRRMQRGRVASVEAGNYLGTHAPFGYDIHRLNKRERTLTINPEEASVVRMIFDWYANEDMGANAIRSKLNDLGYKSKLGNEWNPYSILDILKNNVYIGKVTWQKRKEVKQPDAVKRSCARQDKSNWIIADGKHEPIIPESLFEQVQEKLNSRYHVPYNTNGIKNPLAGIIKCSKCGYSMVQRYPKNRKETMDCKHRSCENKSSYTELIEKRLLEALKEWYINYKADFEKHKQDDKLKETQVIQMNEAALRKLEKELVDVQKQKSNLHDLLERGVYTVDMFLERSNVVSDRITEITSTMENLKKEIKIEIKKEKVKKDTIPQVEHVLDLYFKTDDPKKKNSLLKSVLEKAVYKKEKWQRLDDFELVLYPKLPQDGDI

SEQ ID NO: 16292 - protein, 515 aa, synthetic construct
MKTAIYLRKSRADLEAEARGEGETLAKHRTTLLKIAKEMNLNVLSVREEIVSGESLVKRPEMLALLEEIEDNKYDVVLCMDMDRLGRGGMKEQGIILETFKRSNTKIMTPRKTYDLNDEWDEEYSEFEAFMARKELKIITRRMQRGRVASVEAGNYLGTHAPFGYDIHRLNKRERTLTINPEEASVVRMIFDWYAHEDMGANAIRSKLNDLGYKSKLGNEWNPYSILDILKNNVYIGKVTWQKRKEVKRPDAVKRSCARQDKSDWIIADGKHEPIIPESLFEQVQEKLNSRYHIPYNTNGIKNPLAGIIKCSKCGYSMVQRYPKNRKETMDCKHRGCENKSSYTELIEKRLLEALKEWYINYKADFEKHKQDDKLKETQVIQINEAALRKLEKELVDVQKQKSNLHDLLERGVYTVDMFLERSNVVSDRITEITSTMENLKKEIKTEIKKEKVKKDTIPQVEHVLDLYFKTDDPKKKNNLLKSVLEKAVYKKEKWQRLDDFELVLYPKLPQDGDI

SEQ ID NO: 16293 - protein, 491 aa, synthetic construct
MGLAAIYLRLSRNEEQLNIDEILLNHRNALTKLAKQQKLTWDIYQEISSGVNTERPELNLLLSRLDDYDALLVMDIDRISRDNAHAEEIKKMLIIHDIKILTPQGAIDLSQESNEMLFSFQAMMANFEYKQIRKRLGRGRLAAAEQGKWTMSNRVPLGYKKNEEKRLEVVEEEAKIIRFIFQKTLERVSANEIAKQLDILGWRSRQGKVLTSTHISNMRRNVVYYGVVKAGRKVNGRVVDEVFVEDAHEPIVSKQMFLEVQKILEENTTGNFFNKLKATRKLQNLIYCNCCKRKRYIQCDGNGVDYIKSCIYKVDNNKCRDRGYKYEPIEQFVLQKVKEKKPDFEQELQMLKSLDTTEIEKKLSIQRESLEKQINRFNKRQRNLKEMRMDGEISKAEFYEMRDENEEQIKQVKQQMELIDIKLENLSNTDEEQARLQDAIKTLDKLEELKAESCNTFLKKFIKKIWFSSNTEANHDTTRPKEDATIEIEWL

SEQ ID NO: 16294 - protein, 463 aa, synthetic construct
MLGKIKRCALYIRVSTSEQCMHGKSLEAQRDYLEHYAKEHNMVIVGVYADEGKTARKELKKRKAIHALLEDVKAGKIDIILFWRLDRWFRNLSDFYKVQDILDAHGVSWMSASEPGINMETRDGRLQLNVVLSIGQNEVDTTSERIRFVNDASVRQGKLIFGDANMGFGYKSGIVDGVKRMIKDPETEEATEAFFKYLLSHQNKSATVKYMQKHYYPDFSYSMLRTMVSSEFYKGTYRGFPYCPAYVTEEEWNKLQSLSCKNVKSTPSGRIYLFTSLMRCPVCGQKLVGTGCSSIINRKTKEKRSYCYYRCNRAIIDHLCSNRHRVSQNLIEEYLLENLENEYKKYQIRYKKIREQKKKLRDTRTPEKLNKELDRLNLLFQKDRITWEYYAAEYDRIEKELKEISTALPEVEKDFTYLEELLRSDFKKIYEQLTPENRRAFWRSTIEEIHLNEDSTVKNVDFL

SEQ ID NO: 16295 - protein, 562 aa, synthetic construct
MSKEKIKVYLYTRVSTSIQIDGYSLEAQKTRMKAFALYNDYEIVGEYEDAGKSGKSIEGRVQFTRMMEDIKSGKDGVSFVLVFKLSRFARNAADVLSTLQTMQDFGVNLICVEDGIDSSKDAGKLMISVLSAVAEIERENIRVQTMEGRIQKAREGKWNGGFAPYGYKLVDGKLLINEEEAVAIRTIFEQYVNTTIGANGLSKYLENHGIRKIPRQNGKNPLFDAGLIRKILKNPVYKGKIAFGRRTLEKVHGTRNEYKQVEQDEYLIAEGIHEAIISDELWQAAQVKLKSQAKKYEHVNKGKDVRTHLLSGIVKCPICGVGMFGNKCIKKKKDGTKYKDFYYYGCKHRQMIRGHKCTFSKQIREELLDDAVAELIIKIVSNPKFASIMQEKINMKVDTSEIEKEIDNYQKELRKSHSIKFKLIEEIDNLNVDDKHYKRRKQDLDDRLYRMYDKIEELESLLIDAKAKKQTIEAEKLTGDNIYKVLIYFDKLYNVMNDVERRQLITSLISEIKIYEEKQPNGQWLKSITFKLPIIDEDLNISLDNDEQVESVVLMTRVAPTK

SEQ ID NO: 16296 - protein, 521 aa, synthetic construct
MAKITKIEKRQQNNRVKKMRVAAYARVSTESAEQLLSLEVQKEHYENCIKANPYWEYAGLYFDEGISGTKIEKRESLLKLLDDCEKGKIDRVITKSISRFARNTVDCLEMVRKLTGLGVAIYFEKENIDTEHMNSELMLSILSSIAESESRSISENSKWSLKRRFENGTYVISYPPYGYENVDGKMVVVPSEAEIVKEIFRMAISGLGSYLIANELNKRGIATKKNSKWHSSTVQAILKNEKYTGDVIFQKTYTDENFNRHQNRGEKVRYMMKNHHEPIISHEDFELVKTVVGQRKKEKNIDGSDNKYQKRYALSGKVYCGECGSKVKRCMRYAQSGNYAAWTCVRHIEDKKSCNMKYIREEHIKVAYVQMRNKLIAGKNIMLKPFVDTLRCGNNKDRLRHILELDEKIEKLNEQAQVLTKLLSSGYIELDVFYAENNNISLELAELEKEKASLSSIVSGDLNHLNEAQKLLRFINKSDCIKDFIDDAFSQFVEKITIEDRLKFTFHLKCGLNLTEEVIVK

SEQ ID NO: 16297 - protein, 522 aa, synthetic construct
MLIPARKRPGNSISNQKEKPKLKVVAYCRVSTDSEEQSGSYEMQVKHYTDYISRNSDWEFAGIYADDGISGTNTKKREGFNDMINDCMAGKVDMVITKSISRFARNTIDCLKYVRQLKDSNIPIIFEKENINTMEASGELLLTIMASLAQQESASLSQNVKMGLQFRYQEGKVQINTNWFLGYTKDADGNLIIDGEEAKVVKRIYREYLAGSSLREIATGLQRDKIKNGAGHLKWHVSNIKGILENEKYIGDALLQKTITTDFINKVRIKNDGTEPQYYVKDNHEAIIPRDIFIQVQEEMLRRANMFSGEGKKKKRVYSSKYALSSLCICSKCGDIYRRVAWNNRGEHLVVWRCCTRVEHGPKSCDAPTVREEELQKAVVKAMNEVLKTSDDTEKILIKNIEKVVAGSNDEEIEAINRVIEVKQKELLAQVRAKKDYTDIANEVDTLKGEKHKMLVQKALDEDVKRRIKDMKEFLRSQSKNIKEYDEELVRKYIKQIKIYDDKFEITFKSGIEINIERIRIN

SEQ ID NO: 16298 - protein, 571 aa, synthetic construct
MTSEKAKVAIYARYSSDKQSERSIEDQVRLCRERAEREGWTVVEVFPDFALSGATRDRPGLNALLARVGEIDIVLAEALDRISRDQEDIAAIWKRIEFSDCKLVTVSEGRIGELQVGFTGTMSAMFLKGLAEKTRRGQVGRVAAGRIPGGLSYGYAADPQILAGGAVDRGRRRIVPEQAEVVRRIFAWRAEGRSANFIVRQLNREGVPGPTGGPWRLSTVCGSRQRRNGILHNELYAGRIVFNRQRFVRDPVTRKRVSRPNPESEWKRQDVPELRIVDEALWDAVAAIEGAPERIAGVRPTPTKRLLSGLIKCGACGGNFTVVGAERWGCSTARATGTCGNGRTISTAQLESRVLDALRNRMLQPDLVAAFIEEYRNASEDARKAAFADRTKVERNRAKLTGRIERLTDMMADGIGDYAEMKSRLAAALSDRAAIERQLEDIEVAPAVSLHPNLADAYRRNVEKLSDALNAPELEAGEARLALRNLIELITAVPREEGRGVDLLVHGRLAQILHIANDRPDLRQGGRMIRLVAGARGAGKHTTGPNGADCMFELVAGTRTERCHTSPIIDI

SEQ ID NO: 16299 - protein, 544 aa, synthetic construct
MIRAAIYARFSSDRQNDRSVDDQIASCRELCAREGFTVVLTFCDREISGASTVNRPGFQNLMRAAEALHFDVIVAEDVDRISRDQGDWHTARKRLDFLGIAIHTASGKVGKLDGALRALMGEMFLENLVVHTRRGLESVIRDGRHAGGRAYGYRAIAGKPGELEIDQAEAEIVRRIFCEFVEGKTPREIAAGLNADGVKPPRGKNWNASTINGNAARGHGMLINELYAGRIVWNKVRMIKDPATGRRVPRPNRKDQYRSVDAPHLAIVDDATFKAAQVIKAGRSHQGASHSRKAVRPLSGLLRCGSCGAGMSAIGAQRKGKPHRMQCSAFRESGICSNGRKVSRPAIETLVFEGLREELANPEAIAEYVRTYNAERRRLAKQSGDREKHLQRRNGELDREIDRLITNIAKGADFDTYNPKVNDLAAERKRVKAELAQIAATSEIVTVHPAAIERYLADIGRLAEVAAEAAELDEPGLVATLRQLVQAVVVHAPPGTDELAIEIKASLSELTLPGPLLKRSNGRVTVGSGGGTRTPDPRIMIPVL

SEQ ID NO: 16300 - protein, 605 aa, synthetic construct
MSLAQDAISSTQLERRKRFVLYLRVSTPSQVNTDYDPEGISIPAQREAGLRKGAALDADLVREFIEPGRSGTSVDKRPVFQEMLAWIKEQGDIDYVIVYTFSRAFRNALDAGITKRTLGKYGTRVVSTTLDLGESPESAMIETIMHAVDQYQSEQSGADIRYKMGQKAIKGGTIGRARIGYLNSIEEFEGRTVRTIVLDPQRGPLVRRMFKLFATDEYSITDLHEEAERIGLTTRPTKRWPEQTPSENQLRAILADPYYVGLVTYEGQQYPGRHEAIIDAATFQVVQDILATRARRGSRDRVTTHYLRGKLFCERCFQNGRPGTRLIFTESKGNGGYYSYFVCRMKQEGICDLPVLPVERVEQSIIDHYATEQLPPEFSAMVGDQAREAILHDRKDLDTRRKQAAKRLRELDVQEERLIDLAADGTIQSGKLRDRLKKLAVQRVQLTEEQQSSTETLTQGLKVLNAVLHFLEDPQAMYKAAADVTRRRMNSAFYDALYIARDAVGHVERTAIFEEVITAYTDRPTTAPSREGGASDANRRPDPKIGASVPFTLRDALATSGGYSVDHGLSTPVMVELRGFEPLTSSMPWISPALQALRSACIPVH

SEQ ID NO: 16301 - protein, 555 aa, synthetic construct
MYNYDYKQLRFALYVRKSQEDKNRQVQSIESQLEVLEEHAGKENINIIKIYKDCASAHKPNNRKGFNEMLQDINDKKIDSILCWKADRLARNHIEGGMTMHCLEQGIIKMIKTPHKTFLPTDNTLPLTIEFGMANQYSRDLSLNIKRGNKTKVNKGGWCHIAPQGYVNNRLEKKIETDPERFSTVRKMWDLALTGQYSLQQICEKANNEWNFKTSKKKNTGGVKLTTGTLHNILVNPFYYGYIKAGEHQAWGNHKPMITFKEFEKVQSILRYRGRKAYTSQSFAYSGIMKCKVCSSMITAETKVKYKCPKCGKKQTAKNPKICSCGYMISHKDISKGKFYTYYHCSKSKGECNQKSIRKELLDKQFESFITSLEIRANFIDWAEKWLKYLEQREVQKEKKDKQTRIRQIKDLESQLSRLVDMRMTDEIGADLFKKKKEVLEKQMIILKGKNHCRNTKIQEIREALSFIENLKTKFLNASNKEKKQLILEIGSNPTLRDKKLLVQAKRKYLTIQKLRVHKNNKIEPPKDYSTSRLQGNLRSCYQTWCTILDENETF

SEQ ID NO: 16302 - protein, 560 aa, synthetic construct
MTRAAIYARFSTELQNEKSTEDQIALCRAYATRNGLDVVAVYEDKARSGASLFGRDGLLTLLEAAGQKTFDAVVVEALDRLSRDMADLAGLHKRLSFLGIEIQAVHDGIADAVLIGIRGLVGQMQREDGAKKVRRGMAGVVRDGRHAGGRAYGYRPILGRPGELEVVEREAEVVRRIFDAYSAGRTPRDLAGDLNRDGIAPPRGTRWNGSTINGNARRGVGLLFNELYVGRIIWNKVRMVKNPDTGKRVSRPNPKDQWQTKEVPHLRIVDDEVWQNAQALKAGRVNASPHFKRRPAHLLSGLLRCGICGSGMSVHDRDKTGKTRIRCSAVRESGSCSNRRIIYLPEIERAVLDGMREQLKAPDLIEAYIRKYNQERRELAARANSMRSALEGKRDRVKGELQRTIDLVIRGVIAEEDAKQRIAELKTQLSLIEGQFGGLDEPPSTVALHPATLQRYVKTVDDLSTALAGHATAPDDRGPLIRNFRQLVHSVTVHPKPAREGFEIEVNGKLAALIGGAAFPTARYTGKPTAIGGRCDAAVGHDSGFEVVAGEGLEPPTPGL

SEQ ID NO: 16303 - protein, 506 aa, synthetic construct
MRSVITYLRYSSAIQGAEGADSTRRQNDLFKQWLKKNSDAQVVASFSDEGLSGYKGKHLTGQFGDMLARIESGEFPEGTILLVESIDRIGRLEHLETEALMNRILGNGLEIHTLQDGLIYTKDALADDLGISIIQRVKAYIAHQESKQKSFRVSQKWEQRAKLALAGEQRLTKMVPGWIDPDTFKLNEHAETVRLIFKLLLSGESLHNIARHLQSNGIKSFSRRKDANGFSVHSVRTILRSETTIGTLPASQRNDRPAIPNYYEAAIDASTFNKAQEILGKNRIGRTPASDNPLTINIFKGLFRCQCGASVHPTGTKNKYQGVYRCNNHLDGRCDVPPLKRKPFDKWMIDNFLGMIDVGNDGEAEGKIASLQHEVEIVTTRIKKATALLLEMDDIDELKIQLKELNQKRTELQTTIDNMRRKTSLTDKELPQLKDIDLTTKAGRVECQLILSKHLKGLTLGKDSVTVTLQNDTEITIPTNPLPLNDGTSIFEIADKELLDIDAYQL

SEQ ID NO: 16304 - protein, 481 aa, synthetic construct
MITTNKVAIYVRVSTTNQVEEGYSIDEQKDKLSSYCDIKDWNVYKVYTDGGFSGSNTDRPALESLIKDAKKRKFDTVLVYKLDRLSRSQKDTLHLIEDVFIKNGIEFLSLQENFDTSTPFGKAMIGLLSVFAQLEREQIKERMQLGKLGRAKSGKSMMWAKTSYGYDYHKETGTVTINPAQALTIKFIFESYLRGRSITKLRDDLNEKYPKHVPWSYRAVRTILDNPVYCGFNQYKGEIYPGNHEPIISKEEYDKTQSELKIRQRTAAENVNPRPFQAKYILSGIAQCGYCGAPLKIMLGVKRKDGSRLKKYECHQRHPRTLRGVTTYNDNKKCDSGFYYKDKLEAYVLTEISKLQDNAGYLDKIFSGDNAETIDRESYKKQIEELSKKLSRLNDLYIDDRITLEELQSKSAEFISMRGTLETELENDPALRKNKRKADMRKLLNAEKVFSMDYEGQKVLVRGLINKVQVTAEDIVINWKI

SEQ ID NO: 16305 - protein, 547 aa, synthetic construct
MKLLVTYIRWSTKEQDSGDSLRRQTNLIDAFYSKHKNDYYLLPAHRYVDKGKSGFHQQHKNQGSDFRRMFENVMSGAIPEGSLIVVENFDRFSRADIDTAIDDVRQILRKGVSILTLGDGELYDKSALTDPVKLIKHIIIAERAHQESLVKQKRIAQVWNHKTQLARELKKPMGKQAPGWLELSEDGSHYIVDEDKASLVNIIYDKRLSGMSMFAICKWLNEQGYPTINQRKVRISKTKKPDGNWSALSVKHILTSRSVLGYLPAKISTEDRKTVLREEIEGFYPQIVTDSKFYAVQQLLEETGKGKTSSGDHWLYVNILKGLIRCKCGLVMTPTGIRKPVYQGTYRCNGNKESRCSYGTVSRKLLDTQLCSRLFSKLSQLHDEATDTAKLDELQRRLNTVDGELEKLTETLIQLPNITQIQEALRVKQEEKDELIVQLSREKARVKSVSSLDLSGLDMESVEGRTEAQIIIKRLVKEIVVSGNEKLVDIYLHNGNMIRGFPLDGKDDHTLTLEEATDEMQSLDDMLIFGEPVTRIYPAGDMEEVDA

SEQ ID NO: 16306 - protein, 506 aa, synthetic construct
MRHVITYLRYSSAIQGAEGADSTRRQNELFKQWLRKNSDAQVVASFSDEGLSGYKGKHLTGQFGDMLARIEAGEFPAGTILLVESIDRIGRLEHLETEALMNRILGNGIEIHTLQDGLIYTKDALADDLGISIIQRVKAYIAHQESKQKSFRVSQKWEQRAKLALAGEQRLTKMVPGWIDPDTFKCNEHAETVRLIFKLLLDGESLHNIARHLQANNISSFSRRKDANGFSVHSVRTILRSETTRGTLPASQRNDRPAIPNYYEAAIDAATFNKAQEILDKNRKGRTPASDNPLTINIFKGLFRCQCGASVHPTGTKNKYAGVYRCNNHLDGRCDVPPLKRKPFDKWMLENFLGMIDVGNDGEAEGKIASLQHEVEIVTTRIKKATALLLEMDDIDELKIQLKELNQKRTELQTTIDNMRRKASLTDKELPQLKDIDLMTKAGRVECQLILSKHLKGLTLGKDSVTVTLQNDTEITIPTNPLPLNDGSPIFEIADKELLDIDAYQL

SEQ ID NO: 16307 - protein, 506 aa, synthetic construct
MRTVITYLRFSSATQGAEGADSTRRQNELFKQWLRKNSDAQVVASFSDEGLSGYKGKHLTGQFGDMLARIESGEFPAGTILLVESIDRIGRLEHLETEALMNRIIAHGIEIHTLQDGLIYTRDALSDDLGISIIQRVKSYLAHQESKQKSFRVSEKWKQRAKLALAGEQRLTRNVPGWIDPDTFKCNEHAETVRLIFKLLLDGESLHNIARHLQSNDIKSFSRRKDANGFSVHSVRTVLRSVSAIGTLPASQRNDRPAIPNYYEAAIDAATFNKAQEILDKNRKGRTPASDNPLTINIFKGLFRCQCGASVHPTGTKNKYAGVYRCNNNPDGRCDVPPLKRKPFDKWMIDNFLGMIDVGNDGEAEGKIAALQHEVEIVTARIKKATALLLEMDDIDELKIQLKELNQKRTELQTTIDNMRRKASLTDKELPQLKDIDLTTKAGRVECQLILSKHLKGLTLGKDSVTVTLQNDTEITIPTNPLPLNDGTSIFEIAEKNLLNIDTFQL

SEQ ID NO: 16308 - protein, 492 aa, synthetic construct
MNAYLYQRISSKKQTAGVGLDRQLENALSYCKQHSLTVIDTQQDVASAFHAKHLDGHLGAFLAAIKDKLIEVPSALVVESLDRLGRDHTLSALSRFIDIIQAGVEIHEVSTGTVYNARDTHLLHLALAVMERAHNESYMKSKRSKDAIQRKLSAAKDGKIIRKNVPVWIDVIGDALQLNEHAVTVKRIFDLYLSGMSFRAIARELNSTCTPYPIKQAAKKLRVERWGSARVSTMLSSPAVYGQFTPKDGDVIEDYFPAVVDVATYEKVKSIRTTRQVKATKITGLLSIVSSCCVCAECKHSYICHYRSWTNAEGKEERINLRCNGRMSGTLCKGKSVPMEVVEQHILESLPNVDISKLNRNKMRTLDNLKAKREQLQAEMENLIDLVAMGSAVAKEKFKAIQERAEQLDTKIEKAAERILPEEVVQHNAAALNPENLELRRKVNSALQLMGLRVEIDAHAANSATLNIFLKHQHIETKKIQWNRKKRIDARS

SEQ ID NO: 16309 - protein, 490 aa, synthetic construct
MPQAILYSRFSSSQQADGDSLRRQTEMAERFCMTHGLELSSMTFEDLGVSGWKEVLRDGLKSLLKAVERGVVPNDSFILVEAADRLSRKGWEDVTKIVSELISRGCSLVTIENGQIYNSTNFKTLAGVLPLMISADLAKQESDRKSQRIRSVKTAKREQRVIQGNQPFWIDIVDGAPVLNAKAPLARRIVDLSLSGKRPLAIVREFNTERLESPNGGVWQVAVIRSILKNTILYGAKTYFESRDGEYTPVETVAGLYPKICTKAEFDIIKTGTGKKGRKGKGPFSTLLRCVCGRPLVIKGRRGDDTYRVCSGSIDNVCKLKGYYKNIDEILLNQVAFIEVPNDKPVEVNNDERISELEQRLIDLDEMRKENKGKTRILQMVFEEIEEVEQELEELNKEEPISQDDIDLKTIMDIEDSDKQNAILKRRIKKIECSKDGYFTNVHIVFRTGFQRKMIIDQSRKLKGGYEVMGVAIGGDRLRQELEELGQEEE

SEQ ID NO: 16310 - protein, 568 aa, synthetic construct
MSRPVKAYSYIRFSTPKQAQGDSYRRQLQQAMDYCAEHNLQLDDKTIDDFGTSAFRGANMTEGALGRFVDAVKHGEIEQGSYLLVESVDRLSRQAVEEALEQFLAIIRAGIVIVTLSDKQVFCKGQVDFTKLIVSIVYMARANDESEMKSRRSRAAWSNGREQARKNNKVIANSRLPSWLTRNGDQIVTIPERVAIVNEMFEMAKSGCGYEQIAKVFLEKGYKTFGKEADWRPAGIQAVIKSQAVIGVFQPHVIENGHRVPSDEPILGYYPTIVSPALFEEVQHLISKRNKHSGSYRKGTFNNLFSGVLRCQCGESLRYQNKGRAGSPRNYLVCPKQNTAGCKLPNMLYDKVEPQLLQAVFLLNRVMKQRVEGEDKTIALKTTLAELRVQLEVETQKRKKAAQLVLDNDNDADYRVLFEQCKKKTQALEEKIKRAESDLMSRELSVKTLEYIVDPEDLRSTEQRQRFNGQLKTALKEIRFRFDGGYLWAEHKDIDGWIMLTQIFEDKLAGSSIYDRSRYLVRKTQSEAPYGVDPSVVQQEMEDYIRNLQKNDDGTDPDFEDLSSEYSK

SEQ ID NO: 16311 - protein, 529 aa, synthetic construct
MRKVYSYMRFSRPEQAKGTSIERQSSFAEQYALAHGLELDKSLTMMDKGLSAFHGMHKTKGAFGQFLAAVTAGKVPSGSVLVVESLDRLSREDPLIAQAALTDLILSGITVVTAADNQVYSREEIQQNPFKLIMSLVVMIRANEESETKQRRSNAFLKSALNQYQANGNIRRLGADPSWLDFNKDDNTYSFNARVDVIRRILSLYNQGIGSLKIARQLTEESIPTLSGKRNAWGQTTVANIVKSHALYGMKRINVQGVDYDLEDFYPALITKSKWLALQQHRSKRSKTMHGRGEVVHLITGHGKGFTTCGYCGGGLGAQTQKQYKRSGEYSRTVTRLHCLTHKETSSCCSSVFLQPVESAVLFAVCIGVEPQSLVPTVNNVNYSALIDEVENKVKHIVEQVTAGAPWDLFKDVHDRLKLEKQKLIKERDSQKPDVNQSDVQKWVNKLVELADKARANDKEARLQCRTLINSICKSIVIKLRGHDLKSEPVVTITFVTDEQFEFKVGKNGAVKFVDNGMAINRRLKPLLA

SEQ ID NO: 16312 - protein, 596 aa, synthetic construct
MATNKKITALYERLSRDDEMVGDSNSIINQKKMLEDYANKNGYTNILHFTDDGYSGGSFERPAWKKLIEGVESNIIDTVIVKDMSRVGRDYLQVGFYTEVMFREKGVHFIAVANSVDSNKTESAEFAPFLNIMNEWYIRDTSKKIKSVLKTRGLEGGHHTSNHAIYGYRKDKDNPSKWIIDEEAAEVVRRIFQMSLEGNGPYQIAKILTEEKVERPSYYLAQRGMGNHISNYNSTEPYLWRGTTISNILSRPEYMGHTVNFRTYKESYKSHKSKKTPKDEWVIFENTQEAIIDEETFNTVQKLRKTIRRTDSVGIANPLTGLVFCADCGAKMYNHRGKAGFKRDWLGRKTDKRRPLKDEYICSTYNLARGNFEEKCSSHYIRSEVINKLVLDTIKEVSEYVKLNEEEFIKKVYRASKEQQEKTSKLLKKRLAKEEKRISEINSLIRKLYEDNVSGKLSNKHFDMMLKDFEKEQTALEKSIEQTKDTLRDFEEDSIRADKFIALVKKYTDFNELTTQMINEFVDKIVVHEGKWENCERTQEVEIYLNFIGKFEMPKKEPTKEELEELEKLRKKREKKREYNYRYMKKVKDRIEAEGI

SEQ ID NO: 16313 - protein, 502 aa, synthetic construct
MLPAYIYSRISSKQQTSGVGLDRQLENAKAYCAANNLEIVDIQADVASAFHGKHVDGNLGAFLDAIKDKLIPVPSALVVESLDRLGREHELTALSRFIDIVKAGVEIHEISTGIVYNITDTHLLHVALSIMTRAYNESLIKSKRATDAIQRKLEEARKTNKVIGANIPAWIDNIDGEFHLNKHAETVKQIYDLYISGMTIRPIVRYMIEQKIEYPEPKIAKRGVNAGTYKWHSGRIMTILSSSSVYGTYTPLNGEPIEDYYPAVVDLATFMKVKVIRENRARKAVKVNDLLSIFGSCCQCNLCKHSYISNQRILRNRSGEVKTVAMRCSGRLAGLDCKGVNVPNEDLEAYVLPLLPEIDISKLNRNKMRTLDTMKARRTLYTEQQDNLLDLVQMGNAKAKERFIALSADIEKLQEKIAKMETRIVPAVDLIIKDALDQNNIELRRKLNTQLCMMGLKIVIDCKQTGKAEISVFLKSTHIHTGVMTWTRKNRVGVKNTTEVEE

SEQ ID NO: 16314 - protein, 597 aa, synthetic construct
MKKNNVEIIKADSLVRRRGDNVERHLKRVAAYCRVSSDSEDQKNSYDSQVRHYKEYISQRSDWELADIYADEGISGTQVGKRQDFQRLINDCANGEIDYIVTKAIARFARNTLDTLKYVRMLKDMQIGVYFEEENIDTLTMDGELLLTILSSVAQQEVENTSAHVKKGLKMKMQRGELVGFQGCLGYDYDVETKQISINKKEAKIVRYIFERYLEGIGGKVIARELDELGYKSPRGLEHWNDTTVLGIIKNEKYKGDILMGKTFTVDPISKRRLSNFGEEDKYYIKDNHEPIISKEDFEKAQEIRLRRAGNKKTAANVNGKRERYSKMYAFSSMLECGFCGSILSRRSWHCRSDYRKVVWHCVTSIKKGKKFCKHSKGLEEIAIEGAFMEAYRQVYHSNENLMTDLLETIESELNDNSLNKELKRITNKLRILLKKEENLVNLRLEGKVSDSIYNEKYNEISSEKEFLAEEKVNIETTLKSEIDVKKRLTEFKHLLSSQKMLTEFDRAVFESIVEKIIVGGVNSNGEIDPAMLTIIFKTGEIQNKDGKQFKSKRKNAKLETDKLCPQNSDEDKKLYSQGTDNTRGVCSVAGSILASQ

SEQ ID NO: 16315 - protein, 485 aa, synthetic construct
MAEKRKVAVYCRVSSMHQAIEGYSIEQQRDSLTKYCEAMEWNIYDIYIDAGFSGGKLERPAMDKLIREAEAGKFDTVAVYKLDRLSRSVQDTLHLIRDVFKEHDIDFVCLQENIDTKSAMGNLFLTLLSAIAEFEREQITERMAMGRHGRAKSGKSMMWARPAYGYRYDRESQTVSVVQSEAMIVKRIYKEYLEGKSVSQIKNDLNSEGHITKEKPWVYKRITYILQSRVYTGVNEYKGEIYDGKHEAIIDTETFELTQMEFAKRQQQTKDKKNNPRPFQAKYMLSGLARCGYCKAPLKLRLGAVRKDGTRAMVYDCHNRWNRKVTYLTIYNDNKQCTESGRYQKADLEAYVLDKIKELQLNPDTIREKMDLNEKPTANTEEIKKQIAKTNQQIDKLNDLYLNDLITVEKLKERANKLKKERELLEAELSKNSDHLFKAKKKQLNDLLMNKDIDSMTYEEQRNLVKMLIYKVDVTKEDINIIFDF

SEQ ID NO: 16316 - protein, 499 aa, synthetic construct
MEFVAIYMRLSRDSTQNGIEESLENHRLALTRICKTNGWKHDIYEEIASGVSPEREQLNLLLSRLNDYTAILTMDVDRIGRDPEHNEKVLKMLILNGIKVITPSGEYDFSNENSQMLYRMQSMLSSFEYSTIRKRLGRGKFLEASKGHWVMNNIPLGYLKNPETKRLEIDDNESKIIRYIFEKTIEGYSANKISQDLDAFGWRSKKGKVLSTAHISQMRRNPLYYGVVRYERKNELGRVLENCWVEDAHPGIVTKEEFLMCQELIKNNNNKKFKTHGKINHLLQGLIYCGKCGRKRYICIDRNGTPYIKADGAKIENVRCSDAGMALKPVTDAVIEEVKKLKPGLEEEIINFKKRDTIKLEKEMNNKLIETEANKDKLNKKKRNLVEMRMNGEITKEEFLQFRDSLDEQIRNVDDMIQLLQMKLNNLINTEDEVKKLEQIISIINNLDNLSVEKVNAFLRSIIKKVLFSRNIESNPNTAKRDSVEPTVDIEWIEGIPLL

SEQ ID NO: 16317 - protein, 584 aa, synthetic construct
MNTKVKLIKASNTGARNRNALHLDLKRVAAYCRVSTDSKDQLESYKSQVDYYTNLIKNNKNWTLAGIYADEATTGTTATKRADFMRLISDCQNGDIDMIITKSISRFARNTLDTLKYVRLLKENNVGVVFEEENIDTLTMDGELLLTILSSVAQQEVENTSAHVKKGLKMKMEKGELIGFQGCLGYDYDPITKSISINEEEAKIVRYIFKRYLEGNGGSVIGRELEEQGYLTPRGKTKWSDTTVLGVIKNEKYIGDILMGKTFTVDPITKRRLANFGESDKYHIENHHEPIISKEDFEKAQEIRLRRAQNRNTIANKDRKREKLSRQYAFSSMLECGFCGEILSRRTWHTSSIYKKINWQCVKSTKKGKKYCPHSKGIQEAAIEKAFVESYRQLCHADSTIIDDFLKIVEEEINDETLVKDLKKLENQLNRIISQERKLVDLHLEDSIDEEVYAKKYKKLTKQKEELLDEKKTLELTIKDEDSIKERLKQFKKVLENREIIEDFNRTVFESIVDKVVVGRIDKDGTVHPYDLTFYFKTGVKDSQDSNNFKDKRKNAKDNDINKLCSYKNDEDKKLCSQAKDNAH

SEQ ID NO: 16318 - protein, 558 aa, synthetic construct
MSKEKIKVYLYTRVSTSIQIDGYSLEAQKSRMKAFALYNDYEIVGEYEDAGKSGKSIEGRVQFTRMMEDIKSGKDGVSFVLVFKLSRFARNAADVLSTLQIMQDFGVNLICVEDGIDSSKDAGKLMISVLSAVAEIERENIRVQTMEGRIQKAREGKWNGGFAPYGYQLIDGKLLINEEEAIAIRTIFDQYVNTSIGANGISKYLENHGIRKIPRQNGKNPLFDAGLIRKILKNPVYNGKIAFGRRTLEKVHGTRNEYKQVEQDEYLISEGIHEAIVSDEVWQAAQVKLKSQAKKYEHVNKGKDTRTHLLSGIVKCPICGVGMFGNKCIKKKKDGTKYKDFYYYGCKHRQMIRGHKCTFSKQIREELLDDAVAEVIIKLVSNPKFASMMQEKINMKVDTSEIEKEIDNYQKELRKSHSTKFKLIEEIDNLDVEDKHYKRRKQDLDDRLYRMYDKIEELESLLIDAKAKKQTIEAEKLTGDNIYKVLIYFDKLYKVMNDVERRQLISALISEIQIYEEKQPNGQWLKSITFKLPIIDENINIGLDNDEHVECVVLLIKK

SEQ ID NO: 16319 - protein, 373 aa, synthetic construct
MSKEKIKVYLYTRVSTSIQIDGYSLEAQKSRMKAFALYNDYEIVGEYEDAGKSGKSIEGRVQFTRMMEDIKSGKDGVSFVLVFKLSRFARNAADVLSTLQIMQDFGVNLICVEDGIDSSKDAGKLMISVLSAVAEIERENIRVQTMEGRIQKAREGKWNGGFAPYGYQLIDGKLLINEEEAIAIRTIFDQYVNTSIGANGLSKYLENHGIRKIPRQNGKNPLFDAGLIRKILKNPVYNGKIAFGRRTLEKVHGTRNEYRQVEQDDYLVAEGIHEAIIPDELWQAAQVKLKAQAKKYEHVNKGKNMRTHLLSGIVKCPICGAGMFGNKSIKYKKDGTKYKDFYYYGCKHRLMRRAYFCPTKIRKHLHRPYTPEN

SEQ ID NO: 16320 - protein, 488 aa, synthetic construct
MLSYGVYVRVSTDRDEQVSSVENQIDICRNWLERNEFIWDERCVYKDEGISGTLFTERPAIQILLQKAKAKEIDMVVFKSISRLARDLKDSLEIREVFLAHNVRIISVEEGYDSTKAGKNDMAFELWSLFSAQYSRTLSSSISAALAAKVRRGEHIGKVPYGYNRENQKLIINEEEAKVVRDIYNWYNSGWGFKRITNELNRLGIKSKSKDIWQMTSVQRIVRSSIYKGTFILNQYTSVKVGGKKKQIRNPQEKWFIFPNHHSNIVDEETWDQANQKDITANKTKITAWNEFRDLAKCGVCGSNMTVVQSHLLKKNGERTEWKYLKCSRYRRAGKHGCVNHVPIQYRDFRQFIIDLLIKKGESVILKLKSNVEQGQEKKIKKLKQLMNVNEQKKKSLLDLYLEGLINKEEFEKKRGDLETEIKKASNELFIIQQKDVVQTDIKTIKEAFEQLQQQGQDLFHVFQTLIQEIMIHQDGTVDISYCFAESE

SEQ ID NO: 16321 - protein, 534 aa, synthetic construct
MKKYEQARLEDVLQPGLRVAFYARVSTEEQDCTMQENAVEMFLGRYGCEIGEELKYIDSAVSAMKIPLKEREELQKLISDAETRKFDVIVTYKNDRLARSVEEHQEIRKRMRELNMHIVVSSTHELYTVGEIVPQTVKDGLTQIEAAITQERTRDTFRSKAKRGKWFGGKAPYGYTYRVIEENNGGEKTRKEKFVCNKEQQKVVKEIYRLFEIGYGLQQIANEIKDRKLDQNMKWSKEKIRYILTNPFYCGLMSMNRYDNGVLNDQNQWVKGTVQGVTPLFTREYWEYVMKLFENRKKRKIHSRDYSTPFLLRGILYCHQCKELMTTKNQEPGGVKYTRKKTEEKRRVYECKNCDFKLQAKTIHERFQSEYLPYVLEQVTQQKKDHVELEIEKRLKKEMKNLKDANKKLDEKIVKLNQQIEELSEEIKSYYEKEIIEDEVLEFMKIIMSHRTNKIHELNTVKDNKIGSQERIDHIAQTIQQKKYLPPHEVLNGFMKENVDTQKLRVFLLQFFKCIHVASDGNLVLEINERLMGL

SEQ ID NO: 16322 - protein, 552 aa, synthetic construct
MSTITKIQSYHRDAKQLRVAAYCRVSTDTAEQLESLENQREHYQKYISNQPNWQLAKIYYDEGISGTKLTKRDALKELLADCHNHRIDLVITKSISRLSRNTTDCLRIVRELQQLNIPIIFEKEHINTGAMASELFLSILSSIAQDESHSTAGNLRWSIRQRFASGEFRVSSAPYGYSIEDGNLVIDSVEAGVVREIFQQFLSGMSASQIAKGLSHKHIPTKRGGQWRSNTVINILRNCNYTGDMLCQKTYRDDQYHRHFNQGELTQYLIEDHHPSLVNHETFNRIQALLKEAAQKRHIETDSHKYQHHYLFSGKIICGNCGTTFKRQTRPNKICWACQRHLKSAKQCPIKAVPEASLEVAFCNMMNKLVYSRKFLLQPLLENLQVQVNSDTHGRLNSLTERIKANNHKAETLTELMQSGLIDKSIYVNQTAQLEQDTYQCREKAKQLHSRNTDSANSFEDVRSLLHWCQQDQELSGFDKTPFQDFVQQIVVHSSIVVFKLKCGLKLTEKLTKAVTINNHFYRNIIRQRFNEPIKQAEYLYSIIESEGDLIG

SEQ ID NO: 16323 - protein, 525 aa, synthetic construct
MGKVRIIPAHQQKGNSVHHQRSPQPFEKLRVAAYCRVSTDYDEQASSYETQVAHYKELIQKEPTWEFAGIYADDGISGTNTKKREQFNKMIAACKAGKIDLIVTKSISRFARNTIDCLKYIRDLKAINVAIFFEKENINTMDAKGEVLITIMASLAQQESESLSQNVKMGIQYRYQQGKVFVNHNHFLGYTKDAQGNLVIEPEEAKVIKRIFYSYLNGMSMKQIADSLKADGILTGGKTKNWQSSGVSKILKNEKYMGDALLQKTYTVDFLSKKRVKNNGIMPQYYVENDHPAIIPKSVFMQVQQIIKQRRNGITTKNGKHRRLNGKYCFSQKLFCGKCGDILQRNMWYRPEKVAVWRCASRIKRSKTGRRCMIRNVKEPLLKEATIEAFNQLIERHELANKQIKANIMKVIENSKGPTLDQIDHQLEKVQMKLIQAANQHQDCDALTQQIMDLRKQKEKVQSRETNQQAKLHSLDEINKLVELHKYGLVDFDEQLVRRLVEKITIFQRYMEFTFKDGEVIRVNM

SEQ ID NO: 16324 - protein, 476 aa, synthetic construct
MKVALYVRVSTLEQAEEGYSISEQKDKLTKYCEIKDWTITKIYSDPGFSGSNINRPSIQQLIKDAGTGLYDAVLVYKLDRLSRSQKDTLYLIEDVFQKNNIHFISLSENFDTSTAFGKAMIGILSVFAQLEREQIKERMMMGKTGRAKAGKITAWSNIPFGYIKDNDTYKIDPLRADVVKDIYKRYLSGQSITRIYQQLNEEGHIGKDTKWSYRTVRQILDNATYTGMVNYRGKTYQGKHKAIITKETFDTVQQQLKLRQIEAEKKFYAHPFQSKYMLSGLLKCGYCGSTLAINKSHRKNKAPRWRYNCPVTHSRNHSKTYARRADNCQFKFIYRDVVENIVIDEIRKLSLNPKSVLVRPKQNDKTETVNVEAIKKELSGIKKKQDRLVDLYLIADSLSLEELNKRSKELKRQQEALESKLKPVQNESSNIVEFEELLLKAKNIEELNYQQQTHLVRQLIKSIDVTNEELTINWNI

SEQ ID NO: 16325 - protein, 521 aa, synthetic construct
MAKITKIEKRQQNNRVKKMRVAAYARVSTESAEQLLSLEVQKEHYENCIKANPYWEYAGLYFDEGISGTKIEKRESLLKLLDDCEKGKIDRVITKSISRFARNTVDCLEMVRKLTGLGVAIYFEKENIDTEHMNSELMLSILSSIAESESRSISENSKWSLKRRFENGTYVISYPPYGYENVDGKMVVVPSEAEIVKEIFRMAISGLGSYLIANELNKRGIATKKNSKWHSSTVQAILKNEKYTGDVIFQKTYTDENFNRHQNRGEKVRYMMKNHHEPIISHEDFELVKTVVGQRKKEKNIDGSDNKYQKRYALSGKVYCGECGSKVKRCMRYAQSGNYAAWTCVRHIEDKKSCNMKYIREEHIKVAYVQMMNKLIAGKNIMLKPFVDTLRGGNNKDRLRHILELDEKIEKLNEQAQVLTKLLSSGYIELDVFYAENNNISLELAELEKEKASLSSIVSGDLNHLNEAQKLLRFINKSDCIKDFIDDAFSQFVEKITIEDRLKFTFHLKCGLNLTEEVIVK

SEQ ID NO: 16326 - protein, 455 aa, synthetic construct
MANEIKQVALYIRVSTDQQAKHGDSLDEQQHTLNEYVRQQGNMRVFKTYIDDGISGQKLYRDEFQKLLDDVKKGRIDTILFTKLDRWFRNLRHYLNIQEILDKNNVTWLAVTQPFFNTETAMGRSFVNQSMGFAELEAQMTSERIRAVFDNKIRKGEVVSGKVPLGYEIKDKHLVPNEKAEIVKEIFQYYLETGSMRATVRHLENHFSMTRDYQSVRQMLTNRKYIGELRDNKNFCEPIIDRDVFERVQLQLSKNIRMNKKRDYMFTGLLVCSECGCNYSATAVISRYVRKDGTTNPNERHLYRCTKNRNNVKKCSNKKGIYETTLENFLLENIEKQAKDLSVKMQREPEVKKTKNTNDKIKKKIDRLKKAYLNEVITLEEYKKDRKELEALLIPERDNKIAKIDLNSLHNYSTAEFRDGYKQLTISEKSSLWRQVIKNIVVYPDGNLKINFLGY

SEQ ID NO: 16327 - protein, 540 aa, synthetic construct
MKQPYNTTIYNTALYMRLSRDDELQGESGSIQTQRMMLRQYAAEHGLNVIDEYIDDGWSGTNFDRPDFQRMIDDIEDGKINCVVTKDLSRLGRNYILTGQYTEIYFPSKGVRYIAVNDNVDTINGENELAPFLNILNEMHARQTSKKVKAAMRTRFANGAHYGAYAPLGYVKDPDKKGHLLIDPETRWIIEKIFDLAVHGRGAASITRILVEEKVPTPGWLNFQRYGTFANIYAGAPEEKAYAWTIAQVKSILKEETYIGHSVHNKQTNISFKNKKKVRKPKEEWYRVENTHEAIISEDVFRQVQEQICNRRRRQKNGTTQIFSGLVKCADCGWSLAYGVNSQNKNPYAHYHCSKYGQGLHQCSMHYIRYDVLYAYVLSRLQYWSVLAQQDGDKLLKRLLNASDKERNTARKRQTAELKKAEKRKAEVDTLFAKMYEDWSAGRITEYNFNMLSEKYQGEQRELDAKIERLHEAMEVAAQTAVDAEKWIGLMKQYVNPTELTAELLNTLIEKILVHEAVKSEDGSREQEVEIFYRFIGKIE

SEQ ID NO: 16328 - protein, 449 aa, synthetic construct
MLKRAALYIRVSTDQQAKHGDSLDAQIATLKDYVSTQDNLTIIDTYIDDGISGQKLYRDEFQRLLEDIKKNRIDIILFTKLDRWFRNLRHYLNIQEILDNSGVTWLAVSQPFFNTDTAYGRSFVNQSMSFAELEAQMASERIKAVFENKIRKGEVVTGSVPFGYKICDKKLMPNENAPIAKDIFKHYSIHNSIRLTVEYLFNEYDITRSSRTIKHMLRNRKYIGEVSGNKNYCPPIVDKETFEKVQNLLDKNISSIAKRTYIFSGLVVCSCCGKKMTGRYRKRKYIKKDGTVMYYTKKVYRCNGNTYKRNKCPNKINIPEEILEEYLLNNIKADAENFEAKQKKIAVSAPEKNNNSKILKKIERLKKAYLNEVISLDEYKKDRKELEQMIVQVKPKETIVFKSNWFNKNIESTYRDFDEEEKRFVWRSVLKNLLVDPHGKITINFLTKN

SEQ ID NO: 16329 - protein, 515 aa, synthetic construct
MKTAIYLRKSRADLEAEARGEGETLAKHRSTLLKIAKEMNLNVLSVREEIVSGESLVKRPEMLALLEEIEDNKYDVVLCMDMDRLGRGGMKEQGIILETFKRSNTKIMTPRKTYDLNDEWDEEYSEFEAFMARKELKIITRRMQRGRVASVEAGNYLGTHAPFGYDIHRLNKRERTLTINSEEASVVRMIFDWYANEDMGANAIRSKLNDLGYKSKLGNEWNPYSILDILKNNVYIGKVTWQKRKEVKQPDAVKRSCTRQDKSDWIIADGKHEPIIPESLFEQVQEKLNSRYHIPYNTNGIKNPLAGIIKCAKCGYSMVQRYPKNRKETMDCKHRGCENKSSYTELIEKRLLEALKEWYINYKADFEKHKQDDKLKETQVIQMNEAALRKLEKELVDVQKQKNNLHDLLERGVYTVDMFLERSNVVSNRITEITSTMENLKKEIKTEIKKEKVKKDTIPQVENVLDLYFKTDNPKKKNSLLKSVLEKAVYKKEKWQRLDDFELVLYPKLPQDGDI

SEQ ID NO: 16330 - protein, 522 aa, synthetic construct
MNHSKRKVAIYIRVSTEEQANEGFSLGAQEDYLKQYANTKGYEVYDIYVDDGYSGKDYNRPEIQRLFKDLYQEKFTGILVKSVDRISRRVSDVTKLIDDVLAPRKCCVLVSDNNLDSSTTGGTAFIQLLATFAEYERSMIVQRVKSGMSKRAELGYWNGGRVLGYDVKNKELKINKEEAEIVRKVFHLRAEGKGYKSIAIILNQQGFKTKRGRLFSIGTIKTILENPLYIGYCRWGRHKNWNVERRKGKADEYKFVKGKHEPIVSEELWKRVQGVNYAHKKSISKNRNFNGEFVLSGILRCPSCGAGMVMCKTKKRDKSGYHLYYMCQAFHSKGKLACKSNLIRKEDIEEKVLQCINKIILIPSIVDKTFERIQEKQESGIERIKNDLSYINEELKRKKQFIKKLNKDYFDEKIRVETYTELSEPLREEIVELEREKSKLDRKIESSEIPITKEMVIKALENFTNLYENATYEQKKSLLRAIIKKIEVQPNRKEIKGITYWFDCDDGQGDALLVSKEGRTVS

SEQ ID NO: 16331 - protein, 492 aa, synthetic construct
MKCAIYIRVSTKFEEQQSSLANQKLLFENYVLERGWTIYEIYTDIESGTNDRNRPAFKRMLNDAQEKKFDIIMAKELSRLARNSELAHKTKRIAEENNIHILTLDNAINTIKGDLELFGLRAWLYEQESERTSQRIKHTFKTKANSGLVTGGTPPYGYYLKDNKLYVRNDHTPNIVKRIFKEYILGSGFDSIAMKLYNEGEPTPAMVANKRNANDKWHGSTIRLILQNEAYIGNLVQSKETKLSVTSSKRIANPKDKIIRVLETHEPIIDKDTFYLVQSIIKERKHKKYHQKTHLFTNIMFCNDCKKGMHFKKNRKGYVCGSFNKHGKKACSDHIIREEALSKKILSDINYFISCINDDKIFRDIESTISKCILDNKTNLKSLEDEKNSLLKQKNEALVYLINKTITNENYKLFISAIDSKIEKLTLKESKLKSFNKELNFENLLNEIKTLRSEILDLNKLTPDVLHRFVKRIEIKENGDAIIYYRFSHLPF

SEQ ID NO: 16332 - protein, 517 aa, synthetic construct
MLENIQKLKCALYVRTSTTEQKDSLELQARYKNNNFKIDKIYSEEVSGRDILKRPEQIKLLNDCGIEVTSVQKQAVFTLNDKPPLYDCIIVSNTSRWGRNVVQVKQIVEALHKKNVKLWFDDLSKFSDSKDLSLTLDMLFVLDENYSQTISQKVKSAMDKRKKEGYILTNGRLIGYDKSKEGTLVKNKDSDMVKSIFEDYVYENLAIRKLAEKYNLSTSTITTLLKNIKYAGFMAYGIKEYGWDFSKLEIVKTDKIEPIITEELFWKVQDIRRSRSRIVEGSKNARNKIGVNNKTHSLSSKILCTNCGKNFHYKDRGYWICGTHSKYPKKCDMPTIRENKIINYLKSPYGLKAIKNGLEVRLEGELNKLQLENTEPIKRNLKEFKEKSSKLLDLYMDSLIDKNTFEKRNNILKNKIDKLENELKIYNDKENYRIKLLELKKEAKRFLDEYEEILDSNKPEKIFDRVFKIEVDKIIDIKKGKEVSYVKNIRFKDFKVLEDYQLFNQFTNIEDVLEYRK

SEQ ID NO: 16333 - protein, 498 aa, synthetic construct
MKRIAIYSRKSVYVENSESIETQINMCKAYFTRQFKDCEFEIFEDEGFSGKNTDRPAFKRLMKLCSIKSFDAVAVYKIDRLARNIVDFMNIYNELEKLEIKLISITEGFDPTTPIGKMMMVMLAGFADMERMNIAQRVKDNMISLAKKGCWTGGIIKRGYTVEEKEDGKKYLKLENEDFIKFTFENFLKGYSMHKLSKMQKENYGSYGLGSAIAVRNMLRSPVYVKSSKDVSDYLEKKGFEVVGKEDNLHGYLTYGVSSKEPCAIVSKHKAIIDPIEWLKVNTKLDNIKSKALTKTSKCYWLTGVLKCPYCKANYVLANVRGNSYYTCSTRLKRGANNPKTCENRKYVNAIELENLIEDLIIKLYSKDYFDSFFCNSEKVYEDNTLELEAKLKRNEKSIMNLVEKLALIDNSNPATKFITDKIEKLSREISEIKINIEENKFNKLEQKLNQSTPDIIYNNISNFAECKTLEEKRLRLKLIFESIYYEPNTKSIEVEFI

SEQ ID NO: 16334 - protein, 502 aa, synthetic construct
MKKVAIYSRKSVLVEGSVSIETQINMCKDYINNKFPNAKFKVFEDEGFSGGNTNRPDFQKMLRMAQLNEIDIVVCYKVDRIARNTLDFLKILELFKENNVELISISEGFDPNTQMGKVMLTLLASFAEMERTNIQQRVKDNLLSVAKKGKWTGGSPPTGFKNGLNGGLEWNKQDMILDVFNMKYEKEKNSNIIKYIKEKYNHNFLGGTLATTLRKPIYVKSSPSVSLYLKTKGYIVQGNEDNIHSYLTYTDKETKYAIVSDIVGLIKPSVWISINKDMDKNISREGNRFSEKFWLTKTVRCKYCGQTFCGQTKTTKTKHYNKHGEEKIYISTYSYYSCRDAVRGKLKTCKNTKRVKQEILESKVSELIHLLKDKKTFNSSYFSNKIDNSSKIDTIKKQIKNIDKNINNLTDKIALLSNEASLIFISKLEELVTEKSILKDNLLQLELQELNSNTKKDSSLVYNNILAFNDDLSVDDKRKIAMSLFKEIIYNPETDSLDVTFM

SEQ ID NO: 16335 - protein, 490 aa, synthetic construct
MKKIAIYIRKSVKGDENSISLEAQTEVIKHYFKGENKFTVYKDDGFSGGNTNRPAFQKLMADAMDGKFDTVACYKLDRIARNTLDFLTTFNTLKEYGIDLICVEDKYDPSTPAGRLMMTLLASLAEMERENIKQRVSDSMLNLAKQGRWTGGTAPFGYRVISKDGGKYLGLEDSKNIKYIFSEFINGKGIIKLGNEFNCDKKKISRILHNITYLQSSKDANIYLKQVLGYEVIGQPDGYGYLPYGKYKVLNGKKIKNTDGLKIACISRHEAVIDLDTFIKAQERLKTFEGKKAPRISTKTFLAQMVKCGICDANMLVTLGQKRKDGTRKLYFSCPNKCGNTFKDVSELENDILTTLKDVNFFDEIKKNNNIINKDNSKIKKSMLKELEEKKKILDGLMDKLALVDSNLANIIIEKMNSVNIDINDLQNKIDLLEKEEIASSYNKEDFKLKEENRKHFIEDFENMDMEEKQNSIRGVINKVVWDGKNIIIS

SEQ ID NO: 16336 - protein, 570 aa, synthetic construct
MKTVAIYSRKSRFTGKGDSIENQIEMCKEHIKKFVSPKVEFLIYEDEGFSGGNTNRPAFQRLINDIKYGNIDLLICYRLDRISRNVADFSSVLDVLQEYKVDFISIKEQFDTSSPMGRAMIYIASVFAQLERETIAERIKDNMLEMAKKGKWTGGKLPLGFTSKKIAYIDEEGKKRFKVTLEHDSKDLEFVKFLYEKYLELGSLHKLETYTHENNIRSASGKIFEKSTLKIILQNPIYVKADENVFNYFENKGWSVYGEPDGLHSLLSYNKTETAKKDGKLTKRNKDESESLVAVSDVKGFIDSSLWLKVQYQFKKNKNTFPRLGKTHNALLVGKLFCGNCGTRMIIQHGRTSTKTGIKTFYYVCSLKKTSKKKLCSAHNVKTDFLENLVLDSLEKLYYKKDFINDSLKINLKENKDNIKEINTTKKLIELNKNKINSLIEKLSLDFDNVLSDILIPQIKKIKIENDVLESKLEELKLKKQESEMNRIEIDLITSLLNKCKNIKDLTRTEQKQIIDCLVDSIYYYSNDNGNDKIKIKFINDIDSINTLLSDEEKRQFEKLSFYSHSMSSI

SEQ ID NO: 16337 - protein, 567 aa, synthetic construct
MGFKKLVNDIKVEKRRKLIAIYCRVSTEEQSENGYSVDEQERLLEEWCKKMGYVIYKCYSDRGISGKNIKDRPALKELLSDAKAGKFDMVISWKINRISRKLEDVLKIVNLLEKNNITFKSYSEPFETDTPAGRMQFQMMALIGEFERGTIAQNVKMGMIAKAKSGNWCGGRVLGYDLVPNNSPEEEKKGKNKLEINEKEAEIVRFIFNEYSKGKGYKAITNKMNKLGYKTKKGNNFSVGSIRDILTNPVYIGEIRYNVRQNWSEKRRRNINPNPIRVKGKHEAIIDRELWDKVQLILESKKGKPSRIYDGEYPLTGILRCPKCGAGMVISRTTNTLADGTKKRIAYYCCGNWKNKGTSVCNSNTIRVDKANEHVFKKIEELVSNEAMIKAVVKNINKERKDKVKPAKRLLGDIDKELEKLDKRKRKIFEAYEDDILTKDEFQTRKNELNEKIRILEEEKKPLLNTISEEVSEEIPYEFIKDILMNFSKVLNSSVSREQQKKLLHMIISEITMNESREIDSIKLNINDKLVEYLVKEGGVPIKGIPSSFMLKNIGLKVLDLDIAIIG

SEQ ID NO: 16338 - protein, 414 aa, synthetic construct
MHEIKRVAIYCRVSTEEQATEGYSISAQLQTLRQYTQLYGWEIAEEYVDEGISGKNISGRPAMQKLISDVEKDKFQAVLVWKISRLSRNMLDTLTLLDKFEDYGVKFISYSENFDTGSPIGRLVVQLMASIAEMERNTLSENVKLGMKQRALEGSWNGGVVFGYDTIEKELVINKKEAEIVQQIYQLYANGKGLKSIANYLNKAGYRTKRNCYFSINGVAQILDNVIYNGKISWLKVENWDTKRRRGKNPNPILVEGQHEAIISDELWSMVQARRKSKSFKQRQSNEPFLLSSLLRCPDCGQGMVPAITTNKRKDGTKKKYRYYVCSNFHNKGSSACRANSIKAYDAEYEVINKIEKILSNQNQLFSKLQSINTTSIESLNQLNSELKQLENRLSEIQEYRIVTWKHLSKRPYQ

SEQ ID NO: 16339 - protein, 551 aa, synthetic construct
MDKKKVAIYARVSTVEQAEEGYSIDEQERLLREYCDKHDLEVYKAYSDRGISGKDIKHRPELKEMLKDSEENKFDMVLVWKINRLSRKLADVLKMVELFDKNNVTFKSYSEPFETNTPAGKMQFQMMALIGEFERGTIAQNVKMGMLARAREGKWCGNRVLGYDIVPVEGSLNKKRKETKLVINEKEAETVRLIFNEYSNGNGYKAITNKLNKLGYKTKKGNNFSVGSIKDILTNPVYIGKIRYNVRQDWSEKRRKNINPNPIIVDGLHDAIISDELWDKVQKILESKKGKPARIYDGEYPLTGILRCPVCGAGMVIMRTTNKLKDGTKKRITYYACGNWKNKGTAVCNSNAIRVDKANEYVFGKIEELLSNEKMIKSIIENINNTRRSNVEPNKKKLEKIDKELSKLKSRKTKILEAYEDDLITKEELVERKSELDKNISALEEERQKLLITVTDENQIEISYDVIKEILQSFGRIMSNCTSREKQKMLLHMLASEITVGKDREINSIKLKINDGLIDYLSNEEEVPIKGASSFLMKNFRFGRIKFNLVI

SEQ ID NO: 16340 - protein, 530 aa, synthetic construct
MISAIYSRKSKFTGKGESIENQIQLCMEYAKNLGINEFLVYEDEGFSGKSMDRPKFKEMLKDAKDKKFDYLICYRLDRISRNVSDFSTLIEDLNKLNISFVSIKEQFDTSTPMGRAMMYISSVFAQLERETIAERVRDNMYELARTGRWLGGMPPYGFISTQINYYDENMNQRKMYKLKVDEDTIEIVKLIFDKYLELRSLSKLYKYMYENGIKGTRGGNLDPSTLSLILKNPAYVKADKSVVDYLRKSNIDVMGDIDNIHGILTYAKNTDSPIAAVAKHKGVIDSDKWIEVQRLLNANKDKAPRAGTGSKALLSGLLKCSKCGSNMRITYKNSKSGTIYYYICGTKKSLGVSACDCRNIRSDKAESKVIDELKNKSIKSIMSSYKDSKLENSKNSKNIKTEINSINNQIKEKETYIDNLVMQLAKVTESSASTFIINKLESLNNDLSNLKSQLESLNTMSMENKQVDININMLIDNLNKFNKEIDTSDINKKRLLLSTVVDYMTWNSDTDTIKVNLIGINPSNTIASGK

SEQ ID NO: 16341 - protein, 452 aa, synthetic construct
MKAAIYIRVSTQEQIENYSIQAQTEKLTALCRSKDWDVYDIFIDGGYSGSNMNRPALNEMLSKLHEIDAVVVYRLDRLSRSQRDTITLIEEYFLKNNVEFVSLSETLDTSSPFGRAMIGILSVFAQLERETIRDRMVMGKIKRIEAGLPLTTAKGRTFGYDVIDTKLYINEEEAKQLQMIYDIFEKEKSITTLQKRLKKLGFKVKSYSSYNNWLTNDLYCGYVSYADKVHTKGVHEPIISEEQFYRVQEIFSRMGKNPNMNRDSASLLNNLVVCSKCGLGFVHRRKDTVSRGKKYHYRYYSCKTYKHTHELEKCGNKIWRADKLEELIIDRVNNYSFASRNVDKEDELDSLNEKLKTEHTKKKRLFDLYISGSYEVSELDGMMADIDARINYYEAQIEANEELKKNKKIQENLADLATVDFDSLEFREKQLYLKSLINKIYIDGEQVTIEWL

SEQ ID NO: 16342 - protein, 518 aa, synthetic construct
MRTILYARYSSELQNALSTVDQIASLRERADREGWTIIDTFADEEISGRAGIGEMQRPGLNAMLNRVERGDVDQVLAEATDRIARHSGDAHAVREHLEHFGARLFTLADGHVDEITGTIKGLMDSRFLKDLADRIRRGQRGQHGRGFNAGGLAYGYNVVKKIGEDGEIVRGILEVNEEEAAIVRRIFDETLAGVSSRAIVKALNEEGIPSPSGKLWATNVIHGDRVRANGILRNNLYRGVMVYGRTRRAYHPKTRRYVARVNPVSEWRFVDVPHLRIVSDAQWKAIEAHYAAFDGDVRTKKRHPKRLLSGLGKCGVCGGTWTVISPAKWGCSTAKNKQACSNTRTISTALYEQRTMGQLKQILLNPDAIQLFVERYNVGIRKRLAEATTNRAPLERKAADLRGRISRLVDAIADGAGEFQEVKDRLRTARADLADTEHQLKALDDAAPIALPDDLADRYRIYIAQLDDALATEGAARERAASAIRELIDTLTLTPNKTGRGVEIQLTGHMANIINLAK

SEQ ID NO: 16343 - protein, 545 aa, synthetic construct
MRTIIYARYSSDLQNSRSIADQIALCRDRAAQEGWQIIDTFTDEAISGAAGIGEDQRPGLNALLARVERGGVDQVIAESTSRIARHQGDGFAIRERLSYFGVRLFTLSQGEIDEIKGWVQGFLDSQARKDIAFNVKRGQRGTVRAGRSPAGLAYGYRKANRLDERGELVRGLRAIEEDQAEIVRRIFAEYANHRSARQIAGGLNEDGIPGPTGGTWRASTILGDRQRKNGMLQNRIYIGKIVHERTSKVADPRTRKERIRPNPEAEWVEADAPDLRIIDDVTWQTVQQLRNAYSTDRPELMRRPKRLLSGIGRCGVCGGGWIVIGRDQWACGKHRDGRACTNNRTVKTHVYEQKVLDGLRDDMLHPDAVSAYVREFHESRRQRSQEVAQQRAKLERRHREAAAKVERLIKAIADGGDEFVEIRAILTKARTDRDAIAQQMADLEAFPVITLHPGIAQEYRKQVADLTEALAGHGEAQAEAIPKLRALIGTVTVYPAEGRRGVEVEATGQIANMLALATGQQLHASMYVDGGAGSGDRTRITSLEG

SEQ ID NO: 16344 - protein, 560 aa, synthetic construct
MTKLYSYIRFSSMRQGEGSSYERQIKMAKEIADRYGLELVNDYQDLGVSAFKGANSKTGALSRFLDEIGRSIPVGSWLFIENLDRLSRQDIISAQELFLSIIRRGITIVTGMDNKIYSIETVTANPMDLMFSILLFIRGNEESQTKRNRTNSSALLKIKAHQQNPQSPAVAIEEIGKNMWWTDTTSGYVLPHPVYFPILQKIVKMKQEGHSTGSVLDYLNEHHEPPAPTSNKQHRKWSIAMVSRLFKTKALIGVKEVTVDGVQYELKDYYPRVLSDSEYYFLKNNLIKKAWSFGHAQEKTIPLLSGIGLLKCAHCGSPMVKRKAANGKVEQYRYTCDGEGSGRTDCLYPNWGFRASSLEGAVLQLLADKVWIAEDKANPIPEIQVQIDEISRKIDNLINLSAMTGATKELANQITDLNMQREALHEEIRLFEREMYSVDSQGWEKLAQFDLSDVQNEERLQIRLKIKGALRSIECARIDRNKNLFTLVYLDGLRQRLVIENNRGIRKGQIFVDLKTINDRQILESAGMVLHDHIDILIDEKAFYDGLPKEEDGPLSKFGI

SEQ ID NO: 16345 - protein, 552 aa, synthetic construct
MSIQSPHVALRAALYLRVSTARQAEHDVSIPDQRKQGEAYCASRGYQLVETFVEAGASATNDRRPEFQRMIEAGTSKPAPFDLVVVHSFSRFFRDHFELEFNVRKLAKNGVRLVSITQEMGDDPMHVMMRQIMALFDEYQSKENAKHVLRALKENARQGFWNGSLPPIGYRVVDAEQRGAKMKKKLEIDPLHADTVRLIFRLATEGDGTSGPMGVKNIVSYLNRNHMFTRSGGRWGIGQLHRILTRRTYIGEHRFNRRSKKGDVKPEEEIVTVAVPPLIDLETFEAVQRRLQVNNPKVTPPRVVSGPNLLTGICHCGNCGGAMTLRTGKNGRYRYYACSIRARQGETGCKGRAIPMDKLDRIVVSHIEERVLDPERIEDVLASLLDRRQESVERRSQHIAELNQRAAEADMRLKRLYDAIEAGSLDPAEAALGERIAGLTALRDQARADAERTEAMLKSSAHQGLTGAAVRELASEARTRLRLGKGGYRREHVRAFAQHVEVADDAIYIKGSKSTLLRTLVATKGGKTAEIGVPGFIPKWRSGRDSNPRPPA

SEQ ID NO: 16346 - protein, 515 aa, synthetic construct
MKPVRVLIALRISNETDASTSLERQLQDCTSYVNERQHLGWQVVGVARDAHISATKSHPFERPELGEWLNNRAPEFDLLLFWKMDRFVRKVVDMQDMIKWATAHGGKALVSVKEPVLDMIGPFRHVIIDLFAAIAETEAQNISMRVKSFQSYAKSKNVWAKGNPPYGYESFRDTDGAMRLQVRENQRQVIREMHKRVVEDGEPYSTICDDFNTRGIPSPAGERMSDRRKKNGTSMPVWRSRTITNILRSEAILGWKCEEVRAPGKKYGVSQAILTSEGKIRMAEPILTEDEWTKLQDEMNGRPGAARRSTKNTTTYRGVVLCGGCGKNLYLFKPERQQGKPVYRCNKSANRDSCGKGYAFRAERVEELVETMILGTIGDFPMHERHYVKGSNNSQRLQEIEEYVTELQRSLRPGGKNSSGFAKKATEEEIAALYEEHDSLTAEGDKPDRYEYRDTGETFRHMWERNKGNESERARHLLKAGITIRLNPLTKGVSNTTDFGAEVDLGNRSEPFTIH

SEQ ID NO: 16347 - protein, 543 aa, synthetic construct
MLAFSYKRFSSKQQAQGMSIERQTKLAEDYCHKHSLELSSQSFEDLGVSAWTGRNSNEDAGLGQFIQALESQKIRTPCYLLVESLDRLSRAKIQKAMRQLMDITDFDVTIVTLMDEKQYTKDMEFTDFLLAGVIMERANNESETKSKRLKAVWAKKRAEQAMHSNAPFWLDRTDEGYKINQSVSIVQRIFRLAAEGLGHYSITGILNKEQVPSPTGKGWNGSTVSKLLRSRTVIGEYQPNTVNNKVATPIGEPICGYYPIVIEEDLFNRVQLEINHRLKKYKSYRGGSTSTHRNLLRDKGKCSCQKYLSLVKKRQRYYLQCIDNRSQLCGKRAIQMDAFEKWLRQYFLSPMFHNHWIDSGEKNADIDSKINELIIAKQSSRDGLEGLLSITENLSDKLVLQRIRELSEEVSALDKRIEDLEGSKLSGNKRQSLEETSRLIDLAFAVEDMAENIAARVQLKQLLNQTFDYFELTRVDSDNGKVLYYRIELGFYGQTWKYQSIDAPTALQNAKKRHIWFDWSDKPRVELTEEQKQAVIEEFKINH

SEQ ID NO: 16348 - protein, 540 aa, synthetic construct
MPLNLQDRPAISYARYSSQGQDNNDSLRRQAEIFAKAVVETGALATDIQLVDEAKSGFKGEHIKAGSLGAFIEQLETMIFTQRPVLFIEKWDRLGRQKNSITQDVLNKLLKHVDVYDCSDGQLVTQSTENDLGASIMLLVKIHAAWQYSKNLSDRIRAAKESQFKQSMKEGALVPHGGYPRWLVVKDKKATLIPERASSIKKVFELYLSGMTLGAISKYLNTNNHLHWNRAGEDSYGSWNSCKLSQLIRQPSLYGSHVSRTWKTNGERFEEYSGWNAGGIEIKNAYPAVVSEEMYNLAQSIREQTKTNMPFNKSKSRSSTRSDGRNIYPVSTCSMCGSNYVLKMNKRKGKSYPEFLCTNKKAGGKCDSSSLSYVLAEQMLLNLVFKDLNIKKLFEKKSADSKGEKLQAQLQALSIELKELQDRVKMNSLNNKRTSATILIAIDDLEQQIEELKKQRVTTNEDYKFLRKQWRDLCSAESHIRVRALRFMETIIDSIEITSIKRGTKLVRVHLQQDRVIMATSNGRLRQGEYHIHFIDGTFK

SEQ ID NO: 16349 - protein, 667 aa, synthetic construct
MPDALAPDPFTAMAAQLTPKRAVSYIRVSTREQAQRGGSEEGFSLPAQREANKRKAQSMGALVVKEFADRGESARSANRPELQKMLAYLKEDGGIDYVIVHKLDRLARNRADDVEINRAFEEAGVRLVSTSENIDQTPGGMLLHGIMSSIAEFYSRNLANEVIKGMGEKARNGGTLGKAPLGYVNVRARDENGREIRTIALDEERAPLVRLAFTEYATGQWTTKRLAAHLHGLGLTTVPTVRKPAKAVTGAQLHRMLRHSYYKGVISFQGVEYAGAHEPLVDEETWSQVQAVLDSHRFGERERQHNHHLKTTVYCGLCGARLLVQNTRNSKGDLYPYFICARRQRTHDCAFRAVLIDVVEERMSDLYQTIQLSSQDRQLVEQYVRQELRRLERDKDRTIRSLTTRRTNIEDKRRRLMHAHYEGAVPLELLKEEQTQLTAELNQIERQLTAYQADITEIHQRLTQALDLFEDCHRLYTAAPAHLKKLLNQVFFQRILVNPAVDEEGRVVLPGDGTTDGANAGRPADRDVAAGDCPIGESDDGPLQHTAAPRLLADASSDASLAADLRLPFACLTSRLMHNVARRRSATLLQDNPRENPDNQLDCPITNTVCNDEALTSDGERFASSTNNPEHSTHDLGLGKAIVVPPLGFEPRTLCLSGTTRGISSLL

SEQ ID NO: 16350 - protein, 476 aa, synthetic construct
MESNHAIGYIRQSTSKQKSLEWQQDVIQQEAGKRNRQLVHVFHDKASGKNSERTGFSLMKASIATKKYTFLYVWRLDRISRNVSDLLEFHDYCSQYGVIIVSIADPITATGDSMARFQISVIGSVAQLQRELIAENQRIAFRRKHDLGLQLTARVPFGYRYISTDKIVIQEEEAETVRRVYALYLSGSGYKRICSILAAEGIKVRGNPFRVHNVRGILTNAFYSGYIDNEFGNVKGIHPPIVTRKLQNDVGKIQQSRYVKKKDFRRQLLTGKIKCPHCGKNLTIHIVGPSQKSRSYNKLYYYNCPLNSVNGKLACKGIHLRANEIEAQIVTAVIAFLNDKERLGQIQSQLNKKVVKKRDRTGERTESIESRKQAALVAFEKGVFSAKQLADELKRLNQYKAGGEAVQPKDELLDTVRLKELTERIVSLGAVQQMPTVQQYHFFQEVIDRIDIDSQKKVLGIYLKGYKKNILSEKKE

SEQ ID NO: 16351 - protein, 553 aa, synthetic construct
MEQLPMNSIPSQTFRKKRCVGYARVSTQEQAEEGYSIDAQIQTIQEYCQRENMECVGVYVDRGKSGKNIKGRPEMQQLLQDAESGQFDAVVVWKISRVARNLMNLLEIVNVLQKQDIAFYSISEKFQVDTTTGRFMLQIMASVNELERNQIAENVKLGMTKRAFDGGWNGGLILGYDNVESEAGKKVLEINKEEADLIQVIFQEASTGKGYRAIANSLNRAGHRTKQGNPFSTIAVKDILHNHTYIGKIQYNKYEKWADKRRKGLSENALLVEGQHEAIIDDSLWQKVQVKLKINSKHPSWTKTGTSVLTGLIKCPECGSAMVINNTYNTLKDGTKKKIRYYSCSQFRNKGASVCHSNSIRAEVAEKQVAEKLKAVITQPEILEAVVERMNQQLQDRKAPMVRELERLIQDIKEKEANVQKFLNLMVEAPEIASDLTKRIKQLEQEQQMLLQKEQQLQRTLRKGAEQIPLDEAKRALVYLDKGLEGKQNKELKEIYKVCIDKVTFDKQSKEVAVHLLFGQDFIRKLNHANETESSPTEGDGSFVLSGEIYLVL

SEQ ID NO: 16352 - protein, 539 aa, synthetic construct
MGFFYGVFMSIAYSYRRFSSKGQEQGDSIRRQTELAEKYCIEHRLELSNQTYEDLGVSAWTGSNSHEDAGLGQFLKACELKKIPEDSVLLVESLDRLSREKIMKAMTQLMSITRHIDVVTLVDNRRYTSDMDFSDIIIAGATMVRANEESEIKSQRISAVWEAKRRDPKRSKKTRKCPFWLDVTDDSMDFVVNEKVEIVREAYRLSAEGLGNMKVAKYLNSKGFRTARDKDWSPANVSVLLKARTVLGEYQPCKVINRKAVSQGDPVVDYYPQVIDTELFNKVQICISDRARNIRMGSTSSHRNLIRSNGRCMCGGELFITSKRQGVAYFQCQNKTNSECSHSLFRYDVFLQFIREQVIRPMYFRAWAIDDSSNEHESKRDALVVQRNIEQSKLDALLELDLSNPSITLKIGVLANQVEKFDSEILEVEQQIAKSKLGNFKFESLDTMLKLTDVAGEGDSTEKQISARVQLNRMLSNFKIELGSNERKSLVYIEYFDQHKQEYSKQLFQTKTTAPSRAIKKKKMIWELIDLTLNKQTFD

SEQ ID NO: 16353 - protein, 549 aa, synthetic construct
MLAYSYKRFSSKHQTQGHSIERQTKLAEDYCAKHQLELSTLSFEDLGVSAWTQANTKEDAGLGQFLSALESNKIKTPCYLLVESLDRLSRAKIKVAMNQLWRITDHDVTVITLLDQKSYTKDMDFTDFLMAGLIMERSHEESLTKSKRLKAAWAKKRSKQDMHSKAPFWLDRIKGDPDRPDGYYLNRHQATVQRVFEMASEGLGHYTITGILNKEQIPSPTGRDWNGSSVSKLLRYRQVIGEYQPCTVSNKIATPIGEPIKDYYPSAISEELFNKVQLGINQRLKKYKTHRGGSTTTHRNVLRDVGKCSCGKYLSLVKKRSRYYLQCIGSRSSLCPIRAIQIDAFEKFLRQYFISPRFHNQWVSADQANIDIDSKINRLQLEQEETNKALQGLLSVIEMNPNQLILQKVSELSESLTERSGMIAELEESKGSGNKQQSLKETLKLIDLAFSPEDDSENIKARVKLKQLLNATFDYFVMTRVDSDNGKVLYYLIELGFKGVVLKYQSIGAPTALQNASKKEIWFAISDKPRVELTEEQKEAVIEELKINH

SEQ ID NO: 16354 - protein, 576 aa, synthetic construct
MTTAQIPATFKRTKLAPYVGYIRVSTWKEEKISPEIQRAAILEWAKRHGAEITEWIEDLDTTGRNFKRKIMRAIEIVEKGKEKGIAVWRYSRFGRDRAGNAINLARVESIGGQLVSATEPVDATTAIGRFQRGMILEFAAFESDRIGEAWSETHQHRRAQGLPATGRPRFGYIWHRRWDARTEKLQDEKYEPHPEVGPIVAELYRMYTHPTKPKGFASLCGWLNNSGHRTTRGTLWTTQTLTRYMDGGFPAGLLRIHDDDCKCNGRRTNGSCPNYFFAQGAHEELIDYDLWQKYRARRTEVQNTPPRARNAIYELTGIVRHDACRGGTSMTTNRWRNAAGEVINLNGHAYRCSQRAASGGTKCEGIWIQRVPVEKEVEKWLMREAAPGVDTAPPTEKDEPKVDERALAKLARAKLTAEYETAEAALTRLIMDQAEHPEKYPAGAFERARDTYVQRQERIKRELEKQADVAEAPRRSDFDRLVVSIAAEWKTFNTSERNAMIKQLVRRVVLSRKKDENGEPIPGGEGVAVTVHPLWEPDPWERARICRGPFGTATAGLWLSAELWTRPDTWEQIPPR

SEQ ID NO: 16355 - protein, 553 aa, synthetic construct
MTRSQANIGIYARYSTDMQSQASIEDQVRLCTERAEREGWTIVQIYTDHGLSGASMMRPGIQALMQDAQSGKFDIVLAEALDRLSRDQEDIAGIHKRLSFANVQMVTLSEGEISHLHIGLKGTMNALFLKDLADKTRRGLRGRVEAGKSGGGKSYGYDVVRKFDGNGEPIKGDREINQDQAETINQIFRDYAAGISPKAIAKSLNERGIPGPSGKGWTQSTINGNRDRGTGILNNELYIGRLVWNRQRFIKDPDTGKRVPRLNPESEWIIQDVPELAIVDQELWQAAKVRQQKLTKARKKNDALWDCRRPKYLFSGLMKCGECGGGFSKISSEHFGCSTARNKGTCSNRRSIRRNLLEDTVLNGLRHHLMDPELAAVFAEEYTRHMNKLRMGRNAAIKTHKEELDRNNKELDKLIDAICNGVPAARVKDRMWELENRNEELKGLLETTVEEPVYIHPNMGKRYREQIEKLVAVLNEDDKRAEAAEIIRGLVDKIVLSPDTTAKKGLKIDLHGALAGILSLGKACKNSKDISSSELQQVVLVAGAGFEPTTFGL

SEQ ID NO: 16356 - protein, 530 aa, synthetic construct
MTYQEGGEAMKKITKIEGNKVASIIKPKLRVAAYCRVSTGSDEQLVSLQAQKSHYETYIKANPEWEYVGLYYDEGISGTKKENRTELLRMLSDCENKKIDLIITKSISRFARNTTDCLEMVRKLLDLGIYIYFEKENINTQSMESELMLSILSGLAESESISISENNKWAIQKRFQNGTFKISYPPYGYDNIDGQMIINPKQAEIVKYIFAEVLSGKGTQKVANDLNQKGIPSKRGGRWTATTIRGILTNEKYTGDVILQKTYTDSHFNRHTNYGEKNMYLVENHHEAIISHEDFEAVDAILNQRAKEKGIEKRNSKYLNRYSFSSKIICSECGSTFKRRIHSSGTRKYIAWCCSKHISNITECSMQFIRDEDIKTAFVTMMNKLIFGQKFILRPLFHGLRNQNNAASFRRIEELETKIENNMEQSQVLTGLMAKGYLEPALFNKEKNALEAERERLLAEKDQLTRSVNGNFAKVDEVDRLLKFATKSKMLTAYEDELFEDYVERIIVFSREEVGFELKCGITLKERLVN

SEQ ID NO: 16357 - protein, 452 aa, synthetic construct
MKTIRKIEATLPNLPKRKKVAAYARVSEEKGRTFHSMSAQISHYSSYIQKNKEWIYAGVYADEGISGTTDNRAAFQRMIEDCKKGKIDIILTKSISRFARNTIDLLETVRYLKDLGIEVRFESENISSLSDDGELMLTLLASFAQEESRSISENVKWGIRKGFQKGIVNSFCIYGYRWDGEKFNIVPEEAEVIKLIFDNFLNGLSAEQTEKQLKEMGIKSYTGGHFSNTSIRAILRQEKYTGNSLLQKTYVENHITQKTKLNKGELPTYYAEDTHPVIIEKEIFDKVQTEIARRRELGVFANKAIKTTCFTSKIQCDNCGKNYRRSGKRQRKDPNEIYYIRICITKSEKGISHCHAKDVPEKVLEKYSAMVLGLEEFDEDIFLEEIEKIVVKGQDELIFHFYDGQIVHQKWESTARTDAWTEERREAWAEYQKGNNHAAGHKGRWHKNDKDS

SEQ ID NO: 16358 - protein, 526 aa, synthetic construct
MTRTVRNVTTIPATISRFTSTPINEQRKRRTAAYARVSTDSEEQATSYEAQVDYYTSYIKSRDDWEFVDVYTDDGISATNTKHREGFKRMIADALDGKIDLIVTKSVSRFARNTVDSLTTVRQLKEKGIEIYFEKENIWTLDSKGELLITIMSSLAQEESRSISENVTWGQRKRFADGKVCVPFRRFLGYDRGEDGNLVLNKEEAPIIKRIYGMFLQGMTPYGIAKQLTKDGILTPAKKKNWSAGTVRSILTNEKYKGDALLQKSYTVDFLTKKKKVNEGEIPQYYVENNHEAIIDPAVFDMVQRELEARQAGKNRHSGTHIFAGKIKCGECGSWYGSKVWHSNSKYRRTVWQCNHKFKGNKKCETPHLDEDTIKDIFIKATNDLLADKDEIIANFETMKATLFDTKDLENKKTELQNELEIAAEMIQDIINQNAHTALDQEEYKRRYDSLVEKFDTTKANLELTTEQIKDKITRHKNLEIFLDELQKQDGLISEFDPLLWNSLVDYLTVYEKDKIQVSFKNGIKI

SEQ ID NO: 16359 - protein, 544 aa, synthetic construct
MERKKVGIWIRVSTEFQVKDESPEHHEQRAQYYIKSKDWEAVEVYRLDAISGKTVMDHPETQRMLRDVRTGRISGLVFSKLARLARNTKELLELADIFKTQKADLISLAEQIDTSTPAGTLFFTIISAMAQWEREEISARVSASVPIRAEMGKCTGGAGAFGYKWDNKQFVLDENEAPVRKLMYEIFLECRRKRTTANRLNELGHRTRKGAKFTDTTVDRLLRDTTAKGIRLANYTKSTGENKSWELKPEDQWVEVPCPAIVDEEVWESCNAILEKQRNSRNKNGRFSYSLLGGIVKCSCGKPMYVHGSRSRKYKCSSCKNDINQEALYGFFQENLNQYIEGIKPEIFIAELSTEIHNKADLLNTTMKNRDALLKRMDELVDLKLNDGMSSEHYKARYYPLDEQVKQLNRSIPELQAEIDYMRIQMNSSDYVLNGVKSLYTDWSELEFSQKRGITETITQHIIVGKDTIDIALAYLPTTLKTSQHNLMDLLTQETQKKMSFNIVVRLNREPVVLKSLIINAIPRLENGSNSICNDYASEKLCGV

SEQ ID NO: 16360 - protein, 566 aa, synthetic construct
MSAMMMQQELNQFLNNKKHSIPTTPIKRVAIYARVSTTEQAEEGYSIDEQQRLLTEWCDKNGYILHEVYADRGISGKSIKKRPALVKLLEDAENKKFDVVLVWKANRLARNILDLLKIVEVFDQNYISFRSYTENHETETSQGKLQFHMLAAIDEFERNTISENLKMGMLARAREGKWNGGIVLGYDLEDVSNQGDKRKHTRLVINEKEAKTVRRIFELYIAGNGYKAIANRVNKEGHLGKRGKPFSISTIKTILENPVYVGMIRYDVRRNWTDKRRGDINPTPILQQGVHEPILSQQDWEKAQLILKQRSNKPNRVHGGTFPFTGVMKCPKCGSGMVVMRTVNKLKDGTRKTLEYYACGAWKNQGTSVCPSNAIRADKAETYIFERLQALATNKQLIKEVAERVNGKRSNHDEPLQHEHQALQKEMEQAKRKKDKAMELYEEDVITKVDLQQRLIKVNEQIEQLELRLQPIKLQLHSLKVHTINEATIQEVMANFQKAFKKAMTQEQQKHLITLIIKDITLNEKREVDSIQIQFNNSVLDYLTEHGADRSLADDLSAPFYVLISV

SEQ ID NO: 16361 - protein, 510 aa, synthetic construct
MSDDRESWPFVDLLLRKSKRVRDGELTLSIRAQEDRGRAWADANRYRVRKVWKENLSAWSDVERPKYDAAMDAVLNAEVPALWCYALDRFSRKGAEAVVPILGKARVVFDYEGLDSMNERDRKWIIDKAEQARDYSNRLSYNVSSTKAKQRNEGRWLSRAPFGLKVNKKTGKLSPDKKKSKKRSYSYWDIVLRIFTEIADGKSARGLARDFNSEGITTAWGNAWRAESIRYIVINPVYEGWLTVSIKGRPTAYRNEEGKRVKVAAKKSEMIPKKLAERARRVLSGHQILDNTPKEGRSKHLLAERVGCISCKYAMTLNGVSYVCSGPDCQLPASVTRTLLEKHVLKLWFARLDNAERDDPILTVVAQRWHALTRPKEAKGMREATAALREAKSALDKFHADDRAGFYEGRSAKYRIPAKVKAEERLTAAEERIEKLSGGAVDITFLMWGHAAKAWEKADDTLKRELLGLAIDRVYVAKAAKKGVRFDGDSRVVIEWAQPEEEDGEPMLAA

SEQ ID NO: 16362 - protein, 475 aa, synthetic construct
MKTMNKVAIYVRVSTTNQVEEGYSIDEQKDKLEAYCKIKDWKIYDVYVDGGFSGANTQRPELERLISDVKRKKVDIVLVYKLDRLSRSQKDTLFLIEDVFAKNDVAFISLQENFDTSTPFGKASIGMLSVFAQLEREQIKERMMLGKEGRAKNGKSMSWTTIPFGYDYSKETGVLSVNPTQALIVNRIFTEYLNGKPVVKIIRDLNAEGHVGRKRPWGETITKYLLKNETYLGKVKYKDKVYEGQHEPIITQELFDLVQLEVERRQISAYEKYNNPRPFRAKYMLSGLMKCGYCGASLGLRYTRKDKNGISHHKYQCRNRHSKDLEKRCESGWYSKEELERVVIKELERIKFDPKYKNETLAKKEETIKVEEIKKQLERINNQVSKLTELYLDEIITRKELDEKNDKIKTERQFLEEQLENQKSNVLSIRKRKLTRLLKDFDVEKLSYEDASKIVKNIIKEIIVTKDGMSITLDF

SEQ ID NO: 16363 - protein, 471 aa, synthetic construct
MESGYIEAGSVLLVESLDRVSRQDIDTAGEQLRKILRSGVEVVTLVDNEWYTKESLKDSLSMIKAMLVMERAHEESAMKSTRLRSVWAAKRERAANGEIMSKRCAAWLKVSDDRSHFEFIPENVKAVQRVFQLRLEGLSHVKIAKQMNDEGFSTLNQFKSVTGGWSQSSVTELLSNRSVIGFKVPSKSMAVKGVSEIPNYYPSIITDEQFYAVQQLKQGSGRKPSSDLPLLTNLFKGVLRCSECGFIVVVAGVSAKRSGIYKCSMKSEGRCNSVGFSRLQTDRALVQGLLYNTNRLSLNRDNGSAIGTLQSELEQLQKQRERLIKLAMLADDTESMAKDLKALNSQIKDAEKAVSEVHQREQSSQLETISHLDLTLKKDRIEAQIIIKRIVKEIRLNTAGKKCDVFLHNGLKLLNFPLDRVVDGAQWLEVLPLIDGDEFDFEGFTTKPRHLVLEEAPEWVKEIEAQPNQPL

SEQ ID NO: 16364 - protein, 503 aa, synthetic construct
MPQRNNGIAYSYVRFSSKRQELGDSLRRQTEMAEEYAIKNGLKLSSKNFQDLGISAFREGKRASLVDMLAAIEEGQITAGSTIIIEALDRLSRRGIDATLETVKEILRKDVQVVSLSDGLLLTKNSLNDLQSVIRIAVAADLAHKESERKALRLRETKGQQREAALSGKPINKILPFWLQRTEAGYAFSDKAGVARQIVQLKQEGKGSNMIAKTLNRLGIAGVRTAQWNHASITKMLKNPALYGAYQTGETTKDRELIKLELVEAYYPALINKEEWLLLQSDQSKSKRGRRSANNPYSGLLRCECGGALVKRQHTVKGKLYVYHGCLNAKDGRCKQNISIKGLDGALTTILGRLEFKKKQTLSQSIHQERQQLEARINDLNSKLQVLDDIPLSVIKSIGAMESRLKEITDQIAKDEREQRGIEAVKSEKLSSITDGLELNLLLKRVLKSITVFRSGNGWAVKVLHLSGHKQNFLMVDGEIKFLSDTIALQNLLAGFREATENS

SEQ ID NO: 16365 - protein, 461 aa, synthetic construct
MRTVITYLRFSSATQGAEGADSTRRQNELFKQWLRKNSDAQVVASFNDEGLSGYKGKHLSGQFGDMLSRIESGEFPEGTILLVEAIDRIGRLEHLETEALMNRIIAHGIEIHTLQDGLIYTRDALSDDLGISIIQRVKSYIAHQESKQKSFRVSQKWEQRAKLALAGEQRLTRNVPGWIDPETFKLNEHAETVRLIFKLLLDGESLHNIARHLQANNISSFSRRKDANGFSVHSVRTILRSETTIGTLPASQRNDRPAIPNYYEAAIDAATFNKAQEILDKNRKGRTPASDNPLTINIFKGLFRCQCGASVHPTGTKNKYAGVYRCNNHLDGRCDVPPLKRKPFDRWMIDNFLGMIDVGNDGESERKIAALQHEVEIVTARIKKATALLLEMDDIDELKIQLKELNQKRTELQTTIDTMKRKASLTDKELPQLKDIDLKWSTKTGHRVRVFPVSIFRFVWG

SEQ ID NO: 16366 - protein, 525 aa, synthetic construct
MGKVRIIPAHKQRSNSINRSPDEPQSERLRVAAYCRVSTELDEQVNSYETQVSHYKELIQKDPSWEFAGIFADDGISGTNTKKRDQFNKMIRACKAGKIDLIVTKSISRFARNTIDCLKYIRDLKAINVAIFFEKENINTMDAKGEVLITIMASLAQQESESLSQNVKLGLQYRYQQGKVLINHNHFLGYTKDKDGNLVIEPEEAKTVKRIFYSYLQGMTMKQIAELLKADGVLTGGKKTNWHSSGIALILKNEKYMGDALLQKTYTVDFLTKKRVKNNGIMPQYYVENDHAAIIPKSVFMQVQNLIRRRHNGITTKNCKHRRLNGKYCFSQKLFCGKCGDILQRNMWYRPEKVAVWRCASRIRRSKTGRQCMIRNVKEPLLKEATVEAFNQLIEGHELASKQIKANIMKVIKNSKGPTLDQIDHQLEKVQMKLIQAASQHQDCDALTQQIMDLRKQREKVQNCETDKQAKLHNLDEINKLVELHKYGLVDFDEGLVRRLVEKITIFQRYMEFTFKDGEIIRVNM

SEQ ID NO: 16367 - protein, 531 aa, synthetic construct
MKEIIKIDSTIRKTGFKKKTRVAAYARVSTDSDEQLLSLEVQKEHYENYIKSNPCWEYAGLYFDEGISGTKIDKRESLKQLLKDCQSGQIDRIITKSISRLARNTVDCLEIVRKLTGLGIYLYFEKENIDTEHMSSELMLSILSSIAQSESRSISENSMWAIQKRFENGSFIISCPAYGYKNENKKMIIVPEQARVVKEIFNMALSGMGGEAIARVLTDKKIPAKRGAKWSSTTVNAILNNKTYTGDVIFQKTFTDDNFNRHKNCGEKKQYVIENHHEAIISHETFNLVKEIIAWRRNENNIVCGSGKYNKLYAFSGKIRCGECGSKCKRRIIYQHNKAYGIWVCITHLEDIHACSQKSVMESYLKISFLQMLNKLKAGYVQILTPFIKSLRNVNSKDGLNKVIELEEKIAKLQEQEQVLSKLFAGGYIEMDSYYLESNQLKTEIDTCLKEKLKLSNSLNGNLTHLNEVQKLQRFVSVTEVFSEFKDEDFLDFVDNVVVKSRTEFIFHLKCGLELEEEVKETWHASHMVTE

SEQ ID NO: 16368 - protein, 530 aa, synthetic construct
MKMITKLEAKQPDNSLRKIRVAAYARVSSDSDEQLLSLEVQKEHYENYIKSNPCWEYAGLYFDEGISGTKIGKRESLKQLLKDCESGQIDRIVTKSISRLARNTVDCLEIVRKLTGLGIYLYFEKENIDTEHMSSELMLSILSSIAQSESRSISENSMWSIQKRFENGSYVISSPSYGYKNENGKMIIVPKEAEVIKDIFGMALLGKGGHVIANELTAKKIPAKRGAKWSSTTVNAILNNKTYTGDVIFQKTFTDDNFNRHKNCGEKKQYVIENHHEAIISHETFNLVHELRQKRKLKLNITSGSNKYLARYVFSGKLYCGNCHSRLKKHDRHKKDGAYVVWCCTKHIRDIKCCSMKAVKEEYVKLAFLQMLNKFKATSAQILAPFIKSLRNVNSKDGLNKVIELEEKKLKLQEQEQVLSKLFAGGYIEMDSYYLESNQLKTEMDTCLKEKLQLSNSLNGNLTHLNEAQKLQRFVSVTEVFSEFKDEDFLDFVDDVVVKSRTEFIFRLKCGLELEEEVKEIWHTSHMVTE

SEQ ID NO: 16369 - protein, 540 aa, synthetic construct
MPKAISYIRFSSRIQASGDSTKRQNKYINEWLKNNPDYHLDESLRFQDLGISGYSGANAKSGAFGEFLAAVESGVIEAGSVLLVESLDRVSRQDIDTARERLRKILLAGVDVVTLADNSWYKKESLNDPLSLIKAVLIMQRANEESATKSKRLRSAWDAKREEAAKGKIMSRRCVAWLRVSDDMSHFELIPDNVKAVQRVFQLRLEGLPFVRIARQMNEEGFYTLNQRNPVKGAWSHTTVKALLDNRSVIGFKVPSNCTVTKGVKEIPNYYPAVISEEHFYAVQQLKQGAGRRPSSEKPLLTNLFKGVMRCAECGFVTIVNCATEKWHGVYRCSMRYEGRCHAKSINRRLADKALVQGLLYNTNRLSLNRDNGSAIGSLQSELEQLQKQRERLIKLAMLADDTESMAKDLKALNSQIKDAEKAISDVHQREQSTQLETISHLDLTVKKDRIEAQIIIKRIVKEIRLNTAGKKCDVFLHNGLKLLNFPLDRVVDGAQWLEVLPLIDGDEFDFEGFTTKPRYIALEEAPNWVKEMEEQSNQP

SEQ ID NO: 16370 - protein, 602 aa, synthetic construct
MSRSIEFEEPAKAVLYLRVSSKKQMDTAVDIDPDGNSIATQREVASRKASSLGADVVREFVEPGVSASTIEKRQAFQEMLAFLRENPDVRYVVVYARSRAFRNYIDAAITKRLLDKLNVKLVSAREDFGDGVYADMMEAVTDIFNDVQNKLSGEDIRIKLQHKAENGGTTGKAPLGYLNARVEHEGRLINTIQLDPKRAPLVRRAFELYSTGEYGLERLEATMADLGLTARAAGDLPERPVTFKWLHRMLQDRYYMGCVVYKGEVYAGRHEPIVDPVLFERVQEVVAFRSKSGQRDRVLQHYLKGILFCDRCERNERTSRLIYTEATNRSGNRYGYFLCRGRQDGVCDLPYLPVDKVEQAIVDHYETLNLPTNFVDDVRQLLDDALTEEQHSVAELHAAVSRKLKELETKEDRLLDLLTDDRLPQAKVREKLRKIQIERTATEARLANSGEVLAVGATALLDALDFMSDPAATYASGTDSIRRNLNETYYQRIFLDEEGVQAGELKPPFDEFHAALAMTKEKRTTVTTSTSTTPPTKQGPLAGALDRVSDDRSSSGLALALTDILSDAGSSKTSLVELRGIEPLTFSMRTRRATNCAIAPRR

SEQ ID NO: 16371 - protein, 506 aa, synthetic construct
MKDQAKRALVVIRLSRVTDATTSPERQREACLELCKQRGYEVIGTAEDLDVPAGKTTPFDRPQLGDWLTNRHHEFDVLVVFRMDRIVRRLLDLAGLILWCQTHDVALVSATEAFLDLTAPFGDVVALLVAKVAEMELAAISERNRSAAQHNMREGKYRGGPPPWGYMPEKIDGEWRFVQDDEQVKVINEVVRRVLDGEPLRQVAANLTDRAILTPRDRVNQLKGRETKGYSWHSAKLREMLTSKSLLGHAVTANGSIRKDDGSPIIRATPILERDVFEQVQVELSGRENRKEPTKRSSSLLLRVIYCGICGKPAYKLKGSGGRQDRYRCASVQSKATCGNGTVTTADADESLTASVLDLFGDSERQERVWDTGSDHSAELAELDAVLADLTSLLGTSVYRAGTPQRAQLDSQIAGYAARHDELSKLAVKPAGWTWQPTGEMFSDWWGQQDIQALNVWLREMKVRLTFDNSTAATVWHTDLGDLKPFEQQFKFGRSARRAVRRLTKV

SEQ ID NO: 16372 - protein, 517 aa, synthetic construct
MNIAAIYLRVSTEDQARHGYSLADQLSVCREKAFAMGADEILEFADEGVSGELLDRPGLSDLRESIRNGQVNIMICYDPDRLSRNLAHQLLLTDEIERAGVRLDFVNFEWQNTPDGRLFYALRGAIAEYEKEKIRERTVRGKMQKARQGGLPVRADSYGYKFEKGTLLLNQEEAEVVKLIYKWFISEDMGVNGVATRLTEQCIPTRKGNSIWQRCVVKTILTNPMYAGTFYYNRRDCKGVAYNKHLPLEKRVKAKSKPKDEWISIPVPAIVDLATWEKAQEKIKSARRLWSGWSREEYLLSGIISCTDCGNTMHGAVKVKYNGNKERGYTCVKTTAGTSNNGCKPIKRVPAEIIEVIVWEQVCTWLNDPDALTSEIRERTTEKDLRADLERIEKLIADVEKGRDNVRNALAAGLFDLDPKTTKLLQGLKGREKQLLTRKKELEIALHRSTAAEIRVKEIRKQAASFLSKLDALSFDQKKALLRTLVQQVTISGRGDNLRVTVHAAFLPEVEAKTKKL

SEQ ID NO: 16373 - protein, 501 aa, synthetic construct
MEGATKRALIVTRLSRVTEATTSPERQMEICQGLCDDRGYEVVGYAEDLDVSGSVDPFDRKRRPNIARWLANEAEPFDVIVVYRVDRLTRSLRHLQKLVHWAEDNGKLVVSATEPHFDMTTPFAPVLIALIGTVAEMELEAIRERNSSAARHNIRAGRWRGGQPPWGYVSSNASGEWRLVPCPEQVELINEVVARVLSGEPLQRIAHDLTSRSIPTPKGRTEWNVTPLKRSLTSEAMLGYVISGDKPLRNDDGSPIVRAEPILSREVFDRVKVELESRSRRGEPTKRSSSLLLRVLYCGVCQRPAYQFNGGSHSKSPRYRCSSTGKSTKCENLTVRMDLADQAFTENLLDVFGDSERLERIWDTGSDHSAELADINEILKDLTGLLGTGPYKAGTPQRSALDSRIAALASRQAELSTEAVRPSGWVWRTTGEMFADWWDNQDTESRNVWLRSMNIKVTYNNSSGAVTWGLDWGDLKKFEEQLKFGKSAQQAVRQVTEAPDL

SEQ ID NO: 16374 - protein, 578 aa, synthetic construct
MDEDILNQELALHVTGIKRTKRAVLYLRVSTSGQVNTDYNPEGISIPAQREAGTRKADSLDAGVVREFVEPGRTATSIDKRPVFQEMIAWVKEQKDIDYIIVYHFNRVFRNSVDAAITKRDLHKVGTRIVSTVLDMGEGPESAMVESIIHAVDQYQSQASGADIRYKMGQKAKNGGTLGPAPLGYLNVREAKPEGGEIRTVMIDPERGPLVRKGIELFATGQYIAQDALDHVTTAGLRTRGTRRTSPKELSLSQFYEILSDRYYIGKVNYDDVEYPGRHQALITEETFDRVQRVLALRGGGGTRERVHHHWLKGLLWCHRCGHRMVIMRGKGNGGVYFYFFCRGRQKHLCDLPYLGMADVEAAVDKHLGTVRLRDDFQAAVRRQLDEAVLIEQGAISGLKKRLGARLDELDTKEDNLLELLGDPDWPRAKIKSKLAGIERERAEIQAQIADTTSKLEAGRQFFGAALDLLADPQGFYRRGSDTVKRAITKVMFHKLHLDAEQIMGHDLTDGLAGLVEAGGAGGQLRNSKSTSVPGDGGAFDLVTDAVLLDVVQGDNGSSKTALVDDTGIEPVTPTVST

SEQ ID NO: 16375 - protein, 635 aa, synthetic construct
MSKIIPHVYMRVSTRGQFKSGGGWDEQDRQTKAYIVNRPDVFDTENIHYITDEGVSAFSGSNVTEGKLGDFLELVKCGDIGEGHALICYSIDRLSRQNTWAGSQLISTLVTAGIEIHSVIDNRPLRKNDQVGAIISTIELMRSNSESMVKSERAVAGYQARLTKSKKNGSVLTGQMPRWLFNKNGMYAIKSEMKLVIDFIFEQYINGVSTGHIADELNLKGWQYKTYWTDSIVDRLLNANDSQMIEGKKNKSKVHECREYISNAYKNDFTLSQIAEDLNGKDIPYTMTAWRGTFVARLIRDRRLIGEHTRYSKSVKGKKRDVIERVSNFYPTAIDNDRFNIANNMLTAVAGNIRGRTRISYGDTTQLKNIFSGILVCGQCNGAISVNKNSKDGVQFIRCRNRYELKACDARDIKYSTVENNILTHLKGINLDELISSPIDTKLELLKSELVLCLEEEQEYLNNIKKRESEKLRIRPTTIQALEEVQDRIDELSREIEVFEVDNFIPTFDVELNRITDQKNVKERSLIKKGISSVVDVIKYYRLDDGVICIEMVYKAKILKHFLIIDNKTGSLLTQSSLEDINGAFWLRSSFCDIDFSTNKVVYHRPPTELDLKIHNMLSRLLLNTVEAMRKDLDP

SEQ ID NO: 16376 - protein, 526 aa, synthetic construct
MKNCYLYRRYSTSKQSKGSSLERQQSLADKWCATNDGQLLDVITDEGYSAFKGDHISQGAFAGVLTAISSGVIPAGSYLLVENIDRLSRQAIGDALTTWMNILGADINIVTLMDGKVFTKESRNDLGSMLTYLVTQERAWSESHAKSVRTTNAIKAANKRLLNGEIARVTRPASWVTYTPQGYVLNEKADGVRRLFELYLSGLGQASTAKQLNDEGVSTLSGRSALWSSASVRKVLLNENVTGVKTIDGQAVIVYPVVVSREDWLKAREQLASKNVGASITVGKVSNPLTGLCYCGVCGDTMHYSSSTSRVGKRYEYLNCASHRRADKCGNVLFKLDHLFEIAKNLAAILCELPVQEDETQRLSAELEGAQLELADASERLAVASTMAVKYPSEAAFAALGTLELEISEVTKRVEKAELALAGAKGVQSAPLVQLSTVRKLQMSEEASRREAAQIFSSSFVSWSFDVNGNSELRTKRHGVIHLDGAGRVLEVRANGLALEGLINRFRAIPFVIDGKQGHITFDRTG

SEQ ID NO: 16377 - protein, 514 aa, synthetic construct
MRKVYSYIRFSSTKQAFGDSHRRQSKAIQDWLASHPDHILDESLSFEDLGRSAFHGDHLKEGGALRAFLEAVKQGLIPPDSVLLVESLDRVSRQSISHAQETIRAILEQGITVVTLSDGETYNRQSLDDSLALIRMIILQERSHNESVIKSDRIKKVWSHKRQQFEQDGTKITGNCPGWLKLNSDGKSFSLIPHHVETIHRIFDEKLSGKSLHAIARDLNLENIPTITNKKVDTGWTPTRVRDLLLKESLIGVAYGVSDYFPPAISKEKFHAVQMIRGQGKGKKPTSRQPSSIDILKGICKCAECGSTLRQRNTKKTPEGRYPRGYLECRNRQLGRCNSKAFNRSLIEDILIQKVFPTLQYLSLKSNGDNISVTTLKADITSLEKGINNLISLAERGLGDLDTLAQRITNNRVELESKKKDLRQAEAIQSLRSDNDIQDSDRKTVEGRIKLQLAIKSFVKEIIFDYYKQEITIRLLNGKSFSGISVARENKDFDHSSVFEVLQKSLLDIDEVHL

SEQ ID NO: 16378 - protein, 360 aa, synthetic construct
MRRAISYIRFSSERQLKGDSVRRQSKLVTDWLDKNPEFYLDSSLSFKDLGKSAFSGKHLKGGLGDFLTAIEKGLVKAGDTLLIESLDRLSRQDIDIASELLRRILRAGVDIVTLSDGEHYTRESLKDPLSLIKSILIMQRAHEESLRKSERVQAAWNRKKELISEGIKVSRRCPAWLRLNDDRRTFTIIPDKVEVVKRAFDLRLQGLSFWAITRTLNDEGHLSLNQYTPKQKGWSDTAVKKLLRNRAVIGCFTPAGREEVQGYYPAIISESLFYRVQQLNTGQYGRASVSSNPLSVNLFRGIIKCSECGATIVLGGYALKRFGMYRCPNRSANRCSAKAISRKQTDTTILEVVNKNWPPS

SEQ ID NO: 16379 - protein, 547 aa, synthetic construct
MKLLVTYIRWSTREQDSGDSLRRQTNLIDAFYSKHKNDYYLLPAHRYVDKGKSGFHQQHKAQGSDFRRMFENVMSGAIPEGSLIVVENFDRFSRADIDTAIDDVRQILRKGVSILTLGDGELYDKSALTDPVKLIKHIIIAERAHQESLVKQKRIAQVWNHKTQLARELKKPMGKQAPGWLELSEDGSHYIVDEDKASLVNIIYDKRLSGMSMFAICKWLNEQGYPTINQRKVRISKTKKPDGNWSALSVKHILTSRSVLGYLPAKISSEDRKTVLREEIEGFYPQIVTDSKFYAVQQLLEETGKGKTSSGDHWLYVNILKGLIRCKCGLVMTPTGIRKPVYQGTYRCNGNKESRCNYGTVSRKLLDTQLCSRLFSKLSQLHDEATDTAKLDELQRRLNTVDSELEKLTETLIQLPNITQIQEALRVKQEEKDELIVQLSREKARVKSVSSLDLSGLDMESVEGRTEAQIIIKRLVKEIVVSGNEKLVDIYLHNGNMIRGFPLDGKDDHTLTLEEATDEMQSLDDMLIFGEPVTRIYPAGDMEEVDA

SEQ ID NO: 16380 - protein, 481 aa, synthetic construct
MITTNKVAIYVRVSTTNQVEEGYSIDEQKDKLSSYCDIKDWSVYKIYTDGGFSGSNTDRPALEGLIKDAKKRKFDTVLVYKLDRLSRSQKDTLYLIEDIFIKNNIAFLSLQENFDTSTPFGKAMIGLLSVFAQLEREQIKERMQLGKIGRAKAGKSMMWAKTSYGYNYHKETGTVTINPAQALTIKFIFESYLRGRSITKLRDDLNEKYPKHVPWSYRAVRTILDNPVYCGFNQYKGEIYPGNHEPIISKEEYDKTQSELKIRQRTAAENVNPRPFQAKYILSGIAQCGYCGAPLKIMLGVKRKDGSRLKKYECHQRHPRTLRGVTTYNDNKKCDSGFYYKDKLEASVLKEISKLQDNAGYLDKIFSGDNAETIDRESYKKQIEELSKKLSRLNDLYIDDRITLEELQSKSAEFISMRGTLETELENDPALRKNKRKADMRKLLNAEKIFSMDYEGQKVLVRGLINKVQVTAEDIVINWKI

SEQ ID NO: 16381 - protein, 481 aa, synthetic construct
MITTNKVAIYVRVSTTNQVEEGYSIDEQKDKLSSYCDIKDWNVYKVYTDGGFSGSNTDRPALESLIKDAKKRKFDTVLVYKLDRLSRSQKDTLHLIEDVFIKNGIEFLSLQENFDTSTPFGKAMIGLLSVFAQLEREQIKERMQLGKIGRAKAGKSMMWAKTSYGYDYHRETGTITINPAQALAIKFIFESYLRGRSITKLRDDLNEKYPKHVPWSYRAVRTILDNPVYCGFNQYKGEIYPGNHEPIISKEEYDKTQSELKIRQRTAAENVNPRPFQAKYILSGIAQCGYCGAPLKIMLGVKRKDGSRLKKYECHQRHPRTLRGVTTYNDNKKCDSGFYYKDKLEASVLKEISKLQDDDDYLDKIFSGDNAETIDRESYKKQIEELSKKLSRLNDLYIDDRITLEELQSKSAEFISMRATLETELENDPALRKNKRKADMRKLLNAEKVFSMDYEGQKVLVRGLINKVKVTAEDIVINWKI

SEQ ID NO: 16382 - protein, 479 aa, synthetic construct
MNKVAIYVRVSTKGQAEEGYSIDEQIALLTSYCSIHKWKIHDTYVDAGISGATIERPELSRLSRDAQKKKFNTMIVYDLKRLGRSQRNNISFIEDVLEKNGIGFISLTENFDTSTPLGKAMVGILSAFGQLDRDTIRERMMMGKIGRAKSGKPMMTSTIAFGYTYDKVTSSLNINPAEAIVVKTIYNEYLSGRSLTKLRDYLNENDLLRNGKSWNYQGVSRVLRNPVYMGMVRFRGEVYQGNHDPIIDSETFEAVQKELKKRQLEAYEFNKNTRPFRAKYMLSGIIKCGYCGSPMGVTLGTKRKDGTRNIRYQCVNRFPRTTKGITVYNNGQKCNSGFYEKDDIEIYVLGQVRLLQLNKAKLNKMFETPEIINVEEIENQINSLNNKMKRLNDLYLNDMISLDELKTQTYTFLKQKDLLENELNNNPAIHQEENRKQFQKLLGTKDITQLSYEEQSFAIKNLIDKVFVKPGIIDINWRI

SEQ ID NO: 16383 - protein, 481 aa, synthetic construct
MITTNKVAIYVRVSTTNQVEEGYSIDEQKDKLSSYCDIKDWNVYKVYTDGGFSGSNTDRPALESLIKDAKKRKFDTVLVYKLDRLSRSQKDTLHLIEDVFIKNRIEFLSLQENFDTSTPFGKAMIGLLSVFAQLEREQIKERMQLGKLGRAKSGKSMMWAKTSYGYDYHKETGTVTINPAQALTIKFIFESYLRGRSITKLRDDLNEKYPKHVPWSYRAVRTILDNPVYCGFNQYKGEIYPGNHEPIISKEEYDKTQSELKIRQRTAAENVNPRPFQAKYILSGIAQCGYCGAPLKIMLGVKRKDGSRLKKYECHQRHPRTLRGVTTYNDNKKCDSGFYYKDKLEASVLKEISKLQDDADYLDKIFSGDNAETIDRESYKKQIEELSKKLSRLNDLYIDDRITLEELQSKSAEFISMRGTLETELENDPALRKNKRKADMRKLLNAEKVFSMDYESQKVLVRRLINKVKVTAEDIVINWKI

SEQ ID NO: 16384 - protein, 442 aa, synthetic construct
MIATNKVAIYVRVSTTNQVEEGYSIDEQKDKLSSYCDIKDWNVYKVYTDGGFSGSNTDRPALESLIKDAKKRKFDTVLVYKLDRLSRSQKDTLYLIEDIFIKNNIAFLSLQENFDTSTPFGKAMIGLLSVFAQLEREQIKERMQLGKIGRAKAGKSMMWAKTSYGYDYHRETGTITINPAQALAVKFIFESYLRGRSITKLRDDLNEKYPKHVPWSYRAVRTILDNPVYCGFNQYKGEIYPGNHESIISKEEYDKTQSELKIRQRTAAENVNPRPFQAKYILSGIAQCGYCGAPLKIMLGVKRKDGSRLKKYECHQRHPRTLRGVTTYNDNKKCDSGFYYKDKLEAYVLTEISKLQDNAGYLDKIFSGDNAETIDRESYKKQIEELSKKLSRLNDLYIDDRITLEELQSKSAEFISMRGTLETELENDPALRKNKRKADMRN

SEQ ID NO: 16385 - protein, 452 aa, synthetic construct
MKAAIYIRVSTQEQVENYSIQAQTEKLTALCRSKDWDVYDTFIDGGYSGSNMNRPALNEMLSKLHEIDAVVVYRLDRLSRSQKDTITLIEEYFLKNNVEFVSLSETLDTSSPFGRAMIGILSVFAQLERETIRDRMVMGKIKRIEAGLPLTTAKGRTFGYDVIDTKLYINEEEAKQLRLIYDIFEEEQSITFLQKRLKKLGFKVRTYNRYNNWLTNDLYCGYVSYKDKVHVKGIHEPIISEEQFYRVQEIFSRMGKNPNMNKESASLLNNLVVCSKCGLGFVHRRKDTVSRGKKYHYRYYSCKTYKHTHELEKCGNKIWRADKLEELIIDRVNNYSFASRNIDKEDELDSLNEKLKIEHTKKKRLFDLYISGSYEVSELDAMMSDIDAQINYYEAQIEANEELKKNKKIQENLADLATVDFNSLEFREKQLYLKSLINKIYIDGEQVTIEWL

SEQ ID NO: 16386 - protein, 674 aa, synthetic construct
MPDALAPDPFTAMAAQLTPKRAVSYIRVSTREQAQRGGSEEGFSLPAQREANKRKAQSMGALVVKEFADRGESARSANRPELQKMLAYLKEDGGIDYVIVHKLDRLARNRADDVEINRAFEEAGVRLVSTSENIDQTPGGMLLHGIMSSIAEFYSRNLANEVMKGMGEKARNGGTLGKAPLGYVNVRGRDEHGREVRTVELDEERAPLVRLAFSEYATGNWTVRQLADHLNTLGLSIPPTPRRCAKPITTTRLHKILRHPYYKGTISFQGVEYAGTHEPLVDEETWSHVQAMLDSHRYGERQRIHNHFLKSTVVCGQCGARLSVQNAKNSKGTIYPYFVCARRCRLHDCAFRAVLIDVVEDRMVELYQTIQLSAADRTQIEHYLHDELSQIEGDKAKAIRSLTTRRTNIEDRRRRLLHAHYEGAIPLDLLKEEQAKLTSELGQIERQLAAYQADITEVHQRLTQALDLLEDCHRLYTAAPDHLKKLLNQVFFERVLVNPLVDEEGRVILPSTGDGTSAVDKDAAGKETGGEDSAGEEGTSDASGGGAADADTLALTSRPVHLADTGSGTRLSALLVPPFDQLTSPSLHAAAHAHYLQHAAQPDSSTTPPTAGDEPTSPTTRTTPTLVGERCSTSGTTSQPVSTGVGSGKSLLVPPVGLEPTTFGLKVRSSDQLS

SEQ ID NO: 16387 - protein, 529 aa, synthetic construct
MTYQEGGERMKKITKIEGNTANSFKPKDRVVAYCRVSTGSDEQLVSLQAQKAHYESYIKANPEWEYAGLYYDEGISGTKKENRSDLLRMLSDCETGRIDLIITKSISRFARNTTDCLEMVRKLIALGIHIYFEKENINTGSMESELMLSILSGLAESESISISENTKWAIQRRFQNGTFKISYPPYGYQNIDGQMIVNPKQAEIVKYIFAEVLSGKGTQKVANDLNQKGVPSKRGGRWTATTIRGILTNEKYTGDVILQKTYTDSHFNRHTNYGEKNMYLVENHHEAIISHEDFEAVDAILNQRAKEKGIEKRNSKYLNRYSFSGKIICSECGSTFKRRIHSSGPRKYIAWCCSKHISNITECSMQFIRDEDIKTAFVTMMNKLIFGQKFILRPLLQGLRNQNNAASFRRIEELETKIESNMEQSQVLTGLMAKGYLEPALFNKEKNALEAERDRLLAEKDQLTRSVNGDFAKVDEVDRLLKFATKSKMLTAYEDEFFEDYVERIIVFSREEVGFELKCGITLKERLMN

SEQ ID NO: 16388 - protein, 459 aa, synthetic construct
MCERRTEMKAAIYIRVSTQEQIENYSIQAQTEKLTALCRSKDWDVYDIFIDGGYSGSNMNRPALNEMLSKLHEIDAVVVYRLDRLSRSQRDTITLIEEYFLKNNVEFVSLSETLDTSSPFGRAMIGILSVFAQLERETIRDRMVMGKIKRIEAGLPLTTAKGRTFGYDVIDTKLYINEEEAKQLRLIYDIFEEEQSITFLQKRLKKLGFKVRTYNRYNNWLTNDLYCGYVSYKDKVHVKGIHEPIISEEQFYRVQEIFARMGKNPNMNRDSASLLNNLVVCGKCGLGFVHRRKDTVSRGKKYHYRYYSCKTYKHTHELEKCGNKIWRADKLEELIIDRVNNYSFASRNVDKEDELDYLNEKLKIEHAKKKRLFDLYINGSYEVSELDSMMNDIDAQINYYESQIEANEELKKNKKIQENLADLATVDFDSLEFREKQLYLKSLINKIYIDDEQVTIEWL

SEQ ID NO: 16389 - protein, 572 aa, synthetic construct
MTLAPSAPPSSLDRLGETTTLAVSYLRVSTKEQAQRGGRSEGFSIPAQREANLRKARDLNAIVVEEFVDAGESARKADRPELLRMIEYVKTHSVAYCIVHKVDRLARNRADDVTIHLALKDAGVMLVSATENIDETPSGMLLHGIMSTIAEFYSRNLANEVAKGMTQKASTGGTVACAPIGYLNVHKRDELGRDVPTVDLDPDRAALVRWAFEAYATGNYSTITLREELIDRGLTTVPTPKRPAKAPGLSTIQRMLSNPYYKGDVIFRGASYTGLHEPLVTPEMWYRVQNVLTAHQVSGEKTQAHDHYLKGTIYCGDCASRLMITHAKNRHGNVYPYFICAGRHSKRTTCQRQAMPVGDIERLVEDYYRQVQIPEHIVTALRHMLTRQFDDLHAASKTERRTLATEREKLRDERRSLLHAHHAGAVPLDLLKEEQDRISRRLAFLDSRIEAGQIEYDQAKAHLEDCLALAGNAHAIYMSIDDSLRRICNQSFFERINVYEIDDTDTVLADHGEPFDILFDPALHAEALAYEQRQQEGDAQPPHVEGLNIQHWVEHRGFEPLTYGLQSHRSTN

SEQ ID NO: 16390 - protein, 546 aa, synthetic construct
MYTAIYIRVSTGMQATEGTGLEGQYEACLKKAQEFLVSASAIKLYKEDGFTGEDISRPAMNELRSDVSAGRIERVIITHPDRLTRDLTDKLILCREFEKSNVELVFVDTEYRNTPEGQLFFNLMSSIAQYELSLIKKRTVRGRLKAVEKDKKIMPMRVAPYGFNMVNNKLLVNEEEAEFVKKVYHWYVYEGLTLREIGERLFTLGAEPKRAESRNWGASSIRRILTSEIYIGKYYYNRRQTSKVKGEKTKSGSPRKTYSFRDKSEWIMLDVPPIIDEQLFELAQRQREVNTKKSGNVKYEYLLKSLIRCGHCGRMWQSTTYSGRVDKQTGKRMKYMCYRCPNLFPKKYGEGVEKCCTKSLRAEELDRYIWGLILETISNPDDYIQRITRQSGDILENLLSTASLLQKQVEQKEKEKEKIKTMFKREVIDEKEMVDEMQKINTAMRTIQAELEKYEEQVVLHKEKEMSADRIKEIAQLINQFVDNEGRDLTFDEKRTIVEALVDEIIIRFNDNSVEVTAVGALDELKRQRLLQHCHDVGSGLYHQEI

SEQ ID NO: 16391 - protein, 515 aa, synthetic construct
MREFPKGLNRVVMYLRKSRADIEAEMRGEGETLSKHKKALLELAHRNEYNIIKIYEEIVSGERIADRPEVIRLLNEVEDGMYDAVLCMDIDRLGRGDMRDQGAIIAAFKESKTLIITPQKSYDLEDEFDEEYSEFEAFMARRELKLINKRLQRGRVASVKEGRFIGTKAPFGYSKGDDLILVPNEKEAEIVRLIFHWYVNEKVGTSRISRRLNEMKISTPSGKGLWSPYSVISILRNEVYIGRMQWRKKYTNKKKGIEEWRPRDEWIDVEGKHDSLVSTELFKKAQQTLKQKTRVPNRANLKITNPLAGLVRCDLCSAAMIKRPYTKQAPHIRCSNVNCKNKSTRFEYVERAVLNQLQQWLNDFEVNMEEIEREVAAETEAESTSFTPETIISDMEKQLDELEKQKNKLHDLLERGVYDIDTYLERNQNIMGRISETKEAIKRVAEEASRVREQETAKESLLPRIKHVIEAYHQTEDPEKKNDLLKQVIEKVTYRKEKHQRGDNFDLEIEIYLPE

SEQ ID NO: 16392 - protein, 558 aa, synthetic construct
MTKLYSYIRFSSMRQSDGSSYERQIRMAKEIADRYNLELVNDYQDLGVSAFKGANSKTGALSRFLDEIGRSIPVGSWLFIENLDRLSRQDIISAQELFLSIIRRGITIVTGMDNKIYSIETVTANPMDLMFSILLFIRGNEESQTKRNRTNSSALLKIKAHQQNPQNPAVAIEEIGKNMWWTDTTSGRVLPHPVYFPVLQKIVQLRQEGHSAGAILDYLNEHHEPPAPTSNKKHGKWSRAMVSRLFNTKALIGVKTVNVDGVEYELRDYYPRVLSDSEFYFLRKNIVKKAWDYSHDKEKVIPLLSGIGVLRCVHCGATMVKQTAANGKREQYRYCCDGRKSGRTDCPYPNWGFRAVTLEGAVLQLLADKIWIAEDKTNPIPEIQVKIDEISRKIDNLINLSAMMGATKELANQITDLNSQREALHEEIRLFEREMYSVDSQGWDKLAQFDLSDVQNEERLKVRMKIKGALHEIECSRIDSKKNLFVLVYLDGLRQRLVIENNRGLKKGQIFVDLKTINDRQILESAGMVLHPCIEMIIDADWKAPEEIPGLLSEEFGI

SEQ ID NO: 16393 - protein, 548 aa, synthetic construct
MSNTKRTGQTALYERLSRDDEMQGESNFITNQKQLLESYAKRNGFVNIYHYTDDGVSGTTFDREGFQKMIKAVEENKVSTVIVKDMSRFGRDYLKVGFYTEILFKEKGVRFIAINNGIDSEKQAESDFTPFLNIMNEWYARDTSRKIQFIFRARMEEGKRVSSSVPYGYYRNPKNKQELLVDKESAKVVKRIYRLVIEGYGVTHIADILTKDKVLIPSAYAQIHYPENNHSSKKRGIEDPYFWTPTTVGYILEKREYMGHTVLGKTICLDYKTKKRRKAKEDELIIFKNTHKAIIDEETWNNAQRLRKTVRRSPKYGTTSHPFTGLLICADCGGKLSYREPAEYKEKKYDCDYYFVCQHYRHRKGSCSMHYIKVKTVNEILLKSIKEITDFAKEEKQEFLKVMNKLSDEKREEKYQDDKTKLEKLSSRNEELTTLITKLYEDHALGKIPAKHFDRLFNIYEQELEKQIQYFEDEIESYHQRKVDTDKFLKMIEKYTDIEELTVPMINEYIEKVVVHEATGGRKGKDRKQQVDVYFNFIGNCQVPQSEE

SEQ ID NO: 16394 - protein, 522 aa, synthetic construct
MRKVTRIDGNNALQAFKPKVRVAAYCRVSTDSDEQMASLEAQKDHYESYIKANPDWEFAGIYYDEGISGTKKENRTGLLRLLADCENKKIDFIITKSVSRFARNTTDCIEMVRKLTDLGVFIYFEKENINTQRMEGELVLTILSSLAENESLSIAENSKWSIRRRFQNGTYKISYPPYGYDYVDGKLFINKEQAEIVKRIFSEALDGKGTQIIADGLNSDKIPTKRGSHWTATTIRGILSNEKYTGDVLLQKTYTDENFKRHYNRGEKDQYMIKDHHEAIISHEEFEAVKEILKQRGKEKGVIKGSSKYQNRYPFSGKIKCAECGSNFKRRIHGSGDCKYIAWCCTKHIKDASSCSMKFVREDAIHQAFVVMINKLIFGHKFILKPLLQSLKKSNYSDNITKIQELETKIKENTERVQVIMGLMAKGYLEPALFNTQKNELLKEAALLKGQREALKRVIDGGMTTLVEVEKLFKFATKAEKQIDAFDIEIFEDFTREIIVFSQEEIGFKMKCGLNLRERLMK

SEQ ID NO: 16395 - protein, 522 aa, synthetic construct
MTTRNVTIIPARKRIGNSAKAEELPKLRVAAYCRVSTDSEEQATSYEAQIEHYTNYIKSNPEWELAGIFADEGITGTNTKKREEFNRMIEECMQGKIDMIITKSISRFARNTLDCLKYIRQLKEKNIPVYFEKENINTLDSKGEILLTIMASLAQQESQSLSQNVKLGIQYRYQQGKIHINHNRFLGYTKDKDGNLVIVPEEAEIVKRIYREYLEGSSMLQIARGLEADGILTGAGNHRWHTSTINKILRNEKYIGDALLQKTYTVDFLSKKRVPNNGIVPQYYVENSHEPIIPREIFMQVQEQLVKRRCVHISKNGKKRNYSNNHPLSQMVFCGNCHEIFRRVHWNNRGKKSIVWRCVSRLENTGLFCTASTILEDTLKEKIIEAINVAVSGKNSFLAILKKNIETVLSADLDESTADIDKRLEELQTELIQKANSKESYDNIVNEIYRLRDLRQETLSRNALRKDKRDRIAEMTDFLNTQTGDITEFDDKLVRKLIEKVIVYDDRLVVEFKSGLEIEVNL

SEQ ID NO: 16396 - protein, 464 aa, synthetic construct
MPEKILRCAIYIRVSTFEQSVHGKSLQAQKECLEQYATDNNMSIVGVYADEGKTARKELKKRKAIHALVEDVKKDRIDVILFWRLDRWFRNLSDFYKVQDVLDEHGVRWISVSEPGINMETRDGRLQLNVVLSIGQNEVDTTSERIKFVNEASIRQRKLIFGDANMPFGYKTGVVDGKKCMVKDPETEHMVEDFFNYFRIHNSKKGAVRYMQEAYGIDFSYGMLRTMLSSEFYKGTYRGYPYCPAYLSEKEWNEMQTISKRNIKSTPSGRVYLFTGLIRCPVCGQKLVGTGCSSIINRETRKKRTYCYYRCNRALIDHICTYRHRMSQNLIEKYLLENLEREYEKYKVRSNQISEELKKEKKAKDPEKLRKEMERLNLLFQKGRISFDYYDNEYQRLEEEYSVSAAFPEEEETRSLHYVEELLKTDFRQMYDSLSLENRRSFWRSTIREIYLNEDNTIKCVDFI

SEQ ID NO: 16397 - protein, 532 aa, synthetic construct
MPAKQYCLYLRKSRADMEAEARGEGETLARHEKLLLDLAKKGRYNVTKIYREIVSGETIAARPVVQQLLQEVEDGLWEGVLVVEVERLARGDTIDQGVMSQAFKYSGTKIITPMKIYNPADEFDEEYFEFGLFMSRREYKTINRRLVRGRLASAREGKWVSGVAPYGYERVRIKNDKGWTLRPVEEEADIVRFIFRLYTSGEEGENGAVKQFGTYSLALRLDKMGIAPPGSASCWNDRTIQAMLQNPVYIGKVRWNVNKSKKRIINNTVEVEYYKSPAEDVILVDGLHPAIVDEEIFYKAQELIGRSGPPPVPKNDVVKNPLAGVLVCGKCGHSIAMRPNQRCGMLLCPNRACNNVGSKYDIVEERLLQALSQWLSDYRLEWSDKPPAEEQALIDLKHKSLRRADTELETLRRQLDRTHDLLEQGVYDTETFLSRSRSLTERIAAAEADIESLSAEVLEDEKRAASRLNIIPKVEKLLEVYPALPSAQAKNELLKEVLEKVEYTKLQRSGRNGPFDNFELVLFPKLPREFGD

SEQ ID NO: 16398 - protein, 640 aa, synthetic construct
MRRKKDKSNGITALYERLSRDDDNAGESNSIVHQKRMLEDYAIKHGFTNLVHFTDDGWSGATFDRPSWNRLVEGVKNGEITVCICKDMSRIGRDHLQVGFFTDILFREKEVRFIAINNGIDSDRQETSEFAPFLNIMNEWFVRDTSKKIKAVLKSRGSSGNAHTSNIPPYGYLKDPENHDHWIIDEEAAEVVRRIYRMTIEGKGPYQIARELSEEKIERPSYYLGKKGLGNHASNYDKENPYMWRGNQVTTLIARPEYIGKTVNFRTFKNSYKDKKVKRTNKEDWVVFDDTQEPIVDEETWLLAQKLRQNVRKADPMGEPNVLTGKIYCADCGAPMYNHRERKGRERIYYTAKGEKRTSYSNPADCYECSTYNLGRQKYDRHCTCHHISTKALKSIILKTIQETCHYVSLNEQEFVYSLQEESAMKDIAVSETVKKRIERNQKRLHELDMLIRKIYEDNVIGRLPDRLFQSMLTDYENEQNELNKIIETDTADMQRIIGGQNNVERFLKLVKKYENITELTPAMINEFIDKILVHEPQGKGADRTTEVEIYLNYVGQFQVPVEQHEPTEEERIAAEKEADRLRRKRESNRKYMKKIREKSKEFAEHERIAEEKSSDSNVCAEQNAVTKSNRQKVRGEKIA

SEQ ID NO: 16399 - protein, 650 aa, synthetic construct
MNKKIKCDTYTRVSTTMQVDGYSLDAQKEKLKRYAEFQNMEIVNEYSDEGKSGKSVESRPEFQRMLDNIENGTDEVQFVLVFKLSRFGRNAADVLNSLQRMQDFGVNLICVEDGIDSSKDSGKLMISVLSAVAEIERENILVQTMEGRKQKAREGKWNGGFAPYGYELVNGELQIAEDEAEIIRLIYDKFIHTNMGISAIAAWLNQHGYKKKKRQNNTLDAFAASFIKGVLDNPVYCGKLAYGRRKNEKVSGTRNEYRIVKQENYMLHDGIHEGIISETDWELAHQKREKTGVKYEKTHSLDHEHILSGILRCPLCGSGMYGNVNRKKKKDGTLYKDYFYYACKHRRLVDGHKCGYRKQWSEEKINNAVEEVIRKLVKNPKFEEAILNKIGSRIDTEEIEKEIEGLEKQHRQLTGAKARLGQQMDSLDIMDKFYEKKYQDMETRLYRLYDEIEGVENSIEEVKNRLLNIQQQKISEENVYQFLLYFDKLYDKFTDLEKKEFLNSFVEQVDIYEQEQPDGRFLKHIKFRFPVYFGDRETQELCWDNESTVETVALLSKLDIDKHIDVEITLDELDLTSAESKATYAQIKEYILEKFDLKVSTLYIAQIKKKCGIVLREHYNKSKKEKQVIPQCTPEKEEAIMDALRHFKMI

SEQ ID NO: 16400 - protein, 464 aa, synthetic construct
MPEKILRCAIYIRVSTFEQSVHGKSLQAQKECLEQYATDNNMSIVGVYADEGKTARKELKKRKAIHALVEDVKRDKIDVIIFWRLDRWFRNLSDFYKVQDVLDEHGVRWISVSEPGINMETRDGRLQLNVVLSIGQNEVDTTSERIKFVNEASIRQRKLIFGDANMPFGYKTGVVDGKKCMVKDPETEHMVEDFFNYFRIHNSKKGAVRYMQEAYGIDFSYGMLRTMLSSEFYKGTYRGYPYCPAYLSEKEWNEMQTISKRNIKSTPSGRVYLFTGLIRCPVCGQKLVGTGCSSVINRKTWEKRTYCYYRCNRALKDHICTYRHRVSQNLIEKYLLENLEREYEKYKVRTNQISEELKKQKKTKDPEKLRKEMERLNLLFQKGRISYDYYDKEYQRLEEEYSASAAFPEEEETRSLHYVEELLETDFRQMYDTLSLENRRSFWRSTIQEIYLNEDNTIKGVDFI

SEQ ID NO: 16401 - protein, 560 aa, synthetic construct
MAKKPKAKVYSYLRFSDPKQAAGSSADRQMEYAARWATEHDMQLDATLTLRDEGLSAFHQRHIKQGALGVFLRAIEDGRIQPGSVLIVEGLDRLSRAEPIQAQAQLAQIINAGITVVTASDGREYNRERLKAQPMDLVYSLLVMIRAHEESDTKSKRVKAAIRRQCEGWVAGTWRGIIRNGKDPHWVRLGEHGKFEHVPERVLAVRTMIDLFLEGHGAIEITRRLTEQNLYVSNAGNYSVHMYRIVRNQALIGEKRISVDGEEFRLDGYYPPILTREEFAELQQTMSERGRRKGKGEIPNIITGLSITVCGYCGRAMTTQNSKARAPKGKSVVRRLSCPMNSFNEGCPIGGSCESEIVERALMRYCSDQFNLSRLLEGDDGTARRTAQLAVARQRASDIEAQIQRVTDALLSDDGKAPAAFTRRARELETQLEEQRREIEALEHQIAASSAHGIPAAAEAWAQLVDGVLALDYDARMKARQLVADTFRKIVVYQRGFAPIDDAAADRWKRSGTIGLMLVTKRGGMRLLNVDRRTGCWQAEDDLDPSLIPSDGLPMLPLDA

SEQ ID NO: 16402 - protein, 547 aa, synthetic construct
MNTVKNKTRVAAYARVSSLKQVDNYSIAAQLAEVEKYCTLHDYEMTSPYIDNGISGAAMNNRPALQQMLKDLKMNKFDKIVVWKLSRLGRSMKDILQIVEECEKNNVSFYSVSEHLGIDSDMHKLMLNIMGSLGEYERAILRDNIRLSSSNKANEGKSVGGQTPYGYDRIDGNLIINQHESRIVKEIYQMYSQGMNYTAIAKMLNDRHEVTKLGKPHSKDSISYILKNKVYRGLVVYNQYVDWKKKGRRGYNDKPIITEGKHEAIVSQELWNKVQAQHKARKCYKRGNNKTDNLLTGLLKCKSCNANYVISNTVNTLKDGSKRHFRYYICRTRKQKSSDCKEAPNIRADFIEDYVFQNIKNLIRKPDLIQKVVNAVNSKSTPDTTQIKHEIANKQFQIEELRSKYDNLIEATEQDNSIIESIQPALLRYTQQIRELENSITHLERKQLVEHPKIDTNTVIDIFAILFKNLESTNKTSLKNIYHLVIDHIYVEADKGNKKQFYITFKFNKDIVATLLNNINPDEQLLNCSSSFLSQIPSETFFLEFSL

SEQ ID NO: 16403 - protein, 562 aa, synthetic construct
MPNHARQLNDQLDQLSQIGTQKRAAIYARVSTLEQAEEGYSIDEQVRVLREMCEREGYVVHKEYVDRGRSGKNIKGRPALQQLLHDAKSKDFDLVLVWKVNRFSRKTKDLLNIVEELESKNIVFRSYTENYETDTIAGKMQFRMLAVIAEFERDNIAQNVKMGMLARAKEGSWNGGQVLGYDVVSVPGENRKRKLSTLVINPTEAQTVRKVFDLYVEGNGYKSIANKLNNEGHRTKKNKDFSINGVKTILSNPLYAGFIRYNVRRDWNEKRRNNINPHPVIEKGQHEAIISEETWEKAKNIMASRSGKPNRIHDGEFPLTGIMKCPACGAGMVIGRTTNTLKDGTKKVLEYYVCGAWKNKGSAVCRSNGVRTDYADPYVLEKLSNIATSDVLIEQIVERINNKKERDSSPLQHEYETLKKALESNQQKKEKVLGLYEDDLIQKADLVQRLSTLNEEKERLEERLSPIDLQMGEGGTQLINFLMVKQVMQNFKSAYHESLTREQRKRLMHLLIRQITINENRKIDTVQIQLNKEVAKHFTFKGGEDSSITDEFSPPFSILINL

SEQ ID NO: 16404 - protein, 598 aa, synthetic construct
MDEKPRIAHIYSRVSKGTQVKGDGLRRQIEIASKFIEDVNISNSRDGLPVYTLADSPIYDRGLSAYFGLNTDENAGLGAFLKAAENGQVEKGTLLIVEAIDRISRLPVDDARALFARFKKYGIDVAICRFNLIIYHDKSSDLGQDLLITTAIHLAHLESEQKSKRIRARFTHKRLLEKEGGERRTSMSPSWIELSKDKTHFVLIPERARIVRKMVDLKLQGWGAHRITVYLNERGYPCWNRSNTWYTKIVEKYLKMIQLVGDFQPVEHVHGEKGVRKEPVGDVIKGYYPALITEEEWIRLKASFKRSGGRQTGAFSNLFSRMLYCPTCGYCMSYFKPNRGRIKVRCRKQIDKQGCDQRALNYEEIEPRLIKALAGLDYAKINNNSFASLQKELNTLEAQVAELEASADDIKTQMLEESDPRIISAYVNKLKAIYTEQDKAKARFEKLSTQTSDYDVNTLEQLQLERNEDRERYNGFVRSFVKYVIASDSKLGKPLRIVFKSEAVGEVPVFFNDDKNNKAISDIFTAQKDVNEAAPIRLINMSRVHGNLGKLAAIDTVPVPDDLGDTLERIKYLFAVRQAVLQNPEKWQAIADDARLFE

SEQ ID NO: 16405 - protein, 569 aa, synthetic construct
MMKTDVIGTVPRMRAAIYARYSTDLQSPASIADQVRTCRRLCEERGWEVVEVFDDMAISGATRLRPQFQQMQEAARKGQFDVLVAEALDRLSRDQEHIAGLHKRMRFNGVAIFTKAEGEISELHIGLGGTMSALFLRQLAQKTHRGLEGRVKAGKSAGGISYGYRLNRQPLPDGSFTTGDRVVDETEAEIVRRIFREYDQGKSARTIAVGLNRDGIAPPRAGGKGSGAWSFSTISGNWKRGTGILNNELYVGKLVWNRQNFIKDPETGKRQARLNPPEAWIIEEVPHLRIIDDALWDRVKERQSAIRKTMKTSNQPRNAFGAARRPTYLFSGLLKCGDCGAAYTLMNGKKYGCSGARNRGTCANRALISRTAVERRVLEGLKHELMHPDLVREFVEAFRKEMRRERRATQATREAQKRRHGQVLTEIDAIVSAITQGMFHPSMKAKMDALEAERAELEEKLAALPETEPVTLHPRLSDIYSRKVMDLTKALNDPEARAEAADLLRGLVSEIRLIPDPDAEDGHAIELFGDLGSILAFSRDGNAKPRRFTGGVSDSLVAGVGFEPTTFRL

SEQ ID NO: 16406 - protein, 589 aa, synthetic construct
MSTEIQLRGDSLRRQEQASKRYAEQHGLQLVEDFKLEDIGVSAFKGANVSSGAALGRFLELVKGGQIAKGSYLLVESLDRISRQQILDSVPIFFDIVKGGINVVTLADNHVYRAGDTNVADVIYSVVVLGRAYEESKTKSMRVGAAWENKRKNAGSRKLTKVSPAWLSLQEDRTGFDLVPERVEIVRQIFQLADTGNGSFSIARRLNQSATPTFTKSNGWHESYVTKILNNRAVLGEFQPHRYDDHGDRVPHGEPVADYFPKIIEDDQFHRVQASRRKRLVEGAGRKGPEYRNLFTKIAKCEYCGAPMRFVHKGRPPKGSQALKCTNAVRGLGCESISWRYTDFETSFLYFVKEIDLTATLRAAAENSERASVEQQIAAIEEKIRQLSAKRERIFELLTEPGSSTAFIKGKLDECEASIAAEEALIAEIREQRSMADMLPTISADELRSLIASVQDMSAPDIFERRAAVANRLSILVTSLRIAADGRRPKMKGIRTFLEGQELNADERDRLTDHIEKSNEEAQRYNRSFKVVLADGVSRYVIVRSDEPTDIIAEVLVDKDGAISGSDRGMPIGWSEGWDNLFDEPATAQ

SEQ ID NO: 16407 - protein, 505 aa, synthetic construct
MLHPRDLKGRTAISYARWSSGSQASGDSLRRQSENAERFCSTYGLTLDHQLVDNGVSAFKGLNLEARLGQFIADVKAGKISNDVVLILENLDRFTRINPVDAVPVLLELLKTGLTLVTLQDERVHTRTAYADNTMHLMMSLMAMQAAYEYSAKISQRVGAEWSNRAKRARQGRVKISKVPFWIDQQTQELNDRADDARLIFRLAQEGNGQWTITNYLNDAGIPSSRGGTWGKSMVQDVLKSKAAYGALVIKGEEVPNYYPPLITETAWLAIQHRQRQRYQNPQASGTTNIFPRLVRCAHCRSPMVVTSSKVRGKIWRYFACEGRSLKRTDCTAPNWRYDSFETEFLARVGFLAAPIPAVDGSAPMDSSGELVDAIAALENQHSNILAGMAEAFDAASRRVLLDRAHAISTEIAVKKNELVRVRENDARYQETKPLTDIETDLEVIQRLAKEDRKEAQRLIANLVERIDLESDSHGPRAGNGLRRALVTLRSGWSHAMVFDDSAEP

SEQ ID NO: 16408 - protein, 481 aa, synthetic construct
MITTNKVAIYVRVSTTNQVEEGYSIDEQKDKLSSYCDIKDWNVYKVYTDGGFSGSNTDRPALESLIKDAKKRKFDTVLVYKLDRLSRSQKDTLHLIEDVFIKNGIEFLSLQENFDTSTPFGKAMIGLLSVFAQLEREQIKERMQLGKIGRAKAGKSMMWAKTSYGYDYHRDTGTITINPAQALAIKFIFESYLRGRSITKLRDDLNEKYPKHVPWSYRAVRTILDNPVYCGFNQYKGEIYPGNHEPIISKEEYDKTQSELKIRQRTAAENVNPRPFQAKYILSGIAQCGYCGAPLKIMLGVKRKDGSRLKKYECHQRHPRTLRGVTTYNDNKKCDSGFYYKDKLEAYVLKEISKLQDDADYLDKIFSGDNAETIDRESYKKQIEELSKKLSRLNDLYIDDRITLEELQSKSAEFISMRGTLETELENDPALRKNKRKADMRKLLNAEKVFSMDYENQKVLVRRLINKVKVTAEDIVINWKI

SEQ ID NO: 16409 - protein, 533 aa, synthetic construct
MRRAAIYSRFSTDLQNDQSVEDQETICLAYAARIGCTVVSKFHDRARSGASLFLRDGLANLIASADAGGFDVLISEAPDRISRDMADLAGLHKRLEFRGIEINCVNSGKMDSLQIGVHGLVGQMQREEGAKKVRRGLIGVVNDGRHAGGRAFGYRPVLGRPGELEIVPEEAEVVRGIFRDYASGASPRTIAAGLNSEGVAPPRGSRWNASTINGNGSRGYGILLNPLYAGRNVWNRVRMMKDPATGKRVSRSNPESEWHTKELPHLRIVEQSTFDAVQVRKDSRGGPHGKHLPRAKRPLSGLLKCGCCGGGMTIIGSDRSGRRIQCSTYRESRSCTNAARYYVEKLERLVVDSLRHQLASPELISEYVAAYRDERRKIEGEARRGRAQAQTKLAGVEDRIRRLISMVGKGLVSEDEVAAEIGPLRIEKTRWQGVLDAAGDDTNVVELHPPAIEKFRANLEELAVLIADKNSLLDIDVTGTFHQLVESVIVNPRKAGEEYEVTIRGHLSSLLGAEVSAIVMVAGEGLEPPTPGL

SEQ ID NO: 16410 - protein, 481 aa, synthetic construct
MITTNKVAIYVRVSTTNQVEEGYSIDEQKDKLSSYCDIKDWNVYKVYTDGGFSGSNTDRPALESLIKDAKKRKFDTVLVYKLDRLSRSQKDTLHLIEDVFIKNGIEFLSLQENFDTSTPFGKAMIGLLSVFAQLEREQIKERMQLGKIGRAKAGKSMMWAKTSYGYDYHRETGTITINPAQALAIKFIFESYLRGRSITKLRDDLNEKYPKHVPWSYRAVRTILDNPVYCGFNQYKGEIYPGNHEPIISKEEYDKTQSELKIRQRTAAENVNPRPFQAKYILSGIAQCGYCGAPLKIMLGVKRKDGSRLKKYECHQRHPRTLRGVTTYNDNKKCDSGFYYKDKLEASVLKEISKLQDDADYLDKIFSGDNAETIDRESYKKQIEELSKKLSRLNDLYIDDRITLEELQSKSAEFISMRGTLETELENDPALRKNKRKADMRKLLNAEKVFSMDYENQKVLVRRLINKVKVTAEDIVINWKI

SEQ ID NO: 16411 - protein, 481 aa, synthetic construct
MITTNKVAIYVRVSTTSQVEEGYSIDEQKAKLSSYCDIKDWNVYKVYTDGGFSGSNTDRPALESLIKDAKKRKFDTVLVYKLDRLSRSQKDTLHLIEDVFIKNGIEFLSLQENFDTSTPFGKAMIGLLSVFAQLEREQIKERMQLGKIGRAKAGKSMMWAKTSYGYDYHRETGTITINPAQALTIKFIFESYLRGRSITKLRDDLNEKYPKHVPWSYRAVRTILDNPVYCGFNQYKGEIYPGNHESIISKEEYDKTQSELKIRQRTAAENVNPRPFQAKYILSGIAQCGYCGAPLKIMLGVKRKDGSRLKKYECHQRHPRTLRGVTTYNDNKKCDSGFYYKDKLEAYVLTEISKLQDNAGYLDKIFSGDNAETIDRESYKKQIEELSKKLSRLNDLYIDDRITLEELQSKSAEFISMRGTLETELENDPALRKNKRKADMRKLLNAEKIFSMDYEGQKVLVRGLINKVQVTAEDIVINWKI

SEQ ID NO: 16412 - protein, 412 aa, synthetic construct
MRIVRRIQPMMTPQKPKLRVAAYARVSDSRLHHSLSTQVSYYSRLIQSHPDWELVGVYYDEGISGKEQSNRQGLQDLLKACDDGKIDRILTKSIARFGRNTVDLLSTVRVLRQKNIGITFEKEGIDSLSSEGELMLTLLASVAQEESHNISENLRWQIKKKFEQGQPHTPQDIYGYRWNGENYVIEPDEAKVVRQVFQWFLDGDNAPMITKKLNEQGVLTRLGNPFTVSSVREFFKQEAYFGRLVLQKTYREPFSRNPKRNNGQKNKYIVEDAHEAIVSKSYFDVVLQEKERRYKVMYQESHMHKGTFRELIECSHCGKIMITRVDSKKVHPTIRYCCRTRDRFGTSSCPSKTLSEKRILATFEDKIGFKPDKNWVTENIKKVIYDSSVGLITVFPIKGRKYELKVRKEHFL

SEQ ID NO: 16413 - protein, 481 aa, synthetic construct
MIATNKVAIYVRVSTTNQVEEGYSIDEQKDKLSSYCDIKDWNVYKVYTDGGFSGSNTDRPALESLIKDAKKRKFDTVLVYKLDRLSRSQKDTLHLIEDVFIKNGIEFLSLQENFDTSTPFGKAMIGLLSVFAQLEREQIKERMQLGKLGRAKSGKSMMWAKTSYGYDYHKETGTVTINPAQALTIKFIFESYLRGRSITKLRDNLNEKYPKHVPWSYRAVRTILDNPVYCGFNQYKGEIYPGNHEPIISKEEYDKTQSELKIRQRTAAENVNPRPFQAKYILSGIAQCGYCGAPLKIMLGVKRKDGSRLKKYECHQRHPRTLRGVTTYNDNKKCDSGFYYKDKLEASVLKEISKLQDDADYLDKIFSGDNAETIDRESYKKQIEELSKKLSRLNDLYIDDRITLEELQSKSAEFISMRGTLETELENDPALRKNKRKADMRKLLNAEKVFSMDYENQKVLVRRLINKVKVTAEDIVINWKI

SEQ ID NO: 16414 - protein, 507 aa, synthetic construct
MKRVISYIRFSSEKQAKGDSLRRQSKMVTDWLKAHPEYYLDQDLSFRDLGVSGFTGKHLKGGLGDFLTAIEKGLVKAGDTLLIESLDRLSRQAVDRASELLRNILRSGVDVVTLSDGEHYTSESLKDPLALIKSILIMQRAHEESLRKSERIQAAWDAKKEAAKAGIKVSKRCPAWLKLNDDRKSFSVIPEKVATVKRCFQLRLEGKSIWEIVRTLNDEGHQTLNQYKPGKFGQTSVQDLLKNRSVIGYFTPKGREEIAGYFPPIIPETDFYKVQQLSYSRYGRKPASDKPLSVNLFKGVIRCSECGHALIITGFSDTRNGIYRCPLRNENRCNAKGLSRKQTDGTLLALLSRLDRFDSDTTNTIDTLKLHREHLSSNIEKLVQLSLEIEDLSAITIKLKQLKGELSQVDADIEKETQRLKSIDVGCLSDCDLTTKAGRIEAQLIIKSAVKEVVLNTAKRRCKVTFHNGKVIDLPITENPSEDVTEAIQSLSEVTAKGLIDVDVVEI

SEQ ID NO: 16415 - protein, 507 aa, synthetic construct
MKRAISYIRFSSEKQSRGDSLRRQSKMVNDWLKAHPEYYLDQDLSFRDLGVSGFTGKHLKGGLGDFLTAIEKGLVKAGDTLLIESLDRLSRQNVDRASELLRNILRSGVDVVTLSDGEHYTRESLKDPLALIKSILIMQRAHEESLRKSERIQAAWNRKKELISEGIKISKRCPAWLKLNDDRKSFSVIPEKVETVKRCFQLRLEGKSIWEIVRTMNAEGHQTLNQYKAGSFGQSSVQDLLKNRSVIGYFTPKGCEEIAGYYPAIIDETTFYKVQQLSYARHGRKPASAKPLSVNLFKGVIRCSECGHALIITGFSDTRSGIYRCPLRNENRCSAKGLSRKQTDGTLLTLLSRLDRFDSDTTNTIDTLKLHREHISSNIEKLVQLSLEIEDLSAITSKLKQLKNELSQVDADIEKETQRLKSIDVGCLSDCDLTTKAGRIEAQLIIRSAVKEVVLNTAKRRCKVTFHNGKVIGLSITETPSEDVTEAIQSLSEVTERGLIDVDEVII

SEQ ID NO: 16416 - protein, 508 aa, synthetic construct
MKKAIAYMRFSSLGQMSGDSLNRQRRLIAEWLKVNSDYYLDTITYEDLGLSAFKGKHAQSGAFSEFLDAIEHGYILPGTTLLVESLDRLSREKVGEAIERLKLILNHGIDVITLCDNTVYNIDSLNEPYSLIKAILIAQRANEESEIKSSRVKLSWKKKRQDALESGTIMTASCPRWLSLDDKRTAFVPDPDRVKTIELIFKLRMERRSLNAIAKYLNDHAVKNFSGKESAWGPSVIEKLLANKALIGICVPSYRARGKGISEIAGYYPRVISDDLFYAVQEIRLAPFGISNSSKNPMLINLLRTVMKCEACGNTMIVHAVSGSLHGYYVCPMRRLHRCDRPSIKRDLVDYNIINELLFNCSKIQPVENKKDANETLELKIIELQMKINNLIAALSVAPEVTAIAEKIRVLDKELRRASVSLKTLKSKAVSSLGDFHAIDLTSKNGRELCRTLAYKTFEKIIINTDNKTCDIYFMNGIVFKHYPLMKTISAQQAISTLKYMVDGEVYF

SEQ ID NO: 16417 - protein, 627 aa, synthetic construct
MKKIFLYHRVSTEQQAEDGSGMARQADLLQSYIDRTCIVENMDDPVPVVLEDGGLSAFKGHNFLHGQLGRWMEEVRAGMWDGSILVVENIDRFSRQNPFNVMGYLHDLINHSVAIHDVNMNMVISRENSAMLPMVMMQAQRAYDESKFKSNRIRAGWAKKRDNAFNNGTIVTKKRPKWIDIVDNQYVLNAKARIVTEIFRLYQTGIGCPTIAKTLREMGDDWRFDRIWTSEAVHKILRNRRVTGVIFISELIRDYNSTENSIVQKRYEMNVYPPVIGEDEFNLVQQLLSSRRSGKATGGKRITKKRNDDGSAVTDINGYPTYDTIDCGEITKSNIFNAVCRCAKCGSPMYHNIVVSKRTPAKATSSVEQKYRYIRCLNERDGLCDNKSLRYDVIERFIMEHVKGLDFSTIIQENRINPEVELVRLKLEEEREHIREYEHGIKRLRNLGKKVPFDVLLELEDAQVRLKALEDKQATFADVHVDLDVLKNVDLDALYDVTNIELRGRVENELSKVLEKVELHRDSKNYVITFKYRRVDVLKHVLMITASKTPVLVSGVCIETVGDTVAYSTPSFDIIVVDGGDLHFQPIDDEPLSIIDYSLLMNYVDGSEGADAVAAWMKHNMNFLFTR

SEQ ID NO: 16418 - protein, 507 aa, synthetic construct
MKRAISYIRFSSEKQSRGDSLRRQAKMVTDWLKAHPEHYLDESLTFRDLGVSGFTGKHLKGGLGDFLTAIEKGLVKAGDTLLIESLDRLSRQNVDRASELLRNILRSGVDVVTLSDGEHYAKESLKDPLALIKSILIMQRSHEESLRKSERIQAAWDVKKEAAKAGIKISKRCPAWLKLNDDRKTFSVIPEKVETVRRCFQLRLEGKSIWEIVRTLNAEGHRSMNQYKPGKFGQTSVQDLLKNRSVIGYFTPKGCEEIAGYYPSVIDETTFYKVQQLSHSRYGRKPASAKPLSVNLFKGVIRCSECGHALIITGFSDTRNGIYRCPLRNENRCSAKGLSRKQTDGTLLTLLSRLDRFDSDTTNIIDMLRLHREHISSNIEKLVQLSLEIEDLNAITSKLKQLKGELSQVDADIEKETQRLKSIDVGCLSDCDLTTKAGRIEAQLIIKSAVKEVVLNTAKRRCKVTFHNGRAITLPITENPSEDVTEAIQSLSEVTERGLIDVDVVAI

SEQ ID NO: 16419 - protein, 398 aa, synthetic construct
MKRVISYIRFSSEKQAKGDSLRRQSKMVTDWLKAHPEYYLDQDLSFRDLGVSGFTGKHLKGGLGDFLTAIEKGLVKAGDTLLIESLDRLSRQAVDRASELLRNILRSGVDVVTLSDGEHYTRESLRDPLALIKSILIMQRAHEESLRKAERIQAAWDAKKEAAKAGIKVSKRCPAWLKLNDDRKSFSIIPEKVETVKRCFQLRLEGKSIWEIVRTLNDEGHQSMSQYKPGKFGQTSVQDLLKNRSVIGYFTPKGCEEISGYYPAIIDETTFYKVQQLSYARYGRKPASDKPLSVNLFKGVIRCSECGHALIITGFSDTRSGIYRCPLRNENRCSAKGLSRKQTDGTLLALLSRLDRFDSDTTNTIDMLRLHREHISSNIEKLVQLSLEIDAYYREGDR

SEQ ID NO: 16420 - protein, 600 aa, synthetic construct
MARKLYSYQRWSSAVQADGTTKARQTRSAEEYAQKNGLEIEEIVDAGVSGFKSANTDENGALGQFLRAVDEGLIAHNSVLFVEALDRITRDEIDTALELFLGILRRGITVVTGMDNKVYTREAIKGNPVDLLTSILMFSRAHEESKTKQNRTNGNALALIDRFIKQGLPVNIKSIGSHPWWIDDSGSMYEAVKTHPVLWACAQFAIENFMEGESVFKVTQMLNEKFPHYYKGKAWAMANIRKLRINKGVYGLREVTVGGKTYVLPNYYPALITEGQFLRLQQIRTTTKYIGKVGDGRVVTNADGSTKIIAEKNNINLLAGMKLFRCGHCGGTMMAMRHRNTIRYLCEKGRGNNHDCKTWSMPGMLVEHTLMLVTTIAYMDLQKKGQGDKADYTQQITAMESTISGYSVQINKATKLAIALDDVDVDELADTIRELKRKRDNAIIELEVLQRKQLLANDSTFESIMMDFFTYVQYGVLQDPLHEYRSKLRDVVYSAIGDVRAWKHDRRLFISFQIKGNEGYYNFSAGNTPYDWGCYVGALPFSQHELEVANEEVPEHALDRVRERYAELHAVNMMMLRHAKELLSHVGYPELDSKMFWPRK

SEQ ID NO: 16421 - protein, 507 aa, synthetic construct
MKRAISYIRFSSEKQSRGDSLRRQSKMVNDWLKAHPEYYLDQDLSFRDLGVSGFTGKHLKGGLGDFLTAIEKGLVKAGDTLLIESLDRLSRQDVDQASELLRNILRSGVDVVTLSDGEHYTKESLKDPLALIKSILIMQRSHEESLRKSERIQAAWDAKKEAAKAGIKIYKRCPAWLKLNDDRKTFSVIPEKVETVKRCFQLRLEGKSIWEIVRTLNDEGHQTLNQYKADKFGQTSVQDLLKNRSVIGYFTPKGCEEIAGYFPPIIPETDFYKVQQLSYSRYGRKPASDKPLSVNLFKGVIRCSECGHALIITGFSDTRNGIYRCPLRNENRCSAKGLSRKQTDGTLLALLSRIDRFDSDMTNTIDTLKLHREHISSNIEKLVQLSLEIEDLSAITSKLKQLKGELSQVDADIEKETQRLKSIDVGCLSDCDLTTKAGRIEAQLIIKSAVKEVILNTAKRRCKVTFHNSKSITLPITETPSEDVTEAIQSLSEVTERGLIDVDEVII

SEQ ID NO: 16422 - protein, 542 aa, synthetic construct
MQQLKTKRVGIYVRVSTEMQSTEGYSIDGQINQIKEYCDFHHFEVKDIYADRGISGKSMNRPELQRMLKDAKEGNIDCVMVYKTNRLARNTSDLLKIVEDLHKQNVEFFSLSERMEVNTSSGKLMLQILASFSEFERNNIVENVFMGQTRRAQEGYYQGNLPLGYDKIPDSKHELMINQHEANIVKYIFECYAKGHGYRKIANALNHKGYVTKKGKPFSISSITYILANPFYIGKIQFAKYKDWSEKRRKGLNDKPVIAEGKHSPIINQNLWDKVQMRKKQVSQKPQVHGKGTNLLTGIIHCPQCGAPMAASNTTNTLKDGTKKRIRYYSCSNFRNKGSKVCSANSVRADVIEDYVMKQILEIVKSDKVIQRVVTHVNQENQVDGAALHHDIAYKQQQYDEVQIKINNLIKTIEDNPDLTSVIRPSIQKYEKQLNDITNQINQLKNQQNEDKTLFDAKEISKLLQHIFHDIKHIEKSRLKALYLSVIDRIDIKKDGNHKKQFYVTLKLNNEIIKQLFNNKQLDEVHLSTSSLFLPQTLYLTI

SEQ ID NO: 16423 - protein, 536 aa, synthetic construct
MKGKIALYSRVSTSEQSEHGYSEKEQEQLLIKEVMKNFPGYDYETYTDSGISGKNIEGRPAMKRLLQDVKDNKIEMVLSWKLNRISRSMRDVFNIIHEFKEHDVGYKSISENIDTSNASGEVLVTMFGLIGSIERQTLISNVKLSMNAKARSGEAITGRVLGYKLSLNPLTQKNDLVIDENEAHIVREIFDLYLNHNKGFKAITTILNQKGYRTINQKPFSVFGVKYILNNPVYKGYVRFNNHQNWAVQRRSGKSDKNDVILVKGKHEAIISEDVFDQVHEKLASKSFKPGRPIGGDFYLRGLIKCPECGNNMVCRRTYYKTKKSKERTIKRYYICSLFNRSGSSACHSNAINAEVVERVINVHLNRILSQPNVIKQIASSVIEELKQKHSKQTEIKYDINSLEKQKAKVKTQQERLLELFLDDEMDSEMLKAKQSEMNQQLEVLDQQIKEAKQANQSQDDIPNFDKLKARLILMITRFSVYLRKATPEAKNQLMKMLIDSIEITKDKQVKLVRYKIDESLIPQSLKKRLGVFFYT

SEQ ID NO: 16424 - protein, 481 aa, synthetic construct
MKTMNKVAIYVRVSTTNQVEEGYSIDEQKDKLSSYCDIKDWNVYKVYTDGGFSGSNTDRPALESLIKDAKKRKFDTVLVYKLDRLSRSQKDTLHLIEDVFIKNGIEFLSLQENFDTSTPFGKAMIGLLSVFAQLEREQIKERMQLGKLGRAKSGKSMMWAKTSYGYDYHKETGTVTINPAQALTIKFIFESYLRGRSITKLRDDLNEKYPKHVPWSYRAVRTILDNPVYCGFNQYKGEIYPGNHEPIISKEEYDKTQSELKIRQRTAAENVNPRPFQAKYILSGIAQCGYCGAPLKIMLGVKRKDGSRLKKYECHQRHPRTLRGVTTYNDNKKCDSGFYYKDKLEAYVLKEISKLQDDADYLDKIFSGDNAETIDRESYKKQIEELSKKLSRLNDLYIDDRITLEELQSKSAEFISMRGTLETELENDPALRKNKRKADMRKLLNAEKVFSMDYESQKVLVRRLINKVKVTAEDIVINWKI

SEQ ID NO: 16425 - protein, 481 aa, synthetic construct
MKTMNKVAIYVRVSTTNQVEEGYSIDEQKDKLSSYCDIKDWNVYKVYTDGGFSGSNTDRPALESLIKDAKKRKFDTVLVYKLDRLSRSQKDTLHLIEDVFIKNGIEFLSLQENFDTSTPFGKAMIGLLSVFAQLEREQIKERMQLGKLGRAKSGKSMMWAKTSYGYDYHKETGTVTINPAQALTIKFIFESYLRGRSITKLRDDLNEKYPKHVPWSYRAVRTILDNPVYCGFNQYKGEIYPGNHEPIISKEEYDKTQSELKIRQRTAAENVNPRPFQAKYILSGIAQCGYCGAPLKIMLGVKRKDGSRLKKYECHQRHPRTLRGVTTYNDNKKCDSGFYYKDKLEAYVLKEISKLQDDADYLDKIFSGDNAETIDRESYKKQIEELSKKLSRLNDLYIDDRITLEELQSKSAEFISMRATLETELENDPALRKNKRKADMRKLLNAEKVFSMDYEGQKVLVRGLINKVKVTAEDIVINWKI

SEQ ID NO: 16426 - protein, 475 aa, synthetic construct
MKTMNKVAIYVRVSTTSQVEEGYSIDEQKDKLEAYCKIKDWKIYDVYVDGGFSGANTQRPELERLISDVKRKKVDIVLVYKLDRLSRSQKDTLFLIEDVFAKNDVAFISLQENFDTSTPFGKASIGMLSVFAQLEREQIKERMMLGKEGRAKNGKSMSWTTIPFGYDYSKETGVLSVNPTQALIVNRIFTEYLNGKPVVKIIRDLNAEGHVGRKRPWGETITKYLLKNETYLGKVKYKDKVYEGQHEPIITQELFDLVQLEVERRQISAYEKYNNPRPFRAKYMLSGLMKCGYCGASLGLRYTRKDKNGISHHKYQCRNRHSKDLEKRCESGWYSKEELERVVIKELERIKFDPKYKNETLAKKEETIKVEEIKKQLERINNQVSKLTELYLDEIITRKELDEKNDKIKTERQFLEEQLENQKSNVLSIRKRKLTRLLKDFDVEKLSYEDASKIVKNIIKEIIVTKDGMSITLDF

SEQ ID NO: 16427 - protein, 600 aa, synthetic construct
MKKDVKVIKGDTTLKRTASGCVERSIKRVAAYCRVSTDTEDQINSYNSQVEHYTEFIQKNNEWTLAGIYADEAITGTQVDRRIDFQRLINDCINGDIDMIITKSISRFARNTLDTLKYVRKLKEFNVAVFFEEENINTLTMDGELLLTILSSVAQQEVENISANVKKGLRMKMERGEMVGFQGCLGYDYDPETKSISINEKEAEIVRYIFRRYIEGVGGMLISRELEEQGYLSPRGNKRWTETTVLGIIKNEKYKGDLMMGKTYTVDPISKRRLDNYGEQDKFYIENHHEPIISEEDFEKAQGIRLRRSKNRNTVANNGGKREKYSRKYAFSSMLECGFCGHNLSRRNWHSSSEYTKVIWQCVNATKNGKKYCPHSKGIEEEAIEKAFMESYRQVCHNNVEITNEFLKTVEEELKDNSLAKDLKKINNQLDKILKKEKDLVELRLNESISMDIYQDKYNEIAISKEKLLAEKRTLEVTLTDEKALKKRLEGFKKLLESNKYLEEFDRAVFESIVDKIIIGGTNDEGEIDPAMITIIYKTGKKDSQDGRLFKSRRKNAKEVDEKTDNKLYPQSSDEVNNLCSYPMDNTRRDGSTFVQTRCR

SEQ ID NO: 16428 - protein, 559 aa, synthetic construct
MSKEKIKVYLYTRVSTSIQIEGYSLEAQKSRMKAFAIYNDYEIVGEYEDAGKSGKSIEGRIQFNRMMEDIKSGKDGVSFVLVFKLSRFARNAADVLSTLQIMQDYGVNLICVEDGIDSSKDAGKLMISVLSAVAEIERENIRIQTMEGCIQKAREGKWNGGFAPYGYKLEDGKLFINEEEAVAIRTIFDQYVNTTIGANGISKYLENHGIRKIPRQNGKNPLFDAGLIRKILKNPVYNGKIAFGRRTLEKVHGTRNEYKQVEQDEYLISEGIHEAIVSDEVWQAAQVKLKSQAKKYEHVNKGKDTRTHLLSGIVKCPICGVGMFGNKCIKKKKDGTKYKDFYYYGCKHRQMIRGHKCTFSKQIREELLDDAVAEVIVKIVSNPKFASMMQEKINMKVDTSEIEKEIDNYQKELRKSHSTKFKLIEEIDNLDVEDKHYKRRKQDLDDRLYRMYDKIDELESSLIDAKAKKQTIEAEKLTGDNIYKVLIYFDKLYKVMNDVERRQLISALISEIQVYEEKQSNGQWLKSITFKLPIIEENLNIDLDNDEQVECVSLLEKRS

SEQ ID NO: 16429 - protein, 485 aa, synthetic construct
MAEKRKVAIYCRVSSMHQAIEGYSIEQQRDSLTKYCEAMEWNIYDIYIDAGFSGGKLERPAMDKLIREAEAGKFDTVAVYKLDRLSRSVQDTLHLIRDVFKEHDINFVCLQENIDTKSAMGNLFLTLLSAIAEFEREQITERMAMGRHGRAKSGKSMMWARPAYGYRYDRESQTVSVVQSEATIVKRIYKEYLEGKSVSKIKNDLNSEGHITKEKPWVYKRITYILQSRVYTGVNEYKGEIYDGKHEAIIDTETFELTQMEFAKRQQQTKDKKNNPRPFQAKYMLSGLARCGYCKAPLKLRLGAVRKDGTRAMVYDCHNRWNRKVTYLTIYNDNKQCTESGRYQKADLEAYVLDKIKELQLNPDTIREKMDLNEKPTANTEEIKKQIAKTNQQIDKLNDLYLNDLITVEKLKERANKLKKERELLEAELSKNSDHLFKAKKKQLNDLLMNKDIDSMTYEEQRNLVKMLIYKVDVTKEDINIIFDF

SEQ ID NO: 16430 - protein, 544 aa, synthetic construct
MEMIQTKRVALYIRVSTQEQALEGHSIQAQEQNGRQFAERMGYEVVEVYADEGISGKSTKNRFAYQRMMNDARNHRFDLLVIWKLTRLGRNMLDVLQTVEELLRYDVGLHSISEQFDVTTSTGKLMLQLLGSFGEFERNQIAENVQMSMQSLVKDKKRYAGGRRLGYVSGIDTNGQKQLVIEPEEAKIVRLIYAKYLGGAGYRAIANFLNRQGYQTVKKNAFSTTAVKDILRNKIYAGYLEYARYINWETKRRKGKNPRPILVKGTHEPIISEEDYQKVQERLALEGKQPKWNHTGENVLTGLLRCPECGAPMAASNVTNTLKDGTKKRIRYYSCSVFRNKGASVCHANSIRAEQAETFVADRLKEIVQLPEVLPRLVAALNEEIVRQSQPLEQELVVLLERKEELKTKIEKWEAALEDSPELFPMLKDRLDELTEKRRQLHIRENEILGIFQQGEPIQVKDVQRILTNLDRFLAQSEKKQIKALYRTFIEKITFDPNHKEMLEITMKFTHAVVQQLNEQYQIAVSKTKDTAIFVLKTPFTLTI

SEQ ID NO: 16431 - protein, 548 aa, synthetic construct
MIQTNSNHFSFKAAIYCRLSKDDEQKGESASIQNQKELLENYVKSRGWSIYDVYIDDGYTGLNTNRPSFQRLIRDIENKKVDIVITKDLSRLGRNYLQTGYYTENFFPKNNVRYIALNDGVDTFQENNEIVPFKNVLNEFYSRDVSKKMKSAYMTRARQGKFIGCLAPIGYRKDNDDPHKLVIDDETSWIVEKIFDLAFSGYGVQAIRRRLFEEKIPTPTWWNRKKGLRNKKTKLEMTVDGGEYWWDCTTLKEIIENPVYIGHIASQKVNYKFKVGWLSDKPKEEWIIVENTHEPIISEDIYNIANEKLKSRRRPFKNGEESIFAGIVKCPDCGKSLNLGRNKSKKREKLLTCNTYRRYGKSLCSQHRIYYDTLYEIVLKDIRKNAEIALKDEKEIIKALEKSREIDNEEEQKFIMDKIYEDQIRVEDLTKKIERLYDDWLDNKISESNFQKILEKSQKEQDYLNQRIEDNQKLIVKEDLEDINVKKWIELIKKHKDIKRLDKETLNELISKIYVHEKEVVNGEITQTIDIYYNFIGNTDTLQVFYNL

SEQ ID NO: 16432 - protein, 545 aa, synthetic construct
METRPTKRVALYIRVSTQEQALEGHSIQAQEQNGRQFAERMGYEVVEVYADEGISGKSTKNRFAYQRMMNDARNHRFDLLVIWKLTRLGRNMLDVLQTVEELLRYDVGLHSISEQFDVTTSTGKLMLQLLGSFGEFERNQIAENVQMSMQSLVKDKKRYAGGRRLGYVSGIDTNGQKQLVIEPEEAKIVRLIYAKYLGRAGYRAIANFLNRQGYQTVKKNAFSTTAVKDILCNKIYAGYLEYARYINWETKRRKGKNPKPILVKGTHEPIISEEDYQKVQERLALEGKQPKWNHTGENVLTGLLRCPECGAPMAASNVTNTLKDGTKKRIRYYSCSVFRNKGASVCHANSIRAEQAETFVADRLKEIVQLPEVLPRLVAALNEEIVRQSQPLEQELVVLLERKEELKTKIEKWEAALEDSPELFPMLKDRLDELTEKRRQLHIRENEILGIFQQQGEPIQVKDVQRILTSLDRFLAQSEKKQIKALYRTFIEKITFDPNHKEMLEITMKFTHAVVQQLNEQYQIAVSKTKDTAIFVLKTPFTLTI

SEQ ID NO: 16433 - protein, 457 aa, synthetic construct
MRVACYDRTSVYEEAKISNDAQYDAVKEYVLEKYEQFPQRFSDKGESGGKADRPAFRQLRAWVCASEEEGVIYVWRYDRLARQAKIALEFIELCQQHQVQVYSISEPLPASFSHASTNKLFVQLLFTFAEQQRNVIIENVRAGLAYKKQQRQYLSSAVPYGYRLVNGKIQQEAHEAKVVRHIFQLYVTQKYGYKKLCQRLTQQKLFLRERPFQPYHIYSILKNPLYYGEIKGGSLGKYLGTFEPILSKATFLQAQEIRQSRCTAKKDTYPYLLRQKIRCPFCGRHLSSKYQWNTKKTKTLHYYHCTDRSCQGIFLRAESVESEVLEKIQAFFQHEGVYQALIAQLTQQLAEKRKDDKHKVIQQKKQEARWLKAFEEGNCSLEELKQQLQALQKPRSTSSFLSLQQCEAKVKEWLQLKDLSSRQLLCDHVCRIEVTKEKTVCGIYFRQLTQNILEGNE

SEQ ID NO: 16434 - protein, 545 aa, synthetic construct
METIQTKRVALYIRVSTQEQAIDGHSIQAQEQNGRQFAERMGYEVVEVYADEGISGKSTKNRFAYQRMMNDARNHRFDLLVIWKLTRLGRNMLDVLQTVEELLRYDVGLHSISEQFDVTTSTGKLMLQLLGSFGEFERNQIAENVQMSMQSLVKDKKRYAGGRRLGYVSGIDANGQKQLVIEPEEAKIVRLIYAKYLGGSGYRAIANFLNRQGYKTVKKNAFSTTAVKDILRNKIYAGYLEYARYINWETKRRKGKNPKPILVKGTHEPIISEEDYQKVQERLALEGKQPKWNHTGENVLTGLLRCPECGAPMAASNVTNTLKDGTKKRIRYYSCSVFRNKGASVCHANSIRAEQAETFVADRLKEIVQLPEVLPRLVAALNEEIVRQSQPLEQELVVLLERKEELKTKIEKWEAALEDSPELFPMLKDRLDELTEKRRQLHIRENEILGIFQQQGEPIQVKDVQRILTSLDRFLAQSEKKQVKALYRTFIEKITFDPNYKEILEITMKFTPAVVQQLNEQYQIAVSKTKDTAIFVLKTPFMLTI

SEQ ID NO: 16435 - protein, 457 aa, synthetic construct
MRVACYDRTSVYEEAKISNDAQYDAVKEYVLEKYEQIPQRFSDKGESGGKADRPAFRQLRAWVCASEEEGVIYVWRYDRLARQAKIALEFIELCQQHQVQVYSISEPLPASFSHASTNKLFVQLLFTFAEQQRNVIIENVRAGLAYKKQQRQYLSSAVPYGYRLVNGKIQQEAHEAKVVRHIFQLYLTKKYGYKKLCQRLTQQKFFFRKRPFQPYHIYSILKNPLYYGEIKGGSLGKYLGSFEPILSKATFLQVQEIRQSRCTAKKDTYPYLLRQKIKCPFCGRHLSSKYQWNTKKTKTLHYYHCTDRSCQGIFLRAERVESEVLEKIQAFFQHEGVYQALIAQLTQQLAEKRKDDKHKVIQQKKQEAQWLKAFEEGNCSLEELKQQLQALQKSMSTSSFLSLQQCEVKVKKWLQLKDLSSRQLLCDHVCRIEVTKEKTVCGIYFRQLTQNILEGNE

SEQ ID NO: 16436 - protein, 452 aa, synthetic construct
MKAAIYIRVSTQEQIENYSIQAQTEKLTALCRSKDWDVYDIFIDGGYSGSNMNRPALNEMLSKLHEIDAVVVYRLDRLSRSQRDTITLIEEYFLKNNVEFVSLSETLDTSSPFGRAMIGILSVFAQLERETIRDRMVMGKIKRIEAGLPLTTAKGRTFGYDVIDTKLYINEEEAKQLQMIYDIFEEEKSITTLQKRLKKLGFKVKSYSSYNNWLTNDLYCGYVSYADKVHTKGVHEPIISEEQFYRVQEIFSRMGKNPNMNRDSASLLNNLVVCGKCGLGFVHRRKDTVSRGKKYHYRYYSCKTYKHTHELEKCGNKIWRADKLEELIIDRVNNYSFASRNVDKEDELDSLNEKLKIEHTKKKRLFDLYISGSYEVSELDAMMSDIDAQINYYEAQIEANEELKKNKKIQENLADLATVDFNSLEFREKQLYLKSLINKIYIDDEQVTIEWL

SEQ ID NO: 16437 - protein, 548 aa, synthetic construct
MIQTNSNHFSYRTAIYCRLSKDDEQKGESASIQNQRDMLEHYVKARGWNIADVYVDDGYTGLNTNRPSFQRLIKDVEERKIDIVITKDLSRLGRNYLQTGYYTENFFPKNGVRYIAVNDGVDTLQDNNEIVPFKNVLNEFYSRDVSKKMKSAYLTRARQGKFTGCLAPFGYMKNPDDTYSLMVDEETSWIVEKIYDLAISGYGVQAIRRILFDEKIPTPTWWNRKKGLRNVFTKLEKTLKDGEYWWDCTTIKEIIENPVYLGHTASQKANYQFKIGWLSDKPKDDWIVVENTHEPIVSEDTYKMANEKIESRKRPFKTGEESIFAGLVKCPDCGKALNLGRNNSKKKEKILTCNTYRRYGKNLCTQHRIYFDTLYEIVLADIRKNADFALKDEKEVLKALEKSRDTENEEEQIYIAKKIEEDSKRVAELGNKIEKLYDDWINKKISESNFQRILEKSQDEQELLTKRIEEMERKVVTSRVDENGVYKWIELIKKHKNIKKLDKETLNELISKIYVHEKEVVDGEITQIIEIHYNFIGNTDSLQVSYNL

SEQ ID NO: 16438 - protein, 576 aa, synthetic construct
MRNYEKITALYERLSRDDELQGESNSIVNQKKILEEYASKNNLFNSIHFTDDGISGTQFDRPGFMAMMNGVNQGNIGCIIVKDMSRLGRDYLKVGQCMEILRQKGVRLIAINDNVDSFYKDDDFTPFRNIMNEWYARDTSRKIKSTFKAKGESGKHTGSSPPYGYIKDKDDKNQWIIDEKAAEVVRRIFHLTMDGKGPYAIARILEADKIDIPAYHQQKLGYGLHQSKVFEYPYRWCSSTIASILKKQEYLGHTVNFKTRKHFKDKKSKYVSEDNWLIFENTHEPIIDQETFDNVQRIRGNVKRYPDGWGEYHPLTGLMYCADCGSKMYVHRTSNYKNIPYYTCSAYTKIPCGTLCPSAHRIKAEVVLKLIQSTLQDIKKSLDEDNEAFLHSIQNEMEESEKIEMEKKRTRLTDSTNRLQELERLMCRIYEDMILEKIPNTRYEILNNQYETEQRELSKEIDGLEKAIKRYEKETNRAKKFIRLIERYDNFDELTPTIINEFVEKILVHERDRKGSQTANQKVEIYFNFIGNYEPPKEELSEEEMQKLREEEEKERARKDRLHQNYLKRKANGKQK

SEQ ID NO: 16439 - protein, 562 aa, synthetic construct
MSKEKIKVYLYTRVSTSIQIDGYSLEAQKTRMKAFALYNDYEIVGEYEDAGKSGKSIEGRAQFTRMMEDIKSGKDGVSFVLVFKLSRFARNAADVLSTLQTMQDFGVNLICVEDGIDSSKDAGKLMISVLSAVAEIERENIRVQTMEGRIQKAREGKWNGGFAPYGYKLVDGKLLINEEEAVAIRTIFEQYVNTTIGANGLSKYLENHGIRKIPRQNGKNPLFDAGLIRKILKNPVYKGKIAFGRRTLEKVHGTRNEYKQVEQDEYLIAEGIHEAIISDELWQAAQVKLKSQAKKYEHVNKGKDVRTHLLSGIVKCPICGVGMFGNKCIKKKKDGTKYKDFYYYGCKHRQMIRGHKCTFSKQIREELLDDAVAELIIKIVSNPKFASIMQEKINMKVDTSEIEKEIDNYQKELRKSHSIKFKLIEEIDNLNVDDKHYKRRKQDLDDRLYRMYDKIEELESLLIDAKAKKQAIEAEKLTGDNIYKVLIYFDKLYNVMNDVERRQLITALISEIQIYEEKQPNGQWLKSITFKLPIIDEDLNISLDNDKQVDESYPNDLHGNII

SEQ ID NO: 16440 - protein, 411 aa, synthetic construct
MRTVRRIQPIKSPCKPRFKVAAYARVSDSRLHHSLSTQISYYNRLIQAHPDWELVGIYYDEGISGKEQSNRQGFQNLIKDCDDGKIDRIITKSIARFGRNTVELLTTVRQLRLKNIGVTFEKENIDSLSSEGELMLTLLASVAQEESQNMSENIKWRVQKKFEKGIPHTPQDMYGYRWDGEQYQIEPNEAKVIRKVFKWYLEGDSVQQIVDKLNQEQVLTRLGNPFTVASIREFFKQEAYFGRLVLQKTYRESFSRNPKRNKGQRNKYIIENAHEPIVTKEYFDLVLHEKERRYQLMSQESHLNKGIFRDKISCSECGCLMIVKVDSKQVNKTIRYYCRTRNRFGASSCSCRTLGEKRLLASFKSKLGIVPDKEWVENNIKHIDYDFGQRIIWVIPVKGRKYPIEIREGRY

SEQ ID NO: 16441 - protein, 520 aa, synthetic construct
MKKVITIQATPSIIRSSSDDFSLKKRRVAGYARVSTDHEDQATSYESQMRYYSEYINGRDDWVFVKMYSDEGISGTNTKLRTGFKAMVEDALNGKIDLIITKSVSRFARNTVDSLTTVRQLKEVGVEIYFEKENIWTLDSKGELLITIMSSLAQEESRSISENVTWGLRKQFAEGKVHFPYTNVLGFKAGEDGAIVVDQDEAKTVRYIFQQALIGKSPYHIAKDLTEQGIPSPSGKSHWNATTIKRMLRNEKYKGDALLQKTYTIDFLTKKKNINTGELPQYYVENNHEAIVDRETFDAVQQVLDNKGRKLSTTIFSSKLVCGDCGHFFGSKVWHSTSKYRRVIYRCNEKYNGSSKCSTPHVTEEEVKQWFVLAVNQVIDNRFEVIDNLSVLLSIGSLEVIDEQIKVLETEAEVVSQLVANLVSENAIIRQDQDKYLKKYNQLTSKYEGIVQDIESLELQRMKKSKRNKELQDFIGTLEKLGKVLTDFDELLWESLVESVMINEDKGAKFKFKNGAVVVI

SEQ ID NO: 16442 - protein, 413 aa, synthetic construct
MAVRLIKVKSEQKKQRVCAYVRVSTTNSSQLDSLENQKTYFETLYANREDVDFLGVYYDKGISGSKEKRPSFQAMLEACRQGQIDLIHTKSISRFARNTMTVLEVSRELKVLGVGIYFEEQNINTLSNEGEVMLSVLASLAEEELESMSTNQRWAFQKKFQRGEMVVNTKRFMGYDIDDDGELVINEAEAQIVRRIFHLYLDGMGMHRIAKLLNEKGVPTVSNARWYDMTVGNMLRNEKYKGAALLQKTYLHGVSGKRRLNQGEVAQYLIEDNHEPIVSKEVWQAVQDKLDSNTWKQGPNKHYRFTSMLRCQYCGSTLKRQVSYKKQIVWCCSKYIKEGKASCQGMRVPEKAIEDWRLKTPVTVIERNEYGQKHYSYSSQENAVDSHPSASHQNQSGRLLSGVHRSRRTAIKL

SEQ ID NO: 16443 - protein, 428 aa, synthetic construct
MSTDQDEQLSSYENQVNYYRDFISKHEEYELVDIYADEGISATNTKKRDAFNRLIQDCRDGKVDRILVKSISRFARNTLDCIKYVRELKDLGIGVTFEKENIDSLDSKGEVLLTILSSLAQDESRSISENATWGIRKRFERGEVRVNTTKFMGYDKDKDGNLIINREQAEVVRYIYERFLKGYTPESIARDLNDRDVPGWSGKANWYPSSILKMLQNEKYKGDALLQKTYTVDFLTKKRTENDGQVNQFYVANNHEGIIDHEMWETVQLEIARRKAFREEHGIPFYHLQNEDNPFMTKVFCAECGDAFGRKNWTTSRGKRKVWQCNNRYRVTGVMGCSNNHIDEETLEEAFMKAISILKAHKADVLDKLDKLSKGDNLLYKHYAKFMKQILDVDHFDCTIMCQVLDNITISESGEIRVTFLEGTEVDL

SEQ ID NO: 16444 - protein, 502 aa, synthetic construct
MEFIREDCIYARQSVDRKDSISIESQIEFCKYELKGGNCRVFKDKGYSGKNTDRPEFQKLLGEIRKGKVRRVIVYKLDRISRSILDFATMMELFQEYDVEFVSSTEKFDTSTPMGRAMLNICIVFAQLERETIQKRVTDAYYSRCLKGFHMSGQAPYGYQLEPTVVEGIRTKKMVADPVAADHVRLMFEMYAEPETSFGDITRYFEEHDIKIYGKSMFRTFLSQLLRNPVYAQADLELYEFFKSQGAAIVNDASDFAGTNGCYLYQGRDVKEDKDRCLKDQILVIAPHEALISSDTWLKCRKKLMANTTFQQGRKPKNTWMAGKIKCGHCGYALKATHVPNSTGYFRCTKRTENKGCPGCGKIRKEEFEQFIFSAMQEKFKDFQILHGREEKVNPKLTAYQVELAQVEAEIEKLLDTLTGANATLLAYANKKIEELDTRRQTISKAIAELSVETISPQQIKKLSYYLDNWDSIDFDDKRKAADGLISTIKATSDRVQIEWKI

SEQ ID NO: 16445 - protein, 478 aa, synthetic construct
MNKVAIYVRVSTTNQVEEGYSIDEQKDKLSSYCDIKDWNVYKVYTDGGFSGSNTDRPALESLIKDAKKRKFDTVLVYKLDRLSRSQKDTLHLIEDVFIKNGIEFLSLQENFDTSTPFGKAMIGLLSVFAQLEREQIKERMQLGKLGRAKSGKSMMWAKTSYGYDYHKETGTVTINPAQALTIKFIFESYLRGRSITKLRDDLNEKYPKHVPWSYRAVRTILDNPVYCGFNQYKGEIYPGNHEPIISKEEYDKTQSELKIRQRTAAENVNPRPFQAKYILSGIAQCGYCGAPLKIMLGVKRKDGSRLKKYECHQRHPRTLRGVTTYNDNKKCDSGFYYKDKLEASVLKEISKLQDDADYLDKIFSGDNAETIDRESYKKQIEELSKKLSRLNDLYIDDRITLEELQSKSAEFISMRGTLETELENDPALRKNKRKADMRKLLNAEKVFSMDYENQKVLVRRLINKVKVTAEDIVINWKI

SEQ ID NO: 16446 - protein, 452 aa, synthetic construct
MKAAIYIRVSTQEQIENYSIQAQTEKLTALCRSKDWDVYDIFIDGGYSGSNMKRPALNEMLSKLHEIDAVVVYRLDRLSRSQRDTITLIEEYFLKNNVEFVSLSETLDTSSPFGRAMIGILSVFAQLERETIRDRMVMGKIKRIEAGLPLTTAKGRTFGYDVIDTKLYINEEEAKQLQMIYDIFEEEKSITTLQKRLKKLGFKVKSYSSYNNWLTNDLYCGYVSYADKVHTKGVHEPIISEEQFYRVQEIFSRMGKNPNMNRDSASLLNNLVVCGKCGLGYVHRRKDTVSRGKKYHYRYYSCKTYKHTHELEKCGNKIWRADKLEELIIDRVNNYSFASRNVDKEDELDSLNEKLKTEHAKKKRLFDLYISGSYEVSELDGMMADIDAQINYYEAQIEANEELKKNKKIQENLADLATVDFDSLEFREKQLYLKSLINKIYIDGEQVTIEWL

SEQ ID NO: 16447 - protein, 452 aa, synthetic construct
MKAAIYIRVSTQEQIENYSIQAQTEKLTALCRSKDWDVYDIFIDGGYSGSNMNRPALNEMLSKLHEIDAVVVYRLDRLSRSQRDTITLIEEYFLKNNVEFVSLSETLDTSSPFGRAMIGILSVFAQLERETIRDRMVMGKIKRIEAGLPLTTAKGRTFGYDVIDTKLYINEEEAKQLRLIYDIFEEEQSITFLQKRLKKLGFKVRTYNRYNNWLTNDLYCGYVSYKDKVHVKGIHEPIISEEQFYRVQEIFARMGKNPNMNRDSASLLNNLVVCGKCGLGFVHRRKDTISRGKKYHYRYYSCKTYKHTHELEKCGNKIWRADKLEELIIDRVNNYSFASRNVDKEDELDYLNEKLKIEHAKKKRLFDLYINGSYEVSELDSMMNDIDAQINYYESQIEANEELKKNKKIQENLADLATVDFDSLEFREKQLYLKSLINKIYIDDEQVTIEWL

SEQ ID NO: 16448 - protein, 452 aa, synthetic construct
MKAAIYIRVSTQEQVENYSIQAQTEKLTALCRSKDWDVYDTFIDGGYSGSNMNRPALNEMLSKLHEIDAVVVYRLDRLSRSQKDTITLIEEYFLKNNVEFVSLSETLDTSSPFGRAMIGILSVFAQLERETIRDRMVMGQIKRVESGLPLTTAKGRTFGYNVVDAKLYINEEEAKHLQLIYDIFEEEKSITFLQKKLKELGFKVKSYSSYNKWLMNDLYIGYVSYSDKVHVKGIHEPIISEDQFYRVQEIFSRMGKNPNMNKESSSLLNNLIVCEKCGLGYVHRAKDTVSRGKKYHYRYYSCKTYKHTHELEKCGNKIWRADKLEEIIISRVKNYSFATRNLDKEDELDSITEKLKTEHSKKKRLFDLYINGTYEVAELDKMMADIDAQINYYNSQIEANKELKRNKKVQESLAELATVDFDSLEFREKQIYLKSIINKIYIDGEQVTIEWI

SEQ ID NO: 16449 - protein, 412 aa, synthetic construct
MSPDFKTITPRRTPTSRIRVAAYCRVSTMSETQAGSLAAQVSAYSKVICANPAWQFAGIYTDQGISGTTRRRPGFADMMDHARAGDFQILLVKSISRLARNTVDLLSCVRELSALGVAVRFERENIDTSSAEGELMLTLLASFAQEESRSLSQNVKWAIRKRYKSGVTNSHRIYGYTWVGGSLHINDDEAQVVRRVFDEYLAGVSPEAIADRLNAEGLRARGGGNFLGSVIRTWLENPRYVGNEMLQATYTDGPGGKLVVNDGALPKYWVQGANPPIIDPDTWKRVQDELARRRQSGGRALTPSGGTCALTHRVVCSQCGRRFHRRTKTRKHVSYKYWWCETATRGQGNPCRAPQIREAQLKSAITAHLGLGEWDDQQVLDRLEQVTVYPSGKVTVMKRGAHAAEPVMAGKE

SEQ ID NO: 16450 - protein, 479 aa, synthetic construct
MAKMKSAGQRAGVRSAAIYARISADVEGTGLGVARQLEDCRKLSADRGWPVGDEYVDNDVSAFSGKPRRQYARMLADLASGARDAVIVYNLDRLHRRPVELEEFVALCESVGVRDVATVTADIDLGNDDGLFMARIFAAFAAKESGRKSARIRRKMLQNAEQGLPHGSVRPFGYEDDKITLRTSEAAVVREMVDRYLAGQSLLSLTVWLNDSGVSPAVAKSWQTSAVRQILCSGRIAGLREHRGEVIGPAKWPAIITPAERDRILARIAARSVTKTRAARTYVLSGMLRCGRCGNRLYSQARHSNPDHRVRRYVCLKGPDHGGCGRLTVVAEPVEALLTDAVLTRLDSRDLAKVLAGKASPNHDVAALAAAVEADQTRLDELAGLYADGAISAREWIAARDPITSRIQQARRDIAEATDTSEVYELAGTGGALRGQWPDLDVERQRSIVKSILDHAVIAPGTPGSRSLDINRVQPHWRI

SEQ ID NO: 16451 - protein, 531 aa, synthetic construct
MKEIIKIDSTMRKTGFEKKTRVAAYARVSSDSDEQLLSLEVQKEHYENYIKSNPCWEYAGLYFDEGISGTKIDKRESLKQLLKDCQSGQIDRIITKSISRLARNTVDCLEIVRKLTGLGIYLYFEKENIDTEHMSSELMLSILSSIAQSESRSISENNTWAIQKRFENGTFVISCPAYGYKNENKKMIIVPEQARVVKEIFNMALSGMGGEAIARVLTDKKIPTKKGGSWTSSTVNAILNNKTYTGDVIFQKTFTDDNFNRHKNCGEKQQYVIENHHEAIISHETFNLVKEIIAWRRSENNIVCGSGKYNKLYAFSAKIRCGECGSKCKRRIIYQHNKAYGIWVCITHLEDIHACSQKSVMESYLKISFLQMLNKLKAGYVQMLTPLVESLRGVNNKDGLNKVIELEEKIAKLQEQEQVLSKLLAGGYIEMDSYYLESNQLKTEIDTCLKEKLQLSNSLNGNLTHLNEAQKLQRFVSVTEVFSEFKDEDFLDFVDGIVVKSRTRFLFILKCGLELEEEVKETWHASHMVTE

SEQ ID NO: 16452 - protein, 537 aa, synthetic construct
MKQQIYNTALYLRLSRDDELQGESSSITTQRSMLRLYAKEHHLNVIDEYIDDGWSGTNFDRPSFQRMIEDIEAGKINCVVTKDLSRLGRNYIMTGQYTELYFPSHNVRYIAIDDGVDSEKGESEIAPFKNIINEWVARDTSRKVKSAFKTKFAEGAHYGAYAPLGYKKHPDIKGKLLIDDETKWIIEKIFSLAYQGYGSAKITKQLRAEKVPTASWLNFTRYGTFAHIFEGKPESKRYEWTIAHVKAILKSEVYIGNSVHNMQSTVSFKSKKKVRKPESEWFRVENTHEPIIDKEVFYRVQEQIKSRRRQTKEKATPIFAGLVKCADCGWSMRFATNKANKTPYSYYACSYYGQFGKGNCSMHYIRYDVLYQAVLERLQYWAKAVQQDEEKVLNKIQKVGNAERIREKKKKASTLKKAENRQNEIDRLFAKMYEDRACEKITERNFVMLSSKYQKEQIELEQQITNLREELSKMEQDMIGAEKWIELIKEYSVPKELTAPLLNAMIEKILIHEATTNEENERIQEIEIYYRFIGKVD

SEQ ID NO: 16453 - protein, 588 aa, synthetic construct
MKKIEKIEAKKTAILERKKVCAYARVSMETDRLKHSLSAQISYYSKLIQNNPEWEFKGVYSDYGITGTSTVKRAGFMEMLEECEKGNIDLILTKSIKRFARNTVDLLKVVRHLKSKGIAVKFENENINSLSGDGELMLSILASFAQEESRSISENVKWGTRKRFEQGIPNGKFSIYGYRWENDHLVVIEEEAKIIRRIYDEYLSGKSRIQIEKQFNAEGIRTRAGYKWMDSNIKVILTNIHYTGNLLFQKEYVVDPISGKTRKNRGQLPQYFVENTHEAIIPMEMFKRVEAEMKRRREAGAIGNPAIATTEMTSKIRCVHCGRSFHKCRRKTVNRGSVFWQCATRKAAQGNPCHTGDLNDIALKELICKVLGIDEYDPDAFAQHIDHIDVIRKEKLIFHLADGNVVETQYPKLNRKEYFTDEIRANLSKQRRDKHRYHRKNSVTPFTGIIECAKCANSFNALTRVLKTGEKIAYLSCRTNRSECPHNSIQDVTLKALVCEVLKLDEFDEQVMDEQIKRIYIADSKATFKLKDGREIVKEYFERKRGVPWSKERREKQLPKMHEYWANEDNRKAASERFKKMWREKNGK

SEQ ID NO: 16454 - protein, 525 aa, synthetic construct
MANKKVTTIPATITKFAQKPINKVSKRKVAGYARVSTDSEEQQTSYEAQVDYYTNYIKSRDDWEFVEVYTDEGITATNTKKRDGFKRMVNDALAGKIDLIVTKSVSRFARNTVDSLSTIRKLKEHGTEVYFEKENIWTFDSKGELLITIMSSLAQEESRSISENCTWGQRKRFADGKVTVPFEHFLGYDRGEDGNLVVNKEQAVTVKKIYRLFLQGYSPFGIAKALTADGILTPGGKTKWAAQTVNAILRNEKYKGDALLQKSFTVDFLTKEKKKNEGEIPQYYVTGNHEAIIPPSTFDRVQKLLAQRKGGKNRISSVSIYSSKIKCGDCGSWYGSKTWHSTDKYRTRIWQCNHKFEEHCTTPHLKEDEIQTLFIKGVNMLVKDKQEIIAMHKEMVKTVFDTSSLENEQLKLEEELNIVADKVNNCINENARKLQDQDEYEKKYTSLVNRFNAVESRLKEVKAIIVDKQARRDEVEYFIEDLKKQDLLTVFDENVWLSMVDYLTVRPDGKVEFTFLDGSVMKIDE

SEQ ID NO: 16455 - protein, 518 aa, synthetic construct
MQKTVYCYARVSSRGQAKDGYGMPRQQTMLRDYVAAYDDSLHNRGYELGSVNWLYAEGISAYSGKNIEDGSVLKSFIDDVLERKIINAVLVIENLDRFSRAEPIKAANLFLNLITAGCDIHEVETETIHHSSSDLSIITGGLQRAHNESKRKARLSIKNWDERIKNAIDGKAVLTNRVPSWLEVKDNGYVIKEGEKEKYNLIFQMYADGFGPAAIRDVLKERNMLINDSEPTIAHLNKIIKDERLIGKFNSTGRKKLSGLVIYPVVVDLSLFHIVDQLRKQRNPVGKIHRKANNLFAGLCICMECGRYVQVNSVEPSGESYFRCGGSLVKIDRCQERGFKYKLFENALLQHIRNFDFSSLNANESEVQIRVNHLSIELLTHIKYRDEILQDIEKEDIPDPNDRRILKNLQKKIGEIESEISNLKRLNVNVSTFDELKKYSEELRDPLNVDLRLDFNIKVKRVIKSIIIKRYSDTIFLVVNYIAINEKQAIVINSKSGEVLYMGVQNDDLKKVEHLIRN

SEQ ID NO: 16456 - protein, 518 aa, synthetic construct
MTSARLRALVGARVSVLQGPQKVSHIAQIEAATNWAESQGYDVVGTIEDLGVSASVSPFDRPDLGPWLDTQREGDWDALVFSKLDRLFRSTRDCVKFAEWAEEHRKILVFSEDGLTLNYRNPDKGSIEQMMAELFVYLGSFFAQLELNRFKARAKDSHRVLRGMDRWASGVPPLGFRVVDHPSGKGKGLDTDPVGKAILEDMAAKLVDGWSFIRIAQDLNQRKIPTNLDKARMAKGKEPYSNPWNVGTVIESLTSERTQGLKMTKTGKKFTTVLDEDGEPIRMAPPTFDADTWRQIQEAAAKRQQNRRTPTETANPMLGVGFCGVCGASLAQQFSRKRKANGDQVEYRYYRCGRTPVNCKGVFMRADEADQALAEGFLFSHGAEPVTRRRFIAGEDHTEDLEKTNRTIESLREDRALGLFTTPEDEARYRQQMTALVAKRDRLAAEPRRAAQWVVEETGQTFAEVWEDSDQRQLLADAGVRFVLSSKTDWSIETLNMRPDHPVFLEPPDDVLGVGGTA

SEQ ID NO: 16457 - protein, 548 aa, synthetic construct
MQHDFQGKSVFVYARVSTTRQEKNDLSLPDQIASAERWIQENDATCVRVFSEAGSATDDERRAFREMIALAEADDHPVDIILVHSLSRLFRNALDFMQYRERLRRRKIRIVSITQNFGDDPASDMAVSMLAIFDEYHSAENSKHVRRTMIANAVNGFWNGQTPPLGFRTYVVPQPRGKDRKKLEHDPETVDLIRWIFEKYLHGNEDGPVGITKLAQLLNQRGERIRGKRFSVSNVHNILTNTAYCGYVMFNRRDSRTREERPENEWVPIPVPPIVSEDVFYAVKKQMADRDPRMGAAAQKTNTNLLTGRAVCGCNGDGCGGGLGTATGKSGQYRYYACAARVKQGAESCKGRRIPMSTLDEIVVDAVGEHLTDPDRLNLLLQTWLDRSQTAVAERQVELKRLRTKLTQLEGESARVIKLVRAGICSPEDPQIASELSNIRAQRASTEADLAVLERQLEAGDRRITPAIIAAFGQLLDKNLRGSDPKLRREYVQLLVDRVEVGNRQIRILGRNDMLERAVIASQAPKALVPKAERKWCTRRDSNPWPSD

SEQ ID NO: 16458 - protein, 520 aa, synthetic construct
MSRASEKQAVIYCRVSSTKQTTRGDGLASQETRCREYAKYRGHSVVKVFKDDMSGSVVGRPGMKDMLAYLRAHRKSQLVVIIDDISRLARGLEAHLRLRADIGSAGGILESPSIEFKEDSDSQLVEHLLASVSQHQRQKNGEQTLHRMHSRVLNGYWVFQAPWGYTYGRAPNGGKMLVRSEPLATIIQEAFHAFASGRLASIGEVKRFFESHPEFPRTRHNVVRHERVRQILTQPIFAGYIEVPRWKVSRRKGQHEALVDLETFERVQERLLGKPRAPARVDLNEDFPLRGFIACDDCGHALTANWSKGEFRSYPYYLCRQPGCVSKGKSIARDKVENAFVELLRSLTPARELFDLASAVFRDVWDGQRARSGERKTVLKRELADIEKKVTALVDRIVESESQTVAAALERRLEELENRKLILSENIAKCGAPIRDYDQTFRTAMVFLASPWNLWKSDRLEDKRATLKLTFSGNLRYSRQEGFRTPQTSLPFKVLGNLSTLGREMAHPERFERPTLRFVV

SEQ ID NO: 16459 - protein, 544 aa, synthetic construct
MSTWSPEGRRAAIYARFSTDMQNALSAEDQIRLCRTYAERQGWEVVAAYPDAAITGQDKHRPNLNAMLAAADRREFDIIIAESLDRIARDIEDTAHIYKRLEFARVALFTCADHRINELHIGFIGTMSALQLKDMRNKIRRGATGSVARGRVPGGRCYGYDVTPLVYPDGRVEYGHRQINEGEAKVVRRIFAEYVAGESPRAIAHRLNAEKIPSPRGGEWRASTINGSAARDYGILRNPIYAGVIRYGRVRMVRDPHSRKRLSRVDQKPDLVESEAPELRIIDDATWSQAQARKEDLATIPFQRQPRARHIFSGLVKCGCGNSYTVISKDRWGCTGHREKGTCDNPRRISTDRLEERVLHGLQERLLAPDVVSAVVKRYHDRRADMRRQLQSSRFMVEQRIEQLQAEIRNLVNAIAAGMDLGEVREGLDARKADLKAAQAALAEHEALPAIILHPQIVETYRRRIRMLGQAIAGGEKARKFLPVIRSLVEAIIVTDDPNQPDNAKVEVLGSLSSVLALVSGQPAEPRTMQVVAEEGLEPPTRGL

SEQ ID NO: 16460 - protein, 639 aa, synthetic construct
MKKAALYVRVSTLHQIDKDSLPFQRQELENYAKYALNIEEVEIFEDAGYSAKNTDRPKYQEMMKRIRSGEFTHLLVWKIDRISRNLKDFSEMYEELKDCKVTFVSKNEQFDTSTAMGEAMLKIILVFAELERKLTAERVFSIMLSRAEKGLWNGATVPFGYVWSEEEKFPVIDPDESKIIQYIFNSYESLRSTLKVAYRLHEEKIATKRNGQWTAKTVRDILRNPFYIGTYRYNMRESGGSRRLKNKEEWVVVDNNHPGIIEKEQFDRVNKLLSDNYRGLTDVQRADIHKHIFSKMLYCGKCNSLLTAGLDAARKDGYRPSRYTCVTSGGAKRCSNYVSDIIIGPFIFNYVSNLIRLQERITPKHSLRDMERALLRGNSFIDVVGVDNESLKETHFALTGNMSGQGQEYSLNAKAEIETPNIEIERLQREKTKFVRALKRLEDLYYFGEEEDAISQKEYIFKKRDLQERLEELDDEINLLKQKNDDKTSDVFIDYAQHFLITKEMQQARQVDYRELSEIVGREALSDFMQTIIDNIVVIDKRVQSITFKNGITHTFAYRSLLQSKSSAPTKKQYKNYEGPVLEYLKENGPASRSDLQKATNITRDGIFTLLSELIEREIIIKTGQSTATRYHYNEKQNN

SEQ ID NO: 16461 - protein, 511 aa, synthetic construct
MIAIYARVSTEEQAQHGASLAAQVAACRHHLGSVTEPVQEFVDGGESGADLDRPQLMALRAAVAAGQVSRIVILDPDRLSRKLVHQLVLTEEFERAGVTLEFVNFAWQDTPEGRLFYSLRGAIAEFEREKIRERARRGWIAKAEQGHLVAGMQRYGYQYDKETKTLTPDPVTAPVVQEIYRLAVEEHRSTGQIAQILADRHIPPPRGRVWWRDTVSKILRNPAYMGVAYVHRYDAPHSRQDTGSDEWIALDVPPLVDQATWLEARAVRQRYQKFWKGRQTFPMLLRRLAVCGLCGHALSTNMRTYRHSTYPYYFCPHRYPRKFGEAVEPACTLPWVSGRDLDEAVWSAVAQILGDPTQWPSHLTSARPDPAIPSPDQIARERRRIARARRQILHFVRQGLIEAADAEQELHALKQEEAHWTGLADAPAPPDPTETWAAMAARLRDTWGTDWQAVPFDVRRDVVVELLDHVTVTPSPDAGWTVAITFRAGGTTVSAPGDSQKGSHGSPIGDT

SEQ ID NO: 16462 - protein, 560 aa, synthetic construct
MTKLYSYIRFSSSRQADSSSYERQKRTAKEIADRYGLELVTSYQDLGVSAFKGANSKTGALSRFLDEIGKSVPVGSWLVVENLDRISRQSIIEAQELFLSIIRRGITIVTGMDGKVYSKESVNANPLDLLLSVMMFARANEESQTKRNRTNSSALLKIKAHQQNPQSPAVAIEEIGKNMWWTDTTSGYVLPHPVYFPILQKIVKMKQEGHSTGSVLDYLNEHHTPPAPTSNKQHRKWSIAMVSRLFKTKALIGVKEVNVDGVQYELKDYYPRVLSDSEYYFLKNNLIKKAWSFGHAQEKTIPLLSGIGLLKCAHCGSPMVKRKAANGKVEQYRYTCDGEGSGRTDCLYPNWGFRASSLEGAVLQLLADKVWIAEDKANPIPEIQVQIDEISRKIDNLINLSAMTGATKELANQITDLNTQREALHEEIRLFEREMYSVDSQGWEKLAQFDLSDVQNEERLQIRLKIKGALRSIECARIDRNKNLFTLVYLDGLRQRLVIENNRGIRKGQIFVDLKTINDRQILESAGMVLHDHIDILIDEKAFYDGLPKEEDGPLSKFGI

SEQ ID NO: 16463 - protein, 521 aa, synthetic construct
MKKVTKIEGAQNNITIKKKLRVAAYCRVSTGSDAQLESLEAQKTHYERYINSCEDWQFAGLYFDEGITGTKAEKRPELLRLISDCESKKIDFVITKSISRFSRNTTDCLALVRKLQSLDIPLFFEKENINTGSMESELFLAILSSMAEGESTSISENAKWSIKRRFQNGTFKLSYTPYGYDWDGENVVINPEQAKIVKRIFADVLSGKGTQAIADELNADGIASKKNSKWTATTIRAILANEKYTGDVIFQKTYTDENFNRHINYGEVDQYMAPDHHEAIISHEDFDAANALVAQRASEKGIEKGNGKYQQRYAFSGKIICGECGDTFKRRIHPCTTYKYVAWTCNTHLKDTTACSMKYIRDDEIKAAFVTMLNKLIYGHRLILAPYLKALENSSGDEAIQRIQHLELLLDQNGEQRETLTKLMAQGYIDQILYNQETNALLLQAETYRSDIEAITICMTGDSAKVTETNLLLHFVSHADMLTNYSEELFESYADHIEISDRNEIRFVMKCGLTFTERIGD

SEQ ID NO: 16464 - protein, 558 aa, synthetic construct
MTKLYSYIRFSSMRQSDGSSYERQIRMAKEIADRYNLELVNDYQDLGVSAFKGANSKTGALSRFLDEIGRSIPVGSWLFIENLDRLSRQDIISAQELFLSIIRRGITIVTGMDNKIYSIETVTANPMDLMFSILLFIRGNEESQTKRNRTNSSALLKIKAHQQNPQSPAVAIEEIGKNMWWTDTTSGRVLPHPVYFPVLQKIVQLRQEGHSAGVILDYLNEHHEPPAPTSNKKHGKWSRAMVSRLFTTKALIGVKTVNVDGVEYELRDYYPRVLSDSEFYFLRKNIVKKAWDYSHDKEKVIPLLSGIGVLRCVHCGATMVKQTAANGKREQYRYCCDGRKSGRTDCPYPNWGFRAVTLEGAVLQLLADKIWIAEDKTNPIPEIQVKIDDISRKIDNLINLSAMMGATKELANQITDLNSQREALHEEIRLFEREMYSVDSQGWDKLAQFDLSDVQNEERLKVRLKIKGALHEIECSRIDSKKNLFVLVYLDGLRQRLVIENNRGLKKGQIFVDLKTINDRQILESAGMVLHPCIEMIIDADWKAPEEIPGLLSEEFGI

SEQ ID NO: 16465 - protein, 523 aa, synthetic construct
MAKSVTTIPATLSRFTAAPINSTKKRRVAAYARVSTDNEEQLTSYEAQIDYYTNYINGRDDWEFVGVYPDEGITGTNTKKREQFRQMVADALDDKIDLIITKSVSRFARNTVDSLTTIRKLKEHNVEVYFEKENIWTFDSKGELLLTIMSSLAQEESRSISENCTWGQRKRFADGKVTVPFKRFLGYDMGPDHNLVVNPEQAKLVKRIYGMFLQGQSPFQIARTLTEEGIPSPGGKDHWNPSNIKSILTNEKYKGDALLQKSFTVDFLTKKKKTNEGEIPQYYVKDNHEAIIDPETFEMVQTLMTTRTKGRNRKSSVSIFSSKVKCGDCGSWYGPKVWHSNDAYRKVIWQCNHKFDGRKCTTPTLNEEQIKALFLKAANTIIGAKEQFIAIFERTLAPALATDELERELADLEAEINIAAELVEECIRENAHVALDQAEYQKRYDGLASRYDKAKDRHDEVTELIAERISRRKRIELYFRELRKREPLETFRDEDWLSMVDHMTVYSKDGIRVTFKDGTEIET

SEQ ID NO: 16466 - protein, 590 aa, synthetic construct
MKTVEKIERKLPVLKARKRVAAYARVSMESERMQHSLSAQVSYYSALIQKNPEWEYAGVFADYGISGTGTKKRDEFNHMLAECEAGNIDIILTKSIQRFARNTVDLLNTVRHLKELGIEVRFEKEKINSLSGDGELMLSILASFAQEESRSISENVKWGTIKRFKQGIPNGKFSIFGYEWQDDKLVIIPEEAEIIRWMYAEYMKGASRIEIGRALMDRGIYTRQGKPWVDSNVKVILTNITYTGNMLFQKEYCEDPITKHRRKNYGEMPQYFVEDTHEAIIPMDEWQAVQAEFKRRRDLGPFGNKSLKLSAFSTKITCGCCRKHYRHSGKRNTAGEVYYIWICQTKSQKGVSACPSKNIPEKMLQNTAAEVLGLDEFDEDVFRQQIEEVIVIGDDTLTFRFYDGHEVTTKWQSTAKTDWWTDERRKLWGERHKRKDTNPNRNTFYEFTGFIKCGCCGANYRCQSGKRKDGTPTRSWYCTGPRSECRNPAIRDETMKRLVTEILGLDEFDEAAMDAQIESATILDHMVTFHFRDGHIESRDFLDKRHGTSWTEERREKAKKSMKAAWTDERREAMSERIKKIRSEKKWPNP

SEQ ID NO: 16467 - protein, 557 aa, synthetic construct
MMIRKLSAGCAPRIAIYGRHSTDKQNPLSSSDQAAACIPLVQVLNGQVVATYLDSEISGYSRNRPGLKRLLASVAAGELDIVICESLDRLARDGEDIAWVGKKLAYDQVQLFTVAEGEIDQIKLAVAGLLGSMFLSGLQQKTLRGMEAAVLAGRAAGGRTYGYRTVSRDGPSGSVIRGLREIDEEEAALVRRIFEEFASGLSSIQIVRRLNAEGIPSPRGGEWSPSTVRGDPKKHTGILSNPLYRGEIVWKRREWRKNPNSDDRERRYRMREEADWVRVDAPDLRIISEPLWDAVCAQIEERSRPRATFSSPVASRRRKHPLSGLIRCASCGSKFTIAGKDYYRCPGNRERGTCHNSLSIRRGEIEEAALSCIENHLLDPKLIELFVAEVQRQTQLQNRSAGTNDVQNAARLKELEGQIATLANNMLVSSASPTLHKMLADLEDEKRLLETVKPTASPKVKILPHPVLVERFTAKVKNLRSALEDETIRLQAVEVIGALIQSVTIYPGEAPSGEISANVVDLASYAASLNDADWAVRKECSVMVVAGVGFEPTTFRL

SEQ ID NO: 16468 - protein, 507 aa, synthetic construct
MKRAISYIRFSSEKQSRGDSLRRQSKLVTDWLKARPEYHLDESLTFRDLGVSGFTGKHLKGGLGDFLTAIEKGLVKAGDTLLIESLDRLSRQDVDRASELLRNILRSGVDVVTLSDNEHYTKESLKDPLSLIKSILIMQRAHEESLRKSERIQAAWDAKKEAAKAGIKISKRCPAWLKLNNDRKSFSVIPEKVATVKRCFQLRLEGKSILEIVRTLNSEGHQTLNQYKAGKFSQTSVQDLLKNRSVIGYFTPKGCEEISNYYPSIIPETDFYKVQQLSYPRYGRKPASDKPLSVNLFKGVIRCSECGHALIITGFSDTRNGIYRCPLRNENRCSAKGLSRKQTDGTLLALLSRLDRFENGTTNAIDTLKLHREHISNNIEKLVQLSLEVEDLTAITSKLKQLKGELSQVDADIEKEAQRLKSIDTGSLSDCDLSTKAGRIEAQLIIRSAVKEVVLNTAKRRCRVTFHNGKVIDLSITENPAQDITEAEKSLTEIAEKGLLDVDAFQL

SEQ ID NO: 16469 - protein, 481 aa, synthetic construct
MIATNKVAIYVRVSTTNQVEEGYSIDEQKDKLSSYCDIKDWNVYKVYTDGGFSGSNTDRPALESLIKDAKKRKFDTVLVYKLDRLSRSQKDTLHLIEDVFIKNGIEFLSLQENFDTSTPFGKAMIGLLSVFAQLEREQIKERMQLGKLGRAKSGKSMMWAKTSYGYDYHKETGTVTINPAQALTIKFIFESYLRGRSITKLRDDLNEKYPKHVPWSYRAVRTILDNPVYCGFNQYKGEIYPGNHEPIISKEEYDKTQSELKIRQRTAAENVNPRPFQAKYILSGIAQCGYCGAPLKIMLGVKRKDGSRLKKYECHQRHPRTLRGVTTYNDNKKCDSGFYYKDKLEASVLKEISKLQDDADYLDKIFSGDNAETIDRESYKKQIEELSKKLSRLNDLYIDDRITLEELQSKSAEFISMRATLETELENDSALRKNKRKADMRKLLNAEKVFSMDYEKQKVLVRGLINKVQVTAEDIVIKWKI

SEQ ID NO: 16470 - protein, 663 aa, synthetic construct
MNKNRTRRAPGEDEAALYVRVSTRYQVDKDSLPFQRKKLKEYLKFLGITRFAIFEDDGYSAKNTDRPEYQKMMSGIRRGQFTHLIVWKVDRISRNLLDFAEMYEELKKHGVTFISLNEQFDTSTAIGEAMLKIILIFAELERKMTAERVMGIMLDRAENGLWNGGHIPIGYRLDEGDAFPVPDWNGEAELVKMIFDKYEETRSTTQIARMLYRDGIRGRRGGTWTSKVIHDMIRNPFYIGTYRYNVRETSRGTIKPESEWIVRKNNHTPIISEEQFARCNKIMDKNASRNTAEFRNCYTHTFAGLLRCGTCGGGFIVTKDRPRENGFRPSVYRCTKQSHTLDCDGKTISETILGPFVLNYVANMTRAQKNFDKITTLDQLERELLRGDDFLNIVGIERQGLNEMFAALSSGAAGGGRYFPEILEADGGGPGDGVEYEILKAEKEKAQRAADRLMELYLFDPESMTAEEMSARRKEIQKNIRDIQEKIDALDAPAGPDAADLSFIRKASAFLISQKIMSRKHIDYIDLALQIDNEILKDFFAQIIDHITVKDGRIQEITFANGLTHRFIYRNKFQQECPKCGGRIGLTLGCRVRSITYQGKMYRRIKVGDPGDPFAGKKNAICYDCAARFGRRHHFGCEAEICPICGKQYISCEHFPGNKKGGQ

SEQ ID NO: 16471 - protein, 560 aa, synthetic construct
MGKTSKGLVYSYLRFSDPKQSTGSSTDRQLAYAEKWASEHGLQLDSSLTLRDEGLSAYHQQHIKSGALGVFLRAVEDGRVPHGSVLIVEGLDRLSRAEPIQAQAQLAQIVNAGITVVTASDGKAYSRARLKENPMDLVYSLLVMIRAHEESDTKSKRVKASIRRLCEGWQNGTYRGRVRQGHDPEWIKETETGWEIDPERAAAVRRAVELYTQGHGGKGIVQRLDAEGLRLYSTTPVNVTTQVYRIIKMPQLAGIKPVSLDGEEYQLKGYYPAVLGADEWAELQRVAAQSGRRRVKGDLPHIITGLGITVCGYCGRPMSGQHLATKKRLPDGRIRDGYRRLLCASAAAYGGGCAVFGSTSVAPVERAIMSYCSDIVNLQALYGADRSQVPRAQVAAARQEVDQISAQLDKLTDAMLASADEGTPAVFARRARQLEADLAAAQARLQAAELDLAGAARTDISGADAAWRALAAGVEAQEIEPRLQARQLVADTFERIVVYARGVNPDPDALERDYKIDLVLIARGGVARLLTVDRQGNWIAGEQSSTAHEPEQPNEPATLT

SEQ ID NO: 16472 - protein, 517 aa, synthetic construct
MYRPTNLDVFIYLRKSRKDIEEEKKAAETGASYDTLQRHRDTLLAVVRKEEHNIIDIFEEVVSGESIAERPEIQKLLREVESGVADAVLVMDIDRLGRGDMLDQGILDRAFRYSGTKIITPTEVYDPESETWELVFGIKSLVAREELKTITKRMQRGRRASAAEGKSISKKPPYGYLRDENLKLYPDKETAWVVVKIFEMMRDGHGRQAIAAELDKLGVKPPDEKREFWSPSSITAIVKNEVYMGHIIWGKVKYVKQNGKYKRKKMPSERWHVKENAHEPLVSKELWEAANKAHTARWRPSTVESKVLSNPLAGLLKCEVCGYTMWYQPRKDRPNALIRCANPKCKGVQKGALLPLVEERILQSLAEFVDQFEVQEQMLEKREKQSVIPLRQKALEKKEKELRELNVQKNNLHDFLERGIYTIEVFLERQQNIVARIKQTQEEIEQLKQEIEKERLKEKNINEYVPAVKKVLEAYRKTDDIEKKNRLLKSVLEKATYLRKPEWTKKDQFIIQIYPKI

SEQ ID NO: 16473 - protein, 536 aa, synthetic construct
MLRQTNQQPITALYPRLSHEDELQGESNSISNQKRILETYAKQNGFSNLRWYTDDGYSGANFQRPGFQAMLADIEAGKVGTVIVKDMSRLGRNYLQVGMYTEMIFPQKGVRFIAINDGVDSAQGDNDFAPLRNIFNEWLVRDTSKKIRAVKRSKGMSGKPITSKPVYGYLMDEDENFIIDEEAAPVVKQIYNLCLAGNGPTKIARMLTEQQIPTPGTLEYRRTGHTHRYHPGYECKWATNTVVHILENREYTGCLVNFKTTTQSYKCSKIVYNDEDKQAIFENHHEPIIDTQTWERVQELRKQRKRPNRYDEVGLFSGILFCADCGSVMYQQRYQTDKRKQDCYICGNYKKRTHDCTAHFIRTDLLTAGVLSNLRKVTSYAAKHEARFMKLLIEQNEDGGKRRNAAKKKELEAAEKRIAELSAIFKRLYEDSVTGRISDERFTELSADYEAEQRELKERAAAIQAELSKAQEATVNAEKFMNVVRRHTSFEELTPTLLREFVEKIVVHECSYDENKTRRQDIEIYYSFVGKVDLPE

SEQ ID NO: 16474 - protein, 521 aa, synthetic construct
MNIHNVLLPGKKGAFYGRHSTEEQTIDTQLHWANELAKEFGCEIIKEFVDIGVSAVKKNMSKRKGLSELLTYLETADIDFVIIYDHTRLARNAMEHQRIRGIFNSKKIPVVMCSTRDLYNSGDLLGELLKDGYSKYEADAIRQRTEDNHYKKIKEGIYRGGKLPFGYKFSPDEYTFKVLPNEKNIVDDIFRKYQEGEGFQSIALSLEKKSFHGRDWTKDDVKLIITNPFYAGYLTAKRFHPNNHRQLTDKEEWIMGYCERITPFIRYEVWEYCYETYRSKRKGNVSPKNFKTPFFLRDILFCKNCKTPLKCKNQKNKYHGKPNGNSIYYCENKACSLRLEKNKVHEKFIEEEMSAVLIKYLSTQHKDIHEEILINLKQMVDKLSQQIKELEIMIDEFTLQIRRTEAELHSLDPNKPQELKNSFLRYRILLKEKINNTQKLINEKKLKISYIENVESDFLLMKGLLVDTILLEYNGEIDPRLRRLVLYLFERIEIGSDLVYDVTARINLENDNPVLLSGFIT

SEQ ID NO: 16475 - protein, 589 aa, synthetic construct
MTITAPTRTQEQATSASPDALTGKSPTDTDSERIGETTTLAVSYLRVSTKEQAERGGRDEGFSIPAQREANLRKARDLRAVVVEEFVDAGASAKSADRPELMRMIEYVKKNHVAYCIVHKIDRLARNRADDVAIHLALKEAGVILVSATENIDETPSGMLVHGIMSTIAEFYSRNLANEVSKGMTEKAITGGTNGKAPIGYLNVTKRDDLGREMRTVEIDPARAPLVRWAFEAYATGNYSTITLHDALIDRGLMSVPTPKRPSKPPVLSSIQKMLSNPYYKGTISFRGASYDGMHEPLVRTEVWYRVQAVLTAKQTSGEKTQAHDHYLKGTLYCGQCDSRLILTHAKSRRGIIYPYFICSGRHAKRTNCERKSMFVPDIEAAVEDYYRKIEIPEHIVIALRTLITEKFDRLHATAKQQRQAHTMKRNTLRNEREKLLQAHYAGAIPVDLLKTEQDRIARRLAWLDAQIEASSTEYEQAKAHLDDCLALAGDCHKLYMTLDDSLRRIANQAFFEKLWVKPDADTIDGDPGQPFNVLFNRDIHTLALDRTQPEGERRTQTGKVAGLNNELLVGPVGIEPTTHGLKVRCSTN

SEQ ID NO: 16476 - protein, 577 aa, synthetic construct
MSSSVASVIDTAPETRRTPIRRLASKEATMTLTMPIHDTDTSPLLTAVTYQRVSTKEQATKGGRDEGFSIPAQRQANARKAEDLGARIVAEFVDAGESARSADRPDLQRMLEYIATHQVTYCIVHKVDRLARNRLDDVEIHRRLVEAGVTLVSATENIDETPSGMLLHGIMSSIAEFYSKNLASEVSKGLNQKFETGGTPMRAPVGYLNVRKRDEQGREYRTVEIDAERAPLVRWVFEQYATGEHTVVSLLAEATARGLTTVPTPKRPSGPVGRSTFFSMLRNPYYIGIVRYKGAEQSGTHEPLVDVETWQQVQRLLDSRKIAAERRRTHDHYLKGSLFCGQCGSRMQLDYPANKQGVRYAYYVCSGRASKRKNCTRRAVPVGIAEQLVADCYRDISITEEQYAALAAQVETAFDERLASRSQELADLTENRKRLQNESDKLLAAHFADAIDLDTLKRHQDRIRAGLADIDRRLASEHDQHEGSRKHLSTALSLLVDCATLYARADDQGKRLANQALTNGIEISEDERATIKLAEPFAALAPTPASTDVRCSSTSEIVELRGIEPLTFSLRTKRSTN

SEQ ID NO: 16477 - protein, 613 aa, synthetic construct
MNYAHRQDEPGPGTPAVIYCRVSSKAQTTRGDGLGSQENRCREYAGYKGYAVQQVFVDDVTGKLAERPGMLSMLSWLRKHKREAPVVIIDDISRFARDMETHIKLRKLLGAAGGTLKSPTVEFGEDSDSILVENMLASVSQHQREKNSEQTKNRMRARTLNGYWVFHAPIGYRYERKSGHGNVLVRNEPFASILQEALEGYASGRFETQVEVKRFLERQPAYPKDLPNGEIRNQRIAEILTRPVYAGYIEVPSWGVSLRKGQHEGLISFETFDHIQTRLKGTAKAPARSDISADFPLRGFVLCDDCGKPLTACWSQGKKQKYPYYLCPTKGCESYRKSIKRDELEGEFEELLQQIEPSKGLYELVKAMFRDAWDMRLAQAADAAKAIKKSIQDTEKQIEQLLDRIVAAESDSVIRAYEKRIAKLEHEKALAVEKLGAGTKPRMTLEESFEHAMRFLSSPWTIWKNADLTLKKTVLRLAFSEPLPYRRNEGLRTPNLAFPFKALGEFCTGKSEMAHPQGFEPWASAFGGQRSIQLSYGCVGGSIAVMAKGRNRHSRSAEPVTPQRLVPSGVASLRSVALPCNCVPRSGSSWKNKRDSPPNPTRVLPVPTGRIPS

SEQ ID NO: 16478 - protein, 503 aa, synthetic construct
MNNRIDAIYARQSVDKKGSISIESQIEFCKYELKGGNCKEYTDKGYSGKNTDRPKFQELVRDIKRGLIAKVVVYKLDRISRSILDFANMMELFQQYNVEFVSSTEKFDTSTPMGRAMLNICIVFAQLERETIQKRVTDAYYSRSQRGFKMGGKAPYGFHTEPIKMDGINTKKLVVNPDEAANIRLMFEMYAQPTTSYGDITRYFAEQGILFNGKELIRPTLAQMLRNPVYVQADLDVYEFFKSQGTIIVNDAADFTGMNGCYLYQGRDVKPSKKNDLKDQMLVLAPHEGIVPSDIWLTCRKKLMNNMKIQSARKATHTWLAGKIKCGNCGYALMSINNPVGKQYLRCTKRLDNKSCAGCGKIITSELEAVVYQQMVKKLEKHKTLTGRKKAAKANPKIAALQVELLHVDSEIEKLVDSLTGANNVLLSYVNVKIAELDGRKQELLARIAELTVEAISPEQVSQISGYLDTWENVSFDDKRRVVDLMITTIAATSDSLNITWKI

SEQ ID NO: 16479 - protein, 433 aa, synthetic construct
MRVRIIEPVSWVQLKRKRLCAYARVSSGSEAQGESLENQTTYYQKLIAANPEYEYVDIFADYGTTGTKEARPEFQRMLALARAREIDLILTKSISRFARNTTLVLEAVRELKELGVEVVFEKDNISTFTGDGELMLTVLSSFAQEESKSASENLKWRYRRKFEQGELALNATRFLGYDKNKHGELVINPIQAKVVERIFADYVSGKGSFVIARELDAAGVRTVAGGKWHSGTVLNILKNEKYKGDAKLQKTYSKDHLSKKKCVNHGEVESFYIENNHPPIVSREIWDETQRLIILRAKAKGNVEETKNKYQNRYPLTGMLLCSKCGAPLRRRIWNSKYYCKKVVWQCSTYIKNGKNACQGTAIEDDVIGRMNIQTKTVVEEVMKNGKKHYRYTSQGEPDKPCGKPRATEKTCSRVLPGIDRSGRAVIKLRSPG

SEQ ID NO: 16480 - protein, 541 aa, synthetic construct
MRIAIYSRKSKFTGKGESIGNQVEMCRDYIATNYNGEEHSIQVFEDEGFSGKNLDRPQFKKMMEIENVIPFDLIVVYRLDRISRNVGDFASLIEKLNKKNTSFVCVKEHFDTGNSMGRAMMNIAAVFAQLERETIAERIKDNMYLLAKEGHWLGGTTPLGYKSIEVTNGKRTHFELIIDESQIDLVNIIFSKYKQLGSINGVETYLFVNGYKTQKNNYWHKSNVKRILTNPIYCIADIDSLNYFTELGCNVCFTLDDCNGKKGIYPYNRFSGQKREMQSYDRWIITISEHQGILAGKEWVAIQQQLKANSKDGFGGKANERRSTSNTSLLSGVLFCSCGAYMRPKKYPSGNTFYICENKMDKKITECNNSNINADELDKIILNELFSFDIKDGVVDSQIQNLKEQVANIDNDLQKQIGRLKKQIETNKNTVNKFMNIVALSIENDTPEQVVEVYNQKINELLNQNKITQKRIDELQDTNIVQVKMNDRLNSLTDAMAYLKENFDKLTIVEKRGFVKEIVDRIVWDGNNINIFIKGISELSE

SEQ ID NO: 16481 - protein, 434 aa, synthetic construct
MKRVVERVDDLIPAQPKALRVCAYARVSTGKDAMLHSLSAQVSYYSKMIQSHNGWMYCGVYSDEAVTGTKRERAGFQHMIEECRQGNIDLVITKSISRFARNTVTLLQTVRELKSLGIDVFFEEQHIHTMSADGELMMTILASYAQEESLSASENQKWRVRKAFENGEIINLRFLFGYDITPGGIQVNEKDAAIVREIFERFNGGESMSSICRDLDARGHKGVLGGTWCAERMRNTLSNEKYLGNALLQKQYRNNHIEKKLLPNRGELPMYYAEGTHEPIIDQATFDKAQERLRMLAQQAANRKKPTRSAFSGLIHCGLCGNTYKRVTYRKKHYWNCTTFQTKGKSECAAKRIPEETLEVLTCEVLGAVSFDPDMVRSKITAIRAEKSNMVVFCMDDGSEIVKRWTDRSRAESWTPEMKEKARQRALQARRKKK

SEQ ID NO: 16482 - protein, 488 aa, synthetic construct
MESYAVYVRVSTDRDEQVSSVENQIDICRNWLERNGFKWDEKRVYKDEGISGTLFVDRPSIQLLLQKAKTKEIDMVVFKSISRLARDLKDSLEIREVFLAHNVRIISVEEGYDSVKAGKNDMAFELWSLFSAQYSRTLSSSITAALSVKVRRGEHIGKVPYGYNRENQKLVINEEEAQVVQMMYKWYLEGWGYKKITNELNRLGIKSKTKKNWQMTSIQRILQSSIYKGTFILNQYTSVKVGGKKKQIRNPKEKWFVFPNHHPRIVEEEIWNQANRKKNKKNKTKITAWNEFRNLAKCAVCGSNMVIVQSHLKKKSGERTEWKYLKCSQYRRAGKHGCVNHVPIQYGDFRQFIINLLVEKGASVTLKLQSNVEKGQEKKIKKLQQLMSTNQQKKKALLDLYLEELINKEEFEKKRNDLEAEIIKADHELLLIQNGNYVQIDIQTIKQAFEQLQKQEQDLIHVFQTLIKKINIHQDGTVDITYTLENPL

SEQ ID NO: 16483 - protein, 525 aa, synthetic construct
MKTVRDVLEKGKKGAFYARVSSDRQTIDAQRHHVYEFIKNYECEIVKEYVDHGESAFKKKLIKRPKIMALLRDVEQKKYDFVITYADDRLARSEFEHAQVRLIMKGADTDVILTSTAEIYTERDIITQLIREGGNRYEVERISARTKDAYKQRTDYGEWMGGPVPFGYEQDEKTKKFSILKDEKEIVLKIYQLYQSGEGFADIAKKLNEQKEKTNTMVWRKERVKQILTNPIYAGYVTFGRLKSGSGNSIEDLSKWKMAQCKDIPPIMTQEEWFATFHLFEKKRNKELPPKQFKTGYVLRDLIYCKNCDHPLLPKNQETTGDNGKKYGMKKYMCSNKTCKIWFPTDELHTLVFDSVMKEVTDKVILKSQTELMYEIERGLEKDIKRIQKEIQRLKQQVNDSLVWIKDAEREIDVLYNRKKRLVEADPEIDPLLDVMLDYRVNLLHEIKESEELIAKKEAEVKRIKEVDSNQRILEKNVLQAFQIEFANIQTDVKKVRQFLVYLIDKIIIDQNGKTEYILKINLEQ

SEQ ID NO: 16484 - protein, 504 aa, synthetic construct
MEDFIYARQSVDKEDSISIESQIELCLREVGNNPHRVFRDKGYSGKNTERPDFQDMMAAVRAGGARRIIVYRLDRISRSVLDFANVISELQKYGVEFVSITERFDTSTPIGKAMLMIVMVFAQLERETIQQRVMDAYRSRSRKGFYMGGRVPYGFELENTVMEGIKTCMYKPIPEQIQVVQLIFSLYAMPQVSFADVVRYLSQNGIKNPNGKNFSRMRIRDIITNPVYAKADASIFEFFHGQGTEIINDISQFIGTNGTYLYTGNKAAKRKSISLDGHVLVLAPHAGCIDADTWIRCRRKCLNVRQIAKPVKAKNTWLAGKIKCIDCGHALSLKSYPRKRSADARYYICNSKYVSASCDGVGAIQASGIEDIVFDEMSRKLKEFNKLSYKEKHGDPIELTKLKIRAEEIEKEIATLIDKIVSASTATMEYINERIDALDEEKKTVKEKIAQMSAEMYDRQNIGVISDYMSKWNDISIDDKLTVVDTLIESIHVGHGKVKIAWKI

SEQ ID NO: 16485 - protein, 533 aa, synthetic construct
MRRAVIYARYSTDLQNDQSVEDQIRLCKAHAERLGLNVVQEYFDRAKSGASMFGRPGLSSLMQAAEMGAFEVLVSEAPDRISRDIADLAHIHKSLTFRGVEMNCVNGGRMDTVQIGMYGVIGQMQREEGAKKVKRGMVGVMRSGRNAGGKAYGYRPVLGKRGELEIVEDEAATVRRIFELYATGIAPRAIAATLNADGIPAPRGLRWNGSTINGNGQRGNGILRNPIYAGRLIWNRVHMVKDPSTGRRISRINPESEYEEIDAPHLRIVDQSLFDAVQARKEATGGPRPRDVPKSKRLLSGLLRCGCCGGGMALMGVDRSGPRIQCSTYRESRSCTNGARYYIERIERQVLDSLRMQFADTAIIDEYVKAYREERRRIEAEARRNRNTSEKALADAKAGITRIVDRIAKGLIEDEEAAALLLPLRQERERLERELAASESPSNVIELHPQAVKRFKENVEQLADIVATKTGTLDVGAASAFRQLVAAVIVHPREKGEPYTIQIKGYLSSLIDSTLSAKSLVAEEGFEPPTQGL

SEQ ID NO: 16486 - protein, 407 aa, synthetic construct
MKPEKKRVCAYARVSTMTEKQQDSLTNQQAYYSHLYQNKKDVDFIGVYYDQGISGKLAKRPGFQQMLEDCRAGRIDVIHTKSISRFARNTELLLAVSRELKTIQVDIFFEEQNLHTLSNEGEVMLTVLASYAEEELRNMSENQRWAFQNKFQRGELVINTKRFLGYDKDENGELIINPEEAKIVKRIYNLYLSGMGVHVIAKLFNEEKVSTVDGGKWYSSTITNILKNEKYKGDAILQKYYFAEIKAKQRLNQGQVQQYLITDNHEAIVSREDWEAVKKRLKQNRKAKLSIDYNRRYPLSGLLKCEHCGSTLKRQKYYKGKVVWVCSKYIREGKVACIGMRVPDSVVQDWSIHEPTVVKEENIGGKKYYSYSSKENDTSRAEATHSENPNGGLLPSIHRPRRTAIKL

SEQ ID NO: 16487 - protein, 435 aa, synthetic construct
MAAYCRVSTDQDEQLSSYENQVRYYKEYIQQNPLYELVDIYADEGISGTNTKKRTEFNRLIADCRKGKVDRIIVKSISRFSRNTLDCLKYVRELKELGIGVTFEKENIDSLDAKGEVLLTILSSLAQDESRSISENATWGIRKKFERGEIRVNTIKFVGYDKGENGNLVINEEQAKIVRRIFRDFLQGETPESIARTLKEEGVPGWNGKANWYPTTIQRMLQNEKYMGDALLQKTYTVDFLTKKRSENQGQVNQYYIEGNHEAIIDKEEWDLVQLEVERRNQFRQDNHINFYIIQCEQNPFTCKVFCKECGGLFGRKNWTTSRGKRPVWQCNNRYKVKGVQGCTNRHIDEETLQKAFLRALEILRENKEKLLDKWDNFREEQKLERYHAAKLKETLNSNQEEFNGRKMCQVLEKISLGEDGSISIKFLEGTEVNL

SEQ ID NO: 16488 - protein, 558 aa, synthetic construct
MTNAVIYARYSPGPNQTDQSIEGQIHECTRFCEDNDLRIVGTYIDRKQTGRNDNRADFQKMLRDSSRRGFSTVVVWKIDRFGRNREEIAKNKAVLRMNGVRVLSAKEHIPDGPEGIILESVLEGLAEYYSANLSQNIKRGMRESALKCQFNGSGLSTGYTVDADHKYRIDPDGAAVVRTIFEMYDSGKKIADIQRYLQQSNIKTMRGKEYTHYGISRILRNRVYIGEYHWHDIVVPGGVPQIIDNDLFDRVQKRLEANKHAPAARRGDVDFLLTSKLICGNCKSTMIGDCGTGKNGARWYYYTCRAKKTKSNKCRKKSVPKEALEREVTALTAAYVLRDDVIDYIANKVVEIQKSEHDDKSMLRYFESQLKDTNKAIANIMRAIEAGIITETTRSRLEELEDTKRDLETEIIKEKVARPTIEREQVIFFLEKFRGGNVDDKEYQRKIIDTFVNKVILYDDKITITYNYSTDSTKNAENTVESIESAASAAECKCSNKSSSSPPITRILLLRCSCYFFRRGSNRTVLRSRISSVRWTVGKSACVSAHGSAPSDPLRLHQ

SEQ ID NO: 16489 - protein, 509 aa, synthetic construct
MKKAIAYMRFSSVNQDKGDSLRRQKKLIDDWLKNNPQYTLDPTTYEDLGLSAYKGKHAREGAFSEFIDALENGLIIPGTVLLVESLDRLSREKVGEATERLKYILKCGIDVITLSDNTQYSEASLDDPYALIKAILIAQRANEESEIKSSRVKLSWKKKRDEAELNGRIMTKACPRWLRVSPDYSHFEVIESKVKVIKKIFSLRKENKSLTAITKYLNDRLIENMTGTPGEWSPSVIEKILGNKALIGICRPTYRGRAKGVNEIIDYYPKVLTDDEFYAVQEVRLSPFGFNSHSGNPYLINLLRTVMKCKCCGNTMIVTAVSKSGKGYYVCPMRRLHRCKSPSIKRELVDVNLIEEILFNFDKLQIESNQVSLQETLEKNSIDLQLQINSLVQALTIAPEVNVLAGKVRELDRKLKKIETTIKVLKNKAKKDKSRGSKELNLSLKEDREVCRRLAFKSFREVYIDTETKKCDIYFTNGLVFKNFPLNKRCRADSIISTLKYMDENTVYF

SEQ ID NO: 16490 - protein, 611 aa, synthetic construct
MRTVKAYIYSRVSSLQQVDAFGLDRQISTVLDFLENAKLPAELGYQLDPSNHEVLESDKGLSGYAGHNFTKGSLGRFKERVRSGEITEGCLLIESVDRFSRKQGYDAIDEFTFLIKRNIDIVEVETGQIYSYKLDHKLSALSTSIERAHQESKRKARISMKSWKHRKEASLANGVALNNNTPDWLSLSTDKLSYEIDYHKVETIKRIFQMYRDGYGVTHIVKVLNDEGNRYNGKGWNTVTVYNKLRDRRLNGFLVGKYKTIPKKINESTNETEKRILENLKIKKEAHDNAKRIYPVVVDDDLFLKVQSLMDRNVSNKKQRSTTTKQRNLFNGLTKCYECGSPMIVQSMSNGGQYLRCYRQRTKDEKCNSKMLRYSVTEKVLLEHIKGLDLDDIYGDKTQNYSVDTLKNLLQQTNNKLLELNEKIKSANDEEELFAIMEFKRKRNIEKEELIAKINSIENASEVVRLSYNYDIGEISNQDNTVLRRKINENISKVVASIKCLRTDSSYIGAYYSYDITYHKDILKHLLLTDNNGALLSEISIYQKNNERTYIVKEDKEMVFRVESNGDVWVLYASRKKSINDLLHYINVMMVGREPDTFSFVLNEDMIEWID

SEQ ID NO: 16491 - protein, 502 aa, synthetic construct
MTLAFSYARFSTKSQAIGTSLERQLNASRLFCSERGLTLSPKGYHDLGVSGFKQVKRPELEQMLHAIQSGDIPSGSYILIEAIDRLSRKGISHTQDVLKQILQYKVKVAFVGEDAKTLNGQVLDEHSLNDLSSVILVALAADLAHKESVRKSKLVKAAKLIIRKKATEGHKVRGHTMFWIDWSDKKQDFVLNDRVKDVQTIIQLRREGQGPRKIAKTMNELGIKGPRGNLWNHMSVTIVLKSPVLYGAYQTHQIIEGQKVPDVLLENHYPALLTKEEYIKIQADSSKANKGRPSKANPFSGVLRCECGQAMLFSKRTNLDKNGDPLEYEYHFCIGSTEGRCKNKKRIRDLVPLLASIMDKLVINQTPTKNLNAELIKATEQKIEKLNNMLVELDNPPMSVLKTIQKLEQELDILLNTHIEEPVQADVKTLSSISDAQEYNQHLKRLVKQIVVYQINGPRNLRIKVHKTDGHYQNFLVKDNKILFKSDTKALKELIDEFNKAR

SEQ ID NO: 16492 - protein, 629 aa, synthetic construct
MPQLYSYIRWSSDRQDKGTTRNRQVAAAKAYAEEAGLEMVEILEPGVSAFRGKNRAGKLGDFIDAVKSNAIPSDSWLYCENLDRLSRDQVDEALRLFLELIGLGLTIVTGMDRKVYNSKSIKQNPIDLMISILMFIRGNEESETKSNRTVGNVVALVERHKEGLPVNIKSVGRHPFWIDDSGSQYEAVKKHPVYWSIAREAIEMFLAGDGIYTVKRHLDDKYPNGLKGKEWDYQVLKKMRDNHALIGERTINVAGATYKLDNYYPWLCKDEAEFLTLAERKQQNNYKAKKDKTEEIKLLSGLQVLRCSKCGGTMHSFMNHGSARYICTNGVHLQKNCSGWSISAQLVEHCTMISLLIGYMDKSRKDGIDTTAIEEEISRKATLITDLESRISNMAKAIAIAPEVSELAVQLNAFDLERKKAVLEVDKLKERLHSLKGKGSLEVDITDFLMLIQWSVFTNMEDADRNKIRKIISSIIESIIIDKTDGCITIKIKCHNKDEWLVFGGVNRKPFWAFTIEYSTNDSKDIEGEDSSNFVSNPLFQKAVEQLDSIKQSYLNLFETANTMLGVVGYSDIRGASFWPNTGQYERANVEYEGITYSIAMNGRVSKAITTALEATGLSRKAFIERYKV

SEQ ID NO: 16493 - protein, 540 aa, synthetic construct
MKRAVIYARYSTDLQNDKSVEDQFSLCRDFAARLGADVVKQFSDRAKSGASMFGRPGLADMMTAAERGDFEILITESTDRVSRDIADLAHVHKVLKFRNIEMQCVNGGLMDTVQIGMYGIVGQMQREEGARKVKRGMTGVVRSGRNAGGKAYGYRPVTGRKGELEIVEHEANVVRRVFDMYVAGISPRSIASTLNHDAVPAPRGKQWNASTIHGNDRRGNGILRNPLYVGKLVWNRVQMVKDPSTGKRVSRANDEDKVETIDAPHLRIVDEELFQAARDRLAARGGSHAHHAPRNKRLLSGLLKCGACGGGLATVGSDRSGPRVMCSTYRESHSCSNYGKYYVEKIERDVVDRLQRIFADTSYIDAYVEEYRAESKRIATDRRSNRGAKESALENVQRQIERVIEQVSKGTIEEEDVLAILPGLKAKRAALRTELDAEHPPANVIEIKPRAVTKFKEDLESLAKILEDRAAEPTLAMGTAFREVVSGVIVHPRIPGEPYSYEIKGLLAGIAGPELSAVLLVAEEGFEPPTQGLPPHQTQA

SEQ ID NO: 16494 - protein, 519 aa, synthetic construct
MADFEHVIIYLRKSRSDDPATTVEEVLSRHENILQEYAVREWGARIPEGRIYREVVSGETIKDRPVMQHVMKILETGLVSGVLVVEPQRLSRGDLQDCGHIINSLRYTNTAVITPPKTYDLSDEYDRKFFEMELTRGNDYLEYTKKILNRGRIASVKAGNFIGNSAPYGYRKICVGTGKEKYYTLEIVPEEAEAVRLMFDLYVNKDYGFRSIAHALDMAGYKPRRSAEWSPAAISCMIANETYIGRVVWNRRKTIKKWENDTIVRTRPRQSEYISVPGKHPAIISDELFYAAKAKRNRTPRIKRYVQLLNPLAGLLYCGTCGHAMSRKRTVDKKYGSVSVSFLCNNQSNCHTKSVMYDAVIDRVKETLRQSIEDFEVKVNNKDETDIAYHRAMIANLKSELRKLKEKDMRQKDAYEDGIYTKEEFVVRNAKLAEQISIAQLKLDEAESSTTQLVDYQERLVRFRECLEALDDDTISAADKNTLLKSCIDKIMYYNDSPSLPGIGRYVDNPFRLEIFLKL

SEQ ID NO: 16495 - protein, 523 aa, synthetic construct
MEERSVTILPPRLNRKREEAKAEEKARLRVAAYCRVSTDSDEQATSYETQIEHYTLFIQNNPEWILAGIFADDGISGTNTKKRDEFNRMIEECKAGNIDMIITKSISRFARNTIDCLKYIRQLKALNIAVFFEKENINTMDSKGEVLLTIMASLAQQESESLSQNVKLGIQFRYQQGIVQVNHNRFLGYTKDADKHLVIVPEEAESVKRIYREYLEGANYKEISSGLEADGILTAAGNPRWHSSTLKKILTNEKYMGDALLQKTYTVDCLTKKRVANDGTVPQYYVNNDHDAIIPRELFTRVQEEMKRRVNIRQGMDGKKRVYSSKYALSSIVFCGHCNDVFRRTHWNNHGKKQIVWRCITRLDAPGVECSARTLSEVQLQNLVLEAINKVLGGKQRAIKVLETNISQVLGNAHTEELERIRKQIEKQQTLLVKMTAASEDYSKVVDKIYALQNEQKQAMADSVNYKAQAERTEEMIEYLKSQPKRVTAYDEQLVRKLIEKITVFDDHLNFLFKSGIQIEIKG

SEQ ID NO: 16496 - protein, 472 aa, synthetic construct
MQTKRKVAIYSRVSTLHQAEEGYSIGQQIEALTKYCQAMGWVIYDNYSDGGFSGGKLERPAMQKMIQDAESGKFDTVVVYKLDRLSRNVRDTLYLVKDVFNANNVDFVSLQENIDTKSAMGNLFITLLSAIAEFEREQIKERMQLGVKGRAKSGKTTSWHTPPYGYVYNQETQMLNIEPFAAETVKNIFDKLNSGWSIMEITTFLRKNHPDNWRPTKVTRILSNISYTGKVKYKGEIFDGLHEPIISDETYTRAQQMLRERSEKATNTRAFQGKYLLSRIVKCGYCGAPLQIDSYRPKKDGTRTRTYSCPNRFTGRAKATIYNNGKFCEKSRRHKADDIEKYVLTEISKLQLNPKIIESLYKGKPEANLDTYYNQLKKVNDKLSKLNDLYINSLIDLDNLKEKSDKILKEKNSIEEIIAKNKNKPNNKPAFEKVIKMEDISTMTYEEQKKIVRMLVSRVEVTPDEIRLIFKL

SEQ ID NO: 16497 - protein, 552 aa, synthetic construct
MKPKAYSYIRMSTDVQLKGDSLRRQTEESKHYCEENGLELIEDFKLQDIGVSAYHGKNVAQGALGKFLALCEQQLIPSESYLIVESLDRISRQNPQAATALFLQILQAGINIVTLTDRHVYRAGSGDFTDIIVSVVIMSRAYEESRTKSLRVSAAWENKRQNIHQKKLTQVAPIWLRLSLDRTVFEVVPERVAIVRWIFDQAAQGKGSLQISRGLNQQRVPTFATSKGWHESYVSKVLTNRAVLGEFQPHRYIDGKRTPYGDPIPGYYPAIVAREQFERIQAGRAVRRVRGAGRKGHNNINLFQGVATCGYCNSRMMIINKGSGPKGGVYIRCDRARRGADCSASSWPLEHFEGAFLWFVEELDLGAVIDGAAGDEARKALEGKAAVISSDIEMQKNLRERAFDLLRESTSAAAFVRTKIDEASMKIDALERELAAVREAMIVATSGQKRPLEEVRRMIKEIGRWQSAESDSRSRVADWIKRNVKELLIFSDGLDPFDLLDAKRRQFSVTLPSGEFRTIQTIGNDPTVAAYSVHANDDRWALAEDGTLSIYT

SEQ ID NO: 16498 - protein, 566 aa, synthetic construct
MKLLVSYVRWSTKAQDSGDSLRRQNDMIDAFYHKHSDQYFMSPTHRYVDKGKSGFHQKHKADGGEFKRMLDNVLSENIPAGSLIVMENFDRASRADIDSAIDDIRQILRKDVEILTLSDNERYDKSSLSDPIRLIKHILIAERAHQESVVKQERTIAVWKAKTAKAIETGLPMGRQTPGWIELSPDRQSFVVTEPKADIVRLIFKMRLAGHSMFAICKHLNENGIETINDRKARISKTFKPGGGGWSAVSVKCLLTSRSVLGYLPAKISTEDRNTILRDEIADYYPRIIDDQSFNAVQTLLAQGGKGRLAAGDHWLYVNIFRTMLRCKCGLTMSPSGIRKPVYQGTYRCNGMHEGRCEFGSVSRKKLDTELCTRLFSKLSQLYDSNTDQSKIIELQRRLQTVDKELQTLTETLLQLPTITQIRDALAEKQKEKESLQAEFRRETMRIQSVSDLDLSKLDLETSQGRTEAHVIIKKMVREIVIDGRAKLVDIRLHNGNVIRGFSLEGERDLTLTFEQATDDTPDHDFIAVMGQGLPKVLPAEEFKNGTQTDRGDWPEVEPDYPNTQE

SEQ ID NO: 16499 - protein, 575 aa, synthetic construct
MPKCYSYIRFSRPEQMRGDSLRRQTEAAEKWAAENGMVIDESLTDLGVSAYRGLNRLKGALGKFLELVAGGQVPKGSYLIIESLDRFSREDALDVISEFSKVLRSGVTIVTLLDGQVYSRERIKAEPMALFGSLMVMMRAHEESKTKGKRVGEAWEKKRKSASDAVLTARVPGWLQVVEDGGRRRIEFKPHGREVVRRIFADTVNGYGKLKVAQRLKEAGFETFEDGKTWHGSYVQKVLRNRATFGEMQPYKRDEEGRRVPAGPPVKGYYPAAVSEADFMRASAALALRDKSGGPREATGEANLLRNLARCTCGGRMRRENKGGKSSAWLVCAEASRGDCTNTRRWRLDLAEEKLLGCSARIDFRKLLAAEGEKMDAPPTVADYEAKAAEVSKRLAAIMAVVEMGVTAYAHRAVELQKESDEAEAELARVRRLGAIGAHQPTPEQRRRTLAELKARLAGATDAERADLRVRLAQEVRAAFKEVTFGPDRITATYKGMVPFGKVLQPRDVTVLIHTENPDEIAEFQSAALEMDEGNRRSGSVAEFARRQRARSGALENLEPKVDLLDEVFDPMPAV

SEQ ID NO: 16500 - protein, 678 aa, synthetic construct
MPEDILPREGSPLQLLIRNRIDRRTDLPGPTQQTPSVIAYYLRRSSADPLYFSIAAQLAHCNAHSHSLGGEFDQRRLLFVDRHRSGATTIGREGIAAMLEAARQGRFRILVVRSICRLTRNATDAARLHEQLTGLGVSIHVAGRGQVQQYEIMLLALSAQRERLRMMASLMDGKRRAAVGGEFFGSWPTYGYDRIDGPDWRKNVNQAAILERCFREVDAGLNLQDLAKLLNGECIPARNGGIWRPRHFFARGRGLLDRPILKGVFVWSLWGEKPITISRPDLAVISADLFDRVNERYGVPTRTQEPRTRAPFLLGLVRCACGDRMHLAEDGNAMHLHCRTAQIGGGCDRTKGFSTSIVARQVLHLFRHEILDPDSGPELEEGRRIEWQGLNATVQAERDRVSARIEQIAHELDALSQDEEEIDPYAAAACCELELEHHKLSERLTQLVVPPFGALDWERVDVDRARILRVMERLPSMSRSGEDLRVIELVRSIVSEIELDIREDGYQLRVWFGAPGAPKGFDAVDRLAGRWWMRWFPMPPKGPLRYPEVVLGHQRRAEAGMFRLDDGDWAAVEPVIRNAPRLGPRDRTMAEAILFIGMTGLPAKYFPERYEPCAPLLKHARPGAVWRGMYEVLHQRCSPVVAEAGPAARILHEDLNSRAHAHPVPPLEDPSPWCNPKA

SEQ ID NO: 16501 - protein, 502 aa, synthetic construct
MTLAFSYVRFSTKSQAVGTSLDRQLNASRLFCSERNLNLSPKGYHDLGVSGFKHVKRPELDQMLEAIRSGDIPSGSYILIEAIDRLSRKGISHTQDVLKQILLHKVKVAFVGEDAKTLAGQILDEHSLNDLSKVILVALAADLAHKESARKSKLVKSAKAIIRQKAIEGYKIRGHTMFWIDWSEKQKNFVLNDRVKDVELIINYRIKGNGPRKIAKMLNDDYISSPRGKQWNHMSVSAILKSPVLYGAYQTHQIFENKKIPDVLIENHYPAIIDYETFIQIQADSSRANKGRPSKSNPFSGLLRCQCGQAMNFSRKTNIGKNGKILEYEYHFCIGSTDGRCEHKKRIRDLVPLLVSLMDKLQIKEPTNKNVNIELIKSKQEKIEHLNKMLIELDTPPLSVLKTISALEKELQILLNTPIAPEITQKHVKNLGSITDAQEYNQHLKQLVRSIVIYQGNEKKSIRVKVNKSDGHSQNFLIKNGIVKFKSDTKALQELLNGFRKS

SEQ ID NO: 16502 - protein, 604 aa, synthetic construct
MKKVFVYHRVSSDQQLDGSGIARQAELLEGYLERTGICAEMDDPAPVVLSDQGVSAFKGLNISEGELGAWMEQVRNGMWDSSILVVESIDRFSRQNPFDVMGYINALMAHNVAIHDVMANIVISRSNSKDLPFVMMNAQRAYDESKYKSDRIRKGWAKKREQAFNKGTIVTNKRPQWIEVENDKYVLNHKAAVVKEIFALYQTGMGCPTIAKKLQTKEGEQYKFNRPWTGELVHKILTNRRVTGKIFISEIIRNHDDIENPVTQKKYDMDVYPVVINEEEFELVQELLKSRRPNAGRVTVKKDGQEEVLIKSNLFSGIARCTECGGPMYHNVVRAKRTPKKGDPKIEEYRYIRCLNERDGLCENKAMIYGTVERFVVEHLLGMDLNTVIKEQEFNPEIEVIRIQIDQVKDQITNYENGIERRKSAGKAVSFEMREELDDAKLELEQLLARQASLATVQVDLPVLQDVNVTELYNVNNVDIRTRYENELNKIVSNIRLKRNGNFYTIDIIYKQNELKRHVLFIENKKKEQKLISEVIIENVDGAKFYYTPSFVISVKDGEIRFQQTKEDLTIIDYSLLLNYVDAVDRCNAVGVWMRNNMSFLFTK

SEQ ID NO: 16503 - protein, 449 aa, synthetic construct
MKQVIGYLRQSTMKQQSLAAQKQAIEAIAEKHHIQHINFYSDKQSGRTDKRNGYKQITEMIQQGQCDVLCCYRLNRLHRNLKNALKLIKLCQTYHVHILSVHDGYFDMDQAFDRLKLNIFISLAELESDNIGEQVKNGLQEKAKQGRLITTHAPFGYDYHNGTFIINQNESPTVKAVFNYYIKGHGYKKIAQLLEEDDTFINRQPYQVRNIIMNPNYCGRVINQYGQFDNMFPSIVSANVYEQAQRLRSQKQTKQTPSDNQLKQKIKCPCCNATLTNMTVRKKNHILRYYVCPKNLNASRFVCDFKGINAQTLEDKVLKVCQDFYQDHHIYAKIKNAIDKRLKRQRNTETHHTLTQEKLIEKLAQGIIDAETFRKQMQSLHQQPQRITSISEHQIQHTIQNIIQKRFTLNILYPYIETIHIAKDKNLIGIYFKNEPLNIVNQTMQSSIA

SEQ ID NO: 16504 - protein, 503 aa, synthetic construct
MPQRNNGIAYSYVRFSSKRQELGDSLRRQTEMAEEYAIKNGLKLSSKNFQDLGISAFREGKRASLVDMLAAIEEGQITAGSTIIIEALDRLSRRGIDATLETVKEILRKDAQVVSLSDGLLLTKKSLNDLQSVIRIAVAADLAHKESERKALRLRETKGQQREAALSGKPINKILPFWLQRTEAGYAFSDKAGVARQIVQLKQEGKGSNMIAKTLNRLGIAGVRTAQWNHASITKMLKNPALYGAYQTGETTKDRELIKLELVEAYYPALINKEEWLLLQSDQSKSKRGRRSANNPYSGLLRCECGGALVKRQHTVKGKLYVYHGCLNAKDGRCTQNISIKGLDGALTTILGRLEFKKKQTLSQSIHQERQQLEARINDLNSKLQVLDDIPLSVIKSIGTMESRLKEITDQIAKDEREQRGIEAVKSEKLSSITDGLELNLLLKRVLKSITVIRSGNGWAVKVLHLSGHKQNFLMVDGEIKFLSDTIALQNLLAGFREATENN

SEQ ID NO: 16505 - protein, 547 aa, synthetic construct
MKQADGSSYERQKRTAKEIAAKYDLELVTSYQDFGVSAFKGANSRTGALSRFLDEIGRSVPVGSWLVVENLDRISRQSIIEAQELFLSIIRRGITIVTGMDGKVYSRESVNANPIDLLLSVMLFARANEESQTKRNRTNSSALIKIKAHQENPQNPAVAIEEVGRNMWWTDTTSGYVLPHPVYFPVIKKIIELRQNGYSIGRLLDYLNGKIAPPDFTANKINPEKWSRSMLNRMFTNRALIGIKEITIEGVTYELNNYYPRVMEDAEFYQLKKIIGLRSFAGKTESSPVITLLSGTGLLRCGHCGASMIKRSGSSKERLAHYRYSCDGVAHRRTNCDHPHWGFRGDQLDKAVLQLLADKIWIAEDKANPVPGMQAQIEDISRKIDNLIALSAMTGATKELADQITTLNHEREAIYSQIKVIEENMYSVDSQGWEKLAEFDLEDVYSEERLKVRLKIKEAVKSINCYKIDANYNHFVMEYIDGKTQRIVIEKSRCNRKGRIFVDVKTINDRQILESNGLVLHPCLDMLTDKNWKPEEEQPGLLQEFGI

SEQ ID NO: 16506 - protein, 506 aa, synthetic construct
MRTAITYLRYSSAIQGVEGADSTRRQNDLFKQWLKKNSDAQIVASFSDEGLSGYKGKHLTGQFGDMLARIESGEFPEGTILLVESIDRIGRLEHLETEALMNRILGNGIEIHTLQDGLIYTKDALADDLGISIIQRVKAYIAHQESKQKSFRVSQKWEQRAKLALAGEQRLTKMVPGWIDPETFKLNEHAETVRLIFKLLLDGESLHNIARHLQSNGIKSFSRRKDANGFSVHSVRTILRSETTIGTLPASQRNDRPAIPNYYEGVVDVSTFNKAQEILDKNRKGRTPASDNPLTINIFKGLFRCQCGASVHPTGTKNKYAGVYRCNNHLDGRCDVPQLKRKPFDRWMIDNFLGMIDVVSDGESERKIAALHYEVETVTARIKKATTLLLEMDDITELKAQVKELNQKRTELQTTIDTMKRKTSLTDKGLPQLKDIDLMTKAGRVECQLILSKHLKGLTLGKDSVTVTLQNDTEIIVPTDPLPLNDGTSIFEIAEKNLLEVDGFQL

SEQ ID NO: 16507 - protein, 507 aa, synthetic construct
MKRVISYIRFSSEKQAKGDSLRRQSKMVTDWLKAHPEYYLDQDLSFRDLGVSGFTGKHLKGGLGDFLTAIEKGLVKAGDTLLIESLDRLSRQAVDRASELLRNILRSGVDVVTLSDGEHYTKESLRDPLSLIKSILIMQRAHEESLRKSERIQAAWNRKKELISEGIKISKRCPAWLRLNDDRKSFSVIPDKVETVKRCFQLRLEGKSIWEIVRTLNAEGHRSMNQYKPGKFGQTSVQDLLKNRSVIGYFTPKGCEEIAGYYPAIIDETTFYKVQQLSHSRYGKRSVSDKPLSVNLFKGVIRCSECGHALIITGFSDTRNGIYRCPLRNENRCSAKGLSRKQTDGTLLTLLSRLDRFDSDTTNTIDMLRLHREHISSNIEKLVQLSLEIEDLSAITIKLKQLKGELSQVDADIEKETQRLKSIDVGCLSDCDLTTKAGRIEAQLIIKSAVKEVVLNTAKRRCKVTFHNSKSITLSITENPSDNVTEAIQSLSEVTERGLIDVDEVII

SEQ ID NO: 16508 - protein, 498 aa, synthetic construct
MKRVISYIRFSSERQAKGDSLRRQSKMVTDWLKAHPEYYLDQDLSFRDLGVSGFTGKHLKGGLGDFLTAIEKGLVKAGDTLLIESLDRLSRQDIDIASELLRRILRAGVDVVTLSDGEHYTKESLKDPLALIKSILIMQRAHEESLRKAERIQAAWDAKKEAAKAGIKVSKRCPAWLKLNDDRKSFSVIPEKVETVKRCFQLRLEGKSIWEIVRTLNDEGRQTLNQHKAGSFGQSSVQDLLKNRSVIGYFTPKGCEEIAGYYPAIIDETTFYKVQQLSYARYGRKPASDKPLSVNLFKGVIRCSECGHALIITGFSDTRSGIYRCPLRNENRCSAKGLSRKQTDGTLLALLSRLDRFDSDTTNIIDTLKLHREHISSNIEKLVQLSLEIEDLNAITNKLKQLKNELSQVDADIEKETQRLKSIDVGCLSDCDLTTKAGRIEAQLIIKSAVKEVVLNTAKRRCKVTFHNGKVIDLPITENPQKMLQRLYSRFLKSLRGV

SEQ ID NO: 16509 - protein, 507 aa, synthetic construct
MKRVISYIRFSSERQAKGDSLRRQSKMVNDWLKAHPEYYLDQDLSFRDLGVSGFTGKHLKGGLGDFLTAIEKGLVKAGDTLLIESLDRLSRQNVDRASELLRNILRSGVDVVTLSDGEHYTRESLKDPLSLIKSILIMQRSHEESLRKSERIQAAWNRKKELISEGIKISKRCPAWLKLNDDRKSFSVIPEKVETVRRCFQLRLEGKSIWEIVRTMNAEGHQTLNQYKAGSFGQTSVQDLLKNRSVIGYFTPKGCEEISGYYPAIIDETTFYKVQQLSYARYGRKPASAKPLSVNLFKGVIRCSECGHALIITGFSDTRSGIYRCPLRNENRCNAKGLSRKQTDSTLLALLSRLDRFDSDMTNTIDTLKLHREHISSNIEKLVQLSLEIEDLSAITSKLKQLKNELSQVDADIEKETQRLKSIDVGCLSDCDLTTKAGRVEAQLIIKSAVKEVVLNTAKRRCKVTFHNGKSITLPITENPSEDVTEAIQSLSEVTERGLIDVDEVIV

SEQ ID NO: 16510 - protein, 553 aa, synthetic construct
MLCYSYVRFSTPDQAKGDSYRRQMEFASNYCKLHNLTLVEDLSFKDLGVSAYKGNNLKNGALGKFLELVVSGQIPSGSTLVIESFDRLSRQTAIKAQAVFFEIISAGITIVTAMDNRSYNLQSVADNPFDLMYSLMIMIRANEESETKSKRVKEAIKSKIDNKKIIPSKLPYWIKHNKNEDILELIPERAQIISYIIERYLSGFGINKLTRHLNETIPPFAGKSWYPLYLQKLLRSESLYGERQYNMNDTLYIMDNYYPAIIDKSKFAVIQENLDSRAPTRGGKIPSAITGIRKAYCGYCQGVLVSQSTKRNGKIVDGLRRARCGTNNNAGSCITSSFRISIVESAIAEYCSQHFDLSLLVPESNNSKLDLAKYRLELKQLDTKIANYVKFISDGNISPAIISALDEAEKNKKNLQQKIKKSELNTLTNSNNEITAKWKKIKTNLSVYDEENTLKLRELIRSSIKRILVFQYGPWANTGPIKTPSGKIIQPYKGNFSIQITFNNGIRKTLELGENVKDQEVDTINRTITENGNTYTPDEYILMIQKTLTKQST

SEQ ID NO: 16511 - protein, 506 aa, synthetic construct
MRSVITYLRYSSAIQGAEGADSTRRQNDLFKQWLKKNSDAQVVASFSDEGLSGYKGKHLTGQFGDMLARIESGEFPECTILLVESIDRIGRLEHLETEALMNRILGNGLEIHTLQDGLIYTKDALADDLGISIIQRVKAYIAHQESKQKSFRVSQKWEQRAKLALAGKQRLTKMVPGWIDPDTFKLNEHAETVRLIFKLLLSGESLHNIARHLQANNISSFSRRKDANGFSVHSVRTILRSVTTIGTLPASQRNDRPAIPNYYEAAIDAATFNKAQEILDKNRKGRTPASDNPLTINIFKGLFRCQCGASVHPTGTKNKYAGVYRCNNHLDGRCDVPPLKRKPFDRWMIDNFLGMIDVGNDGESERKIAALQHEVEIVTSRIKKATALLLEMDDITELKTQVKELNQKRTALQTTIDNMRRKTSLTDKELPQLKDIDLTTKAGRVECQLILSKHLKGLTLGKDSVIVTLQNDTEITIPTNPLPLNDGTSIFEIAEKELLEIDAYQL

SEQ ID NO: 16512 - protein, 508 aa, synthetic construct
MKKAIAYMRFSSPGQMSGDSLNRQRRLIAEWLKVNSDYYLDTITYEDLGLSAFKGKHAQSGAFSEFLDAIEHGYILPGTTLLVESLDRLSREKVGEAIERLKLILNHGIDVITLCDNTVYNIDSLNEPYSLIKAILIAQRANEESEIKSSRVKLSWKKKRQDALESGTIMTASCPRWLSLDDKRTAFVPDPDRVKTIEIIFKLRMERRSLNAIAKYLNDHAVKNFSGKESAWGPSVIEKLLANKALIGICVPSYRARGKGISEIAGYYPRVISDDLFYAVQEIRLAPFGISNSSKNPMLINLLRTVMKCEACGNTMIVHEVSGSLHGYYVCPMRRLHRCDRPSIKRDLVDYNIINELLFNCSKIQPVENKKDANETLELKIIELQMKINNLIVALSVAPEVTAIAEKIRLLDKELRRASVSLKTLKSKGVNSFSDFYAIDLTSKNGRELCRTLAYKTFEKIIINTDNKTCDIYFMNGIVFKHYPLMKVISAQQAISALKYMVDGEIYF

SEQ ID NO: 16513 - protein, 507 aa, synthetic construct
MKRVISYIRFSSERQAKGDSLRRQSKMVTDWLKAHPEYYLDQDLSFRDLGVSGFTGKHLKGGLGDFLTAIEKGLVKAGDTLLIESLDRLSRQDIDIASELLRRILRAGVDVVTLSDGEHYTKESLKDPLALIKSILIMQRAHEESLRKAERIQAAWDAKKEAAKAGIKVSKRCPAWLKLNDDRKSFSVIPEKVETVKRCFQLRLEGKSIWEIVRTLNAEGHRSMNQYKPGKFGQTSVQDLLKNRSVIGYFTPKGCEEISGYYPAIIDETTFYKVQQLSHSRYGKRSVSDKPLSVNLFKGVIRCSECGHALIITGFSDTRNGIYRCPLRNENRCNAKGLSRKQTDGTLLALLSRLDRFDSDMTNVIDTLKLHREHISSNIEKLVQLSLEIEDLNAITNKLKQLKNELSQVDADIEKETQRLKSIDVGCLSDCDLTTKAGRIEAQLIIKSAVKEVVLNTAKRRCKVTFHNGKVIDLPITENPSEDVTEAIQSLSEVTERGLIDVDEVII

SEQ ID NO: 16514 - protein, 507 aa, synthetic construct
MKRVISYIRFSSERQAKGDSLRRQSKMVNDWLKAHPEYYLDQDLSFRDLGVSGFTGKHLKGGLGDFLTAIEKGLVKAGDTLLIESLDRLSRQDVDQASELLRNILRSGVDVVTLSDGEHYTKESLRDPLSLIKSILIMQRAHEESLRKAERIQAAWDAKKEAAKAGIKVSKRCPAWLKLNDDRKSFSVIPEKVATVKRCFQLRLEGKSIWEIVRTLNDEGHQTLNQYKPGKFGQTSVQDLLKNRSVIGYFTPKGREEIAGYFPPIIPETDFYKVQQLSYSRYGRKPASDKPLSVNLFKGVIRCSECGHALIITGFSDTRNGIYRCPLRNENRCNAKGLSRKQTDGTLLALLSRLDRFDSDTTNTIDTLKLHREHLSSNIEKLVQLSLEIEDLNAITNKLKQLKNELSQVDADIEKETQRLKSIDVGCLSDCDLTTKSGRIEAQLIIKSAVKEVVLNTAKRRCKVTFHNGKVIDLPITENPSEDVTEAIQSLSEVTERGLIDVDEVII

SEQ ID NO: 16515 - protein, 506 aa, synthetic construct
MRSVITYLRFSSATQGAEGADSTRRQNDLFKQWLKKNSDAQVVASFSDEGLSGYKGKHLTGQFGDMLARIEAGEFPAGTLLLVEAIDRIGRLEHLETEALMNRIIAHGIEIHTLQDGLIYTRDALSDDLGISIIQRVKSYIAHQESKQKSFRVSQKWEQRAKLALAGEQRLTKMVPGWIDPDTFKCNEHAETVRLIFKLLLDGESLHNIARHLQANNISSFSRRKDANGFSVHSVRTILRSETTRGTLPASQRNDRPAIPNYYEAAIDAATFNKAQEILDKNRKGRTPASDNPLTINIFKGLFRCQCGASVHPTGTKNKYAGVYRCNHLLDGRCDVPPLKRKPFDRWMIDNFLGMIDVGNDGEAEGKIAALQHEVEIVTARIKKATALLLEMDDITELKTQVKGLNQKRTELQTTIDNMRRKASLTDKELPQLKDIDLTTKAGRVECQLILSKHLKGLTLGKDSVIVTLQNDTEITIPTNPLPLNDGSPIFEIADKELLDIDAYQL

SEQ ID NO: 16516 - protein, 598 aa, synthetic construct
MNKIIPYGYLRVSSLEQVRTGGGLDTQDEEVRRYITQNSEKFDIDRMVVMSDAGMSAYTGSNIKEGELGRFLADVNAGLIPTGSALICYSVDRLSRQNPWVGTHLISTLIGAGIEIHSVAENQILRSDDPVGAIMSTIYLMRANNESVIKSERAKKGYEKRLNESITNKKVLTRQMPRWLFDCDGKYAIDPNMQNVINFTFDSYIAGQSTGFIAKELNNRGLMYGNTSWRGSYVAKLIRDERLIGKHIRYSKQIKGVKRVVIETIPNFYPVVVDVEKFFLANNMLTSVAKNIRGRTRVTYGDDSILRNLFNGVIKCGVCGGDTSVVQNTRKKIVNGEATYIPYKTFLRCRTRYELKNCVQSDIRYEVIERAILNHLMGLDISALLSVPVDNKIESYRTELELCKAEEVELHTLIEQREREGKRVRPRTIKAYEDVSDRIDELNKLIESYVEDTFVPDFNVDLNSIADVSNVSDRSLIKKGIATIADSICYKRISDFILVEIKYRNLSVKHALVIDNKQSKVVVNFSIEYHENSHDYTCNGFILKYVKSPEEFHLMGVNIEDYAHMMNFVDFISDNEAKKIKEYLVSNLSRVLISNVPE

SEQ ID NO: 16517 - protein, 509 aa, synthetic construct
MRRAISYIRFSSERQLKGDSVRRQSKLVTDWHDKNPEFYLDSSLSFKDLGKSAFSGKHLKGGLGDFLTAIEKGLVKAGDTLLIESLDRLSRQDIDIASELLRRILRAGVDVVTLSDGEHYTRESLKDPLALIKSILIMQRAHEESLRKSERVQAAWNRKKELISEGIKVSRRCPAWLKLNDDRRTFTIIPDKVEVVKRAFDLRLQGLSFWAITRTLNDEGHLSLNQYTPKQKGWSDTAVKKLLRNRAVIGCFTPAGREEVQGYYPAIISESLFYRVQQLNTGQYGRASVSSNPLSVNLFRGIIKCSECGATIVLGGYALKRFGMYRCPNRSANRCSAKAISRKQTDATILYMLALCDRFETENTDIIDSLKLQREDLQRKISKMAELAIELDDMTIITEKLRDMKNALSKLNHDIEEETKRIKAITTGSLKDIDRTTKEGMIETQLLIKGVLKEIVIDAAKRRCKVTFHNGRIIDLSISENPSEDVTEAIQSLSEVTERGLIDVDEVII

SEQ ID NO: 16518 - protein, 547 aa, synthetic construct
MKLLATYIRWSTREQDSGDSLRRQTNLIDAFYAKHKDDYYLLPAHRYVDKGKSGFHQQHKAQGSDFRRMFENVMSGAIPEGSLIVVENFDRFSRADIDTAIDDVRQILRKGVSILTLGDGELYDKSALTDPVKLIKHIIIAERAHQESLVKQKRIAQVWNHKTQLARELKKPMGKQAPGWLELSDDGSHYIVDEDKASLVNIIYDKRLSGMSMFAICKWLNEQGYPTINQRKVRISKTKKPDGNWSALSVKHILTSRSVLGYLPAKISSEDRKTVLREEIEGFYPQIVTDSKFYAVQQLLEETGKGKTSSGEHWLYVNILKGLIRCKCGLVMTPTGIRKPVYQGTYRCNGNKESRCSYGTVSRKLLDTQLCSRLFSKLSQLHDEATDTAKLDELQRRLNTVDSELEKLTETLIQLPNITQIQEALRVKQEEKDELIVQLSREKARVKSVSSLDLSGLDMESVEGRTEAQIIIKRLVKEIVVSGNEKLVDIYLHNGNMIRGFPLDGKDDHTLTLEEATDEMQSLDDMLIFGEPVTRIYPAGDMEEVDA

SEQ ID NO: 16519 - protein, 596 aa, synthetic construct
MKKNNVEIIKADSLVRRRGDNFERESKRVAAYCRVSSDSEDQKNSYESQVRHYKDYISQRSDWELAGIYADEGISGTQVGKRQDFQRLINDCVNGEIDYIVTKAIARFARNTLDTLKYVRMLKDMQIGVYFEEENIDTLTMDGELLLTILSSVAQQEVENTSAHVKKGLKMKMQRGELIGFQGCLGYDYDVETKQLSINKKEAKIVRYIFERYLEGIGGKVIARELDELGYKSPRGLDHWNDTTVLGIIKNEKYKGDILMGKTFTVDPISKRRLSNFGEEDKYYIKDNHEPIISKEDFEKAQEIRLRRAGNKKTAANVNGKRERYSKMYAFSSMLECGFCGSILSRRSWHCRSDYRKVVWHCVTSIKKGKKFCKHSKGLEELAIEGAFMEAYRKLYHSNENLMTDLLETIESELNDNSLNKELKRITNKLRTLLKKEENLVNLRLEGKISDTIYNEKYNEISSEKEFLAEEKVNIETTLKSEIDVKKRLTEFKHLLSSQKMLTEFDRAVFESIVEKIIVGGVNSDGEIDPAMLTIIFKTGETQNKDGKQFKSKRKNAKLETDKLCPQNSDEDKKLYSQGTDYTRRDGSTFVQTRCR

SEQ ID NO: 16520 - protein, 481 aa, synthetic construct
MKTMNKVAIYVRVSTTNQVEEGYSIDEQKDKLSSYCDIKDWNVYKVYTDGGFSGSNTDRPALESLIKDAKKRKFDTVLVYKLDRLSRSQKDTLHLIEDVFIKNGIEFLSLQENFDTSTPFGKAMIGLLSVFAQLEREQIKERMQLGKLGRAKSGKSMMWAKTSYGYDYHRDTGTITINPAQALAIKFIFESYLRGRSITKLRDDLNEKYPKHVPWSYRAVRTILDNPVYCGFNQYKGEIYPGNHEPIISKEEYDKTQSELKIRQRTAAENVNPRPFQAKYILSGIAQCGYCGAPLKIMLGVKRKDGSRLKKYECHQRHPRTLRGVTTYNDNKKCDSGFYYKDKLEASVLKEISKLQDNADYLDKIFSGDNDETIDRESYKKQIEELSKKLSRLNDLYIDDRITLEELQSKSAEFISMRATLETELENDPALRKNKRKADMRKLLNAEKVFSMDYEGQKVLVRGLINKVQVTAEDIVIKWKI

SEQ ID NO: 16521 - protein, 668 aa, synthetic construct
MKKEYNTNIVGRLDRQEENMSIQANRKTALYCRLSRDDELQGESNSITNQKKILSQFAKQSGFFQCEFFIDDGYSGTNFDRPEFQNMITRVANGEIGTVIVKDLSRFGRNHLHVGIYTTEFFPKHNVRFIAINDNVDTFTTDMETDISIPIKNIINEIYAVDTSRKIKAVYRAKGLEGKHTGSHAIYGYKKDPENKDKWIIDEEAAKVVKRIYSLVVSGLGPYQIADLLYKEKVYSPSYYMAMNGYGNRINKEFDTPYRWWGTSISCIVRREEYLGHTVNFKTIKPSFKDKRRYTNKKENWAIFENTHEAIVDKETWDVANSLLNTTRRQSREGTVNPLTGKLFCGDCGEKLYNSRGINYKDTGHYKKDVRYDNYICSTYQKHRNECSAHYIRTKVVRELILEALKDISKYIENNEEEFKNIVISARLEEREKSQKENIKKLKADKNRLAVIDRLFVKLYEDNIGGRINDETFNKIAVQYTEEQKTLNSEILELEEVTEKLQSVSDNTEQFIKTIKSFTDFSILTTSMINQLIDKIVIYQKQKLKRYKFTQRIDIYFNFIGRFEIEKDDETKEDTYIEKTEDKKYIHKDSRFLPITEYLKGQDREIELDFSKVEELIGRKLCKSARKYPSYWYASEDRPMGNSIYNAGYDIVKVDVKKEIIRLINYDK

SEQ ID NO: 16522 - protein, 600 aa, synthetic construct
MKKEVKVIKGDTTLKRTASGCVERSIKRVAAYCRVSTDTEDQINSYNSQVEHYTEFIQKNNEWTLAGIYADEAITGTQVDRRIDFQRLINDCMNGDIDMIITKSISRFARNTLDTLKYVRKLKEFNVAVFFEEENINTLTMDGELLLTILSSVAQQEVENISANVKKGLRMKMERGEMVGFQGCLGYDYDPETKSISINEKEAEIVRYIFRRYIEGVGGMVISRELEEQGYLSPRGNKRWTETTVLGIIKNEKYKGDLMMGKTYTVDPISKRRLDNFGEQDKFYIENHHEPIISEEDFEKAQGIRLRRSKNRNTVANNGGKREKYSRKYAFSSMLECGFCGHNLSRRNWHSSSEYTKVIWQCVNATKNGKKYCPHSKGIEEEAIEKAFMESYRQVCHNNVEITNEFLKTVEEELKDNSLAKDLKKITNQLDKILKKEKDLVELRLNESISMDIYQDKYNEIAISKEKLLAEKRTLEVTLTDEKALKKRLEGFKKLLESNKYLEEFDRAVFESIVDKIIIGGTNDEGEIDPAMITIIYKTGKKDSQDGRLFKSRRKNAKEVNEKADSKLYPQSSDEVNNLCSYPMDNTRRDGSTFVQTRCL

SEQ ID NO: 16523 - protein, 452 aa, synthetic construct
MKAAIYIRVSTQEQVENYSIQAQTEKLTALCRSKDWDVYDTFIDGGYSGSNMNRPALNEMLSKLHEIDAVVVYRLDRLSRSQRDTITLIEEYFLKNNVEFVSLSETLDTSSPFGRAMIGILSVFAQLERETIRDRMVMGKIKRIEAGLPLTTAKGRTFGYDVIDTKLYINEEEAKQLRLIYDIFEEEQSITFLQKRLKKLGFKVKSYSSYNNWLTNDLYCGYVSYADKVHTNGVHEPIISEEQFYRVQEIFSRMGKNPNMNRDSASLLNNLVVCGKCGLGYVHRRKDTVSRGKKYHYRYYSCKTYKHTHELEKCGNKIWRADKLEELIIDRVNNYSFASRNVDKEDELDSLNEKLKTEHAKKKRLFDLYISGSYEVSELDGMMADIDAQINYYEAQIEANEELKKNKKIQENLADLATVDFDSLEFREKQLYLKSLINKIYIDGEQVTIEWL

SEQ ID NO: 16524 - protein, 452 aa, synthetic construct
MKAAIYIRVSTQEQIENYSIQAQTEKLTALCRSKDWDVYDIFIDGGYSGSNMNRPALNEMLSKLHEIDAVVVYRLDRLSRSQRDTITLIEEYFLKNNVEFVSLSETLDTSSPFGRAMIGILSVFAQLERETIRDRMVMGKIKRIEAGLPLTTAKGRTFGYDVIDTKLYINEEEAKQLQMIYDIFEEEKSITTLQKRLKKLGFKVKSYSSYNNWLTNDLYCGYVSYADKVHTKGVHEPIISEEQFYRVQEIFSRMGKNPNMNRDSASLLNNLVVCGKCGLGYVHRRKDTVSRGKKYHYRYYSCKTYKHTHELEKCGNKIWRADKLEELIIDRVNNYSFASRNVDKEDELDSLNEKLKTEHAKKKRLFDLYISGSYEVSELDGMMADIDARINYYEAQIEANEELKKNKKIQENLADLATVDFDSLEFREKQLYLKSLINKIYIDGEQVTIEWL

SEQ ID NO: 16525 - protein, 452 aa, synthetic construct
MKAAIYIRVSTQEQVENYSIQAQTEKLTALCRSKDWDVYDIFIDGGYSGSNMNRPALNEMLSKLHEIDAVVVYRLDRLSRSQRDTITLIEEYFLKNNVEFVSLSETLDTSSPFGRAMIGILSVFAQLERETIRDRMVMGKIKRIEAGLPLTTAKGRTFGYDVIDTKLYINEEEAKQLQLIYDIFEEEQSITFLQKRLKKLGFKVRTYNRYNNWLTNDLYCGYVSYKDKVHVKGIHEPIISEEQFYRVQEIFARMGKNPNMNRDSASLLNNLVVCGKCGLGFVHRRKDTVSRGKKYHYRYYSCKTYKHTHELEKCGNKIWRADKLEELIIDRVNNYSFASRNVDKEDELDSLSEKLKIEHVKKKRLFDLYISGSYEVSELDAMMADIDAQINYYEAQIEANEELKKNKQIQENLADLATVDFDSLEFREKQLYLKSLINKIYIDDEQVTIEWL

SEQ ID NO: 16526 - protein, 452 aa, synthetic construct
MKAAIYIRVSTQEQIENYSIQAQTEKLTALCRSKDWDVYDIFIDGGYSGSNMNRPALNEMLSKLHEIDAVVVYRLDRLSRSQRDTITLIEEYFLKNNVEFVSLSETLDTSSPFGRAMIGILSVFAQLERETIRDRMVMGKIKRIEAGLPLTTAKGRTFGYDVIDTKLYINEEEAKQLQMIYDIFEEEKSITSLQKRLKKLGFKVKSYSSYNNWLTNDLYCGYVSYADKVHTKGVHEPIISEEQFYRVQEIFSRMGKNPNMNRDSASLLNNLVVCGKCGLGYVHRRKDTVSRGKKYHYRYYSCKTYKHTHELEKCGNKIWRADKLEELIIDRVNNYSFASRNVDKEDELDNLNEKLKTEHTKKKRLFDLYISGSYEVSELDAMMADIDAQINYYEAQIEANEELKKNKKIQENLADLATVDFDSLEFREKQLYLKSLINKIYIDGEQVTIEWL

SEQ ID NO: 16527 - protein, 452 aa, synthetic construct
MKAAIYIRVSTQEQIENYSIQAQTEKLTALCRSKDWDVYDIFIDGGYSGSNMKRPALNEMLSKLHEIDAVVVYRLDRLSRSQRDTITLIEEYFLKNNVEFVSLSETLDTSSPFGRAMIGILSVFAQLERETIRDRMVMGKIKRIESGLPLTTAKGRTFGYDVVDTKLYINEEEAKQLQMIYDIFEEEKSITFLQKRLKKLGFKVKSYSSYNNWLTNDLYCGYVSYKDKVHTKGIHEPIISEEQFYRVQEIFSRMGKNPNMNKESASLLNNLVVCSKCGLSFVHRRKDTVSRGKKYHYRYYSCKTYKHTHELEKCGNKIWRADKLEELIIDRVNNYSFASRNVDKEDELDNLNEKLKTEHTKKKRLFDLYISASYEVSELDAMMADIDAQINYYEAQIEANEELKKNKKIQENLADLATVDFDSLEFREKQLYLKSLINKIYIDGEQVTIEWL

SEQ ID NO: 16528 - protein, 452 aa, synthetic construct
MKAAIYIRVSTQEQIENYSIQSQTEKLTALCRSKDWDVYDIFIDGGYSGSNMKRPALNEMLSKLHEIDAVVVYRLDRLSRSQRDTITLIEEYFLKNNVEFVSLSETLDTSSPFGRAMIGILSVFAQLERETIRDRMVMGKIKRIESGLPLTTAKGRTFGYDVVDTKLYINEEEAKQLQMIYDIFEEEKSITFLQKRLKKLGFKVKSYSSYNNWLTNDLYCGYVSYKDKVHTKGIHEPIISEEQFYRVQEIFSRMGKNPNMNKESASLLNNLVVCSKCGLSFVHRRKDTVSRGKKYHYRYYSCKTYKHTHELEKCGNKIWRADKLEELIIDRVNNYSFASRNVDKEDELDNLNEKLKTEHTKKKRLFDLYISGSYEVSELDAMMADIDAQINYYEAQIEANEELKKNKQIQENLADLATVDFDSLEFREKQLYLKSLINKIYIDGEQVTIEWL

SEQ ID NO: 16529 - protein, 452 aa, synthetic construct
MKAAIYIRVSTQEQIENYSIQAQTEKLTALCRSKDWDVYDIFIDGGYSGSNMNRPALNEMLSKLHEIDAVVVYRLDRLSRSQRDTITLIEEYFLKNNVEFVSLSETLDTSSPFGRAMIGILSVFAQLERETIRDRMVMGKIKRIEAGLPLTTAKGRTFGYDVIDTKLYINEEEAKQLQMIYDIFEEEKSITSLQKRLKKLGFKVKSYSSYNNWLTNDLYCGYVSYADKVHTKGVHEPIISEEQFYRVQEIFSRMGKNPNMNRDSASLLNNLVVCGKCGLGYVHRRKDTVSRGKKYHYRYYSCKTYKHTHELEKCGNKIWRADKLEELIIDRVNNYSFASRNVDKEDELDSLNEKLKTEHAKKKRLFDLYISGSYEVSELDAMMADIDAQINYYEAQIEANEELKKNKKIQENLADLATVDFDSLEFREKQLYLKSLINKIYIDVEQVTIEWL

SEQ ID NO: 16530 - protein, 481 aa, synthetic construct
MITTNKVAIYVRVSTTNQVEEGYSIDEQKDKLSSYCDIKDWNVYKVYTDGGFSGSNTDRPALESLIKDAKKRKFDTVLVYKLDRLSRSQKDTLHLIEDVFIKNGIEFLSLQENFDTSTPFGKAMIGLLSVFAQLEREQIKERMQLGKLGRAKSGKSMMWAKTSYGYDYHKETGTVTINPAQALTIKFIFESYLRGRSITKLRDDLNEKYPKHVPWSYRAVRTILDNPVYCGFNQYKGEIYPSNHEPIISKEEYDKTQSELKIRQRTAAENVNPRPFQAKYILSGIAQCGYCGAPLKIMLGVKRKDGSRLKKYECHQRHPRTLRGVTTYNDNKKCDSGFYYKDKLEAYVLKEISKLQDDADYLDKIFSGDNAETIDRESYKKQIEELSKKLSRLNDLYIDDRITLEELQSKSAEFISMRGTLETELENDPALRKNKRKADMRKLLNAEKVFSMDYENQKVLVRRLINKVKVTAEDIVINWKI

SEQ ID NO: 16531 - protein, 558 aa, synthetic construct
MTKLYSYIRFSSTRQADSSSFERQKRTAKEIAEKYGLELVTSYQDLGVSAFKGANSKTGALSRFMEEIGRSVPVGSWLVVENLDRLSRQSIIEAQELFLSIIRRGITIVTGMDGKVYSKESVNANPLDLLLSVMMFARANEESQTKRNRTNSSALLKIKAHQQNPQSPAVAIEEIGKNMWWTDTTSGRVLPHPVYFPVLQKIVQLRQEGHSAGAILDYLNEHHEPPAPTSNKKHGKWSRAMVSRLFATKALIGVKTVNVDGVEYELRDYYPRVLSDSEFYFLRKNIIKKAWDYSHDKEKVIPLLSGIGVLRCVHCGATMVKQTAANGKREQYRYCCDGRKSGRTDCPYPNWGFRAVTLEGAVLQLLADKIWIAEDKTNPIPEIQVKIDEISRKIDNLINLSAMMGATKELANQITDLNSQREALHEEIRLFEREMYSVDSQGWDKLAQFDLSDVQNEERLKVRMKIKGALHEIECSRIDSKKNLFVLVYLDGLRQRLVIENNRGLKKGQIFVDLKTINDRQILESAGMVLHPCIEMIIDADWKAPEEIPGLLSEEFGI

SEQ ID NO: 16532 - protein, 615 aa, synthetic construct
MTDYSKITALYSRLSVGDEDRDGGESNSIQNQKIFLENYARGQHLTNIRHYIDDDESGRFFDRSAYSRMMDDVENGKIGVCIMKDLTRWGRDYLQVGNAMEIFRRNNVRFIAVNNGIDSEKPDTLEFAPFINIMSEWYAKDISKKVKTGIKTKGMSGKPIVTEALYGYVKDPDNKDFWIIDEEAAEVVRLIFRLFIGGKNRNQIAVYLTQEQIPTPTFYMKDRGRGTCKNKTLNEDNRCKWNKATLTNILTRQEYCGDVVNFKTTKHFRDKHNHYVDRSQWHITENVHEPIISRSDFETVQRILENAPIRRPNGDGEIHPLSGLLFCKDCGAKMHIRIDYRNGGKRHVAFCSEYHKGKAKNPKCHSPHIMDADLLMQTIAEVLKKIEDCSISNRAEFEALVKKNLAMQQTDQTKKQQKRIPQITTRLEQIDKVLNKLYEDNALGAIPQDRYEQMSQKYSEEYYALKAELATLQEQLSAYENAGGRAQKFLKLTERHAAFTELTPAILNEFISRIEVHERDQKRARYAIQHISIYFNYIGKFENEVTQLAEPTEQEIRQMREEIEEAKKEKSRAYHRNYSREYRARNLEKQREYDRMKAREYRARRKAQAAAQPAQ

SEQ ID NO: 16533 - protein, 534 aa, synthetic construct
MELNDILKPGSRCAFYGRHSTDKQDMLLQIDRAAEFAKNYDVAIVKKYLDPGVSATKKPLSKRQNLNELIDDLSKDIFDFVIVYKMDRMARDIIEIEEIRSILFATGKPIVIIDKNPPTLDEEPGDIFGFIKSALAQFEVIQNRERTREKAAVGAKRGMFQGGKPPFGYTYDKKTKRFSQIPEEILLVKSIFDKYLQGLGCRKIAKELQGKSYRGKDWTRDKVERIIKNPKYAGYNLWGKRYNHIDNRGKEEVIVPLEGIEPIITKLEWDRCQEQMKFRSQNDIDPKYYSTNYLFRGIIYCFNCNSDLSISNQETEGGKFGHKLYICESCKSRLKSEFFDRVVQNKIRTSIIGHNYKISEILNKLQKSFNEEIQTLQENIKRAEEGKGQYLIKINEIDLKIRRFSTLQFNEVNRSLIESFTLYRIDLQSKCDLLDQQIDSFVKRIDRINEVLLQEQYWIPVLHSFEKPRDTVTNSEWRLLVTEIVESVLIEKKPKKISQYKVELKLKYDLPSTTFTYNEENETSRKQLSFADLI

SEQ ID NO: 16534 - protein, 486 aa, synthetic construct
MTESFMENARDIALYCRVSTDEQAREGVSLDEQQERLKAYCRAMGWGDVPLIFVDDGYSAKNLDRPQLNKLLDLVSKGKISRILVTKLDRLSRRLLDLLKLIDDFQQQQVSFISISESFDTNTPSGRLTLQVLGAVAEFERERIRERVFDNMLHAANQGKWLSQSPYGYDLKDKELVINEDESKIVKLIYENYLQKGMGYYSIAKELNEKGVPSKQKKEWSIRSVKILLTNPVYKGTLVWNRTDRSKKKQTEKNDDEWVVVDHTHPAIIDAETWESVQKRINKKNIHPRSKTSPHLLGGILKCGNCGAAMSISWHGPKTNRRRVYRCSANKNKGTCTSKSFDATDVESWFKEGLFNLSKELDQKYVFMLVSQVQEDEQKEVQQQTHSAKNRYKRKVEAYTAGLIELEDLQAEKGRLEKIMTNAENQKSTTTVNTTALEELLNNKIITIIEAIDNLPVVEAKSLIQTLVEKVILYGEKDIEISLLTP

SEQ ID NO: 16535 - protein, 673 aa, synthetic construct
MRLNDLAVVVSNVKPVVITYTRFSTSIQKEGLSEYRQDELTQRYVIDFCETHGVPLNDIISLKDRGVSAYRGKNMTQGSLSELINLFKGGELPKVYNEKGEINTFFFIESLDRLTRSDLHTANKLFLDLVEYCNIVVVAENEQKIYSLNSLKSDMGMLDLFSALLTLSRSHNESRMKEMRHRENWSKKRQEVIDYFDLTEDQRGGLNYPLNPTKTCPWWLKPKPDNRGFEFIEENRKAMKFFLERMLDGYGLTSSIRRLNDAITKGEFKVEFSKKQDTKKGFQTHTFYQVLTDDSNESLIGNLIFHKDYYPTEKDVQQGLYDRKKLGKKVRIPVYTAKGFYPALLTEIEFLMLRKMMGERKQSNTKPNKRVANIAQGILKCPKCGYSYVVNDDKRSGRHANLVCSYSRSGKCDAYTYRVEFFEHNLLSYCRNINIGRVLGYQVDDSAVMEELTRLRHDQYQINLLKSQVQVEIEQLVNNISNITIPSLLEKVQHDYSKKELRIQMYEDQMKAIESDILAINMRHKNSIDTNDSIYELIDVVSEKRDVEKREKLNIELKKIIKSMNLINKKDADNPFGRNLLKVDFFDGYSRFIPVDRKLENEELFDILPVIETETVKDSIDYTTTIILPIDYLEGLESKKYPPVEKMAQFYQENPAKYLKIKRQIEQSDQIFV

SEQ ID NO: 16536 - protein, 535 aa, synthetic construct
MRALTSEESGPNDLELRGTPPGLPPFAELLARHPDGIFVGAYSRISDDWRKNNSKKAHASAWSAGKGVANQHRRNDTSAGRHGLIIVHRYTDNDISASKTDLVRPDFRAMLRDLRAGRTTTGYRLDGIIAVDQDRIERSAADWESFVDALTKKSGRLFWTPSGSMDLEEEGELLKSGIQSLFNRVESKKKKRRIRDWHQDLILDGLPHSGPRPFGWEEDKMTLRPAEADFLAWAIRERIKGKALPTLCAEAKRRGLTGSRGGEIKPTTLAQMMTAPRVCGYRANRGVLAVDGNGAPIVGKWDTIVEPQEWEAVCATFGAGSTYLHRGPSAPRVTGKPKTVKYLASQLLRCLNPVESDGVQRLCNGSLNGSPTRSARSPYTYRCSACNKNAVSGPMVDRQLTRLLLAKLSQAQVTYRKPELVWPMESTLKDLADRLAGLEQRWMSGVVDDEQFYRLSPGLQAEVRKLRAERARWEMENAAGSEEPADIIRRWRSGEYDLAQRRKILFDVFLAVQVKPGQKGVKRPDPHRLKPVWRR

SEQ ID NO: 16537 - protein, 539 aa, synthetic construct
MGFFYGVFMSIAYSYRRFSSKGQEQGDSIRRQTELAEKYCIEHRLELSNQTYEDLGVSAWTGSNSHEDAGLGQFLKACELKKIPEDSVLLVESLDRLSREKIMKAMTQLMSITRHIDVVTLVDNRRYTSDMDFSDIIIAGATMVRANEESEIKSQRISAVWEAKRRDPKRSKKTRKCPFWLDVTDDSMDFVVNEKVEIVRKAYRLSAEGLGNMKVAKYLNSKGFRTARDKDWSPANVSVLLKARTVLGEYQPCKVINRKAVSQGDPVVDYYPQVIDTELFNKVQICISDRARNIRMGSTSSHRNLIRSNGRCMCGGELFITSKRQGVAYFQCQNKTNSECSHSLFRYDVFLQFIREQVIRPMYFRAWAIDDSSNEHESKRDALVVQRNIEQSKLDALLELDLSNPSITLKIGVLANQVEKFDSEILEVEQQIAKSKLGNFKFESLDTMLKLTDVAGEGDSTEKQISARVQLNRMLSNFKIELGSNERKSLVSIEYFDQHKQDYSKQLFQTKTTAPSRAIRKKKMIWELIDLTLNKQTFD

SEQ ID NO: 16538 - protein, 566 aa, synthetic construct
MTEKPQVNTGGQSTHSHTGMNTTDALRGVSALRLSVLTDETTSPERQREANQGAATALGIDLADREAVDLGVSASKTTPFERPELGSWLRRPDDFDALVFWRFDRAVRSMDDMHALSTWARDHRKMIVFAEGPGGRLVLDFRDALNPMAQLMVTLFAFAAQMEAQAIRERVTGAQAAMRIMPLRWRGSRPPYGYIPAPMEGGGWTLVQDPETVPVIERIIRELMGDPSKGVPGKSAAAIAAGLNDDGIPSPRDYWSLRKGRETGGKTGGKAGETVTRERFAWRHGAVKGILTSERILGWKMHEDKPVRDSEGAPVMATAEPILTREEFDAVGALFAERSVDNKSADRTDTVALLLRVIVCAGCGERMYLHRPSKGGKSISKTETYKCGSYTRGTTCESRATVKREWAEEYVESEFVRMLGALNVTEVRTIPGYDPGPELVATLAEFEEHQRQEGRQKSKAAREAWQRRADALDARLAELESREKVEPRTEVIQSNETYADIWEARDTAGKRRMLLEAGARLTVKRGTQGGWRTLDVRRVSFDLQTPFFNDAAADLTAMAAELEATA

SEQ ID NO: 16539 - protein, 560 aa, synthetic construct
MNQLRFYLYARKSTQGEDRQALSIQAQVRRAQEIFPDLNIVKVIEERQSAFEPGKRPKFSQVLADIDDGKIDGIVAWHPDRLSRNEEDAAKITYRTRKGVIKDLRFCSYNFDNSPEGIMMLQLALSQSQYFSSKLGKDVKRGMEQKLRMGWLPRMAPIGYLNNVVDHTVIEDPDRFALVRRMWDRLLSGLYTPPRILQMASEEWGLTTVRRKRMGGAPLTRGGIYRVFRDPFYAGLIRWDGEIYPGNHNAMVTLEEFKRAQAILGGGRNRTGKLVKHDFPYRGLIACGECEAQYTAEVQKGHVYYHCTRRKKVRCYQTKNIREESVQAEIDGVLARYGIHAEFRAWALKYLAEVTHVDARDAEQIQSARASRAQQLRDQLSRLLDLKLQGLIDDEDFTHKQKDMKAEISELENQIALAADLQRRLDTQTRRALDLATYGRDVLSNGSSHKKRIIASKIATAYVALDGRLDIKVSDWLVPLEGVAASPQAISSGSPDGPRSLTQVRTREAQHFGSSKRKTAVSAAVCSSWQSIVDNVRSRIEVNLDDMSLPEWDALGELVE

SEQ ID NO: 16540 - protein, 520 aa, synthetic construct
MQNALIYTRVSTDEQANKGFSLPHQKNVLKLYCQHKGINILRHYKEDFSAKNFNRPAFNELFSYVKANRKSIDFLLFTRWDRFSRNQEEAYRVIREFRNLGIEVNAIEQPLDLSQPDSKVMLAVYLVIPEVENDKNSIRTKEGLRRAMKEGCFVGIAPFGYKNVRNEEGKSTLAIKSDLAPIIRRAFTDYAKGVLSSEEIRKKYYHRGLKFTKQSMLNLLKNPVYCGKIAIKEWKKEDAVIVQGLHPSIIDDKTFNTVQRVFADKVKKPIHKFSEIDEYLPLRGFLQCAKCGRALTGSASRGRNGVRHFYYHCQPKCKERFRAEDANAIFENLLKEFVVKEDALILYKQILNETFLGEQKDRKLRLRQIKKEITNLRTRMESIENKFFDDLIDANTFNAMKGKTQLKINDLQAESESLNSIDKNIDKYLKLGISFLHGIDKLYKSSPANIKKKIVGSIFPEKLIFLKNKYRTAFLNELFALILSKHKPFRLLEIKTPRQNDGESKKAPFCGFTFDTYNHM

SEQ ID NO: 16541 - protein, 574 aa, synthetic construct
MIQTQQLRYFLYARKSSESEDRQMASIDDQLKEVNKIAVELDLQVVGVFSESKSAKEPGRKAFNEMLSEIEQGKADGILCWKLNRLARNPVDGGKISWMLQQHRIKHIQCYGRDYKPSDNVLMMQVEFGMANQFIKDLSTDIRRGVASKAERGWYPSSTLPIGYIHHKENRQKVHKTEIIPDKKKFHLVEKLWSLMLTGNYSIADIKRIGDELGFLGKNKHEYSKSSYHSLFSNEFYCGYFYWKDGNGIKKRYKGKHQVVVTEKEFDQIQSHIGNRKRQTRPKKYDFPYRGMISCGECGCSITAERKYQVRCTTCRFKFSCLNRGDCPKCGTEKDDMNNPTIIDITYYRCTKRKQKCSQKFISKKELEQQFLKAFEKIKIPKDFYLYMCEGLQRLDTQAKKKNKELITPLKKHITTLENRRKNLALMRADNEITNEEFVTFKEQCDVKIRNLQKQIRAISHLETNWLSIARDYAFIAENASDIFKKSDNLTKKSLLLKIGSNQQLIDKKLYFITTKPLLAILDCYSLFESQKERFEPKNHLDKQSDLMGLNTQNSVWWTQLNKVRTSLIHTINQ

SEQ ID NO: 16542 - protein, 523 aa, synthetic construct
MKTAVIYARVSTQRQADEGVSLDAQVEQCRGRAEQLGAEVLKVFRDEGVSGRSTKGRHGFQAAVDFCGQAGVHFFITWATSRVARNAVDLIMAQETLRDGGTRLECLNADVNDDTDAGFINRTFMAAMDELHSRNISRDTLRSQKRVAAEGFFTGGRVPYGYTVVDEGKRRRMVPDADAAATVRRAFDLCLQEGLGAQAIAHALNDAGLFRAGARWGKNSVQYLLNNRVYTGVKTYNRKHSRTGRAKPLDEWVSVDAHEPLISKEAFERAQTMIKDRTPHEGGGTPRSEFVFAGKLTCGICSSLLQITNGTSRSGALYSYYSCVAHKHGRPQCLFRPIRADLMDEWLTQTILERVLTPEVVSKALDDVAAMTETWLRDREAARGRLVRDLRAVEGKRDGLLDFVAEHGRATPADVIGKLNEARAQIDELQAELDRLERAKVPRRNRHIDPEVAIEVMHETIMAADAKKKRAFMGAFLDQITVSNSEVEVAYRADALLQTGPVKDVHSGLDWLPDLGSNQGPTD

SEQ ID NO: 16543 - protein, 522 aa, synthetic construct
MARPRKPKAQSSGRGHSAGGEKAVLYARVSTAEQEKEGFSIDAQVALIREYAERMGVVIVEQYVDVETAKKTGRTQFEAMLKYLRGHPGVRHLLVEKTDRLYRNIKDWVTLDGFDIELHLVKEGTVVSRDSRSSEKFMHGIKVLMAKNYVDNLSEEARKGMLEKAKQGIWPSQAPLGYLNVVGPQGKKIIVPDPNLAPIVMRVFEWFETGDYALKDVTHKARAAGLRYRRSQKPVGTSTIHYMLRNRLYAGAFEWGGRLYQGTHEPLVSQETWENVQEVLDGRSASNVRAKPLRFAFTGLITCGHCGCAVVAQMQRGRYIYYHCSGFKQKCPEKYVREETLAQAFSEQLARLHMDDEVFALIERAIRESHGDKNRERLEMVGRLRGEADRLQQRLDKLYVDHLDGRITADMHDRMAAAWREERAGCLRRMDVLNNAEDAYVDDGIALLNLGRKAHSTFNLQSQNGKNTALNLLVSNSTWANGQLSVTFREPFNMLEEMSLVDRGSEPPAGPGGSDYPEWLPE

SEQ ID NO: 16544 - protein, 533 aa, synthetic construct
MKIAIYSRKSKFTGKGDSVENQIQMCREYINIHFPSSESIVFEDEGFSGGNTDRPQFQKMMESIKKGHFDVLVCYRLDRISRSIVDFSSTMEVLEENDVAFVSIKEQFDTSTPMGRAMMYISSVFAQLERETIAERIKDNMMRLARTGRWLGGKAPTGFKGERESYFDDKMQKRSYTNLIPVENELELVEILFKKYLEFDSISKLHSWTLESNIKSKNGNDFDMAALKIILTNPVYVKSDDYLFEWFESREYDIANKKDEYRGNGIFLYNKYQNRRNKAHKIKDISEQVVVVGKHKGIIDSRKWARVQEALEKNSKKAPRTGTGEHGVIGPILYCSCGSRMRITLKYVGGEVKHYYYKCRRKEQSKGTRCNVKNANGTDADMIIENAIKAAGKRKGPLWKQLKEQEKKTGKSGNKVENQRENIESQIEKNKKSIENLTMQLSENQGSTASTYIIQQIETLDNQINELRKKLSSIEEEKDLSLLEEENKKLIMQYIDIFNNSYDDLDIFGKRRVVQAIFKRITWDGEHLDAQLR

SEQ ID NO: 16545 - protein, 676 aa, synthetic construct
MTDPRISPPAETSQGAHRAPFLSLGSETAANGTDAAKTAIIYLRVSTARQANKDGEAEGYSIPAQRAACIKKARDLGAAVIEEYVDAGASARSADRAGLQRMLVRLGDLSLPSVDFVIVHKLDRLARDRADDVAILLDIRKAGATLVSVSEQIDETPAGTLMHGIVASFAEFYSKNLSTEAKKGLEEKVRRGGTPGVAPIGYLNTTRRIDGTEVKSVIVDESRAPHIQWAFAQYATGEWSITALRDALEERGLKTRDTLKYRGQPLSRAQVHRMLTQPYYKGLIRFKGMLFDGKHEPLVDEVTWQSVQEILAGRRIAGDRSWRHSHYLKSGGNLRCARCGGKIGYGWSRGKGGKYDYFFCLGRHTGRTSCDLPYLPAAAVEHKITSIWSHIRFSAKTLADIETQAVADFEVLLGQQEKLATEQRTRLIQLERQKSKLIDAYMADALPVEDLKLRQTQVATEIADARRLIAEADIERTELRNRLQIVLALLRKARKTYDTASDKTRQLLNTAMFERFELDSRDAGPAANGWTPQEPLVERAKLTEVVDAVLNYHPDAVLSAGPLAGPTASSTEPLLTSADAAKPSGNSGVPRDTTCAPATTSFSGLGRFRRTKPGDAHTTTPGRQRDITATARRGRHERTPAELSFTGGSNKSHLAVAEGFEPPDGFSRLSLSRRVH

SEQ ID NO: 16546 - protein, 527 aa, synthetic construct
MNKPKAIPYIRFSSLVQGNGSSVARQQDYINKWLKSNPDVLLSNLQFKDLGKSGYTGKHLKNDLGKLLVAIESNHIKAGDFILIEAMDRLGRLPELEMISIIQQIISAGIKIVTLQDNTEYSTESIAANSGLLYVLVGKVQGAHQYSKSLSDRLSKAWEDKKRKAIEGQGVKRKTPWWVTWNDLTKRYDIVTEDNKYILKSIYNLYLNGFGERRILNRLREKYPDKFGTTDPASVKRWLKNKTAIGYWGDVPNVYPSAIPESLFYTVQAELKNRGAGKSQTPRSGRFLCGLVKCGCCGGNYAIRSNPHSKDAMLCSQSNKRKDKCNNKKTIPYQVLDWVRSQTYLDALARIATRSQKTDIDEKLIVIDGELESLKSQRDNLLELGSKVGFSDSLTNKYTTLEEQITKLEISRVGITQTIIEPEDIDSSMLPELEYDLFEDVEAFGQLLQKVGYKMVVKGRKIECEGTVFEYLKWSRTNDTYHILINGVDFVELSVMRDVTDEEIKDMQETETNSFLITEDNVCDFIL

SEQ ID NO: 16547 - protein, 512 aa, synthetic construct
MKRETLDEYKRTGRYVHTAMYLRKSREEQGMNTEETLRKHHALLDAYAEKVGLEIGPEDIFQEVVSGESLFSRPKMLSLLEAVSNGRYEAVLCIDMQRLGRGGMYDQGLILDTFKFSETLIITPERLYDLTKELDEQAAEMETFLSRGEYRLITKRLRRGLMQVIDNGAYTSNPPYGYERCYVNKLPTLKIIPEEAEIVRQIFQMYADGNGCTIIERAINALGAHGRRGSKFNRNTIRLILGNPVYIGKIRWDKTSTVKTGVGSSRQKKVVYNKSEQWRIIDGRHPPIISQELWDAVQKQRDKKYFYVGSNRVASPLAGLVRCSKCGRLMNMMGQGNGIPYLLCPTPGCCAGAKFEFVEQAVLRQLVDLSKDLEIRVSNQVVPDTSHLEQMLAKAKDQLPRIEERRNRLYSLLEDGTYSRAVFSDRMQVLTQEEENLNTAISSLENEIHVAQSRNEEKQLSQLESVLERYQSASIPGKKELLHSVISEILYTKEKKTKPADFHLDITLRDFF

SEQ ID NO: 16548 - protein, 539 aa, synthetic construct
MLKVQQNYKVGIYVRLSKDDERAGESVSIENQKLMLTKYCEEQGWNDYSVYCDDGVSGTTFDRPGVSKLIEDAKEGLINLILVKDLSRFGRNYIQVGQFTDYLFPMIGCRFIALNDGVDTLHNDNDIMPFRNLFNEFQSKDTSKKIKAVKQAHAKMGNYLGCYVPYGYKAHPDDKHKFVMDEYAAGVVRKMFAYRRQGFGFRKIARLLNEEHILPPRDYYYQEKGVESKGYRNHLWNDVTVKSMLRSEVYIGHMVQNKRGTLSYKNKKQVDKPKEDWIKVANTHEPIIDMDTWNACAEVDARNYKPRPTKDSEISLFGGLLKCMDCGFKMRYSQETHTYPKKGKVKYISYFCGSYARSGRSACSAHIIYLNPLSELVLDDIRHRAKRVLEDEDRVRRELLEQKAKQSDRQLKADKSTLKATEKRLAELEKLTQALYEDKVLGTVPEAVFKNLMVKYEAERVEKQMLVQSLKQKIADTAQDERDIEQYVANIKKYVAVEQLDRGMLLELIKYIEIGERKEKDGQKYRDIVIHYNLVDKAG

SEQ ID NO: 16549 - protein, 510 aa, synthetic construct
MALHENSRIAVYSRKSREDRDSEDTLAKHRNELEYLIKRENFKNVQWFEEVVSGETIDERPMFSMLLPRIENGEFDAVCAVAMDRLSRGSQIDSGRILEAFKQSGTLFITPKKTYDLSIEGDEMLSEFESIIARSEYRAIKRRTINGKKNATREGRLHSGSVPYGYKWDKNIKAAVVVEEKKKIYRMMIKWFLEEEHSCTVIAEMLNELKVPSPSGRSIWYGEVVSEILSNDFHRGYVWFGKYKKSKSSNSIVQNKNLDEVLIAKGHHETMKTDEEHALILNRIEKLRTYKVAGRRLNMNTHRLSGIVRCPYCHKAQAIEQPKGRRKHVRKCLRKSAERTRECEQTKGIHEEVLFQSIMKEIKKYNEALFSPTEQDVNDDSYTTQLIGLREKAVKKAKGRIERIKEMYLDGDISKTEYKEKLKISQETLQKAENDLAELIASTEFQNALSAETKKEKWSHHKVQEMIESTDGMSNSEINLILKMLISHVTYTVEDLGDGTKNLNIKVYYN

SEQ ID NO: 16550 - protein, 547 aa, synthetic construct
MVVRLSRETEATTSPERQLKDCEELCAERGYEVVGVAEDLNVSAAVKPQERPKLGAWLKTPERYDVIVFYRMDRLVRRLADLADLISWGQENHVKLVSANEKFLDLDTPFGDIIALLVAKVAEMELEAIRARTGSASRHTLVSGRWRGGVPPWGYLPEKDGKHWKLVQDPQQVAVIREIVDRVLAHEPLRAIAHDLTKRGVPTARDRVSEASGREMEGFEWHSSPLKRALTSPTLLGQIVMREAVLDADGQALRDAKGNRVLGKEEVVVDEAGVPVVRAEPILSRDVFDRVGKELAGRENRKEPTKRSSGLLLRVIYCGACGRPAYRLKGGPGRKPRYRCGSAQDTRQCDNRTIPLEDADREVTEKVLDTLGSMERMKRVWFTGNDVLAELDEVREMLADLAEQIGTPAFRRGTPGRERMDARIKALSIRQQELEAMPVEQAGWRYEGTGQTLGEWWAEQDDSARNLWLRQSGIRASWTSHTVNGRTVRDSWVIDMGKPDLDAEELPGMVARMAELKGIDAWGHVENLRGLPETLAAAYWQQGDSLD

SEQ ID NO: 16551 - protein, 580 aa, synthetic construct
MSVDIKWAIPQTGSQATTEGDLAAVYTRYSSHNQGEQSIEGQLAAAQRYAAEHGYTIVREYTDRAKSGRTDDREAFQQMLRDTAKKQFSVIILWKVDRFGRNREEIAINKMKCRKNGVRVEYVAEQIPDSPEGVILESVLEGFAEYYSLQLSQNIRRGLAKSAEKCKVTGGNRPLGYKTGPDKEFLIDEDNAPTVKLIFDMYAKGATVKEIVDHLNQKGLRTLTGKAFTKNSLHTVLKNEKYRGVYTYKDIRVEGGVPRIVDDDTWYKVQEMLKINKRAPAKTWTRADYILTDKLFCGKCGGVMFGECGTSRTGVRHNYYTCSNRKKHHTCDKKAVRQEDIEDLVIKATCNIFRDKELLDAIIENTWQYYLAQSDNQAELKGLTKQLNQTELAIKNLLRAIEAGILTEDTKARMDELTAQKAELKAAIADLQLARGFHLQKSHIAYYLTKLCDANYKDRDVQKRLIQTFVNAIFVFDDHLKITFNFSGDKNTVTLSTVQDAESGNVFGHRALCSTKIGKHLTMLADFILLFSVQRKFYVNSFSTLDKNPRSNSAVIVRNFCFFSTNYAFGACIQPLCEVK

SEQ ID NO: 16552 - protein, 507 aa, synthetic construct
MTPGRVYSDRAQTSSSLIGRDGIMQLMADARSGDFDVVVVEALDRISRDQEDLAGIFKRLSFGGIEIVAVHEGVADAMQIGIRGLLGSMFLADLKHKVRRGMAGVVADGRAAGGVSYGYDLVLGRPGERTINEEQAEVVRRIFRMYLGGMSPRDIAKQLNDEGILPPRGAKWNASTINGNKGRNYGILQNAMYEGKIIWNRVQMVRDPDTGKRVSRQNPESEWKTALVPELRIVPAALYDAVQKRKAVRSHDHENHRRANKPKRIFSGLLRCRYCGGGMASKGVYRGTVRMRCSRYSESGSCTNTKSYRLDRIEGGVIDGMLNLLRRPEATQEYIDRFFEKERSKINEAAKHAGQIERNLIKLTAEQDRLIKLYGDGTLPMDRVEARLKELQIERGQLAETLKEAQRKVPKVELHPSALRQFIRKLERIKQVIENEGNIFDRAASEAFRAAVSHIIVGDGEIEGDYEVDVVTYIAALTGQTDFIGYGHSLGGQMVAEEGFEPPTQGL

SEQ ID NO: 16553 - protein, 663 aa, synthetic construct
MPDALAPDPFTAMAAQLTPKRAVSYIRVSTREQAQRGGSEEGFSLPAQREANKRKAQSMGALVVKEFADRGESARSANRPELQKMLAYLKEDGGIDYVIVHKLDRLARNRADDVEINRAFEEAGVRLVSTSENIDQTPGGMLLHGIMSSIAEFYSRNLANEVIKGMGEKARNGGTLGKAPLGYVNVRARDENGREVRTVALDEERAPLVRLAFTEYATGRWTTKRLAAHLYDRGLTTVPTARKPAKAVTGAQLHRMLRHPYYKGVISFQGVEYAGAHEPLVDEETWSQVQAVLDSHRFGERERQHNHHLKTTVYCGLCGARLLVQNTRNSKGDLYPYFICARRQRTHDCAFRAVLIDVVEERMNALYQTIQLSSQDRQLVEQYVREEISRLERDKDRTIRSLTTRRTNIEDKRRRLMHAHYEGAVPLELLREEQTQLTSELDHIERQLAAYQADITEVRQRLTQALDLLEDCHRLYTAAPAHLKKLLNQVFFERVLVNPAVDEDGRVILPDNGTNDGRGRSVADAAAGDCPIGENEGPLQRAAAPRLLADASSDANLAADLRRPFDWLTSRRMRNVARHRSATLLQDNTREYRDAQVDCPVNGTFCNDEALTSGGERFASSSTNPDRVTHDLGLGKAIVVPPLGFEPRTLCLSDTIRGISSLL

SEQ ID NO: 16554 - protein, 692 aa, synthetic construct
MMGEQHAKIQARHLKRNAYLYVRQSTLRQVLENSESTKRQYDLRERALALGWRLDQVVVIDSDLGQSGASAVDREGFQRLVSEVGLGRAGIVMGLEVSRLARNSTDWHRLLEICALADTLILDEDGVYDPAHFNDRLLLGLKGTMSEAELHVLQARLRGGILNKARRGELEIRLPIGFDYDPAGRVRLDPDVRVQESLRQFFRTFRRTGSATATVKAFRAEGLSFPHRIYRGPQTGELLWTDLEHSRALWLLHHPRYTGAFCFGRTRVRKQPDGSHRHQRLPSEEWIALIRDAHAGYITWDEYEENLRILRDNAQAPATGRDRGTPREGPALLQGLALCAKCGDRMTVRYHVNGTRRVPDYVCQREGVEHAQPICQQIVGGELDAAIGRLLVEVVTPITLGVALAVQKELESRSEDSDRLRRQAVERARYESDLARRRYMRCDPDNRLVADSLEVEWNQALRNQTAAQEHYDKQRESETGLDDQQRAAILALAKDFPRLWNDPHTADRERKRMARLLIADVTLLKEADIRAQVRFSGGATHTLHLPLPKPAWMLRQTPGTVVAEIDRLLEDHTDSEIADWLNDQGLISGDGKPFHRPMVRRIRIDYALPSRHDRLRARGLLTLHEMAQRLNICPDSLKRWRRAGLLKAHKYDDRGGYLFEPPGPDTPVKHQHQGKTTGKSTTREGSFPAHTA

SEQ ID NO: 16555 - protein, 679 aa, synthetic construct
MNNMDKKILIYCRVSTQQQTTDRQKEELLKFAEDNHWNVAEEDIFIDVISGFKKGEFRPEYAKMLERVEYGDIDIILFSEFSRLARNATELLEQIKLFIDKGINLYFDKQKLWVKDTNKDVGSLILLHVLAVMSSYEIELFVERSLSGKITKVQAGHGGGDERAYGYMHNENKQIVINPIESKIVARIFEMYVGGYSSIQISEILNAEKVPAPYVRKLNEYKKNREAKGLEVKEYKFDTDNLKWRISTINRLMHNELYKGNRRITFYKPDPTNPLPLSERQDREIVYEYSEHVEGLRIVSDELFQQAQDKLSKAHYNKNNAVRHENLLKHLMVCGECGANFSVGKSNETSKNYISGGRTYKCYGRVNRKDKPRTCTNGAELRQWKLDGLVLQLSIQMFAEINIQQTNILKIENLGKEIEELVQIKSSKNTELVEAENLYKKTLKRLIAIEDDEVAKNLISDAKHKYDETKNMLNKTMDKLSREIITKRITIDNLKRLNANPLLINKMDEIRKDRNLVKTMVDEYIDKITIFRLHELWLLVVVSYKGGEEMWGTIKCARYKKEEMFYDELHCHYGVEFQGWLLNNTERCFSYDKSTHIITYNGESKIYVEFKSGEYDYDTFNQMIQKTGWMGCFPFYAYEDSGKDLSVPSNEDFGKSLQENRIDWKAHNEKVLERLLSKS

SEQ ID NO: 16556 - protein, 561 aa, synthetic construct
MDTSNLSGNVYLYQRFSSSKQEGNSSLFRQGEAQKEWLSRHPNCVVVHLDDHPLIDEGLSAYTGEHIEHGSLGRLVAAIESNVVERGSIILVEHFSRLTRMDIDKSEELIKKIWKNGVSIVTARGNNYYPPEAVNDSKLRISLIIEIEKAHEESLWRSKKVQGSWDRREELAKEHKIPPKMRMPFWLNSDGTLNEFAPVVRDLFELHASGDGQVVIERKLRAKYGDIKPLANVNPTKIIRILKNERCIGRVYGEKLYEPVIDEATFYSAQRIHDERLYTSVRENRIWPLHGMVKCGHCGSGMSIQQTKGSLPLLRCSRKQRSGGELCESSTTFPYVVAYHFFLIYVEPVIMAMMSDSKRLQGFELERVKINQEIKKLRTALADAKAQYKSRIEAGKSALATLSIMDDLQEDIDLLEDKMSEVNGNISAQKSLKSISNDIYQLSVDNPKDYNLELNKTGFKIGLKDKKLSFKDPDTGREIASLLYVEYNRKRMSYVYKFQGIVEFYNAELFRGEVRSKDWSVEKLLHPRRKSELQPNDIAAMMHNLKIHEQSGTFFSFKVNE

SEQ ID NO: 16557 - protein, 535 aa, synthetic construct
MIGIYLRVSTISQAEEGYSLETQEDLCMKRAKELGYSPKQVKVYREEGRSGEDIDRPQMNQLRDDTANGIIHKVIITDPDRLTRDLTDKLIVCKEWDRQGVEIIFIDTEYQNTPEGQMFFNMRSVFAQYELAQIRKRTIRGRLRAVEKDKKIMPMRTAPYGYDYRDGELVINEPEAIFVNKIYTWYLEGYTLREIGDKLFAAGAVPKRAESKNFGATSIRRILTSEIYIGNYVYNKRETKKVWGERTGSGKQKKTYTIRDESEWIRVDVPPIVDEKTFQLAQKQKEKNIKKRGNVKFNYLFKGMIRCKHCGRIWECTTYNGREDKKTGEKKKYGVYRCPNLNPKRYGDGITKCDCRSIRVELLDDYIMNLIQSSLSNPEMFREAIKARLTEKDDTLDEQVNELEKQLKKKTDERDRIKRMYVVAQVITEEEMLKDMKRINAEITGITDEINALKRKIEQQEINTISDEQIKLILDNINLMFEDNEMTFENRRELMELLIEEIQIDAKGEQVAITVKGPLNDIASYSQPQKVRKYR

SEQ ID NO: 16558 - protein, 679 aa, synthetic construct
MNNMDKKVLIYCRVSTQQQTTDRQKEELLKFAAENHWNVEEEDIFIDVISGFKKGEFRPEYVKMLERVEYGDIDIILFSEFSRLARNATELLEQIKLFIDKGINLYFDKQKLWVRDSNKDVGSIILLHVLAVMSSYEIELFVERSLSGKITKVQAGHGGGDERAYGYMHNENKQIVINPIESKIVARIFEMYVGGYSSIQISEILNAEKVPAPYVRKLNEYKKNREAKGLEVKEYKFDTDNLKWRISTINRLMHNELYKGNRRITFYKPDPTNPLPLSERQDREIVYEYSEHVESLRIVSDELFQQAQDKLSKAYYNKNNAVRHENLLKHLMVCGECGANFSVGKSNETSKNYISGGRTYKCYGRVNRKDKPRTCTNGAELRQWKLDGLVLQLSIQMFAEINIQQTNILKIENLGKEIEELVQIKSSKNTELVEAENLYKKTLKRLIAIEDDEVAKNLISDAKHKYDETKNVLNKTMDKLSREITTKRITIDNLKRLNANPLLINKMDEIRKNRDLVKTMVDEYIDKITIFRLHELWLLVVVSYKGGEEMWGTIKCARYKKEEMFYDELHCHYGVEFQGWLLNNTEHCFSYDKSTRIITYHGGSKIYVEFKSGEYDYDTFNQMIQATGWMGCFPFYAYEDSGKDLSVPSNEDFGKSLQENRTDWKAHNDKVLERLLSKS

SEQ ID NO: 16559 - protein, 472 aa, synthetic construct
MTPRPTALYLRVSTPGQVGEDKFGLEVQTRAAEHYAAAHSLPITQVYQDVITGTRATRKALDQLLDEASRYEVVLVSSVDRLARRTAIAYAVLEELLETGVEVHSADMGIIDPKDEMSSMNFGVRSVFAQAEHMRIAKRLRGGMLAKVRSGKPVVPLNGYGWKDGQIFEEEAQWVRQMYGWAREGWTAHAILTEMNRLGVPRRTASPWSDSTVKYILRNPVYKGLYSYGGARPSRGDGRDLVTCEVEAIVPPAEWEATQRSISSRKKGGRPFKSKSADEFPLKSRLRCGLCGSTMTAVKNVPQAKGLVPRQAHLAYYCYRVYKRAGMSLELCTHRRHYGAKKIHPFVLEQLHALLLDDQALLAALPSEPPKALDVRPAVAAIEKRLKNLKMLALDGVIPPDEYKETRAELEGQRQALEAPQTIAFVPPNLVAARQKLGEVLASGNLTEIARRLDLRVVVHPDGRLDLLLSAL

SEQ ID NO: 16560 - protein, 489 aa, synthetic construct
MTSPAPLAVGCTRVSTLQQDDNYGQATQAEEIRMEAQRRGWTLLDTVYEVESGAKEERATVARYYALAEQHPGLHFIFPRVDRIGRRAHLILGIVSELHKRGATVHTVGIPMSLRSKEGMLMLTMLSGVAEFDYSGITERLHRGKYAKAARNLWPHGSPPYGYRIVRDERGKSLTLEPHPDTAPVVRRIFERALAGEGSPHIAAELIRAGTPPPRPTKSSQGLWTVRHVLYVLANEAYTGRRPFTGPDGETAVVTFEPMVTPAEFARVRALVSGRRHHRPARTRFPALWAGHIRCAMCGGSLSVFRNHNDTKKGRTYYVSYRCRNTYQGSAMAVVKGMKTCTHRRIHNHLKIDEAGWALFVQAMSDPAALAQAAGGQQPSAPDHSARLGELRGQMADIVRRAVLHGLPDEVVTAALDPLRTELAALERDMVMPVPEPLPDMTALAAQVGAHLAGLHDLEARREALDTWQARLYLGMEGIERVEMTVQRG

SEQ ID NO: 16561 - protein, 497 aa, synthetic construct
MPNASLRAATYRRVSTEEQVSNHSLGNQADKLAAFAEQQGYAVVRDYVDPGHSGATRKRPGLEQLLHDARLGLFDTVLIYRLDRLARSTHLAYSVIQELMDVGVGVRSSSEPQIDSTTPMGKVSLGVTAIFAELERDTFMQRSQEGREKSLAAGIYNGGSVSYGYEIKDRRLVIQPQEAEVVRMIFQWYLEHRWATVRIAEELTALNIPTRFRGDGRLFRGKETLGCWRGGSIYRMLKSRTYIGEFQYGRRTASGKKDPDRVIKVAVPPIVDLEVWEAAQEMMVTNRVTALRNAKNIYMLKGLIRCAACGRSYLGAKTNGWAGYRCCGRVVPGAGPRHLACKNTHVPARMVEDPVWERITAILLDPGEVLGQQPLTLIPAELPLVEKALADARTSRERLTDLYLDANAGLSKEGYLSRLAGIDAQLAGLEARVLVLRDTQAQRRQQEQSEKRIYDLSAQYRDRLEHADDQLRQTLAHQLVKRITVQTDGSVDIEWVV

SEQ ID NO: 16562 - protein, 504 aa, synthetic construct
MKNNKKSKHRLKRAFGYARRSPRKQLEDTSIEKQTEEIIKYCERNGIELVDIYTDDLKSAKSFDGRDAFKEMYNRTISKKENIDYIIVLKQDRISRDTLDTLYIMKRLNSLDKHLISIADNINTEDPKAEILVHIMSLVAQLEREFIAFRTNSGMEKKAEDGYFLGGKVFGYKTKDKELIIDPDEAKIVKYIFEKYAFNKWGYKKIASKLNIQGVQTKYNNEWTINSVKTILQNQIYIGNTKWREEYKKGQHSPIIEMSLWNKVKEVMQSRTYTPKKVHPGSYPLSGLLKCPQCGSSMVQGNSSQKYKYYQCSKNKNSGKKACSSNLIKKEYAEEFVQDKLITFLNEKNLSPIIYDVTKSNLSYELEPLEKEANNIKGKIQKHEEKLLTTIDLMSDTTLNLGGDLLKEKIVTHQEDINREKSKLESISKQLELKQSEHIKDIINFSVSNFKDFYLALSDTEKKKLVHSIIKEVHVTKGNKTQDRKIKSIIYNFDLNDLNKLVSE

SEQ ID NO: 16563 - protein, 584 aa, synthetic construct
MNEIKKVAIYCRVSTEEQASEGYSIDAQLDTLRQYAKLYGWDVSDEYIDEGISGKSIKGRPAMQRLVSDIEKNKFQAVLVWKISRLSRNMLDTLVLLDKFEEYNVKFISYSENFDTGSPIGRLVLQLMASIAEMERNTLSENVKLGMKQRALQGEWNGGIVFGYDSIEKELIINQKESNVIQLIFDQYAKGKGLKAIANYVNKQGYRTKKDRYFSINGIATILDNPIYNGKISWLKVENWDTKRRKGKNPNPILVEGKHEAIISDELWNIVQTRRKSKSFKQRQSNEPFLLSSILRCPDCGQGMVPSITTYTRKDGTKRKHRYYVCSDFHNKGSSACRANSIKAYNAESTTIEKIQELINNKEEFALKINSLNNNSVNSTKEIQSELKNVDIRIIELKELQDKYFEAYEQNLFPVDILQERLKDVSEEKSTLEQRKNELSTKLSSIDTKVIQPDLLHVLLRKFTETYERSSRNKQKQLLQLLIESISIFQPKDKTRVVDTIELDFDFTEVNISKTFALIHLLYLETDEEGVILPQTTVSNDKLPPYLEQFLPLFMVRFPPNNPKPTINLLQQNQPHNLMWKRHL

SEQ ID NO: 16564 - protein, 538 aa, synthetic construct
MPTNGAKVYSYTRFSDPKQALGHSADRQLQYAKAWAAERGLMLDETLSLKDEGLSAFHQRHIKQGALGVFLLAVDEGRIPSGSVLIVEGLDRLSRAEPIQAQAQLAQIINAGITVVTASDGREYNREKLKAQPMDLVYSLLVMIRAHEESDTKSKRVKAAIRRQCEGWMAGTYRGLIRNGSDPNWVRWTGTEWELIPERVEAVMFALARYKEGLGADRTHQLMVENGYSLNCLGLNSQQLYRLVKLSGLKGAKRISVDGEDYELPEYYPRLMSDIEFDELQVLTKQRSRRRPKGAIPGVITGIGMTWCGYCGTAMTGANQMRRIKSDGKLLDGHRRLICVSNLNAMGCKAGSISVAPVERALMAYCSDQINLQRLQEPAHDGQDLRSHLTDRRKVVDDLERQLFRVTEALLASENDGATPMVFVRKARDLEEQLQLAKVQVRQAERELASSALRQSPADARIWADLAEGVNAQDVGVREKVRQLVMDTFERIVIYIRGIVPEGRKYIDVLLIAKSGQRRWMRIERRSGVWTAGSDRPR

SEQ ID NO: 16565 - protein, 571 aa, synthetic construct
MVVMNRNNPDSTRKLRVATFYRVSSNKQLTDHDIPSQRRSCEEFYKQKGWVFVKEYVESVSGFWVSANDRDKIQEAKRDADAGMYDVLLCFLFDRLGRKEDETPFVVEWFAKRVQVWSVMEGQQKFEQHTDHLMNYIRFWQAGGESKKTSIRVTENHIQMAEDGLYRGGGVGYGYKLINSGVFNKKGKELLRIVKDEDTNPIAYLMYDLVYSQGYGANRIAKYFNSPEVNITTATGGKWTASAINFILSNPLYKGMPAFGKKRKDDEGKMKTASKEDWVSPDEVVEHLVTVPGLMWDRVQEIRTSRNQENTNKPEIEKILITKSPLLFVGMIKCGYCGSPLTTTYNSKKYQLKDGTEQKWRRAKYRCSGKALGKVDCEGQTIYSQTKIEETTLEELFSYLDELKTVDVSEQLKVIGKTNTNDEEKKTKSMKKQFNELEKELGTLLKEVSKSITGKSAFKPELLNTLIEEKQIELEQIRKEIANTETIALQKKVERSEMESLVKLIPVWKDSFQNAGLEKKKMMLNSVIDTITVYRDSIDLKIKLNVHELVQMAIKNGSETNSLGRAHRWQR

SEQ ID NO: 16566 - protein, 543 aa, synthetic construct
MGKNGARVYSYLRFSDPRQATGSSADRQLAYASAWASKHGMELDATLTLRDEGLSAYHETHVKQGALGAFLRAVDEGRIPAGSVLIVEGLDRLSRAEPLLAQAQLGQIVNAGITVVTASDGREYNREGLKAEPMNLVYSLLVMIRAHEESDTKSKRVKAAVRRQCEGWVTGSYRGRIVSGKDPQWLAWDGDSWQFIPERVEAVRFALDAYRSGIGAARLVRLMHEKGMVLSDWGIAAQQVYRLVRLPALRGAKRISIDGEDFMLEDYYPRLLSDEEFSELETLVGQRYRRRGKDEIVGIVTGIGITRCGYCGTALVAQNLMQRVKSDGSLEDGHRRLHCVSYSKNGGCNGGSCSSVPIERAVLAYCSDQMNLQRLLEPTSAGEDLRPRLVEAQKGVAEIERQLERVTDALLADDSGAAPLAFVRKARELEEDLERRRSAVQALEQELVAKSASAPAAGASKWAELAERAKSMADVDAREQARQLVMDTFETLVVYMRGVIPNPKGRYIDVMMKSRAGQTRWIRVDRRTGVWKEGADRPTTRRP

SEQ ID NO: 16567 - protein, 599 aa, synthetic construct
MKKIIPYGYLRVSSLEQVRSGGGLEAQDEEVRRYITQKSDVFDIDKMVMMSDEGLSAYSGRNIKEGELGRFLADVDAGLIPAGSALVCYSVDRLSRQNPWVGSQLISTLIGAGIEIHSVAENQILRSDDPVGAIMSTIYLMRANNESVIKSERAKHGYTKRLNESIANNKVLTRQMPRWLYDNDGKYAIDPNMQKVIDFTFDSYIAGQSTGYIAKKLNDMGLKYGDTSWRGSYVAKLIRDERLIGKHIRYSKQIKGVKREIIETIPDFYPVTIDTDKFHIANNMLTSVAKNIRGRTRMTYGDISILRNLFNGVIKCGVCSGETSVVQNTRRKITNGVVTYVPYKTFLRCRNRYELKTCTQGDIRYEVIERAILNHLMGLDITTLLAAPVDNKIERYRTELELCKAEEEELQAIIKERENEGKRPRPQTLKSYEDVADRIDELTQLIESHVEDNFIPHFNVDLDSITDVSNVSERSLIKKGIATIADSICYKRISDFILVEIKYRNLNDKHVLVIDNKNSEMVVNFSIEYNEENKVYICNSFVMEYDNLSCEFTVSKTTMEDYAHMMNFVDYVSDDESYNAKEFLVKNFTHIKFIDKSNE
